United States Patent Application Publication US 2005/0196754 A1 - sequence listing, part 8

SEQ ID NO: 15295 - DNA, 2760 bp, Homo sapiens
  SIMILAR (1282)..(1566): 731254mologous to Mus musculus Pro-Pol-dUTPase polyprotein,accession number Y12713,Smith-Waterman Score=381.
ttagggcctgttctccagctggccatgcttgaccctccagctccaggcgaagctgccatcaggggccagtgtgcactgcaggtcgatgcccgagtctggcacctccatgtcgtagcgaacaggctgcccgtctttggtgaccaagctgaaggctgcagctgggatctggctgctgatgccagtggcgatgtctcccactttgacccggtggaactcccggatgtgcaggtgttcaccattaagagactgtatttggactttcacaccattgaaatagcttggggtgtcggtgggccgcccccgggccagcaccatgttccagctggagcttcgagcctcggcctggctgctccaggagtgtacgcctgagctcagggtgtcccgcgagctttgagaggcctttgatgggttcttctcactgtcatccgacagggagaggctgtcgatgctgaggcacgagagaatttgctcctgctcctccagagaaaatggctgggacaggctgttgaggaataattctatttccagctgctgcagttcctgctccgggacggttgctttccgctctggtgagctggggtttctggcaggggctggctccagggaggacagaggtaagggttcccacatcccagactcctccttgctcaaagtcaagggaggagacttgtttggctctgggggctcttgctgtagtgcccggttcaccttccctcccagctccgctgcagacacgcggtggatgggctctttcctcagcccctcttggatggcctgggctgtgagaggggcgcaggagggtgggatctccctcacaggcggaggctcgctggcaatcttgaggcagagcggccctcggaagaactgagtccaggggtggcagccgttgagcatgtgcagcatcatacagcagctgctccagacatccaccttggcgtcgcagctcctgcccagcaccacctccggagccatgtgggtctctgtgccagggatgtagtcccctgtgagcaaggactttcccaggccatcaggttgaagacacacagcatggccaaagtcacagagggctgcgtggctcccatcgctggacaggagcacgttgtcagctttgacgtccccatgcagaatccttcgtgagtggaggtattccagaccctccagggcctggcccaggtagtacagggcccggtcctctgggagacagccctgctccttgaccagctggcccagggagccaccttccagcagctccatgaagatgttgacccaaggcccttctctcacagctccatacaaagggacaattctgggtgaggtcaatcctgcacatgccatcagctcctctgcccgaaatacttccagccgcacctcagtgtgaatttcatgacgctccaaccatcttccacgttgggacttgcccctcaggccctggctgtattgagacaccgaggccacgtgtgtcctctcacactgcctctcacatacacacatgccaggggcagcagccaggccaggacacgtgacaggctgctcccttccagttccagccgacctcaggtggctagtgatagccaagttctgttcacaagtcagacccacggccaccctgcgactgtcctttttgacagcgcactggaagccagtctgcttgtcctccatcctgtgcacctctccgaaggagcctctgcccaggcggagctggtgcgtggcccagtggacttcttctcggtactcataatccactggcttgagtttctcagtgagcaggacaccctcgttgtcctcagttttggggctgggctcccgggatctggagccccttgctgcccaggtcttggccaggctggtcaggctgtgggcctggcctgagctcacgctgccttgcagagcatgcactaggtattcctccacagaaaacttctcatgggcaccacgagacaggcagctgggctccaggtgtgggccaggcaggggctttggactgtctacacaggccagtttgctcaggtgtgggtcaggcaagggtttctggctgtctacacaggccagtttgcccaggaaggactccagagggtgaggtttccagggctgcactgggatggtgcagctctcctgctcaggggtcctggggaggggtttggccaaggccactcctgcatgagccagggactttgagctcttcttcttccgtttcttccgggctttgctgcgacgctttcccttccaacacacacgggccattttgccctctgtagcatgggccacattgttggggatctgatcaagactctcggactggctgtactgtttggacccagcgatgaaaatgcgttctgaaaaggtggggctgaactcttggctattctcaccctgcagcagcctgccgccccaggactggcccagcaggctcaagagcacggtgctcattcctgggggtggggccacctctaggtggaagatggtgaaggccctgccccgtgcccacaacaaccctaggcccctacactcagcctgggcgatgatagagatggcagctggccctgcctcggagccttccttggctgtgcccttggtaatcacgtcattcaggatctcccactttccgcagaacacagggctcttctccacggcctcaagcttgtagacggagctctgtttcttccccagtggcggcgtcttctccttggctttggggagttccttctgctgccccactgctgagccaggggcacctgggcaggccatttccatcactgccat

SEQ ID NO: 15296 - DNA, 722 bp, Homo sapiens
  SIMILAR (157)..(468): 681254mologous to Mus musculus Pro-Pol-dUTPase polyprotein,accession number Y12713,Smith-Waterman Score=354.
aatattcctaacagcctgtcccagccattttctctggaggagcaggagcaaattttctcgtgcctcagcatcgacagcctctccctgtcggatgacagtgagaagaacccatcaaaggcctctcaaagctcgcgggacaccctgagctcaggcgtacactcctggagcagccaggccgaggctcgaagctccagctggaacatggtgctggcccgggggcggcccaccgacaccccaagctatttcaatggtgtgaaagtccaaatacagtctcttaatggtgaacacctgcacatccgggagttccaccgggtcaaagtgggagacatcgccactggcatcagcagccagatcccagctgcagccttcagcttggtgaccaaagacgggcagcctgttcgctacgacatggaggtgccagactcgggcatcgacctgcagtgcacactggcccctgatggcagcttcgcctggagctggagggtcaagcatggccagctggagaacaggccctaaccctgccctccaccgccggctccacacttgccggaagcagccttcctgcttcggtgcacgatgcttgcccttgaaacacaggctcagccgttcccaggggatcttgccagcccccggctcagcagtgggaccagggcctcgcagcaacaaggtgggggcaagcagaaaggctccccagaatttacaactgggcccttgccccccct

SEQ ID NO: 15297 - DNA, 1024 bp, Homo sapiens
  SIMILAR (248)..(616): 361254mologous to Homo sapiens HEXIM1 protein,accession number AB021179,Smith-Waterman Score=166.
  misc_feature (1)...(1024): n = a,t,c or g
aagcttggcacgatgctctccccttctggggtctcgggaaacacgcggaggacagtacaggacatgagtcctggtgagggacccgaggagcaggacagagaagacggcccctgaatgcccatttggccccttgctggctggaggtgtgaaaaccagcggtggaggcagccttcggggcctgcatttgagaataagggtgtcactagttccaggcgtctgctgaaagatttggaacagaagatgatggtcactccgaaccagaccgcctgtaatgcagagtcaccagtggccctggaggaggccaagacctctggtgtcccgggggaggccccaaacaacccctgagcgtcatgactctggtggttccctgcccctgacaccgcggatggagagccactcagaggatgaagatcttgctggggctgtcggtggcctgggctggaacagtaggagtccccggacccagagcccagggggctgctcagcggaggctgtgctggcccggaagaaacaccgtcggcggccatcgaagcgcaaaaggcactggcgaccctacctggagctgagctgggctgagaaacaacagcgggatgagaggcagagcnatttaaaggctggactagacgggttctgggtgccttgtgcctccttgttcttgacagcccccaaccctgacccctctctgcagggggttgggcctgagatcccagctgcagccttcagcttggtcaccaaagacgggcagcctgttcgctacgacatggaggtgcccatggatttccatgctgcggcaaagggtcagtggaggttgcagagatgcgacccagacccagacccagaactggagatcggacaggtgccggctttactggagtcagagctatacccagccctcaagcttgaagctgagctggacacggaagccaactcgaacgaggagtctgactttgaagaacccatgcagctgctcagtgccgccaggaaaagagaaagagaatccattattggtgaaaatccattttaa

SEQ ID NO: 15298 - DNA, 407 bp, Homo sapiens
  SIMILAR (261)..(359): 841254mologous to Homo sapiens copper transport protein HAH1,accession number U70660,Smith-Waterman Score=131.
gaagctcccggaattgtggtacagcagtcactaagacgccagtcgtcaaaagtggtgtgcgcctgaggtcactctggggacaactgacaatgacagtcctggagcagactaccaacaccatccgaggggacaagtacctccagtccactccctgctccaaaaaacctacagggaaaagggagaagccaataggcctgcccaaaaacttccaagaatctgagacaaagaaggctatggaatctggccaagcacgagttctcgtggacatgacctgtggaggctgtgctgaagctgtctctcgggtcctcataagcttggaggtgagagttaagtatgacattgacctgcccaacaagaagtctgcattgaatctgagcacagcatggacactctgcttgcaaccctga

SEQ ID NO: 15299 - DNA, 744 bp, Homo sapiens
  SIMILAR (282)..(4): 941254mologous to Homo sapiens src homology 3 domain- containing protein HIP-55,accession number AF197060,Smith-Waterman Score=456.
gcaccgcacatcgttcacgccctcgcctgtccagttgatgaggacaaatttgggcagtccagagttggggtccttcactctgcagaaggcgtacatcaccttcccgctgttgagctcctccaccatctcctccaggccaccctcccctgtgccagccacgcgtatgtcattgctgttgccttcataggtaaagagagcccagtcggtcggggacttctcggtgaccacccgcacgtaggcctcttgcagcgctggcccgccctccgaatccagagaggcgctgctgacaccgccgccacaccgccgccacaccgccgctgccttcagtcattgccgaagcacgaagttctctgtggacatgacctgtggaggctgtgctgaagctgtctctcgggtcctcaataagcttggaggagttaagtatgacattgacctgkcccaacaagaaggtctgcattgaatctgagcacagcatggacactctgcttgcaaccctgaagaaaacaggaaaagactgttttcctaccttkggccttgagtagcaggggcctggtccccacagcccacgaggatggaccaaaggggggmaggatgcttgatcctcccgttggcttccagacagacctgggacttggcagtcatgccgggtgaatggtgttcctgcggagaccctcaagtttgtcctattcctttcctagcttccctgcaataaaatcaagctgcttttgtttggaaaaaaaaaaa

SEQ ID NO: 15300 - DNA, 693 bp, Homo sapiens
  SIMILAR (132)..(572): 411254mologous to Mus musculus Pro-Pol-dUTPase polyprotein,accession number Y12713,Smith-Waterman Score=234.
atgagtgctcgccccagcagcacatataccaaaattggaatgatacgagaagatgagcacgacccctgtacaagaatgacccacatattcgtgaaccttccatacttaaaaatattttccaaaaagaggataaaggctggccctggtgtggcctcctcatcccctggtggtgcaatcagccgcatggctcaccctaaggctcattacctgggctccctggaggacaacagggaaataaaaagggcctgcaagtcaaagagtgtttccagggtagagcctttggccaccagtgatccggggctccccaaggggaaccgcccagccatcctcacctaccatgatgtgggcctcaacatggcgaacaagaagtctggagaccaccccgagcgcgaagggaccccgcggagtttccgagaagtcgttagcgccttcggccctggctcctcaaaactacaaatcccaaagggcagcgcgccccgatgcggcgtcccagggcgaggggcccgccgggagctgcagtctttccgggcaggaccccgcacccaaggctcacctgtgggaccgcgttgtcagtctcggcgcctgcgctccgcccaggaagaaagcgccaaggcgaggcatggcggtctccgtgcgcaccggagcttctcgtgggacatcaggatgtcgtccaaagaaagaaagttctcctag

SEQ ID NO: 15301 - DNA, 544 bp, Homo sapiens
  SIMILAR (411)..(259): 311254mologous to Hepatitis C virus core protein,accession number AF233711,Smith-Waterman Score=51.
ccctgggcggtaccgcccgaattgactgctcctgtctgatgcgtccccgggcgcgggaaacgagtttcaatccactttcctgaccccaaccatcctgcccagtctccgcttccccgtcttgtacacccctaactcctgaggctcctccgaatcacgcgagtggaagcggagaagctcaagtggccgccatgtcagaggcttatttccgagtggagtcgggtgcgctggggcctgaggagaactttctttctttggacgacatcctgatgtcccacgagaagctgccggtgcgcacggagaccgccatgcctcgccttgggcatcttcttcctggagcggagcgcaggcgccgagactgacaacgcggtcccacagacttttatcggacgttttcgccgcatcatggactcctcacagaatgcttacaacgaagacacttcagccctgggtagccaggctagacgagatggagaggggcttatttcaaacagggcagaaaaggactggatgagattttcagggtggggagatggggcaggcttct

SEQ ID NO: 15302 - DNA, 648 bp, Homo sapiens
  SIMILAR (405)..(647): 851254mologous to Homo sapiens protein A1-alpha (AA 1- 320),accession number X06747,Smith-Waterman Score=398.
atgagcctcaggaagcttacaatcatggtagaaggcaaagggggacccaacatacctcatgcctgtggatgccgccaaagaagcagcattaaagtctctcttctccctgctgttacatctaagtcagagtctcctaaagaacccgaacagctgaggaagctcttcattggagggttgagctttgaaacaactgatgagagcctaaggagccattttgagcaaaggagaacgctcacggactgtgcggtaatgagagatccaaacacaaagtgctccaagggctttgggttcgtcacatatgccactatggaggagaaataccacactgtgaatggccacagctgtgaagctaggaaagccctgtcaaagcaagaggtggctagtgcttcctctagccaaagaggcgaagtggttctggaaactttggtggtggtcatggaggtggtttcggtggaaatgacaactttggtcatggagaaaacttcaggggtcatagtagctttggtggcagccacggtggtagtggttatggtggcagtggggatgactatagtggatttggtaatgatggaagcaattttggaggtggtggaagctacaatgattttggcaattacagcaatcagtcttcaaattttggacccatga

SEQ ID NO: 15303 - DNA, 4347 bp, Homo sapiens
  SIMILAR (808)..(1179): 791254mologous to Mus musculus Pro-Pol-dUTPase polyprotein,accession number Y12713,Smith-Waterman Score=505.
atgactggaatctgctacacagaagatgaaagatcatataagaaaaatgctcaaccaacggcagcaagtaaaaagcaaaaagaaacacagaaattctgtctaagagtagacgggcaacaaaaagtgaagctctcggtgctccaggagaaaagcgcgcagctcacagtacaacttaagagccagaagttcctgggccaccccacagcgggccggggtcgcagcgagctctgcctggacctccccgatcccccagaggacccagtggcactggagacccggagtgtgggcacctgggttcgagaacgggacttgggcatgcctgatggggaggctgccctcgccgccaaggtcgctgtgctggagacccagctcaagaaggcgctgcaggagctgcaggcagctcaggcccggcaggctgacccccagccccaggcctggccaccgccggacagcccggtccgcgtggatacagtccgggtggtagaagggccacgggaggtggaggtggtggccagcacagccgctggcgcccccgcacagcgggcccagagcctggagccttacggcacagggctgagggccctggcaatgcctggtaggcctgagagcccacctgtgttccgcagccaggaggtggtggagacaatgtgcccagtgcccgctgcagctaccagcaacgtccatatggtgaagaagattagcatcacagagcgaagctgcgatggagcagcagaaatgaaatgggaggaccagaacattggagatcagtgccaaaatgccaagagaaatctaaggatggcattaacatcctctctgggctgtggatttctccaggttgtgctgagactccagaatttacagcaggtgatagtcagctatttcggccagtgcaagtttggatgcctgcaaggtcaatcatgcgagcatcaggaatatggagagaagccatatacacataagcaacgtgggaaagccatcagtcatcagcactccttccagacacatgaaaggccccccaccggaaagaaacccttctattgtaaagaatgtgcaaaaacctttagttctcttggaaacctccgaagacacatggcggcacaccatggagatggaccttataaatgtaagttgtgtgggaaagcctttgtttggcccagtttatttcatttgcacgaaagaacacacactggagagaaaccgtatgaatgtaagcagtgttctaaagcctttcctttttacagttcctatctaagacatgaaagaatccacacgggagagaaagcgtatgaatgtaagcagtgttccaaagcctttcctgattacagtacctatctaagacatgagagaactcacaccggagagaaaccctataaatgtacacaatgtgggaaagccttcagctgttactattacactcgactacatgaaaggactcacacgggagaacaaccctatgcatgtaagcaatgtgggaaaacgttttatcatcacacaagctttcgaagacacatgataaggcacactggagacggaccacataaatgtaagatatgtgggaaaggctttgattgtcctagttcagttcgaaatcatgaaactactcacactggagagaaaccctatgaatgtaagcagtgtgggaaagtgttatctcatagctcgagctttcgaagtcacatgataacacacacaggagatggaccccagaaatgcaagatatgtgggaaagcctttggttgtcccagtttatttcaaagacatgaaaggactcacactggagagaaaccctatcaatgtaaacaatgtggtaaagccttcagtcttgccggttcccttcgaagacatgaagcaactcacactggagtgaaaccctataaatgtcagtgtgggaaagcctttagtgatctctcttcctttcaaaatcatgagacaactcacactggagagaagccatatgagtgtaaggaatgtgggaaagcattcagttgtttcaaatacctttctcaacataaaaggacccacacagtacaaaaaccttatgagtgtaaaacatgtagaaaagccttcagtcatttcagtaacttaaaagtccatgaaaggattcactctggagagaagccatatgaatgtaaggaatgtggaaaagcattctcttggctcacttgccttctacgacatgaaagaattcacactggagagaaaccctatgaatgtctacaatgtggtaaagccttcactcgttcccgtttccttcgaggacatgaaaaaactcacactggagagaagctgtatgaatgtgtctgcaaggtggacaaacagaaccgtgctggctacagccctattatgctcaccgccctggccaccctgaagacccaggacgacatcgagactgtccttcagctcttccggcttggcaacatcaatgccaaagccagccagccatatgtggcccagggggacctgagtggattccaagacattggtggctacacaaaaaggaaactggacttttattccacgctgttggctggcagtccaggacctcagcatccaggaagtcacctttgtcctcagaccaacctggaaaaatctcgcttttctgcccgtggacaccgccgaagaagcatcgttaaagtctctcttcaccctgccgtcatgtctaagtcagagtctcctaaagagcccgaacagctgaggaagctcttcattggagggttgagctttgaaacaactgatgagagcctgaggagccattttgagcaatggggaacgctcacggactgtgtggtaatgagagatccaaacaccaagcgctccaggggctttgggtttgtcacgtatgccactgtggaggaggtggatgcagctatgaatgcaaggccacacaaggtggatggaagagttgtggaaccaaagagagctgtctccagagaagattctcaaagaccaggtgcccacttaactgtgaaaaagatatttgttggtggcattaaagaggacactgaagttcatcacctaagagattattttgaacagtatggaaaaattgaagtgattgaaatcatgactgaccgaggcagtggcaagaaaaggggctttgcctttgtaacctttgacgaccatgactccgtggataagactgtcattcagaaataccatactgtgaatggccacaactgtgaagttaagaaaagccctgtcaaagcaagaagatggctagtgcttcatctcagccaaagaggtcgaagtgggttctggaaactttggtggtggtcgtggaggtggtttcggtgggaatgacaacttcggtcgtggaggaaacttcagtggtcgtggtggctttggtggcagccgtggtggtggtggatatggtggcagtgggggatggctataatggatttggtaatgatggaagcaattttggaggtggtggaagctacaatgattttgggaattacaacaatcagtcttcaaattttggacccatgaaagggaggaaattttggaggcagaagctctggcccctatgggcggtggaggccaatacttttgctaaaccccgaaaaccaaggtggctatggcggttccagcagcagcaagtaactattggcagtggcaggaggttctaattacagccaggaaacaaagcttatcaggagaggagagccagagaagttgacagggaagctacaggttacaacagatttgtgaactcagccaagcacagtggtggcagggcctagcctgctacaaagaagacatgttttaaacaaaaacttatgtgtgttggggcaaaaaactccgaggactgtatttgtgactaattgtataccaggttaatttagtttcctgttcctgtggaaagtgttaagccattcccaccaaagggttttaatgtagattttttttttttgcaccccatgctgttgattgctaaatgtaacagtctgatcgtgacgctgaataaatgtcttttttttaatgtgctgtgtaaagttagtctactcttaagccatcttggtaaatttccccaacagtgtgaagttagaattccttcagggtgatgccaggttctatttggaatttatatacaacctgcttgggtggagaagccattgtcttcggaaaccttggtgtagttgaactgatagttactgttgtgacctgaagttcaccattaaaagggattacccaagcaaaatcatggaatggttataaaagtgattgttggcacatcctatgcaatatatctaaattgaataatggtaccagataaaattatagatgggaatgaagcttgtgtatccattatcatgtgtaatcaataaacgatttaattctcttgaa

SEQ ID NO: 15304 - DNA, 1515 bp, Homo sapiens
  SIMILAR (151)..(783): 791254mologous to Cloning vector pZC320 SopA,accession number U26464,Smith-Waterman Score=871.
atgggccaagtgttccgggtagtcaccggggttggagaacagcctgggcacccagatcagtttccatatattgactcctggctaagtataattcaaaaccaccctaagtggctgcaggcctgctttgagacctactgtaagactctaatggcccagataaaaccaggaaccatagaaagagattgcaaggcatcagtaaaagaaaaggattcacaggaaaagcagaaaaaacccgtcctacaggccccacctgaagagttagaaagtccagccctctatgcaccaatttatccatccctggcaaggcttagacaggaagctgccccagctgcccccagaggttcagattcagaagaaagcacccctcaggcaacaccatgcagagaggagccagagcccttgcctgaaaaggaaacctcaagctcttatagatctaatgcagtccatttcctaattcacaatcctacctgggctgattgcaaacaacttcttcagtcattatttaatacagaagagcaccatagagttatacaagctgccttccagtggctggagaacaatgcacctgcaggtacaggatatatcaggcagtatgcacaacaagcactcccaatagaggctgacacaggctgggaccctaaccaggctcaagggctacaaagcttgcagtggtatcgagaggcactcctaaatggaataaaggctggagggaagaaggccaccaatattggaaaagtctcagaggtctgccagaagccagatgaaagtcccagtgaattttatgagaggctgtgcgaggcttaccagctttacacaccatttgacccagaggctgcgggtaatcagtgtatggttaatgtggcatttgtaagccaggcacaaggagacataaagcgaaagcttcagaagttagaagcaaaggcagtgctaagaggaaagttcatagccctaaacacctacatcaaaaaggctgaaagagcacaaactgacattctaaggtcacacctcaaggaactaaagaaacaagaacaaaccaaatccaaagccagcagaagaaaggatgtaacaaagatcagggcagaactaaatgaaattgaaacaacaacaacaaaaatacaaaagataaatgaaacaaaaagctggttctttgaaaagataaatacaattaatagaccattagcaagattaaccaagaaaagtagagagaaacttcaaataacctcattaagaaaagaaatgggagatactacaacagacaccactgaaatacaaaagatcattcaaggctactatgaacacctttatgcacataaactagaaaacctagaagagatgaataaattcctggaaaaatacaatgctcctagcttaaatcaggaagaattacataccctgaacagaccaataagaaacagtgagattgaggtggtaattaaaaaattaccaacaaaaaaattccaggacaagatggattcagagcagaatcctaccagatattcaaagaagcattggtaa

SEQ ID NO: 15305 - DNA, 1304 bp, Homo sapiens
  SIMILAR (181)..(489): 641254mologous to Mus musculus hematopoietic zinc finger protein,accession number AF118566,Smith-Waterman Score=302.
atgcctgaagattccctgatgagatcacagagaacctcaaatagagagcaacctgagaaaccaagttgtcctgtgggaggcgtcctcagtagcagcaaagatcaggtgtcctgtgagtttccttctccagaaacaatccagggaacagtgcagactccagtgacagcagccagggtggtcagtcactcatcctctcctgtaggtggacctgaaggggaaaggcagggagccatctgtgactctgaaatgaggtcctgtaaacctctaactagagaatctggatgttcagagaacaagcagccctctgtcactgcctcgggcccccaaggcacaacttctgtgacacctcaaccaacccccctcactagcgaaccttcggcatgtcccccaggtccagagaaggtgccgctgccagcacagcgtcagatgtcaaggttcaaagaagccagtacgatgaccaaccaagctgaaagtgaaatcaaggaagttcccagcagggcttggcaagatgcggaggtgcaggcagtggcgagtgtcgagagcagatccgtctccaccagccccagtatcctcactgcatttctgaaggaaagccgtgctcctgagcattttgaacaagagcagctgcgtgtcatttgccacagcactgatcattctgggagcttggatcccactaataaaggagatgcaagggaaaagaagcctgcatctcctcaggtagtaaaagaaaaagagtctactggcactgatacctcggatgccaaaaccctactgctcaatcctaaatcccaagaaagtggaggcacagaatcagctgctaatcctacaccctccccaattaggaagaaccaggagagcaccttagaagaaaacagacagaccaagacagccaccagcctgagcctgccatctgatcccatgggtgactccagcccaggttctggcaagaagaccccatctcgctccgtcaaagccagcccacgcaggcccagccgcgtcagcgagttcctcaaggagcaaaagttaaatgtgacagcagctgctgctcagaagagacgtgtgtcccgagacacatgagtatcctccaaggcactggcctggatgagcagcatcgccttgagaattggggtagtgtggaaaggaagaatgaacaacggccctgggaagccttcccttcctgcagatattgttgggggagtgctggtctccattttgcgtttagaaaaccagacttagatgctggaggggcaccggttgtcttctttgaactcattccccgtaatgagctagaaaagagtacctaa

SEQ ID NO: 15306 - DNA, 459 bp, Homo sapiens
  SIMILAR (458)..(216): 411254mologous to Human T-cell lymphotropic virus type 1 Gag,accession number S74562,Smith-Waterman Score=182.
tcaaatgtagcaggtggtttgacgcccctcgtggtgttgttttacatatccatcgcggaagacaataatactattttgatagtccgattcatcccctccacctttccggaactctgaggccgggaggcagcaggcaatttccgtgtgatccccaattcctttgccgtcttctccacactttggcatctctgtgaagtctacctggagatcttctaagggggctgctccataagcttgtatgccgggtggaacggctggaccttgcctcgctttatgctgtcggcaggtaacacaccgctgcctcaccgttttggcaagggctgagaaacgcgagatgtagaaataccggcctaacaacttttccagtgactcctgacctcgataggtggtttcttgcacagccagtacaactgcagctcctagcagctgtggcgcagctactctccatccttcctccat

SEQ ID NO: 15307 - DNA, 245 bp, Homo sapiens; identical to SEQ ID NO: 5832
  SIMILAR (264)..(205): 901254mologous to Homo sapiens Human secreted protein, SEQ ID NO: 5576,accession number G01495,Smith-Waterman Score=108.

SEQ ID NO: 15308 - DNA, 429 bp, Homo sapiens
ctttgccgtcttctgtaccaaggcagccaaaaatgcaggcccgttgtctgagccgatccataagggcggtcgaaatctacgaatcagatctcgaagaaggacaggggttacttcacgagttttctcagttcgtgttggataggcctccacccacccagagtaggtacgcccaagaactagtacatacttgttacctccacactttggcatctctctgaagtctacctggagatcttcaaagggggctgctccataagcttgtatgccgggcggaacggctggaccttgcctcgcatcatgctgctgttggcagatctgagctttttttttggacaccttatacccacagtcctccaggtgccggtgtggggcatccgttcccgtggcacacccgactgccgtggggtgtcccagcagaaggtcatcaac

SEQ ID NO: 15309 - DNA, 895 bp, Homo sapiens
  SIMILAR (871)..(326): 301254mologous to porcine endogenous retrovirus viral polypeptide,accession number AJ133816,Smith-Waterman Score=172.
ctagatgggtggtttcatgaacagccagtacaactgcagctcctagcatctgtggcacagctactctcccatctggtaaccgaacccatccttcctttatcacctgtcctccctctgcctggagaaagtctttttcttctttagaataagtaggtacaagaccaggtgcttgagggaacaggggggctgtgattgaggcctggaagaggtcagatgctgctttttgagcctctaagtcagtgcaggaattccccaagcccaccaaggttgaagcttgctgatgtcctctctccaccatgtgaccatcctcatctatcccagtataccactgctctctcaggggcatttgtatcccagttttgggtcttaaacgagctgccaatgtaggggtttctctcgaggcttcacctcctctcttgtctactccgggtggcctagggatatgtttgtcttgtggaggcacaaggactgtgggctcaagagtggggagcatctttccctggtaaggggagggcaccactgggatcactggttccatctcctgcaagggatcttctgatgttgggtcaaacagaacttcaggagttgatttccctcggcgggtggagtaggatccttccttggcaatctgtccctttgctactagcactgctgctgcctgccctcttagccactgtggggggtctagcaccagctgtaaccaagtggctatgtatggaaactggtctgagtgtcctgacttaccagttaccttgtgccataccttagaaacaagggacctctccaggtttccttctgatggccaacccacttctaattttgaccaatctatttcaaaataagttctacatttccctggtgtcatagtaaccccatagtctccattaaatccctt

SEQ ID NO: 15310 - DNA, 708 bp, Homo sapiens
  SIMILAR (1)..(267): 771254mologous to Homo sapiens Human G-protein coupled receptor GRIR-1,accession number Y28279,Smith-Waterman Score=333.
tcagaggatccagaactgcagcccgtcctcgctgggttgtcccggtccatgtatctggtcatggtgctgaggaacctgctcatcatcctggctgtcagctctgactcccacctccacacccccatgtacttcttcctctccaacctgtgctgggctgacatcggtttcacctcggccatggttcccaagatgattgtggacatgcagtctcatagcagagtcatcttttatgcgggctgcctgacaccgatgtctttcttggtcctgagattctgatttcccggcacctgtgtgagtatgtggacttttctggcgtgcgccccaagggccggcgccggcccccgcagcgcgacgggtgaaggccaagcaaggttccttgtgtattgaacggaagccatctcggattgaggccagggcgcgaccccaagccgtcgtcacgatgttaattctaccatgagtgtcgggtgatacgcaccgagctagcggccccccgtagtctgagataattcttgtgtttgggatgatcgccttcactgtgtaggcagaagacaaaacaaccccctttaaggtcccgccttcaaaaagatggcattcctttgcttccactaaaggctctttaggtcttaaaaggcctctccttaacataggtccataaacccatttatacccataggttttgcctttatctctgaggattccaggacccat

SEQ ID NO: 15311 - DNA, 780 bp, Homo sapiens; identical to SEQ ID NO: 3575
  SIMILAR (514)..(777): 851254mologous to Cloning vector pEH1 lac repressor,accession number AJ007659,Smith-Waterman Score=355.

SEQ ID NO: 15312 - DNA, 930 bp, Homo sapiens
  SIMILAR (2394)..(2684): 501254mologous to Mus musculus Lsm4 protein,accession number AJ249439,Smith-Waterman Score=211.
atggggacacaaatgcccctgagagagcagcagtatactgggatagatgaggatggtcaagtgctggagaggcgtgtttttggctaccagtccttcacctgcgtcgatcttctcaactggaaaaacaatacaccgccctatagcgaaaagccacaagccctaattgatttgctccaagctgttatccagacccacgaccccacctgggctgattggcaccagttgctcatgttcctctttaacagcgaagaaaggcggagagtcctccaagcagtaactaagtggctagaggaacacgcaccagctgattatcaaaacctccaagagtatggaaggacccagttgccaggaaccgacccccagttggacccacatgaaagagaggagatgcaaaggctaaaccgagacagggaagctctcttggaaggattaatgaggggagctcaggaagccacaaacgttaacaagctctctgaggtcattcagggaaaagaagaaagtccagcacaattgtatgagagagaattgtgggaggcctatcgtatgtatactccctttgatcccgatagccctgaaaatcagcgcatgattcacatggctttagtcagtcaaagcgcagaagacatgagaagaaaactgcagaaacaggctgggcttgcagggatgaatccaccacaattactagaaatagctagccaggtgtttgtaaacagggatgcagttgatgaccttctgctggaacaccccacggcagtcaggtgtgccaagggaacagttgtcctacactggcacctggaggactgtgggtatcagttgtccaagaagaaagctcagatctgccgacagcagactgggtctctaaaggatggcccccctgttggagggccttggcagcaactgccctgccagtacaagaagcaaataagctga

SEQ ID NO: 15313 - DNA, 1461 bp, Homo sapiens
  SIMILAR (1449)..(1006): 431254mologous to Feline leukemia virus gag-pol precursor polyprotein gPr80,accession number AF052723,Smith-Waterman Score= 283.
tcatacagttttatgctgtttgtcaatttctgtggcggggatgaacttatcgtagttctcatagaccagggtttgcatgtcgctgtctagagcccggatctgctgcaccatgtccgtctcactgtccatcagctgggccagagggcactctctaggcagcttgtctaggtaaacttccgggttgaagtgtgccccgttcagatcagtggggtccagggggtcggtccccgcgaggagtctcaccgcctccccttccgagaggccgttgtaaagctttaacatcctgtgtgccttccgccgacgctccgtgagcctccccctcgggcccttctggggagtccccaggtccacaccccgggctaggcccagtgacagctgccgccgccatagctccaactgcagccgacgggggtaactttttatatttttacgttggatacatgaagatacttggcttttgctttcatcacatcgttgaggaaagaggtggttgcttatggtacccctgtttttactgcaacctctctctccttgggggttgaagaagctgctcccatacacgtatagttcccagtctactgatgcccaagcttggtcccggaggtcaggtctgctagagtcaactgaatccaacacttctacacaatcaggctcgacagggctctctgactccggatcttcccactgaaaggcaaacagcttctgcctctcaggggctaatctgataggaaagaaagcgtctttcaggttccagaaggtgaaccagctgtcttcagctggcggcaacaccaataatgtggacgggttaggtactgttggatgtaaagtcagtgtagcttgatggagcaagcgcaaatcctgtaccggccggtagtccttggtccgtggtgtatccttgtttacaaacacctggctagctatttctggtaattgtgatggattcatccctgcaagcccagcctgtttctgcagttttcttctcatgtcttctgcgctttgacggagataggcctcacacaatctctcgtagaattgtgctggactttcttcttctccctgaatgacctcagagagcttgttaacatttgtggccttctgagctcccctcattaatccttccaagagagcttccctgtctcggtttagcctttgcatctcctctctttcatgtgggtccaactgggggtcggttcctggcaactgggtccttccatactcttgggggttttgataatcagctggtgcatgttcctctagccacttagttgctgcttggaggactctccgcctttcttcgctgttaaagaggaacatgagcaactggcgccaatcagcccaggtggggttgtgggtctggataacagcttggagcaaatcagttagggcttgtggcttttcggtatagggcggtgtattgtttttccagttgagaaggtcgacgcaggtgaagtgtccccgcat

SEQ ID NO: 15314 - DNA, 1863 bp, Homo sapiens; identical to SEQ ID NO: 3586
  SIMILAR (16)..(1986): 961254mologous to Homo sapiens putative p150,accession number U93565,Smith-Waterman Score=3392.

SEQ ID NO: 15315 - DNA, 2118 bp, Homo sapiens
  SIMILAR (1777)..(3162): 911254mologous to Homo sapiens putative p150,accession number U93564,Smith-Waterman Score=2332.
tcagaggatccagaactgcagccggtcctcgctttgctctccctgtccctgtccatgtatctggtcacggtgctgaggaacctgctcagcatcctggctgtcagctctgactcccacctccacacccccatgtacttcttcctctccaacctgtgctgggctgacatcggttacacctcggccacggttcccaagatgattgtggacacgcagtcgcatggcagagtcatctctcatgctggctgcctgacacagatgtctttcttggtcctttttgcatgtatagaagacatgctcctgactgtgatggcctatgactgctttgtagccatctgttgccctctgcactacccagtcatcgtgaatcctcacctctgtgtcttcttcgttttggtgtcctttttccttagcctgttggattcccagtttattcctccggtcacagagggtgttcaccctgtgatatttttcatcatagctttgtgggatgttactcctaaagtcacacggggtgtacacagagtcacacagtgatatgagctgtaatattaggtgagacccataggtggagaaggctttatacttcccacctgatgatgaaaccctcagaatggaggaaacaattttatcgtaagagaaaagtgtccccgagatgggaagaaaaccaaatatggcatcagggaaatacaggattatgttattgttgaaggtgtcacaacatgcaagatgggggagttgagaagggtcacagaagaaattaggaatttccacatccttgaagcaggtcatttgtaaggcaatcaaattgtacagctgggcatctaaaagatcaggagtatgtctgtcttccatgcctccaaaaatggcaaagagagacatctgagtcaggcagcctgcataggagatgactctgctgtgagattggatgtccacagtcatcttggggactgtggtggaggtgaaactgatgtcaggcaaggacaggttggagaggaagaagtacatgggggtgtggaggtgggagtcagggctgatggccaggatgatgagcaggttccccagcgccatgaccaggcacgtggacaggaacagcccagtgaggaccggctgccgttctggatcctctgagctttgaacggcccttcccctctgctgggccatgaccacggagaacaggtccactgtcctccccacacaagaaaaaggatgcaagagatcatgagattcgactgttctgctgcgcagcctccgcagggcgctttgaatgtccctgtttctctggctgtagatgaaaaggttcagcatgggggtgaccacagcgtacatcactgacgccacgacaccattcctggggggtgctgccacagctgaagtcaggtacacgccaatgtctctggtggtcagaagggagtcgtttggtaggaagaacccagaaagtttggctttttgcaattgggggcttgtgggaggaggaaatttaatccttacaaactccatctctgcttgcagaggctcctttgctaagcctggggttatttgaggagggggtggtgtgcagtttatggctcttccaagttccttgttttgcctccgtggcacgctgatcttgacagctcccctgtacctgaacgtttgtgggaacattttagctgcattgctgcctttcatctgtgctctttccataagaagcctcacgtgggaaaagaagggtcgagtctcacctaaggtcattgtactggttattaagccattttctttccgtttcaaacctgcccttttgtactctgctttgtgatgccgaggtggggattctgccgagaggtgcccctggcggccaggctgctgctggccatggccctcatggatgagtggttctacctctgccctgaccacttcttcattgcctcttgatggtccatggcagatgccaggcactgtccctgtggccacttcaggataggacagagtcaaaaaccgctcacttgggctgccctgggaaatgaggtcagctagaccatagaagaggtcttgggacagaattccagggccctccaaccttgagaagaaatagagggccattttgggcagttctgtttggggactttctctagaatacat

SEQ ID NO: 15316 - DNA, 2691 bp, Homo sapiens
  SIMILAR (542)..(1987): 941254mologous to Homo sapiens putative p150,accession number U93564,Smith-Waterman Score=2460.
atgtccggccagtttgattttttattgtggactcccgaggaggacaactcggacgagagcgacgcggagggcgagcatggggacggcgcggaggaggaggcgccgcccccggtgcccaggcctggccccaagcccgctggactcggccgccggccctgcccctacgaacaggcgcaggggggcgacgggccggaggagcagtggatgagcttttgctgggacatcccacggaagtcgggtgcgccaagggaacggattaccctacgtcgacacctggaggactgtgggtgtaaggtgtccaagaagaaagctcagatctgccgacagcagaaagacccccaagaagaaagtccggcacaattctacgagagactgtgtgaggcctacggtatgtatactccctttgatcccgatagccctgaaaatcagcgcatgattcacatggctttagtccgtcaaagtgcagaagacatgagaagaaaactgcagaaacaggctgggcttgcagggatgaatccatcccaattactagaaagagctagccaggtgtttgtaaacagggatgcagtaagccataaggaaaacagcaaagagaatggagggagagaggatgatatgactcccaatatcgcagggggggtacacaaccctgtgatattgttcctaacatccggagagaaagaagatgatatgactctcaatatcacagggggtgtacacccctcctgtcctattgttctgaataccctttccggaactctgaggccgggaggcggcatgcagtttccgtgtgatccccaataccgttgccgtcttctgtagcaagtcagccacaaacgcaggcccgttatctgagccgatccggaagggcagttccaatctaggaatcagatctcgaagaagcacacgggttacttcacgagctttctcagctcttgttggataggtctccacccacccagagtaggtacgcccaagaactggtaaatacttattccctccacactctggcatctctgtgaagtctacctggagatcttcaaaggcggctgctccataagcttgtatgccgggcggaacggctggaccttgcctcgcatgatgctgtcggcagctgacacaacgctgcctcaccgttttggcaagggctgactccggatcttcccactgaaaggcaaacagcttctggctctcaggggctgatctgataggaaagaaagcgtctttcaggtccaagcaggtgaaccagctgtcctcagctggcagcaaccccaacaatgtggacgggctaggtactgttggatggaaagtcagggtagcttgactaagcaagcgcaaatcctgtcccggcctgtagtccttggtccatagctcttcccttgcttctttggggggaccgctctgattgctgcagctaaccaacaggtcggcgtttcgccgggcctgacgttcattctctttgcgcttttcctcgcggcttactgcgtccccgtttaccaacacctgcttagcacaggcctcacacagtctctggtggaattgtgctggactttcttcttttccctgaatgacctcagagaccttgttaacgtttgtggccttctgagctcccctcttgaatccttccaagagagcttccctgtctcggtttagcctttgcatatcctctctttcatgtgggtccaactggggctgggttcctggtaactgggtccttccatactcttgggggttttgataatcagctggtgcatgttcctctagccacttagttgctgcgtggagccctctccgcctttcgcctttcatctctcctgtgacacccatcctaatacccagcgggtagagtatgacatgactgccaacatagcgatcaatgtacagccacccggtgatattgctcctaatattcacggaagaagcgtacgatattaatcccaatatcgcagggagtgtacacctcttctgtgatattgttccgggtggctgtacattcattgctatgttgggagtcatgtcatactctaccccctggatattaggatcagtgtcacagggtgagtgtacatctactgcgatattaaaactaatatcatgccctccatccctggatattaggagcaatatcacaggtaggtgtacacgccccccagtatcgcagggggtgtacaccccttgtgtgacattgctcctaaagcgcagcgggggagaggaagatattacagccaatatcgcaggggatgtacacccccttgtgacattcttccttctatccctgactttccatccaacagtacctagcccgtccacattgttggggttgctgccagccgaggacagctggttcacctgcttggacctgagagacgctttctttcctatcagattagccccggagagccagaagctgtttgcctgtgctgggctgacatcggtttcaccttggccacggttcccaagatgattgtggacatgcagtcgcatagcagagtcatctctcatgcgggctgtctgacgcagatgtctttcttcatcctttttgcatgtatagaaggcatgctcctgactgtgatggcctatgactgctttgtagccatctgtcgccctctgcactacccagtcatcgtgaatcctcacctctgtgtcttcttcgttttggtgtcctttttccttagcctgttggattcccag

SEQ ID NO: 15317 - DNA, 2886 bp, Homo sapiens
  SIMILAR (1)..(3249): 981254mologous to Homo sapiens unknown,accession number AF148856,Smith-Waterman Score=5590.
atggcactgcatactaggaacaatatcacagaagaggtgtacactccctgcgatattgggagtaatatcatacgcttcttccgtggatattatactcggatcaatatcactggctgggtgtacacctactgcgatattgaacgtaatatcatgctctctccctccctggacattaggagcaatatcacagctcgtttacgacccaaaacggggatacaaatgcccctgagagagcagcggtatactgggatagatgaggatggtcacgtggtggagaggcgtgtttttgggtaccagcccttcacctgcgtcgaccttctcaactggaaaaccaatacaccgccctataccaaaaagccacaagccctaattgatttgctccaaactgttatccagacccacaaccacacctgggctgattggcacctgttgctcatgttcctctttaacagcgaagaaaggcggagagtcctgcaagcagcaactaagtggctagaggaacatgcaccagctgattagcaaaacccccaagagtatggaaggacccatttaccaggaaccgatccccagttggacccacatgaaacagaggatatgcaaaggctaaaccgagacagggaagctctcttggaaggattaatgaggggagctcagaaggccacaaacgttagcaagctctctgaggtcattcagggaaaagaagaaagtccagcacaattcgacgagagactgtgtgaggcctatcgtatgtatactccctttgatcccgatagccctgaaaatcagcgcatgattcacatggctttagtccgtcaaagcgcagaagacatgagaagaaaactgcagaaacaggctgggcttgcagggatgaatccatcacaattactagaaatagctagccagatgtttgtaaacagggatgcagtaagccctaaggaaaacggcaaagagaatggagatggggtttctaaaggatggcccccctgtttgagggccttggcagcaactgccctgctagtacaagaagcaaataagctgactcttgggcaaaacctgaacataaaggcctcccgtgctgtggtgactttaatgaatactaaaggacatcattggctaacggatgccagactcatcaagtaccaaactttgctctgtgagaatccccgtataaccattgaagtttgtaacaccctacaccccgcctccttgctcccggtatcagagagcactgtcgagcctgattgtgtagaagtgttggattcagttgactctagcagacctgacctccgggaccaagcttgggcatcaggagactggaaactatacgtgtatgggagcagcttcttcaacccccaaggaaagagagaggtgcaggcccttgccaaaacggtgaggcagcggtgtgttacctgccgacagcatgatgcgaggcaaggtccagccgttccacacggcatacgagcttatggagcagccccctttgaaggtctccaggtggacttcaaagagatgccaaagtgtggaggtaacaagtatgtactatttcttgggcgtacctactctgggtgggtggaggcctatccaacacgaactgagaaagctcgtgaagtaacccctgtgcttcttcgggatctgattcctaaatttcgaccgcccttatggatcggctcaaacaacgggcctgcatttttggctgccttggtacagaaaacggcaaagatattaggaaaaaatgtcactggggatgtgaacagccctgcgatattgagagtagtatcatcctctccccccttgtatattgggaacaacatcacagaggatccagaactgcagccagtcctcgctttgctgtccctgtccctgtccatgtatctggtcacggtgctgaggaacttgctgagcatcctggctgtccgctctgagtccccgctccacacaaccatgtacttcttcctctccatcctgtgctgggctgacatcggtttcacctcagccacagttcccaagatgattgtggacatgcagtggtatagcaaagtcatctctcatgcgggctgcctgacacagatgtctttcttggtcctttttgcatgtatagaaggcatgctcctgactgtgatggcctatgactgctttgtaggcatctgtcgccctctgcactacccagtcatcgtgaatcctcatctctgtgtcttctttgttttggtgtcctttttccttagcctgttggattcccagctgcacagttggattgtgttacaattcaccatcatcaagaatgtggaaatctctaattttgtctgtgacccctctcaacttctcaaacttgcctgttctgacagcgtcatcaatagcatcttcatatattttggtagtactatgtttggttttcttcccatttcagggatccttttgtcttactataaaatcgtcccctccattctaaggatttcatcgtcagatgggaagtataaagccttctccacctatggctctcacctagcatttgtttgcttattttatggaacaggcattggcgtgtacctgacttcagctgtggcaccacccctcaggaatggtatggtggcgtcagtgatgtacgctgtggtcacccccatgctgaaccctttcatctacagcctgagaaacagggacattcaaagtgccctgtggagggaagtcctcacttcattttggaattccctgaaaattgactttatggaagcaatgtacagcaggtcctccaacaccactgacgtctcacccacgatagcagggaatgggtccctctatactattccctcagaacaacaaaaagatgatgaaggtgatgatgaggataaagaggatgatgacagacaccaccgcatcatgaacacttactga

SEQ ID NO: 15318 - DNA, 5021 bp, Homo sapiens
  SIMILAR (1)..(1752): 921254mologous to Homo sapiens putative p150,accession number U93564,Smith-Waterman Score=2853.
  misc_feature (1)...(5021): n = a,t,c or g
atgggactctcagaggatccagaactgcagcccgtcctcgctgggctgtccctgtccatgtatctggtcacggtgctgaggaacctgctcagcatcctggctgtcagctctgactcccacctccacacccccatgtacttcttcctctccaacctgtgctgggctgacatcggtttcacctcggccacggttcccaagataattgtggacatgcagtcgcatagcagagtcatctcttatgtgggctgcctgacacggatgtcttttttggtcctttttgcatgtatagaagacatgcttctgactgtgatggcctatgactgctttgtagccatctgtcgccctctacactacccagtcatcgtgaatgctcacctccgtgtcttcttagttttggtgtcctttttccttagcctgttggattcccagctgcacaggatccttttgtcttactgtaaaattgttccctccattctaaggatttcaacatcagatgggaaatataaagccttctccacctgtggctctcacctggcacttgtttgcttattttatggagcaggcattggcgtgtacctgacttcagctgtgtcaccaccccccaggaatggtgtggtggtgtcagtgatgtacactgtggtcacccccatgctgaaccctttcatctacagcctgagaaacagggacattcaaagcaccctgcggaggctgctcagcagaacagtcgaatctcatgatctgttccatcctttttcttgtgtggggaagcgcaaatccaaccaagaatgtgataccacacatttggatggatgtgataaacaaacaagcattggtgaaactagagggaaggagtacaccctgtgtgacagtaggagtaacctcacccaaggatataaggaacaaatacagaggatgcacacgtgttgtgacattagcagtaacatccatttaggatattacgaatattaccacaatgtgaataccccctgtgatattaggagtaacatccccctacaatattgggaaccatatcacacggtgtacaccccctgtgacattagagggaggcccatgaaccgaggaagcaggtggccatctgtggcagctgtcacagcccagcataaagctaagcacttctacttattatatcattcaaaagctgcctcagcctgcaagggcagtaattccccaaagcaggctccagggcccaaggaaagccctcggcagggaaacattgagtgtcaggcacagggaatcaggccatcgggtcacctggacaccgtaaggctccaagagctgccccctctccaccaggaggaactgacttaccaaggtgacagtctagagactgcttgcccaattaaagccatgatccccaatctcacactccaactacgggaggacattcaaaccaaaggcaaagaagttgaaaactttgaaaaaaatttagaagaatgtataactagaataaccaatacggagaagtgcttaaaggagctgatggagctgaaaaccaaggctcgagaactacgtaaagaatgcagtagcctcaggagccgatgccatcaactggaagaaagggtatcagcaatggaagatgaaatgaatgaaatgaagtgggaagggaagtttagagaaaaaagaataaaaagaaataagcaaagcctccaagaaatatgggactatgtgaaaagaccaaatctacgtctcattggtgtacctgaaagtgacggggagaatggaactaagttggaaaacactctgcaggatatcgtccagaacttccccaatctagcaaggcagaccaatgttcagattcaggaaatacagagaacgccacaaagatactcctcgagaagagcaactccaagacacataattgtcagattcaccaaagttgaaatgaaggaaaaaatgttaagggcagccagagagaaagaaatacaaactaccatcagagaatactacaaacacctctacgcaaataaactagaaaatctagaggaaatggataaattccttgacacatacactctcccaagactaaaccaggaagaagttgaatctctgaatagaccaataacaggctctgaaattgtggcaataatcaatagcttaccaaccaaaaagagtccaggaccagatggattcacagccgaattctaccagaggtacaaggaggaactggtaccattccttctacaactattccaatcaatagaaaaagagggaatcctccctaactcattttatgaggccagcatcatcctgataccaaaggctggcagagacacaaccaaaaaagagaattttagaccaatatccttgatgaacgttgatgcaaaaatcctcaataaaatattggcaaaacgaatccagcagcacatcaaaaagcttatccaccatgatcaattggacctatggcggcggcagctgtcactgggcctagcccaggatgtggacctggggactccccagaagggcaggagcgggaggctcacggagcgtcggcggaaggcacacaggatgctaaagctttacaaaggcctctcggaaggggaggcgttgggactccctgcggggcccgaccccctggaccccactgatctgaacggggcgcacttcgacccggaagtttacctggacaagctgcctagagagtgccctctggcccagctgatcgacagtgagacggacatggtgcagcagatccgggctctagacagcgacatgcaaaccctgacctcccagtgccaagtgtataagtgtgtccagaattggtgggttcttggtctcactgacttcaagaatgaagccgcggaccctcctggagtgaagctgcagaccttctcagtgagtgttacagctcataaaggcagtgtggacccaaacagtgagcagcaacaagatttattgcaaagagcaaaagaacaaagcttccacagtgtggaaggggaccccactgcagcaatcagagctgtccccccaaagaagcaagggaaggggggccctggaaaagaaactcagcttggctgtcagagtttgcagcataaccagtgtgcttattgtaaagaaataggacagtggaagaacaaatgccctcagctcaaaagaaaacaaggtgactcagagcaggaggccccggacaaggaggaaagggccctgctcatcctggtagaagggttgatgagcttttgctgggacaccccacggcagtcgggtgtgccaagggaacggattgccctacgccgacacctggaggactgtgggtataaggtgtccaagaagaaagctcagatctgccgacagcagttgactctagcagacctgacatccgggaccaagcttgggcatcagtacactgggaactatacgtgcatgggagcagcttcatcaacacctaaggagagagaggtgcagggtatgcgtgataacctggacactgttgttgaagccagatcgatgccccagggcacttcagcccagaaagctgaactcattgctttcattcgggccttagaactcagtgaggcccttgccaaaacggtgaggcagcgatgtgtcagctgccgacagcatcatgcgaggcaaggtccagccgttccacccggcatacaagcttatggagcagccccctttgaagatctccaggtagacttcacagagatgccaaagtgtggagatattaggaaaattgtcactggggatgtgaacacccctgcgatattgggagtagtatcatcctctcccccctcgcatattgggaacaatatcacagggtgacgtacatttcccgcgatactgagggcagtattattgtcttccccgccctggtcacgatgctgaggaacctgttcatcatcctggctggcagctctgacccccacttccacacccccatgtacttcttcctctccaacctgtcctgggctgacattggtttcacctcggccacagttcccaagatgattgtggacatgcagtcgcatagcagagtcatctcttatgcgggctgcctgacacagatgtctttctttgtcctttttgcatgtatagaagacatgctcctgactctgatggcctatgaccgatttgtggccatctgtcgccctctgcattacccagtcatcgtgaatcctcacctctgtgtcttcttcgttttggtgtcctttttcctcagcctgttggattcccagctgcacagttggattgtgttacaattcaccttcttcaagaatgtggaaatctccaattttgtctgtgacccatctcaacttctcaaccttgcctgttctgacagtgtcatcaatagcatattcatatatttagatagtattatgtttggttttcttcccatttcagggatccttttgtcttacgctaacaatgtcccctccattctaagaatttcatcatcagataggaagtctaaagccttctccacctgtggctctcacctggcagttgtttgcttattttatggaacaggcattggcgtgtacctgacttcagctggtgtcaccaccccccaggaatggtgtgatggcgtcagtgatgtacgctgtggtcacccccatgctgaaccttttcatctacagcctgagaaacagggacatacaaagtgccctgcggaggctgctcagcagaacagtcgaatctcatgatctgttatctcaagatctgctccatcctttttcttgtgtgggtgagaaaggtcaaccacattaaatctctacatctgcaaatcctgcctgttagtcacattatttttgtgggcttgatgggcttttattcctttccgcatttcctttgtgaatattgctttcttcgttatgcctttaactgggaatggggtgaggattctggggatcccttgtttagcagaaacctcatgactgaatcctttatacctaggcggcctcaatagtttatgagcaataaccctgtcatccaggtggagtcccatccttcttttcatatcnnnnnggnttcccgacngttatcaggtctcattncccccg

SEQ ID NO: 15319 - DNA, 3195 bp, Homo sapiens
  SIMILAR (1198)..(2865): 891254mologous to Homo sapiens putative p150,accession number U93563,Smith-Waterman Score=2651.
atggaggaaggatggattcggttaccagatgggagactagctgtgccacagctgctaggagctgcagttgtactggctgtgcaagaaaccacccatcgagatcaggagtcactggaaaagttgttaggctggtatttctacatctcacttctgtcagcccttgccaaaacgatttcgaccgccttacggatcggctcagacaacgggcctgtgtttttggctgccttggtacagaagacagcaaaggtgtccaagacacagagagccacggaatctcacaggtgtctgagaattcctcctcctgggactctcagaggatccagaactgcagccggccctcgctttgctgtccctgtccctgtccatgtatctggtcacggagctgaggaaccttttcagcatcctggctgtcagctctgactgccccctccacacccccatgtacttcttcctctccaacctgtgctggcctgacatcggtttcacctcggccatggttcccaagatgattgtggacacgcagtcgcatagcagagtcatctctcatgcgggctgcctgacacagatgtctttcctgctccttgctgcatgtatagaaggcatgctcctgactgtgatggcctatgactgctttgtagccatctgtcgccctctgcactacccagtcatcgtgaatcctcacctctgtgtcttcttcgttttggtgccctttttccttaccctgttggattcccagctgcacagttggattgtgttacaattaacccttatcaagaatgtggaaatctctaatttggtctgcgacccctctcaacttttcaaacttgcctgttctgacaggggcattcactaaccatattcatatatttccataaggatccagaactgcagccggtcgtcgctgggctgttcctgtccatgtgcctggtcacggtgctggggaacctgctcatcatcctggccgtcagccctgactcccacctccccacccccatgtacttcttcctctccaacctgtccttgcctgacatcggtttcacctccaccacggtccccaagatgagcgtggacatccagtctcacagcagagtcatctcctatgcaggctgcctgactcaaatgtctctctttgccatttttggaggcatggaaaaaagacatgctcctgagatattaagatccaaatggcaggggggcgaggcgccccccgcgattcggggagtaataccacccgcctctccccccgcatatattaagatccaaatggcagggaggcgaggcgccccccgcgatgcggggaattatattcggatcaatatcaccggctgtgtgtacacctactgcgatattgaacgtagtatcatgctctctccctccctggagattaggagcaatatcacagctcgtttacgacccaaaacggggacacaaatgcccctgagagtgcagcgttatactgggatagacgaggatggtcacgtggtggagaggcgtgtttttggtgaagaaaggcggagagtcctccaagcaggaactaagtggctagaggaacatgcactagctgattatcaaaacccccaagaatatggaaggacccagttgccaggaaccgacccccagttggacccacatgaaagagaggagatgcaaaggctaaaccgagacagggaagctctcttggaaggattaatgaggggagctcagaaggccacaaacgttaacaagctctctgaggtcattcagggaaaagaagaaagtccagcacaattctacgagagactgtgtgaggcctatcgtatgtatactccctttgatcccgatagccctgaaaatcagcacatgattcacatggctttagtccgtcaaagcgcagaagacatgagaagaaaactgcagaaacaggctgggcttgcagggatgaatccatcacaattactagaaatagctagccaggtgttcataaacagggatgcagtaagccctaaggaaaatggcaaagagaatggaggatggcccccctgtttgagggccttggcagcaactgccctgctagtacaagaagcaaataagctgactcttgggcaaaacctgaacataaaggcctcccgtgctgtggtgactttaatgaatactaaaggacatcattggctaacggatgccagactcaccaagtaccaaactttgctctgtgaaaatccccgtataaccactgaagtttgtaacaccctacaccctgccaccttgctcccggtatcagagagccctgtcgagcctgattgtgtagaagtgttggactcagttgactctagcagacctgacctccgggaccaggcttgggcatcagtagactgggaactatacgtggatgggagcagcttcttcaacccccaaggagagagaggtgcagggtatgcagtggtaaccctggacactgttgttgaagccagatcgttgccccaggccacttcagcccagaaagctgaactcgttgctttcattcgggccttagaactcagtgaggttgagactgtcaacatttacactgattctcgaggacaccagcgagcttccaccttgctgggtttggggaattcccgcgctgactcagaggctcgaaaagcagcatctgcccccttctgggcatcagtgctccctcaagcacctgatcttggacctacttcttctaaagaagaaaaggaccttctccagatttcgaccgccttacggatcggctcagacaacgggcctgtgtttttggctgccttggtacagaagacagcaaagatattaggaaaaaatgtcactggggatgtgaacagccctgcgatattgagagtagtatcatcccctccccccttgcatattgggaaacaacatcacagcaaaaaggaatgtagtaggagtcagggtgataataaggagaaggtcagcaacgaacatgtgagcaatagaatctatgtcatcatgaagttcacgggaaggttctatgactggacgtgtacgaaccttctgtcatggaaccagagattggagaccgtgggaacacatccaaatccacatctccgtgacaaggtggtgctgatttccagtggtcctccctggtgggggaatcacgtagctctgactctggagcgtgttgttgtgtttctctttcagtacgagcttgtctgtggccctgcagttcctcccttatga

SEQ ID NO: 15320 - DNA, 1911 bp, Homo sapiens
  SIMILAR (1)..(1464): 961254mologous to Homo sapiens putative p150,accession number U93563,Smith-Waterman Score=2438.
atgcaagccatcagtgcattcggcgagggaagggtaaagagccacttttattgggaaaaagagatttacataagctgcttagaaacagagttcattggttcccgaggtcgaagccagagttgtcgtcagtgctttggtggagacgccagtgctgggcgaatgttcttccgagagcgccttatctgcgttgctgcagtcctgcagaatgtcgagtggatcatgggaacaatatccctgggggattatattctgatcaatatcaccggctgggtgtacacctactgcgatattgaacgtaatatcatgctctctccctccctggacattagaagcaataacacagctcgtttacgacccaaaacggggacacaaatgcccctgagagagcagcggtatactgggatagataaggatggtcacttggtggagaggcgtgcttttggctaccagcccatcacctgcgtcaaccttctcaactggaaaaacaatacacagaactataccgaaaagccacaagccctaattgattttctccaagctgttatccagacccacaaccccaccttggctgattggcaccagttgctcatgttcctctttaacagcgaagaaaggcggagagtcctccaagcagtaactaagtggctagaagaacatgcaccagctgattatcaaaacccccaagagtatggaaggacccaggaatcagtagactgggaactatacgtggatgggagtagcttcttcaacccccaaggagagagaggtgcagggtatgcagtgataaccctggacactgttgatgaagacagatcattgccccaggccacgtcagcccagaaagctgaactcattgctttcattcgggccttagaactcagtgagggtgagactgtcaacatttacactgattctcggggacaccagcaagcttccaccttggtgggcttggggaattcccgcgctgactcagaggctcgaaaagcagcatctgcccccttcggggcatcagtgctccctcaagcacctgatcttggacctacttcttctaaagaagaaaaggactttctccagcctcagaaggtccaggcgagaagctggcttctggctgcatctgccccagtgtcctctgaggcattcggatggggcgatgactataaaaaccacgtgaaatgcataagtgaagatcagaagtatggtggcaaaggctatgaaggtaaaacccacaaaggcgacatcaaacagcaggcgtggattcagaattggatgaagaacagtttaaaagttcataatgaatccattctggaccaggtgtggaatatcttttctgaagcttccaacagcccacttagttgctgcttggaggactctccgcctttcttcgctgttaaagaggaacacgagcaactggtgccaatcagccaaggcaaaaggtgtccaaactctacagacccacagaatctaacaacagatgtctcaatattcctcgtcctagaactctcagaggatccagaacggccagctggtccttgctggactgttcctgtccatagtgactggtcatggtgatggggaacctgctcatcatctctggccgtcagccctgactcccacctccacacccacatgtacttcttcctcatccaacctgtccttgcctgacatcggtttcacctccaccacggtccccaagatgattgtggacatccagtctcacagcagagtcatctcctatgcaggctgcctgactcagatgtctctctttgccatttttggaggcatggaagagagacatgctcctgagtgtgatggcctatgactggtttgtagccatctgtcacccgctatatcattcaccatcatgaacccgtgtttctgtgcctttctagttttgttgggtttcatcagagg

SEQ ID NO: 15321 - DNA, 1089 bp, Homo sapiens
  SIMILAR (2)..(418): 671254mologous to Homo sapiens ribosomal protein S8,accession number X67247,Smith-Waterman Score=452.
ctcaacttcagtgtacatacctaaaaaatgaacaacctgatcccatcatgtggactccggagggacaatcagctgtacaacaaataaaggaaattctgactaatgccccagccttagggcacccgaactacaaattgcctttctcccttttcatacacgaagttggaggtactgcatccggagtactgacccagaaacatggtgatcatcagagacctataggctattatagccaacagctggaccctgtggctcaagggctgcctccctatgtgagagcaatagcagccacggcccttccgtataagtctgttgaagaaataattataggttccccccttaacatttttgtgccacattctcttaaaaccccctcatgactgtgttttgatgactgacttctcacccccaggacagacctacaagagatgccactggataatgctgagatagaatggtatacagatggatcttatttaagaggagaggtattccaatggtatgatcacttagctttaatctttgtaccacagacaggtattgaagatgttatatggcatatagaggccttacccaattacatccaaaaagtctgtgaacgcaggaacccttataaccaaatcctttctctccagtgtgcacagcatgaaatttttctggtgtcttggaaacttgtctgcaaacagcttgaaggggatgatgacatgttagtaggcactactgcttctaatctcctattagagtctgaacagagcaccagcaatctgaatgagaaaattaaccatttagaatatgaagaccaatataaagataataattttggagaaggaaatgatggtggaatattagaagacaaacttattagtaataaatgggtgggcctgatagtcctgattcagtgaatcctgttgaaccagccaactatgactgatcaaacaacacttgttccaaatgaggaagaagcatttgcattggaacctattgatataactgttaaagaaacaaacgccaagaggaagaggaagctaattgttgacagtgtcaaaaacttggatagcaagacaattagagcccagcttaatgattatt

SEQ ID NO: 15322 - DNA, 809 bp, Homo sapiens
  SIMILAR (3)..(809): 961254mologous to Homo sapiens HR21spA,accession number X98294,Smith-Waterman Score=1351.
cttttaaggatgacgacatgttagtaagcactactacttctaacctcctattagagtctgaacagagcaccagcaatctgaatgagaaaattaaccatttagaatatgaagatcaatataaggttgataattttggagaaggaaatgatggtggaatattagatgacaaacttattagtaataatgatggcggtatctttgatgatccccctgccctctctgaggcaggggtgatgttgccagagcagcctgcacatgacgatatggatgaggatgataatgtatcaatgggtgggcctgatagtcctgattcagtggatcccgttgaaccaatgccaaccatgactgatcaaacaacacttgttccaaatgaggaagaagcatttgcattggagcctattgatataactgttaaagaaacaaaagccaagaggaagaggaagctaattgttgacagtgtcaaagagttggatagcaagacaattagagcccaccttagtgattattcagatattggtactactttggatctggcaccgcccaccaagaaattgatgatgtggaaagagacaggaggagtacaaaaactgttttctttacctgctcagcctttgtggaataacagactactgaagctctttacacgctgtcttacaccgcttgtaccacaagaccttataaaaaggaggaaaggaggagaggcagataatttggatgagttcctcaaagaatttgaacatccagaggttcctagagaggaccagcaacagtagcatcagcagcgtgatgttatcgatgagcccattatt

SEQ ID NO: 15323 - DNA, 596 bp, Homo sapiens
  SIMILAR (351)..(548): 951254mologous to Homo sapiens HRP-3,accession number AB029156,Smith-Waterman Score=320.
atggtgaacagaagccacttcagaggggtcggtgagccttgccaccagcagaacagccatgggcatctgaactcaataacagaaacatccaacagcccaacactgagagctgctcccttacagcccacaagggacccaagtgacatggcagtgtttgagattgatgaactcccagagggcgctgtgaagcctccagcaaacaagtatcctatcttcttttttggcacccatgaaactgcatttctaggtcccaaagacctttttccatataaggagtacaaagacaagtttggcaagctcaaacaaacggaaaggatttaacgaaggattgtgggaaatagaaaataacgccaggagtaaagtttactggctaccaggcaattcagcaacagagctcttcagaaactgagggagaaggtggaaatactgcagatgcaagcagtgaggaagaaggtgatagagtagaagaagatggaaaaggcaaaagaaagaatgaaaaagcaggctcaaaacggaaaaagtcatatacttcaaaggttactaagaaacttctcattgttattaatgttatatgcatatccattaaacatttttag

SEQ ID NO: 15324 - DNA, 870 bp, Homo sapiens
  SIMILAR (1)..(1602): 961254mologous to Homo sapiens putative p150,accession number U93564,Smith-Waterman Score=2697.
cggccgctccgacgaggggaatcggcgaggcggcggctgaggcaaggggtgggcggggggcgcatcaggcccggcaaatcacggcccggcagcgggggggcggtctcccggcatgcttcgcggcgaccaaggactaccaggaaggggagcggctgggatggcgcgtccgcggtcccgcgagatacaaagcgggcgacctggtcttcggccaagatgaagggctacccgcactggccggcccggattgatgaactcccagaggcgtctgtgaagcctccaacaaacaaagtatcctatcttctttttttggcaccccatgaaaccggcatttctaggtccccaatgacctttttccatattaggagtacagaggcaagtttgggaaagtcaaacaaccgaaaaggatttaacgaaggattgtggggaaatagaaaataacccagggagtaaaggtttactggctaccaggcaaattcagcaacagagctccttcagaactgagggagaaggtggaaatactgcagatgcaagcagtgaggaagaaggtgatagagtagaaagagatgggaaagggcaaaagaaagaatgaaaaagcaggctcaaaacggaaaaagtcatatacttcaaagaaatcctctaaacagtccccggaaatctccaggagatgaagattgacaaagactgcaaagaagaggaaaacaaaagcagctctgagggtggagatgccgggcaacgacacaagaaacacaacttcagacttgcagaaaaccagtgaagggacctaactaccataatgaatgctgcatattaagagaaaccacaagaaggttatatgtttggttgtctaatattcttggatttgatatgaac

SEQ ID NO: 15325 - DNA, 1275 bp, Homo sapiens
  SIMILAR (268)..(441): 981254mologous to Homo sapiens ribosomal protein S8,accession number X67247,Smith-Waterman Score=298.
atgtggagtggggcaggccctggactggctgtgtggcctcaacttgtcactgttctttctctgagcctcagtagactcaactgcaagtggggcttgtcattcttggcctgcttgcttcttggagatatggcggatgccgccatgcagcactacggggtgaacggctactcactgcacgccatgaactcactcagcgccatgtacaacctgcaccagcaggcagcccagcaggcccagcatgcccccgactaccggccttcagtgcatgcgcttacattggctgagcgcctggctgacatcatcttggaggcccgttatggttcccagcaccgcaaacaacgtcgcagccgcacagcgttcacggctcagcagctcgaggccctggaaaagaccttccagaagactcactacccagatgtggtgatgcgtgagaggctggccatgtgcaccaacctgcctgaggcccgggtgcaggtgtggttcaagaaccgccgggccaagttccggaagaagcagcgtagcctgcagaaggaacagctccagaagcagaaggaggctgagggctcccatggggaaggcaaggccgaggcccccactccagatacccagctggacactgagcagcccccacgtctgcctggcagcgacccccctgctgagcttcacctgagtctgtctgagcagtcagccagtgagtcagcccccgaggatcagccggaccgtgaggaggaccccagggcaggggctgaggaccccaaagctgagaagagccctggggctgacagcaaggggctgggctgcaagaggggcagccccaaggcagattccccaggcagcctgaccatcactcctgtggccccagggggtggcctcctgggcccctcccactcctattcctcgtccccgctgagcctcttccgtctgcaggagcaattccgccagcacatggcggccaccaacaacctggtgcactactcgtccttcgaagtagggggtccggcccctgctgctgcagcggcggctgctgctgtgccctacctgggcgtcaacatggccccgctgggctcactgcactgccagtcctactaccagtccctgtcagcagccgctgctgcccaccagggtgtgtgggggtctcctctgctgcctgcacccccagcaggcctggctcctgcatcagctaccctgaacagtaaaaccacaagcatcgagaacctgcggctccgggccaagcagcacgcggcctccctgggactcgatacgctgcccaactga

SEQ ID NO: 15326 - DNA, 1155 bp, Homo sapiens
  SIMILAR (31)..(912): 971254mologous to Homo sapiens dJ1174N9.1 (novel protein with IBR domain),accession number AL031602,Smith-Waterman Score=1471.
atggttggagatggccgggcgtggtggctcacgcctgtaatcccagcactttgggaggctgagatgggtattggtgtccccattatgctggcatatgtttatggggttgtgcccatttctctttgtcgtggaggtggctgtggagttagcacagccaacggaaaaggagtgaaaattgaatttgatgaagatgatggtccaatcacagtggcagatgcctggagagccctcaagaatcccagcattggggaaagcagcattgaaggcctgactagtgtattgagcactagtggaagccctacagatggacttagtgttatgcaaggtccttacagcgaaacggccagctttgcagccctctcagggggcacgctgagtggcggcattctctccagtggcaagggaaaatatagcaggttagaagttcaagccgatgtccaaaaggaaattttccccaaagacacagccagtcttggtgcaattagtgacaacgcaagcactcgtgctatggccggttccataatcagttcctacaacccacaggacagagaatgcaacaatatggaaatccaagtggacattgaagccaaaccaagccactatcagctggtgagtggaagcagcacggaggactcgctccatgttcatgctcagatggcagagaatgaagaagaaggtagtggtggcggaggcagtgaagaggatcccccctgcagacaccaaagctgtgaacagaaagactgcctggccagcaaaccttgggacatcagcctggcccagcctgaaagcatccgcagtgacctagagagttctgatgcacagtcagacgatgtgccagacatcacctcagatgagtgtggctccccccgctcccatactgcagcctgcccctcgacccccagagcccaaggtatctcgggggagctttgtgccttgatggatcaagttcatcatatgcagcactcaaaatggcagcatccttcggacctcaccacgcgaaagccagaattgaaagcaccttttgagatcgaccagtccaacgccttcattcgacaaagaaggaaacgaaggcacaaggaggaagacataaaaaccacgaggccgagtgcctacagctccctcagtcgcctcctgaggccagtggacctgagctga

SEQ ID NO: 15327 - DNA, 762 bp, Homo sapiens
  SIMILAR (1153)..(2319): 961254mologous to Homo sapiens putative p150,accession number U93568,Smith-Waterman Score=1910.
  misc_feature (1)...(762): n = a,t,c or g
ctggtaagaaattgtgaatttctcagaatttccctgggcaaaaacctgtgaccagagaatctgtgaaattaaaattacataaatctctaccccttggaaaaaaaaaaaaaaaaattcccaaaaagatgcagttacaagtgtgcttctcagaacaggagcattcattcccacttcatactctggcttctccaccttctggcttcaaagacaagtttgtccttcggctagggccagaaaaggttcatatgggcaacttgggctcggtgcacctttgggctcttgggggtcgaagggccaggcttcaagtatgggagcgcggggagccacactcatctaaggtgatgtctggcacatcgtctgactgtgcatcagaactctctaggtcactgcggatgctttcaggctgggccaggctgatgtcccaaggtttgctggccaggcagtctttctgttcacagctttggtgtctgcaggggggatccttttcactgcctccgccaccaactaccttcttcttcattctctgccatctgagcatgaacatggagcgagtcctccgtgctgcttccactcaccagctgatagtggcttggtttggcttcaatgtccacttggatttccatattgttgcattctctgtggagacaaaatccactttgctgantcatgcatggatcatgctaaacctgtcctgtgggttgtaggaactgattatggaaccggccatagcacgagtgcttgcgttgtcactaattgcaccaa

SEQ ID NO: 15328 - DNA, 2423 bp, Homo sapiens
  SIMILAR (310)..(1629): 861254mologous to Homo sapiens putative p150,accession number U93563,Smith-Waterman Score=1914.
atgggctccgagaaggactccgagtcgccgcgctccacatcgctacatgcggccgcacccgaccctaagtgccgcagcggcggccggcgccggcgcctcaccttgcacagcgtcttctctgcctcggcccgcggccgccgcgcccgggccaagccgcaggccgagccgccgcccccggctgcgcagccgccgcccgccccggcccctgccgcggcccagggcccgccgcccgaggcgctgcccgccgagccggccgccgaggccgaggcggaggccgcggcggcggcggcggagcctgggttcgacgatgaggaggcggcggagggcggtggcccgggcgcggaggaggtggagtgtccgctgtgcctggtgcggctgccgcctgagcgggccccgcgcctcctcagctgtccgcaccgctcgtgccgggactgcctccgccactacctgcgcctggagataagcgagagcagggtgcccatcagctgccccgagtgcagcgagcgactcaacccgcacgacatccgcttgctgctcgccgacccgccgcttatgcacaagtacgaggagttcatgctgcgccgctacctagcctcggaccccgactgccgctggtgcccggccccggactgcggttatgctgttattgcctatggctgtgccagctgcccgaagctaacttgtgagagggaaggttgccagactgagttctgctaccactgcaagcagatatggcatccaaatcagacatgcgatatggcccgtcaacagagggcccagactttacgagttcggaccaaacacacttcaggtctcagttatgggcaagaatctggaccagcagatgacatcaagccatgcccacgatgcagtgcatacattatcaagatgaatgatggaagctgtaatcacatgacctgtgcagtgtgtggctgtgaattctgttggctttgtatgaaagagatctcagacttgcattacctcagcccctctggctgtacattctggggcaagaagccatggagccgtaagaagaaaattctttggcagctgggcacgttgattggtgctccagtggggatttctctcattgctggcattgccattcctgccatggtcattggcatttcctgtttatgttggaaggaacattcacagcaggtatgatgggaaggaaaacctccaaacacaagaggaatttggctatcactggaggagtgactttgtcggtcattgcatccccagttattgctgcagttagtgttgggtattggtgtcccccattatgctggcatatgtttatggggttgtgcccatttctctttgtcgtggaggcggctgtgggagttagcacagccaacggaaaaggagtgaaaattgaattttgatgaaggatgatggtccaatcacagtgggcagatgcctggggagagcccttcaagaatccccagcattggggggaaagcagcatttgaagggcctgactagtgtatttgagcactagtggaagccctacagatggacttagtgttatgcaaggtccttacagcgaaacggccagctttgcagccctctcagggggcacgctgagtggcggcattctctccagtggcaagggaaaatatagcaggttagaagttcaagccgatgtccaaaaggaaattttccccaaagacacagccagtcttgttgcaattagtgacaacgcaagcactcgtgctatggccggttccataatcagttcctacaacccacaggacagagaatgcaacaatatggaaatccaagtggacattgaagccaaaccaagccactatcagctggtgagtggaagcagcacggaggactcgctccatgttcatgctcagatggcagagaatgaagaagaaggtagtggtggcggaggcagtgaagaggatcccccctgcagacaccaaagctgtgaacagaaagactgcctggccagcaaaccttgggacatcagcctggcccagcctgaaagcatccgcagtgacctagagagttctgatgcacagtcagacgatgtgccagacatcacctcagatgagtgtggctccccccgctcccatactgcagcctgcccctcgacccccagagcccaagacggcggacttacaggggaggcgccacctgaagacgttccagggccccataagaccctatcttccggaggggaacggatcgaccaccggtgtgtgcccacaaaaaattcaactcctaagtcctcagtttctagtcccgggaagaaagccagaattgaaagcacctttgagatcgaccagtccaacgccttcattcgacaaagaaggaaacgaaggcacaaggaggaagacataaaaaccacgaggccgagtgcctacagctccctcagtcgcctcctgaggccagtggacctgagctga

SEQ ID NO: 15329 - DNA, 540 bp, Homo sapiens
  SIMILAR (1108)..(2328): 921254mologous to Homo sapiens putative p150,accession number U93574,Smith-Waterman Score=1956.
gccccgcaattcccgggtcgacttcatctaccagtactggaagctgaagaggaaagccaatgccaaccagccgctgctgacccccaagaccgacgaggtggacaacctggcccagcaggagcaggacgtcctctaccgccgcctgaagctcttcacccatctgcggcaggacctagagagggttagaaatctgtgctacatggtgacaaggcgcgagagaacgaaacacgccatctgcaaactccaggagcagatattccacctgcagatgaaacttattgaacaggatctgtgtcgagagcggtctgggaggagagcaaagggcaggaagagtgactcgaagaggaagggctgcgagggctccaagggcaccactgagaagaaagaaaaagtgaaggcggtgcctgactcagtcctggggcagctgggcctgtccacctcattccccatcgatggcaccttcttcaacagctggctggcacagtcggtgcagatcacagcagagaacatggccatgagcgagtggccactgaacaatgg

SEQ ID NO: 15330 - DNA, 691 bp, Homo sapiens
  SIMILAR (565)..(1953): 951254mologous to Homo sapiens putative p150,accession number U93564,Smith-Waterman Score=2329.
tcacggacgactccaggcaaagcccccaaggagacctggggccaggatgcaggcagtggcaaggggggtcaagggccacctaccaggaagccaccacgtcggacatcttctcacttgccgtccagccctgcagccggggactgtcccatcctagccacccctgaaagccccccgccactggcccctgagaccccggacgaggcagcctcagtagctgctgactcagatgtccaagtgccctggccctgcagcaagccctaagcctttgggccggctccggccaccccgcgagagcaaggtaacccggagattgccgggttgccaggcctgatgctggggatggggaccacctttcagctgtggctgagaggcccaaggtcagcctgcattttgacactgagactgatggcttacttctctgatggggagatgagcgactcagatgtagaggccgaggacggtggggtgcagcggggtccccgggaggcaggggcaaaggagggtggtccgcatgggcgtactggcctcctaactcacccccttccctgtcccaggccctgccctggtccccccacaaggcctcagcccagtcacaactgccatttccagtctctgctgagtgtcccagaccctcgaggctgccactccgtcgtggttttatttttaatatagagagagttttgaattctaa

SEQ ID NO: 15331 - DNA, 2990 bp, Homo sapiens
  SIMILAR (28)..(1764): 901254mologous to Homo sapiens putative p150,accession number U93563,Smith-Waterman Score=2679.
atgctcctggtcatgtattgggcccctgccccgccccctgtgcacatgtcccagttcctcactactggtcctaagtgcctagaactgagtctggaccatgggagggactcacaggagatcacagcatctggccttttgtggctacaacatgctgcctgtggcctggctcagtggaaccaaaaaccacatcctccatttctaactttattgcaggcagaggagccctttgagagagccaggtcatgcgacatctacatccgcatcaagatgctccaaactgcccagcagcaccaagtcgggctggccccgacagaacgaaaagaagccctccgaggaagtcagagtccccagaagtcagccagtgggcagaggcctgggtctctggaccgggagctgctgatgctgatcaaaatcagcaagtgcttaagagtacctagtgggcctagctcagtgctggggacagaaagcacaggccctgtccctggggagcttgtcctttgtcagcaggatgcaggtgctacacaggaaggtgtctgttatgggagggagttgatgatctgtagatgtgactccttcccgagactcatggagccctggggggtgaagggaaccccagaggttttccggacagacttgatcacagccatgaagatcccggactcataccagctcagcccggatgactactacatcctggcagacccatggcgacaggaatgggagaaaggtgtgcaggtgcctgccggggcagaggccatcccagagcccgtggtgaggatcctcccaccactggaaggcccccctgcccaggcatccccgagcagcaccatgcttggtgagggctcccagcctgattggccagggggcagccgctatgacttggacgagattgatgcctactggctggagctcatcaactcggagcttaaggagatggagaggccggagctggacgagctgacattagagcgtgtgctggaggagctggagaccctgtgccaccagaatatggccagggccattgagacgcaggaggggctgggcatcgagtacgacgaggatgttgtctgcgacgtgtgtcgctctcctgagggcgaggatggcaacgagatggtcttctgtgacaagtgcaacgtctgtgtgcatcaggcatgctacgggatcctcaaggtgcccacgggcagctggctgtgccggacgtgtgccctgggtgtccagccaaagtgcctgctctgccccaagcgaggaggagccttgaagcccactagaagtgggaccaagtgggtgcatgtcagctgtgccctatggattcctgaggtcagcatcggctgcccagagaagatggagcccatcaccaagatctcgcatatcccagccagccgctgggctctgtccggccagcctcggcaaggaatgcacaggccccggcatccagtggtccatgccttcctgcggtcacagcgttccatgtcacatgcgccttttgaccacggcctggaaatgcggcttatattagcagccaacgatgaggccaagttcaagtcattctgccaggagcacagcgactgggggcccacgtaatgagcccacatctgagcgggcggaacccagccaggctggcgaggacctggaaaaggtgaccctgcgcaagcagcggctgtatcagctatgaggaggacttctacgagctggtggagccggctgaggtggatgagcggctgcaccttgctgaggcactggtcgacttcatctaccagtactggaagctgttgaggaaagccaatgccaaccagccgctgctgacccccaagaccgacgaggtggacaacctgggccaacaggagcaggacgtcctctaccgccgcctgaagctcttcacccatctgcggcaggacctagagaggggctcccccaacccattagtgcccttgcctcacccaagcccagtcaccacctccagctgctcccaggttagaaatctgtgctacatggtgacaaggcgcgagagaacgaaacacgccatctgcaaactccaggagcagatattccacctgcagatgaaacttattgaacaggatctgtgtcgagagcggtctgggaggagagcaaagggcaagaagagtgactcgaagaggaagggctgcgagggctccaagggcagcactgagaagaaagagaaagtgaaggcggggcctgactcagtcctggggcagctggcaggcctgtccacctcattccccatcgatggcaccttcttcaacagctggctggcacagtcggtgcagatcacagcagagaacatggccatgagcgagtggccactgaacaatgggcaccgcgaggaccctgctccagggctgctgtcagaggaactgctgcaggacgaggagacactgctcagcttcatgcgggacccctcgctgcgacctggtgaccctgctaggaaggcccgaggccgcacccgcctgcctgccaagaagaaaccaccaccaccaccaccgcaggacgggcctggttcacggacgactccagacaaagcccccaagaagacctggggccaggatgcaggcagtggcaaggggggtcaagggccacctaccaggaagccaccacgtcggacatcttctcacttgccgtccagccctgcagccggggactgtcccatcctagccacccctgaaagccccccgccactggcccctgagaccccggacgaggcagcctcagtagctgctgactcagatgtccaagtgcctggccctgcagcaagccctaagcctttgggccggctccggccaccccgcgagagcaagctccagcagctcagctgtgaatgggaagagctcagcgtcctcaactgtggaatcagcatgggatgctggcaggaaatcagccctggggctgagggggtatctgggtggccagcccacctggccatgaacaccattgtggcggctgactcatctgtcaccaggacactctccacgtga

SEQ ID NO: 15332 - DNA, 404 bp, Homo sapiens
  SIMILAR (239)..(403): 401254mologous to Nicotiana tabacum pAP8 product,accession number X72963,Smith-Waterman Score=74.
  misc_feature (1)...(404): n = a,t,c or g
cnnnnnnnnnnccttaattcctggataccaatacctgcaggaaaggcagcccaagaaatagcaggagatgttgttggggtttcaccacttccaccatcaaaagtctccgcagcctcaaaaccaccaaaatcatcatcatccattcttcaagtggcgcaattttagcaatctgatgaaaatgttttataaaatgtatttctccaaaaattaaaactaagcaggtcatccacgtatagcacctgctcccctctctcgctatccgcaaccgccgctgcgccgctcacccacaatgcccggtgagccacccccagcacacagacccctacgcgcacacccgaggcacggccccaggcccttgaggaaagaccgcggcccagccacacaggttggggtagcccccgcac

SEQ ID NO: 15333 - DNA, 422 bp, Homo sapiens
  SIMILAR (160)..(402): 351254mologous to Nicotiana alata 120 kDa style glycoprotein,accession number U88587,Smith-Waterman Score=114.
ttctctggtgatgaaataatggcatcagaagagaggcagccaatggaagaagagtggtcacggtccagtacaatttcagaaaaagatggtgaaagatggcttccagatactgcaggaaaggcagcccaaggaatagcaggagatgttgtttgggtttcaccacttccaccatcaaaagtctccgcagcctcaaaaccaccaaaatcatcatcatccattcttcaagtggcacctgctcccctctctcgctctccgctgccgccgctgcgccgctcacccacgctgcccggtgagccacccccagcacacagacccctacgcgtacacccgaggcacggccccaggcccttgaggggagaccgcggcccagccacacaggttggggtagcccacgcaccacccggcttcgaacacctacgaaa

SEQ ID NO: 15334 - DNA, 703 bp, Homo sapiens
  SIMILAR (565)..(1227): 931254mologous to Homo sapiens putative p150,accession number U93563,Smith-Waterman Score=1040.
cgaagctgtatgttagatacattggctccaggatcctcagaatcatccacaagggcaattgttccattacttttttcatcagttaaacccaatggaaaaagtgagatatccagatgagtgtgtgttgattgctgaatctgtgcttttggaatagtttgactcacaatgctatttgctgcatgtgtattctctggtgatgaaataatggcatcagaagagaggcagccaatggaagaagagtggtcacggtccagtacaatctcaggagaagatggtgaaagatggactccagatactgcaggaaaggcagcccaaggaatagcaggagatgttgtttgggtttcaccacttccaccatcaaaagtctccgcagcctcaaaaccaccaaaatcatcatcatccattcttcaagtggcacaattttagcaatctgatgaaaatgttttataaaatgtatttctccaaaaattaaaactaagcaggtcatccacgtatagcacctcataatgaatcttcattcacaagtaaagtattagatgcatgagacagaatactttcatcagaattaatcctggaacttggaatgaggtctcctttctctgagtcacataaaggagggttagaagcctgctcccctctctcgctctccgctgccgccgctgcgccgctcacccacgctgcccggtgaattccacgacactgc

SEQ ID NO: 15335 - DNA, 627 bp, Homo sapiens
  SIMILAR (51)..(317): 401254mologous to Homo sapiens engrailed protein,accession number L12699,Smith-Waterman Score=120.
tcacgtgttcgtgggcgtagactttcgaaaacactcgattctgggacgtgcagataccggtacccaccggcgagcgcaggaacgagtgggcactcccacccccgggagctggctccgttcccgcaggaggttggtcacgccccctgactcctggtcgctgcgacagccaagggcgaggccgcagcaggcgggctgctcccctctctcgctctccgctgccgccgctgcgccgctcacccacgctgcccggtgagccacccccagcacacagacccctacgcgtacacccgaggcacggccccaggccctctcatctttgcctgtctgaactctcaagcaccggatgcaagtagactgagagcctccgccaaccagtaagatgactttggtcaaagaattctgctctagagttacttttgttcttgtcttcaactccagatcacagcaattcatacgtgccatctctgttgcagagttttcttgcaaagcctttcttaaaagctttctgtcaaatagcttgtcaggtctggagtctaagaagttcaagattaagacaccagcagattggatgtctagtggggccctgctttctgggtcatagattgtgccttctagctgtgtcctcat

SEQ ID NO: 15336 - DNA, 420 bp, Homo sapiens
  SIMILAR (82)..(420): 1001254mologous to Homo sapiens PINCH protein,accession number U09284,Smith-Waterman Score=643.
agggctgtttccaaactgcagcgcaggcacagtgacgtgaaagtctacaaggagttctgtgacttttatgcgaaattcaacatggccaacgccctggccagcgccacttgcgagcgctgcaagggcggctttgcgcccgctgagaagatcgtgaacagtaatggggagctgtaccatgagcagtgtttcgtgtgcgctcagtgcttccagcagttcccagaaggactcttctatgagtttgaaggaagaaagtactgtgaacatgactttcagatgctctttgccccttgctgtcatcagtgtggtgaattcatcattggccgagttatcaaagccatgaataacagctggcatccggagtgcttccgctgtgacctctgccaggaagttctggcagatatcgggtttgtcaagaatgct

SEQ ID NO: 15337 - DNA, 2661 bp, Homo sapiens
  SIMILAR (1)..(1473): 871254mologous to Homo sapiens putative p150,accession number U93563,Smith-Waterman Score=2207.
atgatcatcaacaccatcatcaccaccaccaccaccatcaccattatcttcatcatcaccatcatgtcatcatcaccaatcaccatcaccaatatcatcaccatcatccaacatcatcaccaccacaatgaccagcggccatctctgggcaaatgcaggggcctctacattcgagtccggaaggtccctggggagcgggccacagcaaacagcaggtgcccaataaatgcccagggcattgaaagctgctggaatggagtgatggctttgtggctgggccccaacagcacctgcagtcggctcccagaactcacagacagcgaggactgccagccagcagactccccaggggatgaggaccccaagccctggtgggacccaccccatgaggcccccctcacaggctacttccacccatatggtgctgcctttgtgccacgccatgccggaaacttcaaggacaggagagaggtgccccaccaggacaccagcttctgctcagcaggtcagttctggattctgccttctgcttgcaagacaggaagagtggccttgactctgaccttgctgattggtgcttatcaaacgctaacagaagctgatgttaagggactgacagcagcccgggcagcgagtccaggggcgaagtggaggacacagttcccctgcccagcaggcacctgcagctcccaggcaggcaacggccagctcgaggactgtctgccctaccccccggggccttccgccccagtggggtccctgagccggagctctgccaacggtgaattcatcattggccgagttatcaaagccatgaataacagctggcatccggagtgcttccgctgtgacctctgccaggaagttctggcagatatcgggtttgtcaagaatgctgggagacacctgtgtcgcccctgtcataatcgtgagaaagccagaggccttgggaaatacatctgccagaaatgccatgctatcatcgatgagcagcctctgatattcaagaacgacccctaccatccagaccatttcaactgcgccaactgcggtattaagctgggtgtctttctcacagacaggaaggatctgactgccgatgcacaggagctgaaaggggagctatactgcctgccatgccatgataaaatgggggtccccatctgtggcgcttgccgacggcccatcgaagggcgtgtggtgaacgccatgggcaagcagtggcatgtggagcattttgtttgtgccaagtgtgagaaaccctttcttggacatcgccattatgagaggaaaggcctggcgtattgtgaaactcactataaccagctatttggtgatgtttgcttccactgcaatcgtgttatagaaggtgatgatgagggggatggatttgcccaccgctactcaccttatgactcttgtgaggttgatcagtctcccctggaaggccaacagctgaagtccatcagaaagggtcctctggcccagagccagcccctgcccacccctgtcatgctgcacccagggtgcaagacccagatcagagaagcgcccggaagtgctgccttggagtcggtgagaaggcggccacggccaggcctggtgcctgaagaggagtcggagtcggcggctgtagaggctgtgcgccacatacatctgcagaacttctcacgctctctgcttgagaccctcaatgggcagaagctgggtgggcacttctgcgacgtgactgtgtgcattcatgaagcttcgctgcgtgcgcaccgctgcgggctggcaatcggctcgccctccttccaagacaagctgctgctcggcccctctgagatccgtgtgccttcggtggtgcctgtgcagacggtgcgacagctagtcgagctcctgtacagcggttcgctcgttgtggcacagagtgaagccccgcaggtactcatggctgcgtcggtgcttcgcatagacagttatcgacgaatgcacgcagattatcgcacgcgctcctctgcacccgcgagcacctctgcacccgcgcccctgcccacccctgtgcccccgccactcgcacctgagcagctgcgtcaccgcctgcgccacctgctggctgcgcacccccggggcaccccggtgccgcgcacagcgctgcctgcgcccccgacacctgccaaagccgaggggcttggtgcctacccctcactgtccgcggcccctgacgaccgaggtgacaacgatgacgaggaaactgacgatgagaccgatggcgaggacggcgaaggtggcggcccgggagagagccaagcacctccttccttcccagactgtgctgccggcttcctcactgctgctgctgacagcgcgtgcgaggagttccatgcacccactggcctctctgactacagtgcaccatccgtgccagcccctgcgcccccacccgccttctaccccacactccagcccgaggcagcccccggcactcagctgcgggaggccccggctccctctgctgctcccaccacggccccctcaggcaccactgctcgcactcctggtgccgagccacttgcctatgcgtgcggccactgttgcaagacgttcagctcaagtaaaaacgacaccaagcacatgttcatccactcgggggagaagccgcaccagtgcgccgtgtga

SEQ ID NO: 15338 - DNA, 1751 bp, Homo sapiens
  SIMILAR (1060)..(1476): 1001254mologous to Escherichia coli cytoplasmic maltose- binding protein,accession number J01648,Smith-Waterman Score=729.
atggccagggttgtggaagcccaggtccaggcagggttcaaatgctcctcagagtgtgccagcagcctcagcctcagggagagcttgtcaggggatgttttacaaggtctccaaaagcctcttatgccctccagagtgaaaagcacggcattgttgatgaagtcttgtggcaaatatgcaaggcacgtgtggatatttctttctcttggaggcttacaaggtagccccggtctcctgagctctcaagcacccacgatggccttctcaggccgagcgcgcccctgcattatcccagagaacgaagaaatcccccgagcagcccttaacactgtccacgaggccaatgggaccgaggacgagagggctgtttccaaactgcagcgcaggcacagtgacgtgaaagtctacaaggagttctgtgacttttatgcgaaattgagccatcctgagctggcccatacaattttattgactggactttgggtgggagttttccagggtggtagggctccgaggggctcgcagcgcagcatgtttagggagacaggagactgccttgtcgtgttgtttgatcttcgatctaagaagtggctgacggtctgcaacctgctgttctttgcgtgttacagcaacatggccaacgccctggccagcgccacttgcgagcgctgcaagggcgtgctttgcgcccgctgagaagatcgtgaacagtaatggggagctgtaccatgagcagtgtttcgtgtgcgctcagtgcttccagcagttcccagaaggactcttctatgagtttgaaggaagaaagtactgtgaacatgactttcagatgctctttgccccttgctgtcatcagtgtggtgaattcatcattggccgagttatcaaagccatgaataacagctggcatccggagtgcttccgctgtgacctctgccaggaagttctggcagatatcgggtttgtcaagaatgctgggagacacctgtgtcgcccctgtcataatcgtgagaaagccagaggccttgggaaatacatctgccagaaatgccatgctatcatcgatgagcagcctctgatattcaagaacgacccctaccatccagaccatttcaactgcgccaactgcgggaaggagctgactgccgatgcacgggagctgaaaggggagctatactgcctcccatgccatgataaaatgggggtccccatctgtggtgcttgccgacggcccatcgaagggcgcgtggtgaacgctatgggcaagcagtggcatgtggagcattttgtttgtgccaagtgtgagaaaccctttcttggacatcgccattatgagaggaaaggcctggcatattgtgaaactcactataaccagctatttggtgatgtttgcttccactgcaatcgtgttatagaaggtgatgtggtctctgctcttaataaggcctggtgcgtgaactgctttgcctgttctacctgcaacactaaattaacactcaagaataagtttgtggagtttgacatgaagccagtctgtaagaagtgctatgagaaatttccattggagctgaagaaaagacttaagaaactagctgagaccttaggaaggaaataagttcctttattttttcttttctatgcaagataagagattaccaacattacttgtcttgatctacccatatttaaagctatatctcaaagcagttgagagaagaggacctatatgaatggttttatgtcatttttttaaa

SEQ ID NO: 15339 - DNA, 713 bp, Homo sapiens
  SIMILAR (248)..(706): 961254mologous to Homo sapiens RanBP2 (Ran-binding protein 2),accession number D42063,Smith-Waterman Score=773.
tttcgtgccacggcgcccggcgggcaagacaccctcagatcacagggttctgccaagagcccggccgagtgcagctcgagcgccgacgtcgccaaggatacacagtgctgacgcagtacacaagtgcgtcacagtggtcctccgccggctacgtcagtggctttcaggcgctttcctgttggaattggcgactgctgcggggctgagcgctggtttcacgcgtctcgggagccaggttggcggtgcgatgaggcgcagcaaagcctacggggagcggtaccccgcctcggtgcagggctccgccccgtcgcctcgacagaagtcaatgaaaggattctattttgcaaagctgtattatgaagctaaagaatatgatcttgctaaaaaatacatatgtacttacattaatgtgcaagagagggatcccaaagctcacagatttctgggtcttctttatgaattggaagaaaacacagagaaagccgttgaatgttacaggcgttcagtggaattaaacccaacacaaaaagatcttgtgttgaagattgcagaattgctttgtaaaaatgatgttactgatggaagagcaaaatactgggtcgaaagagcagcaaaacttttcccaggaagtcctgcaatttataaactaaaggaacagcttttagattgtgaaggtgaagatggatggaataaactttttgacttgaaaaaaa

SEQ ID NO: 15340 - DNA, 1867 bp, Homo sapiens
  SIMILAR (1768)..(2301): 971254mologous to Escherichia coli put. mal G protein (aa 1- 296),accession number X02871,Smith-Waterman Score=895.
tcacatatccgactgagtcacctcctgggactcctcagtgccaagtttccaagctggattccttaattcttcttctggggattgcatcaatgcatcaccctcatcaaagcagcttacatgaattaaagccttactgagtcttgcactgctctgcgtgatatgccaggaaccacatttaatacttgcagaagactgcaccgaaacttcatgagaccttcccctcgctgtgcacggacaagtgtctgactctggagcccaggctgttgcttcccggtctggtgatgaatcctccatagtttgtttgaaggaagaaagtactgtgaacatgactttcagatgctctttgccccttgctgtcatcagtgtggtaagttttactgctaaatgtcaagtaaaaagtgaattcatcattggccgagttatcaaagccatgaataacagctggcatccggagtgttccgctgtgacctctgccaggaagttctggcagatattgcatttgtcaagaatgctggtagacaggaaggatctgactgccgatgcacaggagctgaaaggggagctatactgcctgccatgccatgataaaatgggggtccccatctgtggcgcttgccgacggcccatcgaagggcgtgtggtgaacgccatgggcaagcagtggcatgtggagagagaacagtacatggacccgggaatcctcagtgccttaatagatcctaagtacttacttattctttcccatagaggcttacacatgaagtcaatgaaaggattctattttgcaaagctgtattatgaagctaaagaatatgatcttgctaaaaaatacatatgtacttacattaatgtgcaagagagggatcccaaagctcacagatttctgggtcttctttatgaattggaagagaacacagagaaagccgttgaatgttacaggcgttcagtggaattaaacccaacacaaaaagatcttgtgttgaagattgcagaattgctttgtaaaaatgatgttactgatggaagagcaaaatactgggtcgaaagagcagcaaaacttttcccaggaagtcctgcaatttataaactaaagaacatgggtgggtcagaggccaaatggttcctaagccagatgatgagggggtgcaggtcaggggacgttcaggaaggccagatgcagggtggaggctcaacagaaggtcttctgttggaggaagtgcctggaggctcaggcctcagggcagctgactcgctaggcttcaggacctcgcaggtgtccagggggccacaggggtctgcatgcgagggcaggggcagcaggtgggtgcatcacaatggggcgttggtgacagtgatgtcctgcggtcccccacctgccacctccgttcagggaggtttccttgggcccaccccagccggagagaccttgcccgaagtcaccctcttccatgctatgtgccctgtagctgcagtttactgttcattttgccgcacttcttactttgacggtgccatttgtgggattcctgtttgcccatcttcctttcgtgccgaggaggcaagtgcatcccttcaccaggccaccactgcaggtgaccttgtgggcctgatccacggtgaaaggtggggagagggtactggagcagggcagagggactggatgagcctgcatggggaggaaggcgtgactgagggaagacagctcagccccccaggggaaacctgagttcagtgttggggaatgtgaggacacaatggcggggcaggatggccctggcaccagcggtgctggggaccgtagggggccatgctttgtgagaggcaaacttggctccaaggatgtgaggctgggagcacgaatggcgaa

SEQ ID NO: 15341 - DNA, 444 bp, Homo sapiens
  SIMILAR (196)..(414): 331254mologous to Caenorhabditis elegans weak similarity to collagens; glycine- and proline-rich,accession number AF000298,Smith-Waterman Score=101.
  misc_feature (1)...(444): n = a,t,c or g
gaggagagnnccnnntttgannccactgaggacntctgaaccagcgtggtggatttcgaagacacaacccccgccagggacgagaagaaggtgggggccatggctgcctagcaggacagcgacagtgatggggaggccctgggcggcaacccgatggtggcagggttccaggacgatgtggacctcgaagaccagccacgtgggagtcccccgctgcctgcaggccccgtccccagtcaagacatcactctttcgagtgaggaggaagcagaagtggcagctcccacaaaaggccctgccccagctccccagcagtgctcagagccagagaccaagtggtcctccataccagcttcgaagccacggagggggacagctcccacgaggaccgcagcacccccctggccaggcggtgtctctgttcgcacaggtccggagaagcgg

SEQ ID NO: 15342 - DNA, 2446 bp, Homo sapiens
  SIMILAR (1023)..(598): 1001254mologous to Escherichia coli exu regulon repressor,accession number D13328,Smith-Waterman Score=761.
atggaaacatccctgatggtccaggtttgtggtgggagagattgcaacgctctgcttcctggaaatctgtgttcacagccaacacaggtgctgcccttggaagtggatggggatgatggccccggtgggctgcccctcaatgccgccccaccatcctctgtgccccctgtaccaccctcagaggccctgcccccacctgcgtgcccctcagcccccgccccatggcgtagcatcatctctaggctgtttgggacgtcacctgccgccgaggcagcccatccacctccaggtggggccctggatttcggagcgctccgcacttcttcctgcttgtcccagtcccacgggcacatcccgggtgggcctggcttggggttgggtgcagtgagggttccggtgccgagtgaagaggacccagcgtcactgttcacagagccagtcccggccgcagaggccccagcaacagtccagagtgtggaggacttcgttgccaatgaccgcctggaccgcagcttcctggaagacatgacccccgccagggacgagaagaaggtgggggccaaggctgcccagcaggacagcgacacggggagggcctccagggcgcccgagcagcagattccacatggaggccattggcgaggccactccaggtcatatgagcggttcaggccaccagatatggtctctgcagggccaggtcccagtgatggggaggccctgggcggcaacccgattgtggcagggttccaggacgacgtggacctcgaagaccagccacgtgggagtcccccgccgcccgcgggccccgtccccagtcaagacatcactctttcaagtgaggaggaagcagaagtggcggatcccccaaaaggccctgccccagctccccagcagtgctcagagccagagaccaagtggtcctccataccagcttcgaagccacagagggggacagctcccatgacggccgcagcatccccctggccaggtggtgcctctgttcacacaggtctggagaagtgcagcagcaccaggccccctgctgagattgagccagggaagggtgagcaggcctcctcgtccgagagtgaccccgaggggcccatcgctgcacaaatgctgtccttcgtcatggatgaccccgactttgagagcgaggcatcagacacacagtgcagggcagtaagacgagtcctcccagcgcagagggccgaaaatgcctatggctccgctttccagccaggagccctgaaaccggagtgcagacccaccctaaagggcgggccaggccccgtgcctagcaaggctggcaagaagaccgaggcaacatccccacgacccacaggaggagccagtcccctagcccacggagccacggtgggtgcggcctggggacttggcatggcaagctggcccatagggtcgtccctagcacctaccagagcgcgtacgagggagccgaggctgcagcgccgggtgggcagcgagctccctggagacccatgcagcgggtcaggtgccagctgccgccaggtctgtgcgcggggccgggccaccagcgtgcggcttcccgctctggagagtttatggcccctgtcctcggacggctccgcagccgccagggagggactggagggaccgcggctgagacaggctgctgcaccaggcggccctggaccgccgctgccgcccctaagccgccctcccagcccagcgcgccgaatgcggggtggggctgctgtcgcaggccgtggagccgcagccccgctggagggcagggtccggctgggcgtcgggttcctggcagagacagcggtgagagcaggagcaggtgcactggcagctgcagacgcgccgccaggctcccggacaccgcgggcgcgccccctggtggcagccggctccggagccgcgggagggcggtgcccagtccccagccggcggcagcgcgaagcgccttccccgcttgggggagcgggcgtggacctgcagctggagtgccttactagtgaaaaagctggggttggagctgccacggggggagtactggaagccctagccagagcaatcagacaaaagaaggaaatagaggaaatccaaatcggtaaagaggaagtcaaactgtcactggttgctgacgatatgatgtttctccttgagaaccctacggactcctctagaaagctcctagaactgatgaaagaattcagcaaagtttccagatacaagattaatggacacaaatcagtagctcttctatatatcaacagccaccaagcagagaatcacatcaagaactcaaccccttttacaatagctgcgacaaacaacaacaacaaaaaaacaaaacttaggaatatacctagcaaaggaatcaaaggacagctacaatgaaaattacaaaaccgctactgaaagaaatcatagatggagccaagcacgg

SEQ ID NO: 15343 - DNA, 966 bp, Homo sapiens
  SIMILAR (355)..(513): 501254mologous to Rattus norvegicus putative pheromone receptor,accession number AF016178,Smith-Waterman Score=128.
atggatgtgctagacaaagggatgattcatgatctgggcaggacagaacagaaaggtgcaagacttcgtcatacaactcagaatgctcactccagtggtcccgccgccccaagccgccccgaacgcccagcagccccgagccgcggcctccgccccgcagactcgagtacgcgcgccccgctggcctctgggaaatgtagtcgtcctggggacagaggacgcggctgggccttcgcgacccgcgtcggagccgcccgcctcgcctgcccttcctggcccagccctcgagctcggactcccaaaccacccaaaacaaacccccggcctcgtctggcacccagacgctctcatccgaaggactcctgcactatttttaagcttaactcctttctgaagaatatcaaatttaacaacagtgttggtgaccaggtgaatttggattacaaattaatttctgggacagaatatgatattctcaacttttggaacttcaggattcttgctaaaactgggtgcagcaaggatggacacagaaatccaaggtccaggcctactcaagaagagggctcagggaagcctaagaaaagtctggtcaaggagaggtctggggctcaggaggacttaccagttccaccggaggagaagcttgaactcagtgggacttcaatgggcccctgctgtttctccaagaccagctacggcatcccgcacataatatacatcttgtcctacaaggggacaactgcaactgctggtcatagatggcctgctgcatacccagctcccctgaattgctctgtgcctcctccagagaccaccatgccagtgtctgacctgggaagtccccttcactgggcctctcgcatagccacaccaccatccatgtggctatgctgtctcttggcagctgctttaagagttcttgctgtgtccaatagttctgctgaggtgtactctcagagttaa

SEQ ID NO: 15344 - DNA, 1308 bp, Homo sapiens
  SIMILAR (691)..(1308): 541254mologous to Homo sapiens initation factor 4B,accession number X55733,Smith-Waterman Score=501.
cgattggcgatcacgggtcgcgactactatcggagatatactagttggataccaacatacatgcaaattaaccttaatatagatcgacctatggaagatccacgagatgtgcatagagttcgtccctcgtcatcatcgcgacaacgtcgcacgagcggacaggctagcagcctacacatagaggactatgtcgaatcagcaatgatgcaacctcagatccctgtcctggacatagaaagccctgttctggagcctcctggtgtggccagtggtgactggacattcctgggcctcaagccactagataaagctgtggttgtgggtgagtgggggctggagtgggacaaagaactaggagaaatagcttttcctgaaggctccagtcctgggaatacaagacaagctccactgcctcactccagctcagaggcaggaaatgaacagggccagacatctttagaagtcagtttaaacccagagaagctgttgttcatgaaccagttcaatgcctcgcagtctaacactaaggaagatcaatcacacgcttctctgctcctggagtcagcctgcattgcaaataaagaagctgctgccaccacagacacatttaatggattttcaaagcaaggtgcaaactcactggctggctgtgtgcctgcctgggtccacatcacctccctcatcagctctggccccctgggaatgctgcttaatctctttgaatctcagtttcctcatctgtatgatggggtaactaaagtatctctagtaaagggctgccatgaaacttacatgagcttgaaggagcaagccatgcagatccagccacaatgtgttctcctggtgggcacactccaggccttgttgcccctggtcaggatacagctcccgcctctgttgtctgtcttgctgtatcaccctcgggccttatcagctgaaaaacaggcagcaaaggaacggcagctacaagtcattcggaaattatttgtgtgtgggaaacaggttgctattttgggtgtggataattttccagggcaaaggaaggagctgttgccgaggagtgactgggtgacatcctataaggtcatggtgagcaatgacagccacacgtgggtcactgttaagaatggatctggagacatgatatttgagggaaacagtgagaaggagatccctgttctcaatgagctacccgtccccatggtggcccgctacatccgcataaaccctcagtcctggtttgataatgggagcatctgcatgagaatggagatcctgggctgcccactgccagggtgggagcactga

SEQ ID NO: 15345 - DNA, 377 bp, Homo sapiens
  SIMILAR (11)..(352): 401254mologous to Reticuloendotheliosis virus C end of pol protein (reverse transcriptase),accession number X01455,Smith- Waterman Score=178.
ggcacgagaattattaaaagcagtatggagaccccacaaggtggcagttatgcattgcagaggacaccagcgagcttccaccttggtgggtttagggaattcccgtgctgactcagaggctcgaaaagcaccatctgccccattccgggcatcagtcacagcccccctgctccctcaagcacctgatcttgtacctacttattctaaagaagaaaatgactttctccaggcaaagggaggacaagtgatggaggaaggatgaattcggttaccggatgggagagtagctgcagttgtactggctgtgcatgaaaccacccatcgaggtcaggaattacttgaaaagttgttaggctggtatttctacatctcacatt

SEQ ID NO: 15346 - DNA, 679 bp, Homo sapiens
  SIMILAR (149)..(529): 351254mologous to Reticuloendotheliosis virus C end of pol protein (reverse transcriptase),accession number X01455,Smith- Waterman Score=184.
  misc_feature (1)...(679): n = a,t,c or g
cccacgcgtgcggataatccataaaagaatctataacaagtaaataaaagaaggaaatggaataatattaatttaaaagatgaaaacaaaccagatgggactgaaatcaaaagtagtggaaatgaatgcaactatatcagaaattagattaaacataaacagaaaagacgtagaatatcaacaagaaatcttgcagttagaagcagtatggaaactccacaaggtggcagttatgcattgcaaaggacaccagcgagcttccaccttggtgggtttggggaattcccgcactgactcagagtctccaaaagcagcatctgcccctttgcgggcatcagtcacagcccctctgctccctcaagcacctgatcttgtacctacttattctaaagaagaaaaggactttntccaggtagagggaggacaagtgatggaggaaggatgcattcggttactagatgggagagtagctgtgccacagctgctaggagctgcaattgtactggctgtgcatgaaaccacccatcttaggtcaggagttcacttggaaagttgttaggccagttattttctaccatctcgcattttgtcagcctttgccaaaacttgacacagcggtgtgttacctgccgacagcataatgcaaggcaaggtccagccgttccacccggcatgcaag

SEQ ID NO: 15347 - DNA, 951 bp, Homo sapiens
  SIMILAR (308)..(1021): 571254mologous to Homo sapiens nucleophosmin,accession number M23613,Smith-Waterman Score=524.
tcacgctcgctgcacggggatcgccgccagggctgggctgctggatccccgccacacgggggaagcactggcggcacgatcccggatcgacctcgcgaggcgcccgcactggccgcggggctgcgggactggcggcggcggcggcggctgcgcggggctgggcggggcttggctgcggggaaatgacgtcgccgtccccgcgcgcgccctggtaacggcggctcccgcgtcctcctccatgtccccgcctatccccgccgcagcccgccccgtctcctcctccctccgcagcctcgccgagtcctcggtgcgggctgcgagcgggacccgcggagctgcgctgtcctcgacgcctccgccaggcgcgggccgaggagcctccaagagctggcccggcccccggccgccgccgcccaaccccgggcatctgccccgcgccgttgtccccgcggcttcgggccggcgggaccgccccgtcccttccaggggtgacccgggggtcgcgggtgggacggcgcctgcggccgagtctggggggcgccgggtgtcgggtcgggaagcggccgccgcgactcttgcctcccgggcgtcgttgctccacgggcctgcctccacccgcggggacaggtgccccggctggggtctgttgggaagatggcgaccccgggcatgagctggcagcagcactattacggcggctcggcggccaaattcgcgccctcgccggccaccgcacagctggctgggcacagcatggactgtctccccgggaggcagtgcgccctgcgcccgcagcgaggggaactctactcctccgccgaagcaacagccggagacacctccaaaaccctgcaaactttggtggaacgctggcaacatgaatttaagcttagcactagtacatgccaaatgcagcatctctttttctttgttacattgtagctttgccat

SEQ ID NO: 15348 - DNA, 502 bp, Homo sapiens
  SIMILAR (231)..(4): 411254mologous to Canis familiaris adenylyl cyclase,accession number M97886,Smith-Waterman Score=104.
gcggccgccgcgactcttgcctcccgggcgtcgttgctccacgggcctgcctccacccgcggggacaggtgccccggctggggtctgttgggaagatggcgaccccgggcatgagctggcagcagcactattacggcggctcggcggccaaattcgcgccctcgccggccaccgcacagctggctgggcacagcatggactacagccaggagatgcacctgaaaatgagcaagaaaatcgcccagctcaccaaggtaatatatgctttaaacactaaaaatgatgagcatgaatctgcaattcaagccctcaaagatgctcatgaagaagaaattcaacacattcttgctgaaacaagagaaaaaatatttgcagtataaaagcaaagtaacagaggagctagaccttagaagaaagattcaagttttagaatcatcattagaagatcacataaaaatgaagcagcaggctttgacagaatttgaagcttataagcacagag

SEQ ID NO: 15349 - DNA, 319 bp, Homo sapiens
  SIMILAR (34)..(255): 351254mologous to Caenorhabditis elegans similar to glycoproteins,accession number U41994,Smith-Waterman Score=89.
atgcggaggcttgcattgtacattttagctccagatcgactgcaagaacaaaccagcaatcctgagaggacccacagaccctctgaaggaagcggactgctactgcaggacttgggagagaccccaaatacttctacccaaatgggaaggaaccagaaaaccaatcctggtaatatgacaaaacaaggctcatcaacatgcccctcaaatcacactacttcaccagcaatgaatccaaaccaagaagaaatacctgatttacctgaaaaagaattcaggagtttagttattaagctaatcagggagagaccagagaaag

SEQ ID NO: 15350 - DNA, 368 bp, Homo sapiens
  SIMILAR (1174)..(1929): 751254mologous to Homo sapiens similar to NFE2-related transcription factors; similar to I48694 (PID:g2137676),accession number AC004520,Smith-Waterman Score=880.
ctcctgaattcttctccaggtaaatcagggatttcttcttggtttggatccattgctggtgaactagtgtgatttttttgggggggtattgaagagccttgttttgtcatattatcagggtcggttttctggttccttctcatttgggtaggtgcttcagcttctccagttgtgggggacgtgtttgggagaggagggtctccctttcccacttccactgttggggcattcacagttttgtggggggtctcctgggtccttaagagggtctgtgggtcctcttgggattgctgatttgttcttgcaatcaatctggagctaaaattcacaatgtgagccccccctcgctgctctgtccacagctgcat

SEQ ID NO: 15351 - DNA, 660 bp, Homo sapiens
  SIMILAR (311)..(514): 361254mologous to Mycobacterium tuberculosis modD,accession number Z83859,Smith-Waterman Score=108.
ttaatgcttcagtttgatgaagagtacacagtcacgcagacatatgattgaaccaaaggggtatgatctaatggtactaaactggaagaacttggcaaggcctgtttcctcagattcttctgtgtcctcatgtcttccttcatggataagaatgttaacaaaggtcttaagacctccggaattctttttcaggtaaatcaggatttcttcttggtttggatccattgctggtgaactagtatgatttgttgggggtgttgaggagccttgtttttttatattaccacagttggttttctgctttcctctcatttgggtaggctctggggccagcaacagcaggcagctgccaaccttggccccttctagtaactgtttccttctcttgctagaacttgggagggagtccttgtcagatggaagaacaaagctactatcaaactcaggtccattggctgcccctccgctccctgctccaagtccccggccgccgcagcccactgggagtcctgctaagggaagctgagaaagggggtcctgggaaagcgttcctagtgctcctgaggaaagcgagtctgcatggtgctggctcggttcctgggagtcacacttcgtcttcgccctttgtctcttcaggtttgcagcttcatctgaagccat

SEQ ID NO: 15352 - DNA, 1869 bp, Homo sapiens
  SIMILAR (648)..(4): 881254mologous to Homo sapiens putative p150,accession number U93570,Smith-Waterman Score=925.
ttagcttaggattgacttggtgatgcaggctcttttttggttccacatgaactttaaagtagttttttccaattctgtgaagaaagtcattggtagcttgatggggatggcattgaatctataaattaccttgggcagtatggccattttcacgatattgattcttcctacccatgagcatggaatgttcttccatttgtttgtatcctcttttatttcattgagtagtggtttgtagttctccttgaagaggtccttcacgtcccttgtaagttggattcctaggtattttattctctttgaagcaattgtgaatgggagttcaatcatgatttggctctctgtttgtctgttattggtgtataagaatgcttgtgatttttgtacattgattttgtatgctgagactttgctgaagttgcttatcagcttaaggagattttgggctgagatgatggggttttctagatatacaatcatgtcatctgcaaacagggacaatttaacttcctcttttcctaattgaataccctttatttccttctcctgcctgattgccctggccagaacttccaacactgaggctcgtatatctgagagtgacttgccccacgcgctgcagatggtggcaaaggcagtcttcaaagggcaccctgcgggcaacaactcctctctctggtccgcactgcctcctgcctccatccagtctgttgctgatgtaaagaatccaggcttctttctcttcttttttggaggagtagaatgttgagagtcagcagtagcctcatcatcactagatggcatttcttctgagcaaaacaggttttcctcattaaaggcattccaccactgctcccattcatcagttccataggttggaatcactcgaatacttctatctacttcgtcagaataagggtgtctaacagctacaatcgtgtcaaaatccttttgtccattcgaaactgcactaccaatcgcaatggcttctgcacaaacagttactcgtcctatatacgcttcaatatgtactgccgaaatgatttctcctgttttcgtacgaattgccgctcccacatgatgtttattatcctcataaagcattgtaatcttctctgtcgctacttctactaattctagatcttgttgagaaatgttaaatgttttcatatattcttcttcctccgatttctggttgctgactaattgagatgcatgctttgcatacttctgcctgctggggagcctggggactttccacaccctaactgacacacattccacagctagcgctatatgcgttgatgcaatttctatgcgcacccgttctcggagcactgtccgaccgctttggccgccgcccagtcctgctcgcttcgctacttggagccaaggagtcaaaattagatgcagatttttgactgcacgaggaggggtgccagtactcctaacccacaaattgttcaagggtccactaaacctcctgaattctttttcaggtaaatcaggaatttcttcttggtttggaaccattgctggtggactagtgtgatttttggggaatgttgaatattgctgttttttcatattaccagggttggttttctggttcttctcatttgggtaggctttgttagagggaaggtctagggctgaagactgttgttcagattcttctgtcccatgggatgttcccttaatgtagtactctccccctttacctatgaatgtgacttcctggctctgggctggtactgggggttgtctgcacagagtcttgtagtatgaaccatctatgggtctctcagccatggacaccagcacctgttccggtggaggtggcgggatgaggggtgcaatggactccat

SEQ ID NO: 15353 - DNA, 696 bp, Homo sapiens
  SIMILAR (764)..(2101): 911254mologous to Homo sapiens similar to NFE2-related transcription factors; similar to I48694 (PID:g2137676),accession number AC004520,Smith-Waterman Score=2086.
atggcaagcaagcaagttcacagtcaggaagaagtttggtatgtccctgaaacaggaagctacaatgacttgaaaatcgactgcaagaacaaaccagaaatcccaagaggacccacagaccctctgaaggaagcgactactcctgcaggacccaggagacaccctaaatactgtgagtgccccagctgcagaagtgggaaagggagagcctcctctcccaaacacacacccccgctggagaagctgaaggtctgtttgcgggagaagtttccaactttacttggagctgagtcagaacctacccaaatgagaaggaactggaaaaccaaccctggtaatatgataaaacaaggatggtcaacaccccccacccccaaaatcacactaattcaccagcaatggatccaaatcaagaagaaatccctgatttacctgaaaaagaattcaggagagaaaactccaagtattttttgcaaggaaaagttgatgatactgatgatgatggtgatggtgatggtggtactgattagagtgctgatggtagtagtcctggtccacaacctggcatttagtggtaggcctggagctgctcttggtcaacagtgtcagaagttgggaagaagagctgcatatcaagcagaagagaatgagaagaaacaggaacccacttctgcatctgtctatagcaacatctga

SEQ ID NO: 15354 - DNA, 525 bp, Homo sapiens
  SIMILAR (97)..(300): 941254mologous to Mus musculus serine/threonine protein kinase,accession number AJ250840,Smith-Waterman Score=342.
atgttgagacagagaagatggtacctgctgcatccttggagattcaaaatgtcatcatggcattctaggctagactggcagtggagaaatcacttcaactttgaccactttgaaattttgcgagccattgggaaaggcagttttgggaaggtctgcattgtacagaagaatgataccaagaagatgtacgcaatgaagtacatgaataaacaaaagtgcgtggagcgcaatgaagtgagaaatgtcttcaaggaactccagatcatgcagggtctggagcaccctttcctggttaatttgtgttcaccagcaatggatccaaaccaagaagaaatccctgatttacctgaaaaagaattcaggaggttagctattaagctaatcagggaggaaccagagaaaggtgaagctcagtgcaagggaatccaaaatatgatacaagaagtgaagggagaaatattcaagcaaatagatagcttaaagaaaaaacaatacaaaattcaggaaactttagacacactttaa

SEQ ID NO: 15355 - DNA, 669 bp, Homo sapiens
gccatcagaacctaagcacgtgtgcttgcttcagcagcacatgtactggaattagaatgatgcagagaagattagcatggtccctgcacaaggatgatgcacaaatccgtgaagtattccatataaaaacaaagaagaagaagaaggaaaagggggagagtattacatcaagggaacatgccatgggacaaaaggatctgaacaacagccttcagccctggaccttccctctgacagagcctacccaaatgagaaggaaccagaaaactgactctggtaattaatatgacaaaacaaggctctttgacactccccaaaaaatcacactagctcaccagcaatggatccaaaccaagaaaaaaatccctgattaacctgaaaaagaattcaggaggttagttattaagctaattagggaggcaccagagaaaggtgaagcccaatgcaaggaaatccaaaaatcaatacaagaagtgaagggagaaatattcaaggaaatagatagcttaaagaaaaaacaataaaaaattcaggaaacttcagacacacttttagaaatgcaaaatgctctggaaagtctcagcaatagaattgaacaagtagaagaaagaaattcagaactctaagacaaggtctttgaattaacacaatccaacaaagacaaagaca

SEQ ID NO: 15356 - DNA, 614 bp, Homo sapiens
  SIMILAR (162)..(524): 961254mologous to Homo sapiens t-complex polypeptide 1 (AA 1- 556),accession number X52882,Smith-Waterman Score=579.
  misc_feature (1)...(614): n = a,t,c or g
gccgtcgcagccactgctgtggtcgccggtcgncgaggggncnnatactggttgcccgcggtgtaagcagaattcgacgtgtatcgctgccgtcaagatggaggggcctttgtccgtgttcggtgaccgcagcactggggaaacgatccgctcccaaaacggatgtaaccattactaacgatggtgcaaccatcctgaagttactggaggtagaacatcctgcagctaaagttctttgtgagctggctgatctgcaagacaaagaagttggagatggaactacttcagtggttattattgcagcagaactcctaaaaaatgcagatgaattagtcaaacagaaaattcatcccacatcagttattagtggctatcgacttgcttgcaaggaagcagtgctntatntcantgaaaacctaattgttaacacagatgaactgggaagagattgcctgattaatgctgctaagacatccatgtcttccaanatcattggaataaatggtgatttctttgctaacatgtagtagatgctgtacttgctattnatgccagacatagaggccagcacgctatccagtcantctgttatattgaagccatggagagtcaat

SEQ ID NO: 15357 - DNA, 1864 bp, Homo sapiens
  SIMILAR (1412)..(1594): 951254mologous to Homo sapiens dystonin isoform 2,accession number U31851,Smith-Waterman Score=314.
  misc_feature (1)...(1864): n = a,t,c or g
cgccgtcgcagccactgctgtggttcgccggtcggccgaggggccgcgatactggttgcccgcggtgtaagcagaattcgacgtgtatcgctgccgtcaagatggaggggcctttgtccgtgttcggtgaccgcagcactggggaaacgatccgctcccaaaacgataaagagagttttaatgagcaaaaaacttgcagaatctgaaggaaaaggctggtatagctgtacgaagtggcagagcatgaaattgttatggctgcagcttcgattgccaatattgtaaaaagttctcttggtccagttggcttggataaaatgttggtggatgatattggtgatgtaaccattactaacgatggtgcaaccatcctgaagttactggaggtagaacatcctgcagctaaagttctttgtgagctggctgatctgcaagacaaagaagttggagatggaactacttcagtggttattattgcagcagaactcctaaaaaatgcagatgaattagtcaaacagaaaattcatcccacatcagttattagtggctatcgacttgctttgcaaggcnagcagtgcgttaatatcaatgaaaacctaattgttaacacagatgaactgggaagagattgcctggattaatgctgcttaagacatcccatgtcttccaaaattcatttgggataaatggtgatttctttgctaacatggtagtagatgctgtacttgctattaaatacacagacataagaggccagccacgctatccagtcaactctgttaatattttgaaagcccatgggagaagtcaaatggagagtatgctcatcagtggctatgcactcaactgtgtggtgggatcccagggcatgcccaagagaatcgtaaatgcaaaaattgcttgccttgacttcagcctgcaaaaaacaaaaatgaagcttggtgtacaggtggtcattacagaccctgaaaaactggaccaaattagacagagagaatcagatatcaccaaggagagaattcagaagatcctggcaactggtgccaatgttattctaaccactggtggaattgatgatatgtgtctgaagtattttgtggaggctggtgctatggcagttagaagagttttaaaaagggaccttaaacgcattgccaaagcttctggagcaactattctgtcaaccctggccaatttggaaggtgaagaaacttttgaagctgcaatgttgggacaggcagaagaagtggtacaggagagaatttgtgatgatgagctgatcttaatcaaaaatactaaggctcgtacgtctgcatcgattatcttacgtggggcaaatgatttcatgtgtgatgagatggagcgctctttacatgatgcactttgtgtagtgaagagagttttggagtcaaaatctgtggttcccggtgggggtgctgtagaagcagccctttccatataccttgaaaactatgcaaccagcatggggtctcgggaacagcttgcgattgcagagtttgcaagatcacttcttgttattcccaatacactagcagttaatgctgcccaggactccacagatctggttgcaaaattaagagcttttcataatgaggcccaggttaacccagaacgtaaaaatctaaaatggattggtcttgatttgagcaatggtaaacctcgagacaacaaacaagcaggggtgtttgaaccaaccatagttaaagttaagagtttgaaatttgcaacagaagctgcaatcaccattcttcgaattgatgatcttattaaattacatccagaaatccttcggattaaacatggaagttatgaagatgctgttcactctggagcccttaatgat

SEQ ID NO: 15358 - DNA, 401 bp, Homo sapiens
  SIMILAR (46)..(183): 911254mologous to Homo sapiens Human 5' EST secreted protein SEQ ID No 306,accession number Y11484,Smith-Waterman Score=216.
tttctgcggagaggcgggaggcgctgagagtctgcgcggaggtccgtgcacagactgctttgcctgttgtggctcttcggaggcggcgatccccgaaggcgagctgaaatacggctgcaggctacaatttgcagccgacgattaaggaagacgacgagcgggagaggtggcccaccctcatggagcgcttgtgctcggatggcttcgcatttccccattactacattaaaccgtatcatctgaagaggatccacagagctgtcttacgtggtaatgaggataaagtgaagaaccttctgctgacgtattatgacgccaatagtagagacaggaaggaaaggactgtcctacattgtggcctgtgtcaatgggcatccggaaattgtcgatcctcttgagcg

SEQ ID NO: 15359 - DNA, 2482 bp, Homo sapiens
  SIMILAR (118)..(768): 831254mologous to Homo sapiens aspartate aminotransferase precursor (2.6.1.1),accession number M22632,Smith-Waterman Score= 955.
atggagagaaaccagagcaggaaagctgaaaattccaaaaatcagagcgcctcttctccaaaggatcgcagctgctcaccagcaacggaacaaaactggacagagaatgactttaatgagttgacagaagtaggcttcagaagcatctgtttccaccagtcaccagcaaggggaggatcgtataaggacacccttcagtgtcagtgtgcttcactatgctcaaaatcaccggatttggaggtggatgtggagggtgaagaactgggaggactcttagagatcacgtatttcaacttcctcacggagtggcatgcaggcagcagcagccttgggaaccccgattgcccctcctcacacctgcccatcacaggacttgggcgacggggtggtgaagtcaggctgtgcccccagcggcgccacgaggccaaaaaccggcgctcagcctcatcccggtggctgcagagtgccaagcgccaggtcctgcgctccgggcgcgggtcagaagcagctggcaagggcagcgcagcctgtgggcccttgggcgctggccggccgcagctccgggaagccacgtcagcccacggggtctgcagctgcagccgccaccagcacatggagcaggggtccccgaggattgggaatccccgaccaggcctgcgcctccagccgcgcggaccccggggccagcctggccgcggcaagtcaggcagtctgcggcaggagcgccgggcatgggcttcggccgggggtgcaggaggcgcgcaccctccggccggatggcggcgcactcagggctcaggaggccatcccacgggagccccgccagcccccgccggagcccgagctgcagtgccgcctgcaagtggtgcgctggctgcagctgtggcaaccccagatcccgtcctcccgcctcgcacccatcagcgcggaccccgggggcgacgcagtggcgatgtcgggctgtgggcccagcggtggcactaggcggagaagcaccactcaaccccatccctgggctgcagagggcccagcgcggggggctccgagcgtcgggagcctgtggaagagaagagcgcgcgggcgacagttaaacaggccctgggcagggcgcgcctccgtccagggagccccgccctcccgcggcacctccgcagcaaccgccgcctgcaccgggcgcgcgagagctgctagggcggtttctctgcctcgggcctgttgggcagggccggctaaggtgcgcgtgctcgctggttctaacccttctgttgggcgtttctgcggagaggcgggaggcgctgagagtctgcgcggaggtccgtgcacagactgctttgcctgttgttgctcttcggaggcggcgatccccgaaggcgagctgaaatacggctgcaggctacaatttgcagccgacgattaaggaagacgaccagcgggagaggtggcccaccctcatggagcgcttgtgctcggatggcttcgcatttccccattactacattaaaccagtatcatctgaataggatccacagagctgtcttacatggtaatctagagaaactgaagtaccttctgctcacgtattatgacgccaataagaggagacaggaaggaaaggaccgccctacatttggcctgtgccactggccaaccggaaatggtacatctcctggtgtccagaagatgtggagcttaacctctgcgaccgtgaagacaggacacctctgatccaaggctgtacaacttgaggcaggaggcttgttgcaactcttctgctgcaaaatggcgcccgatccaaatattacggatgtctttggaaggactgctctgcactacgctgtgtataatgaagatacatccatgatagaaaaacttctttcatatggtgcaaatattgaagaatgcagcgaggatgaatatccgccactgttccttgctgtgagtcaaagaaaagtgaaaatggtggaatttttattaaagaaaaaagcaaatataaatgccgttgattatcttggcagatcagccctcatacatgctgttactcttggagaaaaagatatagtcattcttcttctgcagcacaatattgatgtgttttctcgagatgtgtatggaaagcttgcagaagattatgccagcgaggctaagaacagagtcatttttgaactaatttatgaatatgaaagaaagaaacatgaagagctttctataaatagcaatccagtgtcttctcagaaacaaccagccttgaaggctacaagtggcaaggaagattctatctcgaatatagccacagaaataaaggatggacaaaaatctgggacagtgtcttctcagaaacaaccggccttgaaggatacaagtgacaagaacgattctgtttcgaacacagccacagaaataaaagatgaacaaaaatctgggacaagtgtcttctcagaaacaaccggccttgaaggatacaagtgacaagaacgattctgtt

SEQ ID NO: 15360 - DNA, 675 bp, Homo sapiens
  SIMILAR (55)..(999): 521254mologous to Homo sapiens keratin 18,accession number BC000698,Smith-Waterman Score=734.
agcacgtggggaaaggggcggctgtgggcacagcttcagcagacttaaatgttcctgcctgctggctctgaaaagagcagcagatctcccaccacaacactcgagctctgctaagggacagactgcctcctcaagcaggggtcaaaagacaactcatacaggagagctccagctggcatctggaggatggccctctgggacgaagcttccagagaaaggaacaggcagcaaaatctttgctgttctgcaacctccactggtgatacccaggcaaacaaggtctggagtggacctccagcaaaatccagcagacctgcagcagagggaaagcaatagcatcaacatcaacaaaaaggacatccacaccaaaaccccatatgaaagtcaacaatatcaaagaccaaacgtagataaatccacgacgatgaggaaaaactcgcacaaaaaggaggaaaattccaaaaaccagaacaccttttctccaacggatcacaactcctcgccagcaagggaacaaaactggacagagaatgagtttgacaaactgacagaagtaggcttcagaaagtgggtaataacaaactcctctgagctaaaggagcatgttctaacccaatgcaaggaagctaagaaccttgaaaaaaagttagaggaattgctaactaaaataaccag

SEQ ID NO: 15361 - DNA, 467 bp, Homo sapiens; identical to SEQ ID NO: 15142
  SIMILAR (47)..(355): 521254mologous to Homo sapiens p40,accession number U93571,Smith-Waterman Score=249.

SEQ ID NO: 15362 - DNA, 634 bp, Homo sapiens
  SIMILAR (299)..(631): 541254mologous to Homo sapiens p40,accession number U93571,Smith-Waterman Score=278.
agcacctgggggaaggggcagctgtgggcacagcttcaggacacttaaacgttcctgcctgctggctctgaagagagcagcagatctcccagcacagtgctcaagttctgctaagggacagactgcctcctcaagtgggtccctgacccctgtgcctccggagtgggagagaccttccagcaggggtcaacagacatctgaaaggaatagcgtcaacatcaacaaaaaggacatccacacaaaaaccccatccgaaggtcaccagcatcaaagaccaaaggtagataaatccatgaagatgaggaaaaaccagtgcaaaaaggctgaaaattccaaaaaccagaacaccttttctcctgcaaaggatcacaactccttgccagcaagagaacaaaactggatggagaatgagtttgacgaatttacagaaggaggcttcagaaggtgggtaataacaaactcctctgagctaaaggagcatgttctaacccaatgcaaggaagctaaaaatgaaaaaaggctggaggaattgctaactagaataaccactttagagaagaacataaatgatctgatggagctgaaaaacacagcacgagaccttcgtgaagcatacagaagtatcaatagctga

SEQ ID NO: 15363 - DNA, 894 bp, Homo sapiens
  SIMILAR (502)..(876): 491254mologous to Homo sapiens p40,accession number U93567,Smith-Waterman Score=309.
atgtgctatctttcaagaaaaggaaaaaaggaccccagagccacaattcagacttcatcagggctgccaatcctatcactggtccagagtgcacaggccaggggtgcaaggctgcctccacgaagtttcaccagatgcagtcaggcctccgcaggggctgctgagccgcagtgtctccaggaagacccgctgatgagtcacactccaatccactcatcagaccaccgtgctgctggccttctgttgtctgctatggcaaggataacatccctgcctctgggagcctggcagcaccttttgcatactggtgagattgcactctggcctgtgcagaagaggaggctactggatagcatgagactctgtggtgatgggagagagggcacaggagtaattgacgaaggaagcaatagcatcaacatcaacaaaaaggatgaccactcaaaaactccatccaaaggtcaccaacatcaaagatcaaaggtagacaaatccatgaagatgaggaaaaaccagtgcaaaaaggctgaaaattccaaaaaccagaatgcctcctctcctccaaaggatcacaactccttgccagcaagggaacgaaactggacagagaatgagtttgatgaattgacagacataggcttcagaaggtgggtaataacaaactcctccaacttaaaggagcaagttttaacccaatgcaaggaagctaagaaccttgataaaaggttacaggaactgctaactagaataaccagtttagagaagaacataaatgacctgatggaggtgaaaaacacagcacgagaacttcgtgaagcatacacaagtatcaatagccaaatcgatcaagcagaagaaaggatatcgaggttgaaaatccccttaatgaaataa

SEQ ID NO: 15364 - DNA, 716 bp, Homo sapiens; identical to SEQ ID NO: 12886
  SIMILAR (264)..(695): 531254mologous to Homo sapiens p40,accession number U93574,Smith-Waterman Score=365.

SEQ ID NO: 15365 - DNA, 1143 bp, Homo sapiens; identical to SEQ ID NO: 6970
  SIMILAR (1297)..(4092): 211254mologous to Streptococcus gordonii streptococcal hemagglutinin,accession number AB029393,Smith-Waterman Score=509.

SEQ ID NO: 15366 - DNA, 1479 bp, Homo sapiens; identical to SEQ ID NO: 6973
  SIMILAR (499)..(930): 291254mologous to Cyprinus carpio hyosophorin,accession number AF077819,Smith-Waterman Score=195.

SEQ ID NO: 15367 - DNA, 1188 bp, Homo sapiens
  SIMILAR (1)..(255): 781254mologous to Homo sapiens Membrane-bound protein PRO1056,accession number Y66680,Smith-Waterman Score=333.
atgaacacagcaagagcaaggggttacagaagacaggctgtggaggaggcaaaatccacagtcattgatgatgcatgggacatgggggaagaaagaaaaagaggactgaagatggttgtcaggcttccagctggcgcaactggttgtgcctctgaaatacagagttcaggagagagctgtgcaatggttcttccacccaccaccacagaccgtcgtgtgaaacccctgcaccgtcgacgcacttacccggttccactctgggccaatcaggcacccggctttgtgctcacacgttggataatatcagtgctgctggagaaaatccagtgtggtggagcaggactctccttcctgccaccggcttcttttcctcctctccttcccctggtgacctccgaggaggagtgtgaggcagcacttttcctccagaggcattcatggggggtcatcacgtcacagttttttcatgatacgttaacaagcaggggagaaagagacaattggcacctgcaccagacccagtgtagaaatgggagccagtgcgaaacagagctcacgaccactggtttagagctgctcctgtcacatgggcagcaagtaagctccagcaccaagagcaacaccaaagcagatgctggcaattgcacacagagctgccttgtgcagccgtggtcagggccaggtgtgtgggcagggaactgccagtgtctgctacagccatctcacctgtcgggtacccagccctcttcatgccagctttctaaccccttctccgtgatgctagcagcatcagagacagcatcacaagtggagagattgcaggaaggtaaattatctgctgtagcttcattcatggccatgaaactaggcaacaacgacagcctgcctgatgactttaatctgatgaggaaggaaggaggaaggaaggaaggaaggagggaaaggagggaggatcacaactcctcgccagcaagggaacaaaactgtatggagaatgagtttgatgaattgacagaagtaggcttcagaaggtgggtaataacaaactcctctgagcagaaggagcatgttctaacccaatgtaaggaagctaagaaccatgataaaaggttacaggaactgctaactagaataaccagtttagagaagaacataaatgacctgatggagctgaaaaacacagcatga

SEQ ID NO: 15368 - DNA, 2370 bp, Homo sapiens
  SIMILAR (238)..(534): 791254mologous to Homo sapiens Membrane-bound protein PRO1056,accession number Y66680,Smith-Waterman Score=367.
atgaggaaaaaccagtgcaaaaatgctgaagattccaaaaaccagaatgctgcttctcctccaaaggttcacaactccttgccagcaagggaacaaaactggacagagaataagtttgacaaattgacagaagtaggcatcagaagatgggtaataaactcctctgagctaaaggagcatgttctaacccaatgcaaggaagctaagaaccttgataaaaggttacaggaactgctaactataatagccagtttagagaagaacataaatgacctgatggagctgaaaaacacagcaagagaacttcatgaagtatacgcaagtatcaatagccaaattgatcaagtggaagaaaggatatcagagattgaagatcaacttaatgaaatcaagtgtgaagacaagattagagaaaaaagaatgaagaggaatgaacaaagcctccaagaaatatgggactatgtgaaaagaccaaacctacgttggattggtgtacctgaaagtgacagggagaatggaaccaagttggaaaacacacttccggatattacccaggagaacttccctaacctagcaagacaggccaacattcaaattcaggaaatacagagaacaccacaaagatactcctcaagaagagcaaccccaagatacataatcatcagattcaccaaggttgaaatgaaggaaaagatggaagtgggcgcagggatcctaacagtgtgtctgttcaatggcactgataggcgtctttttgttcaaaggaggacttgttcccaacgccctggcactgatccagtgcaagcagcccggggacttgcacccagggccaccggattccatattccgaggccagggctgcctctcccagtgctccggctgcccctcaagttaaataaggcaggtgacatgcgacactggagtcgaccaccgcccgaggcaagaataatttcagagtttttgggctgcaaggaggcagttagcacagggaactacgtagtgagggacatggagactaaacagcagctggcccatctttctggcttctcatggccaagcctgggacacacagctgccctcgtgcaggtccagaactatggcactttgttccctcaggacccatcctcaaagccagtgacttggtctttttcctatgacaaaggagctcccaaaatgtggcagtcccccttcctagagggagaatctgactgggtcagggaggcacccccggtttgcagagcccccattgaagaagaaatcggtacagacacgcagagggaagggcatgtgaggacatgggaaggaaatgccacttgcaagccaaggagaaaggcctcagaagaaaccagccctcctgacaccttgatcttagacttccagcctccagaacttctcagcactctgaagaagcgtgcttgtgagcgccgcgggacgatccaggatggccagaattggggaccatcctgttcttcccatgtggcctggatcacagttcctcaagctttgggatacaaacgaatcacctgggatttggataaaatgcagattcgtgttcagcagccctggcattctgcatttctcatgagctccagggagacgctggtgctgctggggcaggaccacactttgggtggcaagggcttggcaggcaattccagagtgagtgctttttccaaatcttcccagagagatggctatccatggtcaagccatgagctgtccagccagaggggcagccatctccagttggcatggaggcccatagatacttgtggccatgtgaatcagagtcctcatggtcatcataagtgggacatcagagaaaaagatattcagaaaacatggcccaggtgtgatgtgggttgtttacccaagagatggaggactgagcaatcttccaccctaaaatataagaggctttataagaaaaaacttcctgtgaaagggtcaagtctacctaagaactatgagttattcaaaatccacaaggaaaataacgatggccctgattttcataagaagacatttggaaacaggattgagaaaagtgttgctcaaaacaggagctgcccaacccagagaacagagtctccatgtggtgtgaggaagccccaacagcctgtggagaggacccaagaccactggtccacatcttcagttgagctcttaactgataacctctaccatgctaccaaccatatgaatgaaccatctaagaacagatccccagtactcagttgcaccttcccagctactttggaatgtggatgtgggcagctaggcctccaactgcctgctatcttgggtcatgagaaaaagggtcattctagagatggtagaacagacgacttcagagagccaggtttctga

SEQ ID NO: 15369 - DNA, 747 bp, Homo sapiens
  SIMILAR (1)..(393): 551254mologous to Homo sapiens p40,accession number U93567,Smith-Waterman Score=340.
atgaggaaaaaacaaggcaaaaagtctgaaaattccaaaaaccagaacgcctcttctccttcaaaggagtacagctccttgccagcaagggaacaaaactggatggagaatgagtttgacaaattgacagaagtaggcttcagaaagtgggtaataacaaactcctccgagctaaaggagcatgttctaacccaatgcgaggaagctaagaaccttgaaaaaaggttagaggaactgctaactagaataaccagtttagagaagaacataaatgatctgatggagctgaaaaaaaaaacagcaggagaactttgtgaagcatacacaagtatcaatagccgaattgatcaagcagaagaaagggtatcagagattgaagatcagcttaatgaagcctgccttacaagagctcctgaaggaagcactaaacatggaaaggaacaacaggcgccagccactgcaaaaacatgccaaattgtaaagaccgtcgacactgtgaaaactaacacaaggacagaaaaccaaacaccacatgttctcactccggttctcagacttcccccttgtgtgggttgcctggcaacctggggctggagcaatcaaaccgtggccagcgcttctccagcccagactgggagacgatttactggtggaactgaccaagaggctaccctgctttacgactgttccattgttaagagaaccagggacatagaaattgaggctttgaagatggtggaggcctag

SEQ ID NO: 15370 - DNA, 1515 bp, Homo sapiens
  SIMILAR (351)..(659): 991254mologous to Rattus norvegicus integral membrane protein, Tmp21-I (p23),accession number AJ004912,Smith-Waterman Score=519.
atggctgagaattcttcctggattgatggaagcagacactttgcatggctggtcttcagagagtacacataccagttgtctggtcttcccaggctccacttcatggattctttctccaacactctgctgttcttgagtcttgtaacccactccttctctaagcccaagcccaagactaggttattgaatacgtcatttatatggagactgaaatctcctgctggggtaaagcagaaaacccactcacaaaaggcctgtggtctgatacccctacggcaagagcagtttccactggagtcaggtgattcttgtcatccgtggagagcctccagaccaatggctgatttgtggtcctcagggttaatggtgcggtacacaggagaacctgtgcaggccgaaagggagatgctgttattctgtccacttgaactaaggtacctgccacagattcgccttgaaatggattcagaggcaatggctcttaattcaaatgtcatctccatagagatggctttcccatcaaccctggctaaccaccttgatatggtttgggtttgtgtccttgctcaaatctcaagtcgaattgtcatccccagtgttggaggaggggcctgggtgggaggtgtaactgtccagattggagcccttgctgccggcctggcccaaccatcaggtggatacccaagagagtttggaactagccccactacagccttgtacattgatgaagagtcccactcttttggctttgtcattgatacctttcaaggaaatgatcttgatgttggtcatcctgccccatgtacgggggctgagggtcagacctcaagccctgaaaaagagatgcagataggagcggagtgtgccagagcagcactgtcttgttttcctagcaaggtctgggagaaagaagacctgcagaagaggggcctgttagaaggaaaactaacaaacagcaatagcatcaacatcaaaaaggacaatcgtgcaaaaatcccatccgaaggtaaccaacatcaaagaccaaaggtagataaatccatgaaaatgagaaaaaaacagtgcaaaaatgctgagacttccaaaaactggaatgcctcttctcctgcaaaggatcacaactccttgccagcaagggaaaaaaactggacagagaatgagtttgacaaattgacagaagtaggcttcagaaggtgggtaataacaaactcctctgagctaaaggagcaagttctaacccaaagcaaggaagctaagaaccttgataaaaggttacaggaactgctaactagaataaccagtttagagaagaacataaatgacctaacggagctgaaaaacacagcacgagtactttgtgaagcatatataagtatcaatagccaaatcaatcaagtggaagaaaggatatcagagattgaagatcaacataaggaaataaagccggaagacaagattagagaaaaaagaatgaaaaggaatgaacaaacctccaagaaatatgggactgtgtga

SEQ ID NO: 15371 - DNA, 1200 bp, Homo sapiens
  SIMILAR (381)..(259): 701254mologous to Homo sapiens Human secreted protein, SEQ ID NO: 7420,accession number G03339,Smith-Waterman Score=142.
atgttcccgccgtgctgcgcgccgccgcggcgaccctcactgccccccaaccgcgcacgcccccgcaggcccacacacgaaccgcgcacgcgcgcgttcgacgcgccccgctccccgcgcgcccggcctcgggccctctgcagctggccgctgttcccagtgtctcacccacccccgccggaaccgtccgactgggcggacttggatatctttgtgtgcttcttggggcccttggaagggtgtctgtggggtttccgtgaggccaaagacagaggttccttctcacaaggatggtgtttgctttcacatggacagcccagaccacctggaaccaagtgcacagaagccccaccatccctgggcctcccaggtgtgatgggtgaggagtccaagtccgccggagatccaaggctctttgtggttgaatctgtggagtttttgcaggatgtcatagagttcatgtctgcagctcacagtgtcattgcctgtgtccgcagctccacgtactggcaggtgtactgcaagctgggcagagtggccgcgaacccaaaggtgcgggaacaagtgcggctggagctgagcttggtcaactcagacctgcagatgctcaaggaagagctggaggggctgaacatctcacataataagagtgccacatactccgtgggaatgcagaaaaagtactccatgatctgcttagccattgatgatgacaacaaaactgataaaacccagaaaatctccaagaagctttccttcctgagttggggcaccaacaagaacagacagaagtcagccagcaccttgtgcctcccatcggtcggggctgcacggcctcaggatcacaactcctcaccagcaagggaacaaaactgtacagagaatgagtttgacaaattgacagaagtaggcttcagaaggtgggtaataacaaactcctctgagctaaaggagcatgttctaacccaaggcaaggaagctaagaacattgaaaaaatgatagatgaattgctaactagaataaccactttagagaagaacataaatgacctgatggagctgaaaaacacagcacgagaactttgtgaagcatatacaagtatcaatagccaaatcaatcaagcggaaaaaaggaaatcagagattgaagatcaaattaatgaaataaagtgtgaagacaagattagagaaaaagaatga

SEQ ID NO: 15372 - DNA, 717 bp, Homo sapiens
  SIMILAR (358)..(768): 911254mologous to Escherichia coli was o492p and o826p before splice,accession number U28375,Smith-Waterman Score=666.
atgacaccttacacttatggaatttacgtcagaagaggcctgccatactacattcgcttaaattttgcagagaaagaaaaacagcctcaggcaggtccttcaggaaatattccagaaggcattgttatcataggagatgatcactcagtgtgtgttactgtccctgaagaccttctagtgggacaagatctagaggtggaagacagtgagattgatgatcctgatcctgtagcacttggagaaaggggcagctgtgggcgcagcttcagcagacttaaacgttcctgcctgccggctctgaagagagcagcagatctcccagcacagtgctcaagttctgctaagggacagactgcttcctcaagtggatccctgacccccatgtatccttactgggagacacctcgcagcaggggtcgacagacacctcatacaggagagcttcggctggatcacaactccttgccagcaagggaacaaaactggacagagaatgagtttgacgaattgacagaagtaggtttcagaaggtgggtaataacaaacttctcagagctaaaggagtgtgttctaacccaatgcaaggaagctaagaaccttgaaaaaaggttagaggaattgctaactagaataaccagtttagcgaagaacataaatgacctgatagagctgaaaacacagcttgagaacttgataaagcctaaggatcgactctag

SEQ ID NO: 15373 - DNA, 601 bp, Homo sapiens
  SIMILAR (180)..(536): 441254mologous to Homo sapiens p40,accession number U93571,Smith-Waterman Score=247.
ggagtggactttcagcaaactccagcagacctgcagcatgagggtcctgactgttagaaagaaaactaacaaacagaaaggaatagcatcaacatcaacaaaaaggacagccacacaaacacccgatccgaagatcactgacatcaaagaacaaaggtatataaattcaccaagatgaggaaaaaccagcccaaaaagcctgaaaattccaaaaacagaatccctcttctccttcaaaggatcataactccttgccagcaagggaagaaaactggatggagaatgagtttgacaaattgacagaagtaggcttcagaaggtgggtaataacaaactcctctgagttaaaggagcatgttctaacccagtgcaaggaagctaagaaccctgataaaaggttagagaaactgctaactagaataatcagtttagagaagaacataaatgacctagtggagctgaaaaacacagcatgagaacttcttgaagcatacacaaatatcaatagccaaattgatcaagtggaagaaaagatacgagattgaagatcaacttaatgaaataaagcttgaagatgagattagagaaaaaaaaaaaaaaa

SEQ ID NO: 15374 - DNA, 477 bp, Homo sapiens
  SIMILAR (199)..(474): 551254mologous to Homo sapiens PRO2221,accession number AF116695,Smith-Waterman Score=234.
atgtggaaggtgacagggaagcaagacacgtcttacattggcagtagggagcctctgctggtgatactcaggcaaacagggtctggagtggacctccagcaaactccagcagacctgcagaagaggggcctgactgttagaaggaaaactaacaaacgaaaagcaataacgtcaacatcaaaaaacaggatgttcacacaaaaaccccatctgaaggtcaccaacatcaaagaccaaagggatcacaactccttgccagcaagggaacaaaactggatagagaatgagtttgacgaactgacagaagtgggcttcagaaggtgggtaataacaaactcctctgagctaaaggagcatgttctaacccaatgcaaagaagctaagaaccttgagaaaaggttgcaggaactgctaactagaataaccagtttagagaagaacataaatgacctgatggagctgaaaaacacagcatga

SEQ ID NO: 15375 - DNA, 2175 bp, Homo sapiens
  SIMILAR (1)..(567): 1001254mologous to Escherichia coli phoE protein,accession number V00316,Smith-Waterman Score=998.
atgggcaaagacttcaggactaaaacaccaaaagcaatggcaacaaaagccaaaattggcaaatgggatctaattacactaaagagcttctgcacagcaaaagaaactgtcaacacagtgaacaggcaacctacagaatgccttaacctaaacaagtctagcaggtatcagggcaaccagatgaagcatgaaaagtctaatcataaccctgaagatcataccccaaatttatcctgtttgcagttcagggatcacaactcctcgccagcaagggaacaaaactggatggagaatgagtttgacgaattgacagaagtaggcttcagaaggtgggtaataacaaactcctccgagctaaaggagcatgttctaacccaatgcaaggaagctaagaaccttgataaaaggttagacaaattgctacctagaataaccagtgtagagaagaacataaatgacctgatggagctgaaaaacacagcacaagaacttcatgaagcatacacaagtatcaatacccaaatcgatcaagcagaagaaaagatatcagagattgaagatcaactcaatgaaataaaaccaaatctacgtctgattggtgtacctgaaagtgatggggagaatggaaccaagttggaaaacactctgcaggatattatccaggagaacttctccaacctagcaaagcaggccaacattcaaattcaggaaatacagagaacaccacaaagatactcctcgagaagaacaaccccaagacacataattatcagattcaccaaggttggaatgaaggaaaaaatgttaagggcagccagagagaaaagtcgggttacccacaaaggaaagcccatcagactaacagtggatctctcggcagaaaccagaaaagagtgggggccaatattcagcatttgtaaagaaaagaattttcaacccagaatttcatatccagccaaactaagcttcataagcgaaggagaaataaaatcctttacaaacaagcaaatgctgagagattttgtcaccaccaggcctgccctacaagagctcctgaaggaagcactaaatatggaaaagaacaaccgaccactagccagactaataaagaagaaaagagagaagaatcaaatagacacaataaaaaatggtaaaggggatatcaccactgatcccacagaaatacaaactaccatcagagaatactataaacatccctatgcaaataaactagaaaatctagaagaaatggataaattcctggacgcacacaccctcccaagactaaaccaggaagatgtcgaatccctgaatagaccaataacaagttctgaaattgaggcagtaattaagagcctaccaataaaaagaagtccaggaccagacagattcacagctgaattctaccagaggtacaaagaagagctggtaccattccttctgaaactgtcccaatcaatagaaaaagagggaatcttccctaactcattttatgaggccagcatcatcctgataccaaaacctggcagagacacaacaaaaaaagaaaattttaggccaatatccctgatgaacatcgatgtgaaaatcctcaataaaatactggcaaaccgaatccagcagcacatcaaaaagcttatccaccatgatcaagtgggcttcatccctgggatgcaaggctggatcaacatatgcaattcaataaacgtaatccatcacataaacagaaccaatgacaaaaaccacaacatgattatctcaatagatgcagaaaaggcctttgacaaaattcaacaacacttcatgctaaaaactctaaataaactaggtattgatggaacatatctcaaaataataagagctatttatgaaaaacccacagccaatatcatgctgaattggcaaaaactggaagcattccatttgaaaaccagcaaaaaacaaagatgccctctctcaccactcctattcaacatagtattggaagttctggccagggcaatcaggcaagagaaagaaataaaggatattcaattaggaaaagaggaagtcaaattgtctctgtttgcagatgacaagattgtatatttagaaaaccctatcatctcagcccaaaatctccttaagctgataagcaacttcagcaaagtcttaggattcaaaatcaatgtgtaa

SEQ ID NO: 15376 - DNA, 2106 bp, Homo sapiens
  SIMILAR (2770)..(3663): 991254mologous to Escherichia coli sn-glycerol-3-phosphate acyltransferase,accession number K00127,Smith-Waterman Score=1553.
atgaaactcatggaaacacttaaccagtgcataaacgctggtcatgaaatgacgaaggctatcgccattgcacagtttaatgatgacagcccggaagcgaggaaaataacccggcgctggagaataggtgaagcagcggatttagttggggtttcttctcaggctatcagagatgccgagaaagcagggcgactaccgcacccggatatggaaattcgaggacgggttgagcaacgtgttggttatacaattgaacaaattaatcatatgcgtgatgtgtttggtacgcgattgcgacgtgctgaagacgtatttccaccggtgatcggggttgctgcccataaaggtggcgtttacaaaacctcagtttctgttcatcttgctcaggatctggctctgaaggggctacgtgttttgctcgtggaaggtaacgacccccagggaacagcctcaatgtatcacggatgggtaccagatcttcatattcatgcagaagacactctcctgcctttctatcttggggaaaaggacgatgtcacttatgcaataaagcccacttgctggccggggcttgacattattccttcctgtctggctctgcaccgtattgaaactgagttaatgggcaaatttgatgaaggtaaactgcccaccgatccacacctgatgctccgactggccattgaaactgttgctcatgactatgatgtcatagttattgacagcgcgcctaacctgggtatcggcacgattaatgtcgtatgtgctgctgatgtgctgattgttcccacgcctgctgagttgtttgactacacctccgcactgcagtttttcgatatgcttcgtgatctgctcaagaacgttgatcttaaagggttcgagcctgatcacctaacacctgctggaaattgctatgttgttaggagaaatgaggattgtattggatttttcagtggattctacaacgtaattagtctaggagtatacctggttgagcagcagaaaggatgggaggacacccactcaaaaaccccatccaaaggccatcagcatcaaagatcaaaggtagataaatccacaaagatgaggaaaaactggtccaaaaatgctgaaaattccaaaaaccagaatgccttatctcctccaaatgatcgcaactcctctccagcaagggcacaaaactggatggagaataagtttgacaaattgacagaagtaggcttcagaaggcaggtaataacaaacacctctgagctaaaggagcatattctaacccaatccaaggaagctaagaaccttgataaaaggttacaggaactgctaactagaataaccagtttagagaagaacataaatgacctgatggagctgaaaaacacagcaagagaacttcgtgaagcattcacaagtttttgtgttaactgtgaagcagtttcactaataaccagtctaagggaggattcccactggttggaggatagtaaaggtcatcgtatgccaggcaccaggaatagaagtgtgaatactttcacccaccgcatcctgggctgcagttttaccagttgcctgaatctgactcccatagtgaccctctctggccacatggaggcagtttcctcagttctgtggtcagatgctgaagaaatctgcagtgcatcttgggaccatacaattagagtgtgggatgttgagtctggcagtcttaagtcaactttgacaggaaataaagtgtttaattgtatttcctattctccactttgtaaacgtttagcatctggaagcacagataggcatatcagactgtgggatccccgaactaaagatggttctttggtgtcgctgtccctaacgtcacatactggttgggtgacatcagtaaaatggtctcctacccatgaacagcagctgatttcaggatctttagataacattgttaagctgtgggatacaagaagttgtaaggctcctctctatgatctggctgctcatgaagacaaagttctgagtgtagactggacagacacagggctacttctgagtggaggagcagacaataaattgtattcctacagatattcacctaccacttcccatgttggggcatga

SEQ ID NO: 15377 - DNA, 1603 bp, Homo sapiens; identical to SEQ ID NO: 15148
  SIMILAR (453)..(749): 941254mologous to Escherichia coli was o492p and o826p before splice,accession number U28375,Smith-Waterman Score=496.

SEQ ID NO: 15378 - DNA, 1416 bp, Homo sapiens
  SIMILAR (176)..(679): 671254mologous to Homo sapiens glutathione S-transferase Ha subunit 1 (EC 2.5.1.18),accession number M21758,Smith-Waterman Score=477.
atgggcacttcttattgcccagtggggaagaacatcctagctccctacttggccttctctgacactgtccaggaaggagtgaagctgcagaccttcgtggtgagagttacagctcttaaaggtagtgtggacccaaagagtgagcagcagaaagatttattgcaaagagtgaaaaaacacagcttccaccttctggaaggggacctgagctggttgccattgctggctcaggcaacctgcttttattctcttatctggccccacccacatcctgctgattgcccttgggtggtcattgggactgggcgccttggagcagggggcggtgctcatcggggaggctcgggctgtgcaggagcccacggtgcccctctgggacgaagcttccagaggaaggaacaggcagcaatctttgctgttttgcagcctccgctggtgatacccaggccaacaggttctagagtggacctccagcaaactctggcggatctgcagcagaggggcctgactgctagaaggaaaactaacaaacagaaaggaatagcacatccacgtcaaagaccccatccgaaggtcaccaacatcaaagaccaaaggtagataaatccacaaagatggggagaaaccagtgcaaaaaggcctgaaaattccaaaagccagaatgcctgttgtcctccaaaggatcacagctccttgccagcaagggaacaaacctggatggagaatgagtttgacgaattgacagaagtaggcttcagaaggtgggtaataacaaactcctccaaactaaaggagcatgttctaacccaatgcaaggaagctaagaaccttgaaaaaaggttagaggaattgctaactagaataaccaatttagagaagaatataaatgacctgatggagctgaaaaacacagcacgagaacttcgtgaagcatacacaagtatcaatagccgaattgatcaagcgaaagaaaggatgtcagagattgtagatcaactgaatgaaagaaatgacagggagaatggaaccaagttggaaaacactctgcaggatattacccaggacaacttcccctacctagcaaggcaggtcaacattcaaattcaggaaacacagagaatgccacaaagatactactcgagaagagtaaccccaagacacataattgtcagattcgccaaagttgaaatgaaggaaaaaatgttaagggcagccagagagaaagacacatcagtgaaacagaaagttaacaaggatatccaggaattgaactcagctctgcaccaagtggacctaatagccatctacagaactctccaccccaaatcaacggaatatacattcttctcagcaccacatcacacttattccaaaactgaccacatagttcattcgatactctgcgactctggttaa

SEQ ID NO: 15379 - DNA, 679 bp, Homo sapiens
  SIMILAR (178)..(321): 771254mologous to Mus musculus keratin,accession number Y00217,Smith-Waterman Score=189.
ccaccctcatattgtcttatgcccaatttctgcctcaaaagaaagagtaaaaactaaaagccagaaatgaaatccacaggcagacagcccggtgccacaccctgggcctggtagttaaagatcgacccctgacctaaccggttgtgttatctatagattctagacattgcatagaaaagcactgtgaaaatccctgtcctgttctgttccgttctgattaccagtgcatgcagcccccagtcacataccccctgcttgctcaatcaatcacgaccttctcacgcagacccccttagagttgtgagcccttaaaagggacggaattgctcactcagggagcttggcttttgagacgcaagtctgctgaagttcccagctgaataaagctccttccctctttaacccggtgtctgaggagttttgtctgtggctcctcctgctacaaaaggaattgctaactagaataaccagtttagagaagaacacaaatgacctggtggacctgaaaaacacagcatgagaacttcatgaagcacacacaagtatcaacagctgaattgaccaagtggaagaaaggatatcagagtgtgaagaccaccttactgaaataagacattcagaaaagatgaagactgccttactgaaataagacatgcagacaagaagagagaaaaaaaaa

SEQ ID NO: 15380 - DNA, 2092 bp, Homo sapiens
  SIMILAR (1453)..(2841): 941254mologous to Homo sapiens putative p150,accession number U93564,Smith-Waterman Score=2284.
atggatggagatctccacaagggagtggctgtgttctggccaccagatgctgctggaggccacacctgctgcaggagcatggtctgcaggagcctgctaggaggagcacagtggaaatttcatagttttaggtgtaggatccgttttgaattaattttacatatgatacaagaaaggaatagcatcaacatcagccaaaaggacgtccacacagaaactccatctgaaactcaccatcatcaaagaccaaaggtagataaatccatgaagatgaggagaaaccagtgcaaaaaggctgaaaattccaaaaaccagaaagcctcttctcctccaaaggaacacaactcctggagagcaagggaacaaaactggacagagaatgagtttgacaaattgacggaagtaggcttcagaaggtgggtaataacaaactcctctgagctaaaggagcatattctaacccaatgcaaggaagctaagaaccttgaaaaaacattagaggaattgctaactagaataaccagtttagagaagaacataaatgacctgatgaagctgaaaaacacagcacgagaacttcgtgacgcatacacaagtaaatcagggatttcttcttggtttggatccattgctgggagacacctcccagtaggggccgacagacacctcatacaggagagcactggctggcatctggcaggtgcccctctgggatggagcttccagaggaaagagcaggcagcaatgttttgctgttctgcagcatctgctggtgacacccaggcaaacagggtgtggagtggacccccagcaaactccagcagacctgcagaagaggggcctgactgttagaaggaaaactaacaaacagaaaggaatagtatcaacatcaacaaaaaggataactacgcaaaaactccatccaaaggtcaccaacagcaaagaccaaaggtggataaatccacgaagatgaggaaaaaccagcacaaaaaggcttgaaaattcccaaaacccgggatgccctcttctcctccaaagggatcacaactgctcgccagcaagggaaccaaaactggatggagaattgagtttaatgaatttgacgaattgacaggagcaggcttcagaaggtgggtaataacaaactcctctgagctaaaggagcatgttgtaacccaatgcaaggaagctaagaaccttgaaaaaaggttaccaggaactgctaactagaataaccagtttagagaagaacataaatgacctgatggagctgaaacaggatattacccaggagaacttcatgaagcatacacaagtatcaatagcccaagccgatcaaggcaggaaggaaagggtattcagagattgaagatccaactttaatggacataaagtgtgaagacaaaattagagagaaaaaaaaaagaaaaggaacgaacaaagcctccaagaaatatggggctatgtgaaaagaccaaacctacgattgatcagtgtacctgaaagtgacggggagaatggaaacaagtaggaaaacatacttcaggatattatccaggagaattttccttccccaatctaacaagacaggccaacattcaaattcaagaaacacagagaacactgcaaagataccccttgagaagagcaaccccaagacatataattatcagattcaccaaggttgaaatgaaggaaaaaatgttaagggcagccagagagaaaggtcgggttacccacaaagggaagcccatcagactaacagaaaatctctctgcagaaaccctataagccagaagagagtagtagccaatactcaacattcttaaagaaaggaattttcaacccagaatttcatatcgagccaaactaagcttcataagcaaagcaaaagagaaataaaatcctttatagacaagcaaacgctaagggattttgtcaccactaggcctgccttacaagagctcctgaaggaagcagtgaatatggaaaggaaaaaccagtaccagccactgcaaaaacataccaagttgaaaagaccattgacactatgaagaaactgcatcaactaatgggtaaaataaccacctag

SEQ ID NO: 15381 - DNA, 315 bp, Homo sapiens
  SIMILAR (169)..(315): 971254mologous to Homo sapiens pepsinogen A,accession number M26032,Smith-Waterman Score=245.
atggcaggtctggcaacagaactggagccggacttaaggagaaagaggaaggaacttcagctctggcacctgcagacccccgaaagtgacctacggaagctggcagcagggactgcaattgagcattctctcacctttcccttctcagagctccccaagcctatgcccagcatcaccatgaacggagagaccatcgcctgtgctgagggctgccaggccattgttgacaccggcacctctctgctgaccggcccaaccagccccattgccaacatccagagcgacatcggagccagcgagaactcagatggcgac

SEQ ID NO: 15382 - DNA, 2778 bp, Homo sapiens
  SIMILAR (1447)..(2769): 981254mologous to Homo sapiens put. precursor polypeptide,accession number X04391,Smith-Waterman Score=2350.
atgaagtggctgctgctgctgggtctggtggcgctctctgagtgcatcatgtacaaggtccccctcatcagaaagaagtccttgaggcgcaccctgtccgagcgtggcctgctgaaggacttcctgaagaagcacaacctcaacccagccagaaagtacttcccccagtggaaggctcccaccctggtagatgaacagcccctggagaactacctggatatggagtacttcggcactatcggcatcggaactcctgcccaggatttcactgtcctctttgacaccggctcctccaacctgtgggtgccctcagtctactgctccagtcttgcctgcaccaaccacaaccgcttcaaccctgaggattcttccacctaccagtccaccagcgagacagtctccatcacctacggcaccggcagcatgacaggcatcctcggatacgacactgtccaggttggaggcatctctgacaccaatcagatcttcggcctgagcgagacggaacctggctccttcctgtattatgctcccttcgatggcatcctggggctggcctaccccagcatttcctcctccggggccacacccgtctttgacaacatctggaaccagggcctggtttctcaggacctcttctctgtctacctcagcgcgctcagtgtcctcatggtaagtggaaacaacagtgacggtgcccactgcatgggccctggcctaagaggaaaagaaaccacattggtcacaccccaggacagccctggaaagtgcccaatcaacggtcgctctgaggaggcaacagcagatggtcacacaaatggacgaacaaaaaaattcatgtcttctcccctcactttccacagcgatgacaagagtggcagcgtggtgatctttggtggcattgactcttcttactacactggaagtctgaactgggtgcctgttaccgtcgagggttactggcagatcaccgtggacagcatcaccatgaacggagagaccatcgcctgtgctgagggctgccaggccattgttgacaccggcacctctctgctgaccggcccaaccagccccattgccaacatccagagcgacatcggagccagcgagaactcagatggcgacatggtggtcagctgctcagccatcagcagcctgcccgacatcgtcttcaccatcaatggagtccagtaccccgtgccacccagtgcctacatcctgcagagcgaggggagctgcatcagtggcttccagggcatgaacgtccccaccgaatctggagagctttggatcctgggtgatgtcttcatccgccagtactttaccgtcttcgacagggcaaacaaccagaaacctaccgtgacttgccttcaggccatgcatctaataacctttaaaatcaggtctcttgaaacaggtctgatcattctgccctttgagaagctgccagatttccaggcaaggctcacccgttccaactcgaagtgccagggccagctggaggtctacctcaaggacggatggcacatggtttgcagccagagctggggccggagctccaagcagtgggaggaccccagtcaagcgtcaaaagtctgccagcggctgaactgtggggtgcccttaagccttggccccttccttgtcacctacacacctcagagctcaatcatctgctacggacaactgggctccttctccaactgcagccacagcagaaatgacatgtgtcactctctgggcctgacctgcttagagtgtctcattgcagaaccccagaagacaacacctccaacgacaaggcccccgcccaccacaactccagagcccacagctcctcccaggctgcagctggtggcacagtctggcggccagcactgtgccggcgtggtggagttctacagcggcagcctggggggtaccatcagctatgaggcccaggacaagacccaggacctggagaacttcctctgcaacaacctccagtgtggctccttcttgaagcatctgccagagactgaggcaggcagagcccaagacccaggggagccacgggaacaccagcccttgccaatccaatggaagatccagaactcaagctgtacctccctggagcattgcttcaggaaaatcaagccccagaaaagtggccgagttcttgccctcctttgctcaggtttccagcccaaggtgcagagccgtctggtggggggcagcagcatctgtgaaggcaccgtggaggtgcgccagggggctcagtgggcagccctgtgtgacagctcttcagccaggagctcgctgcggtgggaggaggtgtgccgggagcagcagtgtggcagcgtcaactcctatcgagtgctggacgctggtgacccaacatcccgggggctcttctgtccccatcagaagctgtcccagtgccacgaactttgggagagaaattcctactgcaagaaggtgtttgtcacatgccaggatccaaaccccgcaggcctggccgcaggcacggtggcaagcatcatcctggccctggtgctcctggtggtgctgctggtcgtgtgcggcccccttgcctacaagaagctagtgaagaaattccgccagaagaagcagcgccagtggattggcccaacgggaatgaaccaaaacatgtctttccatcgcaaccacacggcaaccgtccgatcccatgctgagaaccccacagcctcccacgtggataacgaatacagccaacctcccaggaactcccgcctgtcagcttatccagggccttga

SEQ ID NO: 15383 - DNA, 1017 bp, Homo sapiens
  SIMILAR (781)..(2193): 931254mologous to Homo sapiens putative p150,accession number U93572,Smith-Waterman Score=2302.
atgaagtggctgctgctgctgggtctggtggcgctctctgagtgcatcatgtacaaggtccccctcatcagaaagaagtccttgaggcgcaccctgtccgagcgtggcctgctgaaggacttcctgaagaagcacaacctcaacccagccagaaagtacttcccccagtgggaggctcccaccctggtagatgaacagcccctggagaactacctggatatggagtacttcggcactatcggcatcggaactcctgcccaggatttcaccgtcgtctttgacaccggctcctccaacctgtgggtgccctcagtctactgctccagtcttgcctgcaccaaccacaaccgcttcaaccctgaggattcttccacctaccagtccaccagcgagacagtctccatcacctacggcaccggcagcatgacaggcatcctcggatacgacactgtccaggttggaggcatctctgacaccaatcagatcttcggcctgagcgagacggaacctggctccttcctgtattatgctcccttcgatggcatcctggggctggcctaccccagcatttcctcctccggggccacacccgtctttgacaacatctggaaccagggcctggtttctcaggacctcttctctgtctacctcagcgccgatgaccagagtggcagcgtggtgatctttggtggcattgactcttcttactacactggaagtctgaactgggtgcctgttaccgtcgagggttactggcagatcaccgtggacagcatcaccatgaacggagaggccatcgcctgcgctgagggctgccaggccattgttgacaccggcacctctctgctgaccggcccaaccagccccattgccaacatccagagcgacatcggagccagcgagaactcagatggcgacatggtggtcagctgctcagccatcagcagcctgcccgacatcgtcttcaccatcaatggagtccagtaccccgtgccacccagtgcctacatcctgcag

SEQ ID NO: 15384 - DNA, 3163 bp, Homo sapiens
  SIMILAR (1994)..(2809): 911254mologous to Homo sapiens putative p150,accession number U93564,Smith-Waterman Score=1328.
atgtgggccggactgctccttcgggccgcctgtgtcgcgctcctgctgccgggggcaccagcccgaggctacaccgggaggaagccgcccgggcacttcgcggccgagagccggggctgcccccactgtgtctggcagcttccaatattgctttcctgctgccataagatggcaggtctggcaacagaagtggagccggacttaaggagaaagaggaaggaacttcagctctggcacctgcagacccccgaaagtgacctacggaagctggcagcagggactgcaattgagcactctctcacctttcccttctcagagctccccaagcctatgcccagagcagccattccttctctgcagctcaccttggcagctgtggcggtcggcagacagctgcatgcccggcccacactcgcacacaaacccaccttctgtgttcacacagtggccctcgcaggaggaggttacacattcgtcaatgtctggaaagacagaaagcacgtgtttacacagtggtcctcgcaagaggaacttacacatttacaacaaacaccgccctacacctacagcagcagctcctcgccaaagcacaacaaccctccctctagccctccacacaacacaatactccttatctctcctcctcacctacatcgtcctctcttgaaagggttcgccgtcattcatgtgtctcctcggttggtaactacacgtctaggtcctcactatattgccttgcactgtgagatgttcgcaccaaaggtggggctcagtgtcctcatggtaagtggaaacaacagtgacggtgcccactgcatgggccctggcctaagaggaaaagaaaccacattggtcacaccccaggacagccctggaaagtgcccaatcaacggtcgctctgaggaggcaacagcagatggtcacacaaatggacgaacaaaaaaattcatgtcttctcccctcactttccacagcgatgacaagagtggcagcgtggtgatctttggtggcattgactcttcttactacactggaagtctgaactgggtgcctgttaccgtcgagggttactggcagatcaccgtggacagcatcaccatgaacggagagaccatcgcctgtgctgagggctgccaggccattgttgacaccggcacctctctgctgaccggcccaaccagccccattgccaacatccagagcgacatcggagccagcgagaactcagatggcgacatggtggtcagctgctcagccatcagcagcctgcccgacatcgtcttcaccatcaatggagtccagtaccccgtgccacccagtgcctacatcctgcagctttggatcctgggtgatgtcttcatccgccagtactttacctcttctacagtgcatacaaccaggtcggcctggcgcgtgtggtttaagcacactgacgaatgcctagggactccctgtcagcagagatgtaaaaacagcattggcagctacaagtgttcctgtcgaactggcttccaccttcatggcaaccggcactcctgtgtagagaaagtccccaagtgctttgagctaagggacgggcggaagaagggctccgtagcccaaacaaagcagctgtccgcagcgaggacctcccgcagacgcaaacgagtgtcggacgccatcggagacgcgagtctgtcaccattcctgccacaacaccgtgggcagcttcgtatgcacatgcggacctggtttcaggacgggaaggtgacctgtgaaaaggccagtgagggcaagcgtgtgacgagctttgttaactttttcgctgcatgtgatgcccgtgtaacagatagttattctgaggatcactctcctttagtgatgaagtgggtgctgttcctggacataaaggcagacctgtgcttcacatggattgatctgtcttctggcagtgaagtgcaggtgctgctgctgcctccactgtactcagacccaggtagcacaggattgtccatcttccagcagctcagtgcaacggtgtgaactcagcctgtttcagagcctccacaccatgacctccaagaagctggtgaactcggtggctggctgtgctgatgacgctcttgctggcctggtggcctgcaaccccaacctgcagctcctgcagggccaccgcgtggccctccgttctgacctggacagcctcaagggccgggtggcactgctgtcgggtgggggctctggccatgagcctgcccatgctgcaaaatccattcatttggcaaacactcatgagcccactgtgtacctggcgctgtactgggcactagggataccagacaggcaaggtttcatagggaaggggatgctgactggggtcatcgcgggagctgtgttcacctccccggcagtgggcagcatcctggcagccatcacggccgtggcccagcctcccacacgcaagcgtcgcatgcaccacggcattgggggcgcctctgggggttcgaccccggtcggccccaacgcccgctccgacggaacctctccagtcgccgctgccctccgccaaacccccaggggcctccgatggggccagagcgcagtccgcaggggggtttaccgcgtcctgagcggagtggtccccttcacggttcgtggggcaccagctgggtgctgcagccccggaggggtgctgttggggtcgcaaactcgagtaactgagacaccgcggtggaccgtgaagaccatggtcaacaccgctgagaagcccagtctgactaaccccattccactgggatgtgtcgtggctacagtcagtgccaccctgtcctgcaagtgctttgacattgttctctggcttttccttggttccgtttgcctctgcaatgagaaatacgtgcagaaaatgtcccaagccctctgctccttcggctgtgggagtggcatctgcatcgctcccaatgtctgctcctgccaggatggagagcaaggggccacctgcccagaaacccatggaccatgtggggagtacggctgtgaccttacctgcaaccatggaggctgtcaggaggtggcccgagtgtgccccgtgggcttctcgatgacggagacagctgttggcatcaggtgtacaggatggtctccagtgtattgcaaggctaagctgagccaagataggctctga

SEQ ID NO: 15385 - DNA, 1298 bp, Homo sapiens
  SIMILAR (1)..(462): 991254mologous to Homo sapiens pepsinogen,accession number J00287,Smith-Waterman Score=809.
atgaagtggctgctgctgctgggtctggtggcgctctctgagtgcatcatgtacaaggtccccctcatcagaaagaagtccttgaggcgcaccctgtccgagcgtggcctgctgaaggacttcctgaagaagcacaacctcaacccagccagaaagtacttcccccagtgggaggctcccaccctggtagatgaacagcccctggagaactacctggatatggagtacttcggcactatcggcatcggaactcctgcccaggatttcaccgtcgtctttgacaccggctcctccaacctgtgggtgccctcagtctactgctccagtcttgcctgcaccaaccacaaccgcttcaaccctgaggattcttccacctaccagtccaccagcgagacagtctccatcacctacggcaccggcagcatgacaggcatcctcggatacgacactgtccagagtgggtaccaccatggaaaccacagactcaacctaaaaggcctgtgttcttccaaacgtagttccaccactcccccgctgtatgaccttgggcaggtggcctcacctccctcaggctcagtgtcctcatgcgatgaccagagtggcagcgtggtgatctttggtggcatttactcctcttactaccactggaggtctgaactgggtgcctgttaccgtcgagggttactgggcagatcaccgtggacagcatcaccatgaacggagaggcccatcgcctgcgctgagggctgccaggcccattgttgaacccgggaccttttttgtgaccgggcccaaccagccccattgcccaacatccagagcgacatcgaagcccagcgaagaactcgatggcggacagtgtgctcatctgctcagccatcagcagtcctgcccgacatcggtcttcaccatcaaatggagtccagtaccccgtgccacccagttgcctacatcctgcagagcgaggggagctgcatcagtggcttccaggggcatgaacctccccaccgaatctgaagagctttggatcctgggtgatgtctttcatcccgccagtactttaaccgtctttcgacagggcaaacaaccaggtcgggcctggcccccgtggcttaagcctaagtctcttcagccacctcccaggaagatttggcctttgtcctgtgcccactttagatgtatctaattttcctgactgttcttcccaggggagtgtggaggttttggccctgttccctgtcctaccaataacgtagaataaaaacataacccactgaaccagaaaaaaaaaaaaaaaa

SEQ ID NO: 15386 - DNA, 768 bp, Homo sapiens
  SIMILAR (1)..(642): 881254mologous to Escherichia coli No definition line found,accession number U00039,Smith-Waterman Score=956.
atggcgggcgatgtgcaaaaagcactggaagaacgcaatatttttagcgttatttatgatggcacccaacctaaccccaccacggaaaacgtcgccgcaggtttgaaattacttaaagagaataattgcgatagcgtgatctccttaggcggtggttctccacacgactgcgcaaaaggtattgcgctggtggcagccaatggcggcgatattcgcgattacgaaggcgttgaccgctctgcaaaaccgcagctgccgatgatcgccatcaataccacggcgggtacggcctctgaaatgacccgtttctgcatcatcactgacgaagcgcgtcatatcaaaatggcgattgttgataaacatgtcactccgctgctttctgtcaatgactcctctctgatgattggtatgccgaagtcactgaccgccgcaacgggtatggatgccttaacgcacgctatcgaagcatatgtttctattgccgccacgccgatcactgacgcttgtgcactgaaagccgtgaccatgattgccgaaaacctgccgttagccgttgaagatggcacatggcattacattggcatctgtggaggctttgcattcatcctactgcagttggtgcttattacagcttttgcccattcctggaacaagaactgcatttgtgactggggcaaataccccaactgtcagctgcggattgtctggaattatttaaagagtgtgaagccgatcataactgtggcagaagaaaacgcagaaggttga

SEQ ID NO: 15387 - DNA, 854 bp, Homo sapiens; identical to SEQ ID NO: 6714
  SIMILAR (2892)..(4325): 901254mologous to Homo sapiens putative p150,accession number U93564,Smith-Waterman Score=2244.

SEQ ID NO: 15388 - DNA, 896 bp, Homo sapiens
  SIMILAR (215)..(571): 431254mologous to Homo sapiens Membrane-bound protein PRO732,accession number Y66647,Smith-Waterman Score=257.
tgccttccatttggtggacctaagcctaatccctgggacaaggatggtgggtgccaaggccggccccagccccggcacctccctgggcctggcacagcagcacagcggaggcagcagtgtcctagtgaaaagtcccttctgtcaggtggccctctctcaccgcatccacttgcagccgcctgttctacatcctcctccatgtgggggcctcagcaatctgctgcctcctgctgtcaaggacagtagtggaaagggtgtggggcaagacacacaggtgctcagtggctctggggctgtgtaccgagtatgtgcaggaaccgccaccttccacctgctgcaggctgtgttgctggtccacctccactcccccaccagcccgcgggcacagctgcataatagcttctggctcctcaagctgctgttcctgttaggtctctgtgctattgccttctgcattcctgatgagcatctcttcccagcatggcattacattggcatctgtggaggctttgcattcatcctactgcagttggtgcttattacagcttttgcccattcctggaacaagaactgcaatgaggcctcctacctggctgaggtatttggacccctgtggattgtcaaggtttacagctatgagtttcagaagccctcactgtgtttctgctgccctgaaacagtggaggcagacaaagggcaaaggggtggggctgcgaggccagctgaccaagaaacccctccagctcctccagtccaagtccagcatcttttcctacaactattctgccttccacttcgtcttcttccttggctcactctatgtcatggttacccttaccaactggttcaggcttcagcaggatgtggatgcaaaccttttgccccttactcactga

SEQ ID NO: 15389 - DNA, 1025 bp, Homo sapiens
  SIMILAR (160)..(933): 531254mologous to Homo sapiens FLJ00092 protein,accession number AK024490,Smith-Waterman Score=574.
atggagcggcgcgggccgggggccgccacggcgaggggccgggccaggccgggcggagggccttctgtggggttactggctactggctcctctctaaaccccagtttccacggggtagctaggattgtccctggctttataaggatagccaggcctcgtgatggttcattcgcatatgagtctgtgccttggcaacaaagcgccactcagccggctggatcgctgtctgtggtcactactgtgtggggagttggcaacgcgacacagagccaggttttggggaaccccatgggccctgcagggagtccctctggcagctccatgatgcctggtgtggcagggggcagctccgccttgacctccccacagtgcctgggacagcaggcgtttgctgaaggcggcgccaacaagggctacgtgcagcaaggcgtgtacagccgcgggggctaccctggggcccccggcttcaccaccgggtatgcaggcggcccggggggcctgggcctcccctcacatgctgcaagaccctccactgacttcacgcaagcggcagctgctgcagctgtggctgctgcggcagccactgccaccgccacagccacagccaccgtggctgctctccaggagaagcagagccaggagctgagccagtatggagcgatgggggccggacagtcttttaacagccagtttctgcagcatggaggtccccgggggcctagtgtccccgctggcatgaaccctactggcataggaggggtaatgggcccctctggcctctcccccttggctatgaaccccacccgggcagcaggaatgacacccttgtatgcagggcagcgtctgccccaacatgggtatcctgggcctccccaggcccagccactgccccgacagggggtcaagagaacctactctgaggtgtatccagggcagcagtatctgcaaggagcctacccggtccattccgggctatcccagtttcccacttggcaggaaaccccacgccacccatgaacccccac

SEQ ID NO: 15390 - DNA, 585 bp, Homo sapiens
  SIMILAR (1)..(1644): 861254mologous to Homo sapiens putative p150,accession number U93563,Smith-Waterman Score=2429.
atgggagtgaagatgcttctggttcttcaaagtgagacaggaagaggaagaagaagaagaggaggaagaggaggaagaagaggaagaagaaggaggaggaggagggaagagaagaagaaggaggacgaggaggaggaggaggcggtggcagtggcggtggaggaggaggagggggaggaggagggggaggagggggaggaggagggggtggaggaggaagaagaaggaagaagaggaaggaagaagaagaaagaagaagaaagaagaaggaagaagaagaagaaagaagaaggaagaagaagaaagaagaagaagaacactgtttggtgggagctatattccaggctccatagctggttactccaagtgaagaaaatgcggcttcaagaggttgtgaggcttacgtggcaggatgagggaagtaaatcagggatttcttcttggtttggatgcattgctgggatgtggcttcctgagggccaagctgtagtgattgttatctctcttctggatctagccacccagcaagtctaccaggctccggattggtactggggattgtctgcacagaatcctgtgatgtga

SEQ ID NO: 15391 - DNA, 885 bp, Homo sapiens
  SIMILAR (279)..(692): 461254mologous to Mus musculus proline-rich salivary protein,accession number M11902,Smith-Waterman Score=319.
atggacgccttccgcttccgcctgccgcttccgcctgccgcttccgcctgccgcttctgccgccgcttctgccgccgcttctgcctgcgcccccgcaaaaggactagcttttgctcctttggaagttttggtcgttcctggacgcaccattccctgacactggcgtctgtaaacaagaaagtgcagacagtgctgccagagacaggaggattttcacatgagactgaaaaagccgacacacccttacaactaagtcatggtcgagtcggacctgccatccacctccaccagtccctggaacccggcagccgccccgcccagggctcccggagcccggttccccccaacagccgcaccgcccagggctccccgaacccagctccccccaacagccaccccgcccagggctccccgaacccagctccccccaacagccaccccgcccagggctccccgaacgcagttccccccaaaagccaccccgcccagggctccccgaacccagttccccccaacagccaccccgcccagggctccccgaacccagctccccgccccacagccccccgccggacagggctccccgaacccagttcctccccacagccgccctgcccagggctccccgaacccagttcctccccacagctgccccacccagggctcccagaacccagttgccttggctgccttcctcctgcctggacggcttgggatagggtgccctgtgcctgtcctcaaggccgcacgagtccaccccggaaaggtgccacctcacatggtctcaaggtagctgctcaggccccacaaggtgcagaaccccagcgcgatctgcctgaacaaaaccccactgtggtgacggagcggcagagacgcctgctgtga

SEQ ID NO: 15392 - DNA, 440 bp, Homo sapiens
  SIMILAR (3)..(158): 571254mologous to Murine leukemia virus reverse transcriptase,accession number AF003736,Smith-Waterman Score=146.
tggggccctggccaaggccagtggcctatctctcaaaacaactatacagggtttccaaaggctggcccccaggtctaagggccctagcagaaatggccctgttagcacaagaagcagataaactaacccttaggcaaaacccgaatataaaggcccccatgctgtggtaactttaatgactaccaaaggacatcattagttcacaaatgctagattaacctatgtgaaaatccccacataaccactgaagttcgcaacaccctaaaccccaccaccttgctcccggtatcagagagcccagtggaacataactgtgtagacgtgttagactcagtttattctagcaggcccaacctccgagaccatccttgaacatcagtagactgtgaacggtacgtggacaggagcagcttcaccaaccgctgcaaagtgacacgaaa

SEQ ID NO: 15393 - DNA, 368 bp, Homo sapiens
  SIMILAR (2083)..(3168): 801254mologous to Homo sapiens putative p150,accession number U93563,Smith-Waterman Score=1437.
tgtcagagagcccagttgaacataactgtgtagaggtgttggactcagtttattctagcaggcccgacttccgagaccatccttggatgtcactagactgggagctgtacgtggacgggagcaactttgtcaactcacaaggagagaggtgtgtgggatatgcagtggtaaccctggatgctgtcattgaagccaaatcgttgccccagggcacttcagcccagaaggccgaactcattgctttaattcgggcctcagagctaagtgaaggtgatcgggtgtggatcaaggattggaacgtagcccccttgcggccatggtggaaaagaccccagaccatcatcttgaccactcctacagttgtaaag

SEQ ID NO: 15394 - DNA, 404 bp, Homo sapiens
  SIMILAR (20)..(388): 511254mologous to porcine endogenous retrovirus pol,accession number Y17013,Smith-Waterman Score=305.
  misc_feature (1)...(404): n = a,t,c or g
ttaatctacatctattcatccaaacagcaacaagcttntcatgagttaaaagaaaaacgtaggccccagccctggggctatcagacctgacaaaaccctttacaccctatgtgtcagaaagagaaaaaatgcagttggagttttaacccagactgtgggaccctggctaaggccagtggcctatctctcaaaacaactagacggggtttccaaagcctggcccccgtgtctaagggccctggcagcaacggccctgttagcacaagaagcagataaactaacccttggacaaaacctgaatataaaggccccccacgctgtggtaactttaatgactaccaaaggtcatcactggttaacaaatgctagattaaccaagtaacaaagcnngccccgtgaaaatc

SEQ ID NO: 15395 - DNA, 1713 bp, Homo sapiens
  SIMILAR (328)..(732): 801254mologous to Mus musculus Pro-Pol-dUTPase polyprotein,accession number Y12713,Smith-Waterman Score=543.
atgaggccaagagacatatggtcctgttctcctgaggctgcagtctacgcggagctgaaggatcccagccggcaccaaggacagcagcagcagcgtggtgactcctcgttcctgagctgctgtagtgagagggcagactccgcgagcagcggctacctggtcctcttggctctgcaccgctttctccccctggtaactgtgcactggggaaagggaaatgatcagacatttcggggactactggacactggctctgagctgatattgattccagggcacccaaaatgtcattgtggtcctccagttaaagtaggggcttatggaggtcagaagacagatgaatcttggagaatgtcagtggattatcgtaagcttaaccaagtggtgactccaattgcagctgctgtactagatgtggtttcattgctcgagcaaattaacacatcttctggtacctggtacgtggtcattgacttggcaagtgcctttttctccattcctgtccataaggcccgccagaagcaatttgcctgcagctggctgggacagcaatatacctttactgtcctaccccagaggtatatctattctctggctttgagtcataatcttattcggagagaccttgatcgctttttgcttccacaagatatcacattggtccattacattgatgacattatgctgattggatccagtgagcaagaagtagcaaatgcagtggacttattgaaagggatgtttgcaataagtcagaaagttgaggcatgtcgaagaattgtctgtgaaagtcgtgaaagaaaaaaaatgtgctataaaaagcaacttatgcaagaaatgctgtataatttcaaagtaattaggcctcctgaatgtaaaactattgaagaaacagtttatatgcaagagagcccagttgaacataactgtgtagaggtgttggactcagtttattctagcaggcccgacctccgagaccatctttggacatcagtagactgggagctgtacgtggacgggagcagcttcatcaacccacaaggagagaggtgtgcgggatatgcggtggtaatcctggatgctgtcattgaagccaaatcattgccccagggcacttcagcccagaaggccgaactcattgctttaatttgggccttagagctgagtgaaggtccaaccgtcctgtctggcatacaagcttatggagaagccccctttgaagatctcaatatagacttcaccaagatgcccaaatgtggcagtaacaagtatttgctagttccagtgtgtacatactctgggtgggtggaggcctatccaacacgaaccaagaaagctcgtgttcttctccgagatctcatcgctaggtttggactgcccttatggatcggctcagaaaatgggccggcgtttgtggctgacttggtacagaagacagcaaaggtgatgagtgtggatcaaagactggaacgtagcccccttgcagccacggtggaaaggaccccagactgtcatcttgaccactcccacagctgtgaaggtagagggaatcccagcctgggtccaccacagctgcgtaaaacctgcagcaccggagacctggtaggtgagaccaagcctagacaacccctgcaaagtgactctgaagaagtcgacaagccctgctccagtcacacccggaagccgactggtccactcatggccgaagcatga

SEQ ID NO: 15396 - DNA, 1015 bp, Homo sapiens
  SIMILAR (294)..(446): 601254mologous to Felis silvestris polyprotein,accession number X51929,Smith-Waterman Score=167.
  misc_feature (1)...(1015): n = a,t,c or g
ccatctatttagatgcaactgaagccccgcaaggagtcccagatcaatttaaagcttgaaatcaaatagttacaggatttaagtcaatattttggtagatgacagtcaataaaaatgtagattagataaactacatctattacaaccaacagcaacgagcttttcatgagttaaaaagaaaaactcatgtcggccccagccctgaggctacctgacctgacaaaactctttacgctctatgtgtcagaaagagaaaaaaatggcagctggagttttaacccatacttgtgaggccctggccaaggccagtggcctatctctcaaaacaactagacaggatttccaaaggctggcccccaggtctaagggccctagcagcaacagccctgttagcacaagaagcagataaactaacccttaggcaaaacctgaatataaagacccccccatgctgtggtaactttgatgaataccaaaggacatcattggctaacaaatgctagattaaccaagtaccaaagcttgctatgtgaaaatccccacataaccactgaagtttgcaacaccctaaaccccaccaccttgctcctggtatcagagagcctagttgaacataactgtgtagaggtgttggactcagtttattctagcaggctcaacctccgagaccatccttgaacatcagtagactggtagctgcacgtggacgggagcagcttcaccaacccctgcaaagtgactctgaagaagatgacaagcgctgctccagtcacacccagaagctgactgggtccacggcacagccgaagcatggagggaaacttcattcatggggacttcatttttccttaaaatttgggatttgttacagtaagggatttcaacttgaccttttcccaggattgagggattgtttcccagttattattacgttcaagttcaattgcgggtagggacaaaaggttggttacagtttntattatttttatgggttattattaagtgttaccngggg

SEQ ID NO: 15397 - DNA, 729 bp, Homo sapiens
  SIMILAR (632)..(1405): 951254mologous to Homo sapiens putative p150,accession number U93569,Smith-Waterman Score=1270.
  misc_feature (1)...(729): n = a,t,c or g
tttcgtggggtgggggaggaggcctttactttgaaaccacatctgctaaagtgctctgggcaactggccagtcagccagggggcagggcactaaagtctgggctttcccaaagccagcggaggcaggagtgagaggaagggctggccagggctctatgcattgggctctgtgcatagtgtgggcttcctgggccccagaaaagcccgccgaggccaaggcagaaaggactacagcaggaggaacacatctcaaagtgcctgttagagttggctcgaagcacagtgaatcactttgcagacatagggagggctccgtgggtcccggggcccccctcgggtggtgtgccacccagcccagcctctcctgcccctgcagcttcggctggagagttgcgggctggtggcggcggtgcgtcctcactcggggggcttggcaatgcctttaccaaatgccactcgacctgcctccgggaggagcgaggatccgagctgaagctcgctttggaacatggtcatcgatctgagagccagagaggctgaagctggattcgtgaaggtccctcatgcccccatgccgggtgacgggccgggtaggagtgtctgcgagtggggttcccatctcttttttcccagggtgctcgtcaacagcgacatcccccaggtagggagtgcggtccactcctctaccctttaaagtctgcncgntgtcctctacccgggacgccctcg

SEQ ID NO: 15398 - DNA, 2249 bp, Homo sapiens
  SIMILAR (1579)..(2226): 991254mologous to Homo sapiens collapsin response mediator protein-5; CRMP3-associated molecule,accession number BC002874,Smith-Waterman Score=1122.
atggtgaagtttggtttcctcctgtcctttgtttctaacagctggaagctgaagccactcatcgtgttatcaccattgcaaacagggctgggcttcccggtgggctctggtgctggaggctgttctctgcctccccgtatcatgcagttcctgcaaccttgccctgactgccagccctgcattctccgcttaaggactgtcaccttgaggactcactgtccaatctacctggtcaacgtgtccagtatctcggctggtgacgttatcgcagctgctaagatgcaagccctgctacggccctccctgtcctaccacaaccgttctcttgaagctgctcacagcaactgcctgtccagaaaacagtctagactgctctttagcgtggcattcgtggccctgcatgcctgttcacccaccgtcaagctccatctgccaacagcaccctgcacacaccagtgctctgggaaggttgtgctggcggaacccaccgctgcactatgccacgctgacaggcttacactactaccaccaggactggtcccacgcggctgcgtacgtcacggtgcctcccctgagggtggacgcctaacacctcaacctacctcatgagcctgctggccaatgacactctgaacatcgtggcatcagatcaccggcctttcaccacaaagcagaaagctatgggcaaggaagacttcaccaagatcccacatggagtgagtggcgtgcaggaccgcatgagcgtcatctgggagagaggagtggttggaggaaagatggatgagaaccgttttgtggccgttaccagttccaacgcagctaagcttctgaacctgtatccccgcaagggccgcattattcccggagccgatgctgatgtggtggtgtgggacccagaagccacaaagaccatctcagccagcacgcaggtccagggaggagacttcaacctgtatgagaacatgcgctgccacggcgtgcctctggtcaccatcagccgggggcgaagtcgtgaatgagaacggcgtcttcatgtgcgccgagggcaccggcaagttctgtcccctgaggtccttcccagacactgtctacaagaagctggtccagagagagaaggatgcacgaacaagtcaaaccagactactggcgcaaccagacgtgcaaaacaaaacgatttacacgcgcctggcaccagcttcgagcccgcccagctacccttctggggcatgtgaccccccggggtggttggcgggcgcaaggagacgctggccaagggggcaccaggagttccaggcagaccgtattgcttggccttacaacgaggccagagggttgggtttggcggatattaggaagttctgcggcatgactggggaagcttcggctggagagttgcgggctggtggcggcggtgcgtcctcactcggggggcttggcaatgcctttaccaaatgccactcgacctgcctccgggaggagcgaggatccgagctgaagctcgctttggaacatggtcatcgatctgagagcctgcagggaaggaagcacagaggggtgcacgacaacagcgacatcccccaggcagcactcgtcggaggcaccaccatgatcatcggccacgtcctgcccgacaaggagacctcccttgtggacgcttatgagaagtgccgaggtctggccgaccccaaggtctgctgtgattacgccctccacgtggggatcacctggtgggcacccaaggtgaaagcagaaatggagacactggtgagggagaagggtgtcaactcgttccagatgttcatgacctacaaggacctgtacatgcttcgagacagtgagctgtaccaagtgttgcacgcttgcaaggacattggggcaatcgcccgcgtccatgctgaaaatggggagcttgtggccgagggtgctaaggaggcactggatttggggatcacaggcccagaaggaatcgagatcagccgtccagaggagctggaagctgaagccactcatcgtgttatcaccattgcaaacaggactcactgtccaatctacctggtcaacgtgtccagtatctcggctggtgacgttatcgcagctgctaagatgcaagggaaggttgtgctggcggagaccaccactgcacatgccacgctgacaggcttacactactaccaccaggactggtcccacgcggctgcctatgtcacggtgcctcccctgagactgggaattccgccacactgaatagt

SEQ ID NO: 15399 - DNA, 600 bp, Homo sapiens
  SIMILAR (446)..(982): 971254mologous to Homo sapiens cytokeratin 8,accession number M34482,Smith-Waterman Score=870.
tcagcctccaagccccgtgacagcaccagccaagtggtctggatgcaggggtgacacggaggcggggctgccctttggctcgtcccccagtgggagcaacgcgaggatcagtgtgagaatctgggcctgtgtgctggtccctcggtcacgcgccacttcaaggacgagaggggagacttcagggcagccaatgtacatgtgctcagatcctccgggaatgccatctccaagcacaaagggctctggagctggaaggagaggccttctggaaacatcagtcatgacaggcagcggagtcactactgagtcagcagaagggcaagctctgggtcccctgtgccgctgggctctcttcatcttcagcactctgcacccgcgcgtcggcggcgccgaagccccgctccccgcctgcgcgtctgtctcgtccgcatctccgcggtgagtcggcggcgccctcgcccctgagcccagggccagcttctctcgccgccgcggctgctgcgcgcgtccccgcccagcccagcccagccccgagcacgaccccagccccacgcacgaccctagccccgcgagtcccgcaccgactcgctcccgccccat

SEQ ID NO: 15400 - DNA, 222 bp, Homo sapiens
  SIMILAR (46)..(609): 681254mologous to Mus musculus surfeit 3 protein,accession number M14689,Smith-Waterman Score=608.
ccaggttgtgggagcacaggagtgtttctgctggtgcatcaggctggggtctgtcctcaccgggatgtctcctcctccacccctctcttccagaggaggagcgagtggacattctaatcaacaacgcgggtgtgatgcggtgcccccactggaccaccgaggacggcttcgagatgcagtttggcgttaaccacctgggtgaggcctgggcaggggctgcac

SEQ ID NO: 15401 - DNA, 1131 bp, Homo sapiens
  SIMILAR (15)..(425): 741254mologous to Homo sapiens L7a protein,accession number X52138,Smith-Waterman Score=488.
atgactgggagccgcacctggggcgctgatcgaggacatctgcggggactggggaagaagaagccggtgcccgtcctcctggggagtttgctgaacaggccggttcccgcagggcgcacactgcggggcgcgctgcggacgctgagcctcctggccgcgcagggcctgtggcgcagacgtccgtgcttcaccgagaggatctggaaaggctcgggcttccagcagttctcactgccctgttctacaccctggagaaggaggaggaagaggataggacggccacacctgggacattggggacgtacagaagctgctttccggagtgaaagactcaggaaccccgacctgatccaagcaggctactactcctttgcctcgctaacgagaagagagccaaggagttggaggccacttttggctgcggatgtcaccggacatcaaacaggaattgctgcgatgcgacataagttgaagggtggacattcaacggtgacagacctgcaggagctcctcggctgtccactgtcgaaacctgcagaaaatgtcactgcaggtaataaggagaatctcccggagaatgtcactgcgtctgaatcagacgccgaggacaccagtcattggattagggctcaccctaatgaccgcatcctgactggccacttcggcacagaccctgtttccggcacaggccacattcacaggtgtgggagcacaggagtgtttctgctggtgcatcaggctgggaggaggagcgagggacattctaatcaacaacgcgggtgtgatgcggtgcccccactggaccccgaggacggcttcgagatgcagtttggcgttaaccacctggactttgacgacttgaactggcagacgaggaagtataacccaaagccgcctactgccagagcaagctcgccatcgtcctcttcaccaagagctgagccggcggctgcaaggctctggtgtgactgtcaacgccctgcaccccggcgtgccaggacagagctgggcagacacacgggcatccatggctccaccttctcagcaccacactcgtgcctctcacctacccgacaacagtgccgctctttcttgatccccaagggcacagcaggggctcagtatgaatga

SEQ ID NO: 15402 - DNA, 801 bp, Homo sapiens
  SIMILAR (374)..(922): 721254mologous to Homo sapiens small subunit ribonucleotide reductase,accession number X59618,Smith-Waterman Score=624.
ttattctgattttgtttttccaaactgcttctcctcttgggaagtgtaaggaagctgcagcaccaggatcagtgaaacgcaccagacagccgcgtcagagcagctcaggttcaggctctgcgccggcttctctgactctggggccttccctgcagccttctctgcctccttcaggtctgtaagagtcacaccttgtgcagctagcgccgcctggcacttgcggcatagggtgactccaggtgaactgcgcatctgcgatggttgaagcgtgacatatacggccaggtcagcattctcagggtagggatcaaaaatgtttgttggagctgtgcgatgtacacataagaaaatagcgtggtgaacaaagggtatcacaggacctcggtcagatccaagttgcgtaggatcatcagatttctggattgtcatctgctgcaccagtaaggaaacatggtacgctttatggagattcgacgggatattacggggtttattaacgccgatgaccgtcttcccagggatggtggccttgctggggcaagccccaccggtgacatagtcccgtctttcattgctcatacggaactccggatgagcattcatcaggcgggcaagaatgttaataaagcccggatacaacttgtgcttatttttctttacggtctttaaaaaggccgtaatatccagctgaacggtctggttataggtacattgagcaactgactgacatgcctcaaaatgttctttacgatgccattgggatatatcaacggtggtatatccagtgatttttttctccat

SEQ ID NO: 15403 - DNA, 556 bp, Homo sapiens
  SIMILAR (84)..(323): 1001254mologous to Homo sapiens Human PRO1430 (UNQ736) amino acid sequence SEQ ID NO:116,accession number Y99372,Smith-Waterman Score=401.
cggagctacccaggcggctggtgtgcagcaagctccgcgccgaccccggacgcctgacgcctgacgcctgtgcccggcccggcatgagccgctacctgctgccgctgtcggcgctgggcacggtagcaggcgccgccgtgctgctcaaggactatgtcaccggtggggcttgccccagcaaggccaccatccctgggaagacggtcatcgtgacgggcgccaacacaggcatcgggaagcagaccgccttggaactggccaggagaggaggcaacatcatcctggcctgccgagacatggagaagtgtgaggcggcagcaaaaggacatccgcggggagaccctcaatcaccatgtcaacgcccggcacctggacttggcttccctcaagtctatccgagagtttgcagcaaagattattgaagaggaggagcgagtggacattctaatcaacaacgcgggtgtgatgcggtgcccccactggaccaccgaagacggctttgagatgcagtttggcgttaaccacctgggtcactttctcttgacaacttggtgct

SEQ ID NO: 15404 - DNA, 639 bp, Homo sapiens
  SIMILAR (970)..(1368): 931254mologous to Homo sapiens small subunit ribonucleotide reductase,accession number X59618,Smith-Waterman Score=644.
tttcgtgtgagcggagcgcctgggcggcggcggcggcggcgtgatggctccggccgcggaccgagagggttactggggccccacgacctccacgctggactggtgcgaggagaactactccgtgacctggtacatcgccgagttctggaatacagtgagtaacctgatcatgattatacctccaatgttcggtgcaattcagagtgttagagacggtctggaaaaacggtacattgcttcttatttagcactcacagtggtaggaatgggatcctggtgcttccacatgactctgaaatatgaaatgcagctattggatgaactcccaatgatatacagctgttgcatatttgtgtactgcatgtttgaatgtttcaagatcaagaactcagtaaactaccatctgctttttaccttagttctattcagtttaatagtaaccacagtttaccttaaggtaaaagagccgatattccatcaggtcatgtatggaatgttggtctttacattagtacttcgatctatttatattggtacatgggtttatcccatggcttagaggcctggggtatacatcattgggtatatttttaatggggatttttaatttgggatataggtaacatattttggtgaggc

SEQ ID NO: 15405 - DNA, 312 bp, Homo sapiens
  SIMILAR (7)..(102): 651254mologous to Saccharomyces cerevisiae Lpg21p,accession number U43281,Smith-Waterman Score=118.
atggctccggccgcggaccgagagggctactggggccccacgacctccacgctggactggtgcgaggagaactactccgtgacctggtacatcgccgagttctacgtggctcatgtctggcttcctcccaacgccctcatccttgagggacctgacagcttccagatgggtgcggtcactgcctccttcccggagtccagcaggcaggcagcccggcccagcggaggagctgcccaaggcctctccctgcccctgggggaagtccctctcacgtcctttcgcgtccttctctgcgtcgtccgggccctctga

SEQ ID NO: 15406 - DNA, 1608 bp, Homo sapiens
  SIMILAR (129)..(620): 811254mologous to Homo sapiens gamma-actin,accession number X04098,Smith-Waterman Score=699.
atggcagctcccgcatccaccagcagcaccgtccgctcgacagatactgcgggcctgtcagttatcgagtgtgaccgctgtggcccagagttgtctctatgggaagcagctctgtggttgactactggcaacattgctggagctggccttttgttttttggtggaggtattggtggcactatcctatatgccaaatgggcttcccatttccgagaaagagtagagaaaaccataccttactcagacaaactcttcgaggtggttcttggttctgcaccttataatgttccattgccaaagaaatcaactcagtctggtccactaaaaatctctagtgtatcagaagtaacaaaagaatttaaacagcctgcctcacaactccaaaaacaaaagggagatactccagcttcagcaaccgcaggtgatacagtgttggtccctggggttcagcatgaggaatctttaaaaactgatcaccctgcaattgatgaaggaaaacccacacctgcactttcagaagaagcatcctcatcttctataagggaacgaccatgtgaagaaattgcagcttgccttgcacaagaggaaaaacaagaacaagttaaaactgagtctctagccaagagctttgaagatgctctgaggcaaactgcaaatgtcactctgcaggcgattgcagctcagaacactgtggtccaggctgtcaatgcacactccaacatattgaaagccgccatggacaattctgagattgagggcaagaagaagtctgctaagtggcacacagtgcaaggtgcgttgaaggaacacagaaaggcagtagatgaagctgccaatgcccttctcaaagccaaagaagaggtccaagcagctcaatttgagtctaagcttgtatctcagtatcatgagctggtgggccaagctcaggatgactttaaacgacagctggacagtattactccagaagtccttcctgggtggaaaggaatgagcgtttcggacccagctgacaagctctctactgatgatctgaactccctgattgcccgtgcacatcgtcacatcgatcagctgaacagagagctagcagaacagaaggccacagaaaagcagcacatcacattagccttggagaaacaaacgctggaagaaaaggttcaagaacaggaattgaagtatgaatttgagcagaacctgtctgagaaactctcggaacaagaattacagtttcatcatctaagtcaagagcaagttcacaactttactctggatataaataccgcctatgccagactcagaggaatcgaacacgctgttcagagtcatgcagttgctgaagaggaagccagaaaagcctaccaactctggctttcagtggaggcattaaagtacagcatgaagacctcatctgcagaaatgcctgctgtcccactgggtagtgcagttgaggccatcaaagccaactgttctgataatgaatttactaaagctttagccacagctatccctccagagtccctgacccatggggtgtacagtgaagagacccttagagtccgcttttatgctgttcaaaaactggcccgaagggtagcaatgattgattaa

SEQ ID NO: 15407 - DNA, 2755 bp, Homo sapiens
  SIMILAR (316)..(918): 921254mologous to Homo sapiens Human protein kinase (HPKM)-5 (clone ID 1222984),accession number Y27056,Smith-Waterman Score= 966.
acgcgggcacgcacacacggaagcacgcctccacttaactcgcgccgccgcggcagctctgagtccaccagcagcgccgtccgcttgaccgaaatgctgctttttctgtcttttatcgggggagaccgccgccgcccagagttgtctctgtgggaaggttgtcctccgtccattgcgaccatgccgcagatactctacttcaggcagctctgggttgactactggcaaaattgctggagctggccttttgtttgttggtggaggtattggtggcactatcctatatgccaaatgggattcccatttccgggaaagtgtagagaaaaccataccttactcagacaaactcttcgagatggttcttggtcctgcagcttataatgttccattgccaaagaaatcaattcagtcgggtccactataaatctctagtgtatcagaagtaatggaaagaatctaacaggcctgcctcacaaactccaaaaacaaaaaaggagatactccagcttcagcaacagcacctacagaagcggctcaaattatttctgcagcaggtgataccctgtcggtcccagcccctgcagttcagcctgaggaatctttaaaaactgatcaccctgaaattggtgaaggaaaacccacacctgcactttcagaagaagcatcctcatcttctataagggagcgaccacctgaagaagttgcagctcgccttgcacaacaggaaaaacaagaacaagttaaaattgagtctctagccaagagcttagaagatgctctgaggcaaactgcaagtgtcactctgcaggctattgcagctcagaatgctgcggtccaggctgtcaatgcacactccaacatattgaaagccgccatggacaattctgagattgcaggcgagaagaaatctgctcagtggcgcacagtggagggtgcattgaaggaacgcagaaaggcagtagatgaagctgccgatgcccttctcaaagccaagtaattactcatggactttaacaaagaagagttagagaagatgaaaagtgtgattgaaaatgcaaagaaaaaagaggttgctggggccaagcctcatataactgctgcagagggtaaacttcacaacatgatagttgatctggataatgtggtcaaaaaggtccaagcagctcagtctgaggctaaggttgtatctcagtatcatgagctggtggtccaagctcgggatgactttaaacgagagctggacagtattactccagaagtccttcctggatggaaaggaatgagtgtttcagacttagctgacaagctctctactgatgatctgaactccctcattgctcatgcacatcgtcgtattgatcagctgaacagagagctggcagaacagaaggccaccgaaaagcagcacatcacgttagccttgggagaaacaaaagctgggaagaaaagcgggcatttggactctgcagtagcaaaagcatttaggaacattcacaggaagttgaaatacagggcttgaacaggacagaaaagatagaaggaagtcagagatgccatggaataatgaaatgagaacccagcttcgccgacaggcagctgcccacactgatcacttgcgagatgtccttagggtacaagaacaggaattgaagtctgaatttgagcagaacctgtctgagaaactctctgaacaagaattacaatttcgtcgtctcagtcaagagcaagttgacaactttactcctggatataaatactgcctatgccagactcagaggaatcgaacaggctgttcagagccatgcagttgctgaagaggaagccagaaaagcccaccaactctggctttcagtggaggcattaaagtacagcatgaagacctcatctgcagaaaccacttcttatcccgctgggtagtgcggttggaggccattcaaagccaactgttctgataatgaattcacccaagctttaaccgcagctattccctccagagtccctgacccgtggggtggtaacagtgaagagacccttaggagcccgttttctatgctgttcaaaaactgggcccgaagggtagcaatgattgatgaaaccagaaatagcttgtaccagtacttcctctcctacctacagtccctgctcctattcccacctcagcaactgaagccgcccccagagctctgccctgaggatataaacacatttaaattactgtcatatgcttcctattgcattgagcatggtgatctggagctagcagcaaagtttgtcaatcagctgaagggggaatccagacgagtgggcacaggactggctgaaggaagcccgtaattgaccctagaaacgaaacagatagttgggaaatcctgacagcatatgccagcgccgtaggaataggaaccactcaggtgcaggccagagtgaggtttaggaaggttttcaataagtcatttttcatgtcaaaggaaatcagcagtgatagatgaagggttcgcagcgagagtcccggacttgtctagaaatgagcaggtttacaagtactgttctaaatgttaacacctgttgcatttatattctttccatttgctatcatgtcagtgaacgccaggagtgctttctttgcaacttgtgtaacattttctgttttttcaggttttactgatgaggcttgtgaggccaatcaaaataatgtttgtgatctctactactgttgattttgccctcggagcaaactgaataaagcaacaagatg

SEQ ID NO: 15408 - DNA, 1215 bp, Homo sapiens
  SIMILAR (383)..(3): 991254mologous to Homo sapiens KIAA1563 protein,accession number AB046783,Smith-Waterman Score=627.
atgcctaaaaagagacaagcactggtggagtttgaagatgtgttgggggcttgcaacgcagtgaactacgcagccgacaaccaaatatacattgctggtcacccagcttttgtcaactactctaccagccagaagatctcccgccctggggactcggatgactcccggagcgtgaacagtgtgcttctctttaccatcctgaaccccatttattcgatcaccacgcctacacgcttgaatgtgttcaagaatgatcaggatacttgggactacacaaaccccaatctcagtggacaaggtgaccctggcagcaaccccaacaaacgccagaggcagccccctctcctgggagatcaccccgcagaatatggagggccccacggtgggtaccacagccattaccatgatgagggctacgggccccccccacctcactacgaagggagaaggatgggtccaccagtgggggagtatggccctcacgccgacagccctgtgatcatggtctatggcttggatcaatctaagatgaactgtgaccgagtcttcaatgtcttctgcttatatggcaatgtggagaaggtgaaaatttccttgaaaaagcaaagcccggggggccgtccaatgggtgaagaatggcttgaatggctacgctgtagaccgggccattacccacctcaacaacaacttcatgtttgggcagaagctgaatgtctggtaggtgctcaggctcgggagggcagcagaggtacaggggagagaaaaggaggggaatggggcccagcagaggagcacagtgaggccgaggtgttgactcacacagaaatgggatgtggcagtgtctccaagcagccagccatcatgcctggtcagtcatacgggttggaagacgggtcttgcagttacaaagacttcagtgaatcccggaacaatcggttctccaccccagagcaggcagccaagaaccgcatccagcaccccagcaacgtgctgcacttcttcaacgccccgctggaggtgaccgaggagaacttctttgagatctgcgatgagctgggagtgaagcggccatcttctgtgaaagtattctcaggcaaaagtgagcgcagctcctctggactgctggagtgggaatccaagagcgatgccctggagactctgggcttcctgaaccattaccagatgaaaaacccaagcatcaacctggtgacctaa

SEQ ID NO: 15409 - DNA, 648 bp, Homo sapiens; identical to SEQ ID NO: 14272
  SIMILAR (542)..(646): 571254mologous to Homo sapiens Fragment of human secreted protein encoded by gene 14,accession number Y14479,Smith-Waterman Score=90.

SEQ ID NO: 15410 - DNA, 677 bp, Homo sapiens; identical to SEQ ID NO: 14271
  SIMILAR (321)..(593): 851254mologous to Homo sapiens L protein (AA 1-558),accession number X16135,Smith-Waterman Score=390.

SEQ ID NO: 15411 - DNA, 2040 bp, Homo sapiens
  SIMILAR (804)..(1709): 991254mologous to Homo sapiens heterogeneous nuclear ribonucleoprotein L,accession number AB044547,Smith-Waterman Score= 1673.
ggacgagcagcggaggcggtcgggagcgatggtgaagatggcggcggcgggcggcggaggcggcggtggccgctactacggcggcggcagtgagggcggccgggcccctaagcggctcaagactgacaacgccggcgaccagcacggaggcggcggcggtggcggtggaggagccggggcggcgggcggcggcggcggtggggagaactacgatgacccgcacaaaacccctgcctccccagttgtccacatcaggggcctgattgacggtgtggtggaagcagaccttgtggaggccttgcaggagtttggacccatcagctatgtggtggtaatgcctaaaaagagacaattctctggtttagtttgaagatgtgttgggggctggcaacgcagtgagactacgcagccgacaaccaaatatacattgctggtcacccagcttcttgtcaactactctaccagccagaagatctcccgccctggggactcggatgactcccggaagcgtgaacaagtgtgcttctctttaccatcctgaaccccatttattcgatcaccacggatgttctttacactatcctgtaatccttgtggccctgtccagagaattgtcattttcaggaagaatggagttcaggcgatggtggaatttgactcagttcaaagtgcccagcgggccaaggcctctctcaatggggctgatatctattctggctgttgcactctgaagatcgaatacgcaaagcctacacgcttgaatgtgttcaagaatgatcaggatacttgggactacacaaaccccagatctcagtggacaaggtgaccctggcagcaaccccaacaaacgccagaggcagccccctctcctgggagatcaccccgcagaatatggagggccccacggtgggtaccacagccattaccatgatgagggctacgggccccccccacctcactacgaagggagaaggatgggtccaccagtggggggtcaccgtcggggcccaagtcgctacggcccccagtatgggcaccccccaccccctcccccaccacccgagtatggccctcacgccgacagccctgtgctcatggtctatggcttggatcaatctaagatgaacggtgaccgagtcttcaatgtcttctgcttatatggcaatgtggagaaggtgaaattcatgaaaagcaagccgggggccgccatggtggagatggctgatggctacgctgtagaccgggccattacccacctcaacaacaacttcatgtttgggcagaagctgaatgtctgtgtctccaagcagccagccatcatgcctggtcagtcatacgggttggaagacgggtcttgcagttacaaagacttcagtgaatcccggaacaatcggttctccaccccagagcaggcagccaagaaccgcatccagcaccccagcaacgtgctgcacttcttcaacgccccgctggaggtgaccgaggagaacttctttgagatctgcgatgagctgggagtgaagcggccatcttctgtgaaagtattctcaggcaaaagtgagcgcagctcctctggactgctggagtgggaatccaagagcgatgccctggagactctgggcttcctgaaccattaccagatgaaaaacccaaatggtccatacccttacactctgaagttgtgtttctccactgctcagcacgcctcctaattaggtgcctaggaagagtcccatctgagcaggaagacatttctctttcctttatgccattttttgtttttgttatttgcaaaagatcttgtattcctttttttttttttttttttttaaatgctaggtttgtagaggcttacttaaccttaatggaaacgctggaaatctgcagggggagggagaggggaactgttatctcccaagattaaccttcacttttaaaaaattattgtacatgtgatttttttttttcctgttcatacatttgtgctgcccatgtactcttggcacatttcaataaaattgtttggaaaataaacacagc

SEQ ID NO: 15412 - DNA, 528 bp, Homo sapiens
  SIMILAR (262)..(528): 911254mologous to Homo sapiens adenine nucleotide translocator-2,accession number M57424,Smith-Waterman Score=431.
aatcaccaaattagaaatgacttcacaatcagccccggagtcaaagccgattctcggaccagtcccatcccacagcagcctgcctcctctttcgacatcacagaggctgctgtgtccttcgccaaggactccctggcaggtggagtggccgcagccatctccaagatggcggtagcacccatcgagcgggtcaagctgttcccaaggagcacggagtcctgtcctggtgcggtaacctggccagtgtcatcagatacttcccccacccaggctcttaacttcaccttcaaagataaatacaagcagatcttcctggatggtgtggacaagagatcccagttttggcgctactttgcagggaatctggcatcaggcggtgccactggggccacatccttgtgttttgtgtaccctcttgattttgcccatactcgtgtagcagctgatgtgggcaaagctggagctgaaagggaattgcgaggtttcggtgactgcctagttaagatctacaaatctgacgggattaag

SEQ ID NO: 15413 - DNA, 1455 bp, Homo sapiens
  SIMILAR (5481)..(5750): 851254mologous to Rattus norvegicus DLG6 alpha,accession number AB030499,Smith-Waterman Score=415.
atgggacatctaatgtccctgatcattagggatccctccctctctctatgcgatcatgtaaatccagaaaacctgccccagagtcaaagccggttgccgaccctgtcccgtcccgcagtagcctgcctcctctttcctttcaacatgatagatgtcactgtgtcctttgccaaggacttcctgggagatggagtggccacagccatcttcaagatagcggtagcacccaccgtccaggtcaagctgctgatgcaggctctcaacttcgccttcaaagataaatacaagcagatcttcctgggtggggtggacaagaggacccagttttggctctactttgcagggaatctgacatcaggctgtgccgctggggccacatccttgtgttttgtgtaccctcttgattttgcccatactcgtctagcagccgatgttattatcatctaccgagctgcctacttcggtatctatgacactagaaatggaatgcttccggatcccaagaacactcacattgtcatcagctggatgatcgcacagactgtcagggctgttgctggattggcttcctatccacttgacacagttcgcccccgcatgatgatgcagtcagggtgcaaaggaactgacctcatgtacacaggcatgcttgactgctggaggaagattgctagtgatgaagggggcaaagcttttctcaagggtgcatggtccagtgttctcagaggcacagtccagattatcaagatgggagaatgtatgggaactatgagcagacactcagaaatagagacatcttttcctgaagcgaggagagcagaatgggaccaccaggatactcagctgatgaagaagctcatggctgtgcaagctcagcacaggccatttactgaggatccttccacacttaactccacagcagcccctctcccggacccctacttctgcagggggcagtatctagttctggcagagagctttttcagtcccattcagaagatctggaattcttgtccttcctccaggaaaaatgccattcctggacaactggaggcatgcagggtgtccatgccaagaggtgccctcaaccgccctccctgctccttactcccatcccacactcctcggcacccaaagtccagagggggccaagatggcagggggctgctccgcaaaacatgcagccattgctatgccctccctgctgcagcaggtgtctccacagcagctgctccagatgggccaccaccaccatcagtacctactgtagacaatgtctgtgttcttgctgtgtcttcacatgatcgtccctctgtctatgtctgtgtcctaaccccctcttcttataaggacacaggtcatactgaattagggtccacctcaatgacctcgtttagacctaattacatctttaaagaccctatctacaaatacagtcacattccgaggtactaa

SEQ ID NO: 15414 - DNA, 1251 bp, Homo sapiens
  SIMILAR (37)..(330): 641254mologous to Homo sapiens Similar to Human Na+/H+ exchanger 2 (A57644),accession number D87743,Smith-Waterman Score= 276.
ccgcagcgccggagtcaaagccggttcccggcccagtcccgtcctgcagcagtctgcctcctctttcaacatgacagatgccgctgtgtccttcgccaaggacttcctggcaggtggagtggccgcagccatctccaagacggcggtagcgcccatcgagcgggtcaagcttcttgctgcaggtgcagcaatgccagcaagcagatcgctgcagataagcaatacaaaggcattataggctgcgtggtccgtattcccaaggagcagggagttctgtctttctggcgcggtaacctggccaatgtcatcagatacttccccacccaggctcttaacttcgccttcaaagataaatacaagcagatcttcctgggtggtgtggacaagagaaccccagttttggcgctactttgcaaggaatctggcatcgggtggggccgcaggggccacatccctgtgttttgtgtaccctcttgattttgcccgtacccgtctagcagctgatgtgggtaaagctggagctgaaagggaattccgaggcctcggtgactgcctggttaagatctacaaatctgatgggattaagggcctgtaccaaggctttaacgtgtctgtgcagggtattatcatctaccgagccgcctacttcggtatctatggacactgcaaaggggaatgcttccggatcccaaggaacactcacatcgtcattcagctgggatgatcgcacagactgttcactgctgttgcccgggttgacttccctatccatttgacacccgttcggccgccggaatgaatgaatgcagtcagggcgcaaaaggaacttgacatcatgtacacaggcacgctttgactgctggcggaagattgctcgtgatgaaggaggcaaagcttttttcaagggtgcatggtccaatgtttctcagaggcatgggtggtgcttttggtgcttgtcttgtatgaatgaaaatccaagaagtacacataagttatttcctaggatttttccccctgtgaacaggcatgttgtattctataacacaatcttgagcattcttgacagactcctggctgtcagtttctcagtggcaactactttactggttgaaaatgggaagcaataatattcatctgaccagttttcctctaaagccatttccatgatgatgatgatgggactcaattgtattttttatttcagtcactcctgataaataacaaatttggagaaataaaaatatctaaaat

SEQ ID NO: 15415 - DNA, 613 bp, Homo sapiens
  SIMILAR (1)..(516): 641254mologous to Homo sapiens p40,accession number U93564,Smith-Waterman Score=539.
atggggaaaaaacagagcagaaaaaccggaaactctaaaaatcagagcacctctcctcctccaaagcaacgcagctcctcaccagcaacggaacaaagctggatggagaatgactttgacgagttgagagaagaaggcttcagaacatcaaactactccgagctaaaggaggaagttcgaacccatggtaaaaaagttaaaaactttgaaaaaaaattagatgaatggctaaccagaataagcaatgcagagaagtccttaaatgacctgatggagctgaaaaccacggcacgagaactatgtgacgaatgcacaagcctcagtagccgatgcaatcaactggaagaaagggtatcagcaatggaagacgaagtgaatgaaatgaatgtatctgaaagtgatggggagaatggaaccaagttggaaaacactctgcaggatattatccaggagaacttccccaatctagcaaggcaggccaacattcaaattcaggaaatacagacaacgacagaaagatactcctcaagaagagcaactccaagacacataattgtcagattcaccaaaattgaaatgaaggaaaatatgttaagggcagccagagagaaag

SEQ ID NO: 15416 - DNA, 1698 bp, Homo sapiens; identical to SEQ ID NO: 3745
  SIMILAR (712)..(1686): 911254mologous to Homo sapiens ORF2 contains a reverse transcriptase domain,accession number M80344,Smith-Waterman Score= 1540.

SEQ ID NO: 15417 - DNA, 723 bp, Homo sapiens; identical to SEQ ID NO: 11619
  SIMILAR (190)..(699): 801254mologous to Homo sapiens p40,accession number U93566,Smith-Waterman Score=663.

SEQ ID NO: 15418 - DNA, 3159 bp, Homo sapiens
  SIMILAR (2615)..(4474): 941254mologous to Homo sapiens putative p150,accession number U93572,Smith-Waterman Score=3044.
atgcaggaacaacagcaagcctccagcctgatcaggagcggcaatgggcgcctccctggatcaggagcacagcggacaccctgccatatccggagggatggaagtcagcggcgggtctgcgatgactgcaaacagcagtggtggaaggcaaaatacaacataccatctggcttgcatgcttgcactgcgactctagaagaaacccatattttagactcgggggcacatgtgcaagttttttacaagggtcaactgcatgtcatgagagttccatgtacagattattttgacacccagaagaaccccaacttgtcacacttacatggatctgtcatggcggaaacagcggttatcaatcacaagaaacgtaaaaatagcccgcgaatcgtccagtcaaacgacctcactgaggcggcatatagtctctcccgggatcaaaaacgtatgctgtatctgttcgttgaccagatcagaaaatctgatggcaccctacaggaacatgacggtatctgcgagatccatgttgctaaatatgctgaaatattcggattgacctctgcggaagccagtaaggatatacggcaggcattgaagagtttcgcggggaaggaagtggttttttatcgccctgaagaggatgccggcgatgaaaaaggctatgaatcttttccttggtttatcaaacgtgcgcacagtccatccagagggctttacagtgtacatatcaacccatatctcattcccttctttatcgggttacagaaccggtttacgcagtttcggcttagtgaaacaaaagaaatcaccaatccgtatgccatgcgtttatacgaatccctgtgtcagtatcgtaagcccgatggctcaagcatcgtctctctgaaaatcgactgggacatagaaccgtaccccgctggcctaaaagagcagattaagtctgatgttttcttgttaagttcctgtgtggaagttctccccaatgctgaaattgggttcttaaaatgtctagctattattggattatgggctgtttctctcttcagctacaataattgctttatatgtacaccggcgttcggtcgaagagtatctggtgtcatagaaattgccgatgggagtcgccgtcgtaaagctgctgcacttaccgaaagtgattatcgtgttctggttggcgagctggatgatgagcagatggctgcattatccagattgggtaacgattatcgcccaacaagtgcttatgaacgtggtcagcgttatgcaagccgattgcagaatgaatttgctggaaatatttctgcgctggctgatgcggaaaatatttcacgtaagattattacccgctgtatcaacaccgccaaattgcctaaatcagttgttgctcttttttctcaccccggtgaactatctgcccggtcaggtgatgcacttcaaaaagcctttacagataaagaggaattacttaagcagcaggcatctaaccttcatgagcagaaaaaagctggggccataaacacacaactggttgaaaccctgctctctgactctagaagaatccccgacttcatgtctaaaacaccaaaagcaatggtaacaaaagctaaaattgacaaatgggatctaattaaactaaagagcttctgcacagcaaaagaaactaccatcagagtgaacaggcaacctacagaatgggagaaaattttcgcaacctactcgtctgacaaagggctaatatccagaatctacaaagaactcaaacaaagttacaggaaaaaaacaaccctgtcaacaagtggtggccatgagaagtggagacgaaatctgaaactcaatgttgctctgctgatatggttttgctgtgaccccacccaaatttcatttttaattgtagctgccaaaattcccatgtcatgtgagggatctggtgggagaagaaaccccatgataaccaggcaaacaggatctggagtggacctccagcaaactccagcagacctgcagaagagggactttactggtagaaggaaaactaacaaacagaaaggaatagcaccaacatcaacaaaaattacgtccacatggaaacctcatccaaaggattgcaactcctcaccagcaagggaacaaaactggatggagaatgagtttgacaaattgacagaagtaggcttcagaaggtggacaataacaaactcctccaagctaaaggagcgtgttctaacccaatgcaaggaagcaacgaaccttgcaaaaaggttagagaaattgctaactagaataaccagtttagaaaagaacaaaaatgacctgatggagctgaaaaacacagcacaagaacttcgtgaagcatacaccagtatcagcggccgaatcaatcaagcagaacaaaggacatcagagattgaagatcaacttaatgaaataaagcgcagaggcgtctccgtgtgtccacaaccatcagaagacaccccgaggagtactgccagggtcccaaaggggatggtccccttccggccccgggtccccttggtcactccacccagagagaaaaaagaagctccttggcttgcatgccttcgcactagggctctaaggatcctcatagaccctccgagccaggtgtgggatatagtctcgtgtgatgcggagaatgaaaccaagttggaaaacactctgcaggatattatccaggagaacttccccaatctagcaaggcaggccaacgttcagattcaggaaatacagagaacgccacaaagatactcctcaagaagagcaactccaagacacataattgtcagattcaccaaagttgaaatgaaggaaaaaatgttaagggcagccagagagaaaggtcgggttaccctcaaagggaagcccatcagactaacagcggatctctcggcagaaaccctacaagccagaagagagtgggggccaatattcaacacccttaaagaaaagaattttcaacccagaatttcatatccagccaaaataagcttcataagtgaaggagaaataaaatactttacagacaagcaaatgctgagagattttgtcaccagcaggcctgccctagaagacctcctgaaggaagcgctaaacatggaaaggaacaaccggtaccagctgctgcaaaatcatgccaaaacgtaa

SEQ ID NO: 15419 - DNA, 882 bp, Homo sapiens
  SIMILAR (88)..(879): 721254mologous to Homo sapiens p40,accession number U93564,Smith-Waterman Score=927.
atggggaaaaaacagaacagaaaaactggaaactctaaaacgcagagcgtctctcctcctccaaaggaacgcagttcttcaccagcaacggaacaaagctggatggagaatgactttgacgagctgagagaagaaggcttcagacgatcaaattactctgagctatgggaggacattcaaaccaaaggcaaagaagttgaaaacttcgaaaaaaatttagaagaatgtataactagaataaccaatacagagaagtgcttaaaggagctgatggagctgaaaaccaaggctcgagaactacatgaagaatgcagaagcctcaggaaccgaccaaatctacgtctgattggtgtacctgaaagtgatggggagaatggaaccaagttggaaaacactctgcaggatattatccaggagaacttccccaatctagcaaggcaggccaacgttcagattcaggaaatacagagaacgccacaaagatactcctcgagaagagcaactccaagacacataattgtcagattcaccaaagttgaaatgaaggaaaaaatgttaagggcagccagagagaaaggtcgggttaccgtcaaagggaagcccatcagactaacagcggatctctcggcagaaaccctacaagccagaagagagtgggggccaatattcaacattcttaaagaaaacaattttcaacccagaatttcatacccagccaaactaagcttcataagtgaaggagaaataaaatactttacagacaagcaaatgctgagagattttgtcaccaccaggcctgccctaaaagagctcctgaaggaagcgctaaacatggaaaggaacaaccggtaccagccgctgcaaaatcatgccaaaatgtaa

SEQ ID NO: 15420 - DNA, 807 bp, Homo sapiens
  SIMILAR (4)..(795): 751254mologous to Homo sapiens p40,accession number U93569,Smith-Waterman Score=1034.
atggaacaaagctggatggagaatgactctgatgagttgacagacgaggatgttcgaacccattgcaaggaagctaaaaaacttgaagaaagattaaatgaatggctaactagaataaacagtgtagaaaagaacttaaacgacctgatggagctgaaaacgatggcacgagaacttcatgatgcttgcacaaccttcaatagccaattcaatcaaatggaagaaagggtatcagtgattgaagatcaaattaatgaaataaagcaagaagagaagtttagagaaaaaagagtaaaaagaaatgaacaaagcctccaagaaatatgggactatgtgaaaataccaaatctatgtctcattggtgtacctgcaagtgatggggagaatggaaccaagttggaaaacactctgcaggatattatccaggagaatttccccaacctagcaaggcaggctaacattcaaattcaggaaatacagagaacaccacaaagatactccttgagaagagcaaccccaagacacataattgtcagattcaccaaggttgaaatgaaggaaaaagtgttaagggcagccagagagaaaggtctagttactcacaaagggaagcccatcagactaacagcagatctctcagcagaaaccctacaagcaacaagagagtgggggccaatattcaacattcttaaagaaaagaattttcaacccagaatttcatatccagccaaactaagcttgataagtgaaggagaaataacatcctttacagacaagcaaatgctgagagatttttgtcaacactag

SEQ ID NO: 15421 - DNA, 1230 bp, Homo sapiens; identical to SEQ ID NO: 10212
  SIMILAR (1084)..(1776): 931254mologous to Homo sapiens Human hSK2 protein,accession number W63707,Smith-Waterman Score=1082.

SEQ ID NO: 15422 - DNA, 829 bp, Homo sapiens
  SIMILAR (251)..(826): 1001254mologous to Homo sapiens p40,accession number U93564,Smith-Waterman Score=981.
cccatatcatactgaatgggcaaaaactggaagcattccctttgaaaaccggcacaagacaaggacgctctttctcaccactcctattcaacatagtattgaaagttctggccagggaaatcagcaatcaggcccctcttccaaagggctgctgcgatttgctgggggtccactccactccttacttacctgggtccctcctgcacctggaggtatctccagtggaggctgcagaacagcgacaataaaacaagaaatatgggactatgtgaaaagaccaaatctacgtctgattggtgtacctgaaagtgatgtggagaatggaaccaagttggaaaacactctgcaggatattatccaggagaacttccccaatctagcaaggcaggccaacgttcagattcaggaaatacagagaacgccacaaagatactcctcgagaagagcaactccaagacacataattgtcagattcaccaaagttgaaatgaaggaaaaaatgttaagggcagccagagagaaaggtcgggttaccctcaaaggaaagcccatcagactaacagcggatctctcggcagaaaccctacaagccagaagagagtgggggccaatattcaacattcttaaagaaaagaattttcaacccagaatttcatatccagccaaactaagcttcataagcgaaggagaaataaaatactttatagacaagcaaatgttgagagattttgtcaccaccaggcctgccctaaaagagctcctgaaggaagcgctaaacatggaaaggaacaaccggtaccagccgctgcaaaatcatgccaaaatgtaa

SEQ ID NO: 15423 - DNA, 1014 bp, Homo sapiens; identical to SEQ ID NO: 11685
  SIMILAR (28)..(1065): 951254mologous to Homo sapiens N-acetylgalactosamine 4-O- sulfotransferase 2 GalNAc4ST-2,accession number AF239821,Smith- Waterman Score=1763.

SEQ ID NO: 15424 - DNA, 1725 bp, Homo sapiens
  SIMILAR (298)..(1119): 881254mologous to Homo sapiens p40,accession number U93570,Smith-Waterman Score=1237.
atgtggttgcaggcactctgcgcttgcagaaatgagctcctgaattcaacctcgcataaagctcttctgagaatgaatgtcacaacaacgacacatctagtagcaccaaatatgtgtcaggtcctgaatccagggctgctttcattcagttcaaatctggtagctgtctttagggtcacgcacactcctattagcacatttgaagaaggaaaactaacaaacagaaaggacatccacaccaaaaacccttctgtacgtcaccatcatcagagaccaaaagtagataaaaccacaaagatggggaaaaaacagagcagaaaaactggaaactgtaaaaagcagagtgcctctcctcctccaaaggaatgcagctcctcaccagcaatggaacaaagctggatggggaatgactttgacgagctgagagaagaaggcttcagacaatcaaactactccgagctacaggaggaaattcaaacaaatggcaaagaagttaaaaactttgaaaaaaaattagatgattggataactagaataaccaacacagagaagtccttaaaggagctaatggagctgaaagccaaggctcgagaattacttgaagaatgcagaagccccaggagccaatgtgatcaactggaagaaagggtatcagtaatggaagacgaaatgaatgaaatgaagcgagaagggaagtttagagaaaaaagaataaaaagaaatgaacaaatcctccaagaaatatgggactatgtgaaaaggccaaatctacatctgattggtgtacctgaaagtgacggggagaatggaaccaagttggaaaacactctgcaggatattatgcaggagaacttccccaatctagcaaggcaggccaacattcagattcaggaaatacagagaacgccacaaagatactccttgagaagagcaactccaagacacataattgtcagattcaccaaagttgaaatgaaggaaaaaatgttaagggcagccagagagaaaggtcaggttacccacaaagggaagcccatcagactaacagcagatctcttcgcagaaactctacaagccagaagagagtgggggccaatattcaacattcttaaagaaaagatggggaaaaaacagagcagaaaaactggaaactgtaaaaagcagagcgcctctcctcctccaaaggaatgcagctcctcaccagcaatggaacaaagctggatgtggaatgactttgacgagctgagagaagaaggcttcagacgatcaaactactctgagctacaggaggaaattcaaacaaatggcaaagaagttaaaaactttgaaaaaaaattagatgattggataactagaataaccaacgcagagaagtccttaaaggagctaatggagctgaaagccaaggctcgagaattacgtgaagaatgcagaagccccaggagccaatgtgatcaactggaagaaagggtatcagtaatggaagacgaaatgaatgaaatgaagcgcgaagggaagtttagagaaaaaagaataaaacccagaatttcatatccagccgaactaagcttcataagtgaaggagaaataaaatactttacagacaaccaaatgctgagagattttgtcaccaccaggtctgccctaaaagagctcctgaaggaagcactaaacatggaaaggaacaaccggtaccagccactgcaaaaacatgccaaaatgtaa

SEQ ID NO: 15425 - DNA, 780 bp, Homo sapiens; identical to SEQ ID NO: 11686
  SIMILAR (223)..(777): 931254mologous to Homo sapiens p40,accession number U93569,Smith-Waterman Score=870.

SEQ ID NO: 15426 - DNA, 2715 bp, Homo sapiens
  SIMILAR (1690)..(2196): 971254mologous to Homo sapiens Human hSK2 protein,accession number W63707,Smith-Waterman Score=839.
gtgggaccctcaaaggaacagggatgccctgagttctctgagtacttcccgttgcacatggataagaaatacagagcagtcagtggaatccctatatgtggaaactacagatacagaaagctgtctctatgtcagatggcgatgaaagctaaagagaaaaataaaaccagaaaggggaaaggggagctgcaagttgaatacgtggtcaaggaaggccttgctaagaaggtgccacttgagcaaagaccagaaggagttgagggccaacacatgcatgcaccaccagggagcctgaggatagagccacctggcctggctctgcactgccagtgcctgagcacattgtctggggacctggggaccacccagctcaatccaccaccattgacacttgagcactcctcccaggggcctgaagttgggcccaccaaacctgctgctaccaccacagcaggcacccccccttgggcctgggggttgaactacccgatgaaagacctctataagaaaaactgcaaaacactgataaaagaaattgaagaggacacaaatggaaagatatcccatgctcatggattagaagaattaatattgttaaatacccatactgcccaaagcaatctacagattcaaagtaatctgtatgaaagtaccaacataatttttcacagaaatagaaaaaacaatcttacaattcatatggaaccaaagagagccagaatagacacagcaatcctgagcaaaaagaacaaagttggagacatcccactacctggaatcaaaacatattacaaggctatagtaagcaaaacagcatggtatgcatttcagattttgaatggatctccttgtctggcgttaattgacagtgaaagcccggttttcaaagccaaggtacaagcactgaagcccagcaaacatatcacatttccttggctctattatcaacaacacaaccacacctacgggacctgcgagctaaagcagctctactcagggagaagctcacaggctttggaatcacagatgctgcccaaagatcggcagatggaaaggaacaccctgcccccagtggacacaggcccaccctcgaggactgtgggggcatcctgttcctcctctacttcaggtgaagatgccggcaagaaactgtttcctggacacacattttgcgagcaccccgaggattccagcgacgtggttaagccgccgggaagaccacgaagagcttttccaatatcatccgaggctttgtgggagagcgaatgtcgagcccgaacttcatattcttcccaacattttgagaaaagttgtgatgttgtcaataaagcaagaaacgcacagagtgagaattatcttgagtgcccagcgcagaacaggaagtcaagaagtgggagctattcacactatgactacactgcatgccactcccatctttctgaggccagtcccctcacactagccacagttcctttggagaatccttctgggattgaaggtggacagttgagaaatgactctcaaaagactctggatggatccaaagagcatattaatttaactaacggtattccaacagacctgcagccgagggtcctgtctgttagaaggaaaactaacaaacagaaggacttcacactgaaaacccatctgtacatcaccatctcaaagaccaaaagtagaataaacccccagagatggggaaaaaaccgaacaaaaaaaatgggaaactctaaaacgcagagcacctttcctcctccaaaggaacgcagttcctcaccagcaacggaacaaagctggatggagaatgattttgacgagctgagagaggaaggcttcagacaatcaaattactctgagctacgggaggacattcaaaccaaaggcaaagaagttgaaaactttgaaaaaaatttagaagaatgtataactagaataaccaatacagagaagtgcttaaaggagctgatggagctgaaaaccaaggctcgagaactacgtgaagaatgcagaagcctcaggaaccgatgcgatcaactggaagaaagggtatcagcaatggaagatgaaatgaatgaaatgaagcaagaagggaagtttagagaaaaaagaataaaaagaaatgagcaaagcctccaagaaatatgggactatgtgaaaagaccaaatctacgtctgattggtgtacctgaaagtgatgcggagaatggaaccacgttggaaaacactctgcaggatattatccaggagaacttccccaatctagcaaggcaggccaacattcagattcaggaaatacagagaacgccacaaagatactcctcgagaagagcaactccaagacacataattgtcagattcaccaaagttgaaatgaaggaaaaaatgttaaggacagccagagagaaaggtcgggttaccctcaaagggaagcccatcagactaacagcggatctcttggcagaaaccctacaagccagaagagactgggggccaatattcaacattcttaaagaaaagaattgtcaacccagaatttcatatccagccaaactaagcttcataagtgaaggagaaataaaatactttacagacaagcaaatgctgagagattttgtcaccaccaggcctgccctaaaagagctcctgaaggaagcgctaaacatggaaaggaacaacaggtaccagccgctgcaaaatcatgccaaaatgtaa

SEQ ID NO: 15427 - DNA, 855 bp, Homo sapiens
  SIMILAR (88)..(852): 771254mologous to Homo sapiens p40,accession number U93569,Smith-Waterman Score=970.
atgctcaatgtccttcaatgcgttggatgcccaccaccccccaacaaggccccgggcatagctgaacaaaaggcagcagataacttctgcagacttaaacgtctccgtctgaaagctctgaagagagcagtggttctcccagcatggcgtttaagctctgagaacggacagactgcctccacaaaaagggtatcagtgattgaagatcaaattaatgaaataaagccagaagacaaggttagagaaaaaagagtaaaaagaaatgaacaaagcctccaagaaatatgggactatgtgagaacaccaaatctatgtttgattggtgtacctgaaagtgatggggagaatggaaccacgttggaaaacactcttcagtatattatccaggagaacttccccaacctagcaaggcaggccaacattcaaattcaggaaatacagagaacaccacaaacatactcctcaagaagagcaaccccaagacacataattgtccgattcaccaaggttgaaatgaaggaaaaagtgttaagggcagccagagagaagggtcgagttacccacaaagggaagccaatcagagtaacagcagatctcttggcagaaaccctgcaagccagaagagagtgggggccaatattcaacattcttaaagaaaagaatattcaacccagaatttcatatccagccaaactaagcttcacaagtgaaggagaaataaaatcctttacagacaagcaaatgctgggagattttgtcaccaccaagcctgcctcacaagagctcctgaaggaagcactaaacacggaaagaaacaaccagtaccagccgctgcaaaaacatgccaaattgtaa

SEQ ID NO: 15428 - DNA, 1266 bp, Homo sapiens; identical to SEQ ID NO: 12888
  SIMILAR (727)..(1263): 971254mologous to Homo sapiens p40,accession number U93569,Smith-Waterman Score=873.

SEQ ID NO: 15429 - DNA, 1140 bp, Homo sapiens
  SIMILAR (445)..(1125): 961254mologous to Homo sapiens bG120K12.3.1 (novel protein similar to archaeal, yeast and worm N2,N2-dimethylguanosine tRNA methyltransferase (isoform 1)),accession number AL109865,Smith- Waterman Score=1119.
ggaaacagctatgaccatgattacgaattcgagctcggtacccttctccttggcggtcttgccgatgtcggccttgctgtcggccagggccagcaggaagagttcgccggcaatgaactgggattttgccgatttcggaaccaccatcaaacaggattttcgcctgctggggcaaaccagcgtggaccgcttgctgcaactctctcagggccaggcggtgaagggcaatcagctgttgcccgtctcactggtgaaaagaaaaaccaccctggcgcccaatacgcaaaccgcctctccccgcgcgttggccgattcattaatgcagctggcacgacaggtttcccgactggaaagcgggcagtgagcgcaacgcaattaatggattttgccgatttcggaaccaccatcaaacaggattttcgcctgctggggcaaaccagcgtggaccgcttgctgcaactctctcagggccaggcggtgaagggcaatcagctgttgcccgtctcactggtgaaaagaaaaaccaccctggcgcccaatacgcaaaccgcctctccccgcgcgttggccgattcattaatgcagctggcacgacaggtttcccgactggaaagcgggcatgatgtggagaatggaaccaagttggaaaacactctgcaggatattatccaggagaacttccccaatctagcaaggcaggccaacgttcagattcaggaaatacagagaacgccacaaagatactcctcgagaagagcaactccaagacacataattgtcagattcaccaaagttgaaatgaaggaaaaaatgttaagggcagccagagagaaaggtcgggttaccctcaaaggaaagcccatcagactaacagcggatctctcggcagaaaccctacaagccagaagagagtgggggccaatattcaacattcttaaagaaaagaattttcaacccagaatttcatatccagccaaactaagcttcataagtgaaggagaaataaaatactttatagacaagcaaatgctgagagattttgtcaccaccaggcctgccctaaaagagctcctgaaggaagcgctaaacatggaaaggaacaaccggtaccagccgctgcaaaatcatgccaaaatgtaa

SEQ ID NO: 15430 - DNA, 1581 bp, Homo sapiens
  SIMILAR (1594)..(1965): 881254mologous to Homo sapiens bG120K12.3.1 (novel protein similar to archaeal, yeast and worm N2,N2-dimethylguanosine tRNA methyltransferase (isoform 1)),accession number AL109865,Smith- Waterman Score=538.
atgcccatggagccttactcgctgctaacgcagcagtctaagattgacctgggatgccggagcttggaacacaactcctcgccagcaagggaacaaaactggatggataacgagtttgacaagttgaccgaagtaggcttcaaaggccgccaattcgatcggctggaagaaaggatatcagtgattgaagatcgaattagtgaaacaaagcaagaagacaagattagagaaaaaagagtgaaaagaaacaaacaacacctccaagaaatatgggactatgtgaaaagaccaaatctacgtctgattggtgtacctgaaagtggcggggataatggaaccaagttggaaaacactcttcagggtattatccaggagaacttccccaacctagcaagacaggccaacattcacattcaggaaatacagagaacaccacaaagatactcctcgagaagagcaaccccaagacacataattgtcagattcaccaaggttgaaatgaaggaaaaaatgttaagggcagccagagagaaaggtcaggtcacccacaaagggaggcctatcagactgacagcaggtctctctgcagaaaccctacaagccagaagagagtgggggccaatattcaacattcttaaagaaaagaattttcaacccagaatttcatatccagtcaaactaagcttcataagtaaaggagaaataaaattctttacagacaagcaaatgctgagagatttcatcaccatcaggcctgcattacaagagctcctgaaggaagcactagacgtggataggaacaactggacagttacagaaagggaactgcaggaaggtagcaccttccaacaaatgcagcaattccaacaattccttgggctcctagaagacttctctcatacaggctttcaaccagcccccatccctaatcctcccatcagcatagaaccctatgacaatggcctgggagaaggcttggcccagctggcctcagaggaatctgcagcaccttgtccaaagacagacattttacaatttccattcactggagtagctggtgaccagcagagggcattgcaaatggcagcatgtggtgattgcctcagtaccttttttgactccctgtgcctcattgactctgacccagtaggaagtcatggactcagtactctgtctgtagcttgctcaacccatgattcctcaatggcccagaagccaagtttgttccgcattcagtatactctcttgattacaataaagtattatgagcctctttccttttggagagactggaaaagtgaagagacacaggtatggaaaggtgaattagaggaagaaacctactatgaactagcaggaataaagatcatccaaatgagaaatgccattgaggagttattcagagcttactctagaaagggagtcagccaccagcacttgcgctgtggcagagactcaaacacaggcacaagagtgggaagtgcctgtcattctgtgcagataagtgaaaagaaggatggggaaaggctttttgataagattgggcatggagtaacaaaaccgtgggctttcatcagctga

SEQ ID NO: 15431 - DNA, 1659 bp, Homo sapiens
  SIMILAR (19)..(204): 1001254mologous to Homo sapiens WD40 repeat domain 11 protein,accession number AF320223,Smith-Waterman Score=317.
atgaggcatgcagacatatcaaaaggccatctgcaaactgagaaagaaaccagtagtgtctcagtccaagtccaaaagcctcaaaagcgggaagccaacagtgcagctgtcagtctgcagccaaaggcccaagagaccctgaaaaaccacagccctagaggcaggaggagcccaaagtgtccaggtggcaatcataacttccagttgaatggaatcattgttgtgtattctggtggcagtgttccttcctttggaactaagacctctgggccagcagaacataatgccatgggaacaggaagcaaaagtcttgctagtgggtcactaggggtgatgttgcttcaggatgatggggagcatggtaataccacagtgaataccataagcatgggcccactgctgaacttctttagccataaaggcacagacaaacaaaaagacagcaataacctctgcagacttaagtgtccctgtctgacagctttgaagagagcagtggttctcccagcacgcagctggagatctgagaacgggcagactgcctcctcaaaaggaaaactaacaaccagaaaggacatctacaccgaaaacccatctgtacatcaccatcatcaaagaccaaaagtagataaaaccacaaagatggggaaaaaacagaacagaaaaactggaaactctaaaacgcagagcgcctctcctcctccaaaggaacgcagttcctcactagcaacagaacaaagctggatggagaatgattttgacgagctgagagaagaaggcttcagacgatcaaattactctgagctacgggaggacattcaaaccaaaggcaaagaagttgaaaactttgaaaaaaatttagaagaatgtataactagaataaccaatacagagaagtgcttaaaggagctgatggagctgaaaaccaaggctcgagaactacgtgaagaatgcagaagcctcaggagccgatgcgatcaactggaagaaagggtatcagcaatggaagatgaaatgaatgaaatgaagcgagaagggaagtttagagaaaaaagaataaaaagaaatgagcaaagcctccaagaaatatgggactatgtgaaaagaccaaatctacgtctgattggtgtacctgaaagtgatgtggagaatggaaccaagttggaaaacactctgcaggatattatccaggagaacttccccaatctagcaaggcaggccaacgttcagattcaggaaatacagagaacgccacaaagatactcctcgagaagagcaactccaagacacatacttgtcagattcaccaaagttgaaatgaaggaaaaaatgttaagggcagccagagagaaaggtcaggttaccctcaaaggaaagcccatcagactaacagcggatctctcggcagaaaccctacaagccagaagagagtgggggccaatattcaacattcttaaagaaaagaattttcaacccagaatttcatatccagccaaactaagcttcataagtgaaggagaaataaaatactttatagacaagcaaatgctgagagattttgtcaccaccaggcctgccctaaaagagctcctgaaggaatcactaaacatggaaaggaacaaccggtaccagccgctgcaaaatcatgccaaaatgtaa

SEQ ID NO: 15432 - DNA, 1120 bp, Homo sapiens
  SIMILAR (232)..(321): 701254mologous to Homo sapiens Human breast tumour-associated protein 43,accession number Y48498,Smith-Waterman Score=97.
atgccgttaaacaagaaacagtctgtgaccacacggtccaatcttggagacagaaaacatgataactgtgttcgaaatcgctttgtcacatctgcagaatgctgggagagagtttcttcagcatattcaacatgtcatggctattcaatagagtgcagtgaggtgaatgaacctctaggcttctccggcaacacaattctgtctgcccagcagcctcccacccacgctgcctctggcaccgatacctgtgcccgggaccagctgaaaaccaaggctcgagaactacgtgaagaatgcagaagcctcaggagccgatgcgatcaactggaagaaagggtatcagcaatggaagatgaaatgaatgaaatgaagcgagaagggaagtatagagaaaaaagaataaaaagaaatgagcaaagcctccaagaaatatgggactatgtgaaaagaccaaatctacgtctgattggtgtacctgaaagtgatgcggagaatggaaccaagttggaaaacactctgcaggatattatccaggagaacttccccaatctagcaaggcaggccaacattcagattcaggaaatacagagaacgccacaaagatgctcctcgagaagagcaactccaagacacataattgtcagattcaccaaagttgaaatgaaggaaaaaatgttaagggcagccagagagaaaggtcgggttaccctcaaagggaagcccatcagactaacagcggatctctcggcagaaaccctacaagccagaagagagtgggggccaatattcaacattcttaaagaaaagaattttcaacccagaatttcatatccagccaaactaagcttcataagtgaaggagaaataaaatactttacagacaagcaaatgctgaccgattttgtcaccatcaggcctggcctaaaagaactcctgaaggaagcactaaacatggaaaggaacagctgggcaaagtgttcccatgcagggttatgccacacgtttccattcgagcagatggcagaaaggtttgtctgcaatgtggaacttgttaagggggaaggccttcctgatagagatcaagaaggccgctttaatttacttagtggtgggatggttt

SEQ ID NO: 15433 - DNA, 1686 bp, Homo sapiens
  SIMILAR (202)..(585): 861254mologous to Homo sapiens laminin-binding protein,accession number J03799,Smith-Waterman Score=563.
atgaggaatggcgcactacagtccaggtactacgctgttcccatggtctccacaacccacagaccaggaaattccctccagtgcctatgtttctggaattggtgggttcttggtctcactgacttcaagaatgaagccgtggaccctcacgcccttgggtggtcgataggactgggcaccatggagcagggggcagcactcattggggaggcttgggctgcacaggagcccatggagagcgggggagactcaggcatggtgggctgcaggtcccgagccctgccccatgggaaggcagctaaggcccggcgagaaatccagcgcagtgccactgagggagccagctctggccttggccagcccagaaaggggctcccacagtgcagcagtgggctgaagggctcctcaagtgccaccaaagtgggagcccagggagaggaggcgccgagagggagtgagagctgtgaaggctgccagcatgctgtcacctctcacctacgccacaagggccctgggtttcaagcacaaaactgggaggccttttgggcagacaccgagctagctgcaggagtttctgtcataccccagtggcgcctggaaagccaggcatctctgaaagaaaagcagcagctccagtctggagcttatagatcaaactcctatctcccagggacagcacctaggggaaggagtggctgtgggtgcagcttcagcagacttaaacactcctgcctgccagcactgaagagagcagcagatcctgcagcacagcactcgagctctgctaagggacagactgcctcctcaagtggatcactgacccctgtgcctcctgactgggagacactttccagcaggggtcaacagacacctcatagagaagagctacaactggcatgtggcaggtgcccccctgggattaagcttccagaaacaggaacaggcagcaatctctgcttttctgcagcctccactgaaaggaatagcatcaacatcaaccaaaaggatttccacacagaaactccatccgaacttcaccaacatcaaagaccaaagaccacagagataaggaaaaaccagtgcaaaaaggccgaaaattccaaaatccagaagacctcttctcctccaaaggatcacaactcctcgccagcaagggaacaaaactggatggagaatgagtttgacgaattgatagcagtaggcttcagaagatgggtaacaaactcctctgagctaaaagagcatgttctaacccaaggcaaggaagctgagaaccttgaaaaaaggttagaggaaatgttaactagaatagccagtttagaaaagaacataaacgacctgaccaagttggaaaacactcttcaggatattatccaggagaacttccccaatctagcaagacaggccaacattcaaattcaggaaatacagagaacaccacaaagatactcctcaagaagagcaaccccaagacatataatcgtcagattcaccaaggttgaaatggagaaaaaaaatgttaaggacagccagagagaaaggtcaagttacccacaaagggaagcccatcagactaacagcagatctctctgcagaaaccctacaaaccaaagagagtggaggccaatactcaacattcttaaagagaagaattttcaacccagaatttcaacccagccaaactaa

SEQ ID NO: 15434 - DNA, 1640 bp, Homo sapiens
  SIMILAR (289)..(1446): 641254mologous to Homo sapiens Human secreted protein dx138_4,accession number Y05323,Smith-Waterman Score=1195.
atgagggctgagtacacaaagcgatctattcacatctttggacttcaagagaatcatattgtgtccggaattggtgggttcttggtctcaccaacttcaagaatgaagccgcggacccttgcactagacctaaaggttctccaagtccccaccagagtcaggagcccagctggcttcactcagtggatccggcacctggccgcaggtggagctgcctgccagtcccgcgcccccttgggtggtcgatgggactgggcgctgtcgagcaggggacgccgctcgtcggggaggctcggccgcacaggagcccacggaggcggaggggatgctcatgcttggtgggctgttggttccgagccctgtcccgcgggaaggcttctcaggctcggcgagaaattgagcacagcagctgctggcccaggtggtgatgatagtaataataatagttgctgtcggggacgtgacagctggctggtggtgttcataatgaaagttcaccttcccgccacctcccctagagccaagaagatcatggttatcacagtctcaggccatttttctttgggctcctttaccaagacagtcataggtaaagaaagtgacagggtgaacagtcttcagtcactaaagctaaagaaatccaatcttcctaacttaaccaaccccagatttacgagaagggaagagaaaggggagaagggtgctcaggaacggatagatagcttgcgtcgaactggggtgatccatgaaaaacagacagctgtgtcagtagaaaacttcattgcagaattgctgcctgacaaaataaccaatacagagaagtgcttaaaggagctgatgaagctgaaagccaaggctcgagaactacatgaagaatgcagaagcctcaggagccgacgcgatcaactggaagaaagggtatcagtgatggaagatgaaatgaatgaaatgaagcgagaagggaagtttagagaaaaaagaataaaaagaaacgaacaaagcctccaagaaatatgggactatgtgaaaagaccaaatctacgtctgactggtgtacctgaaagcgacggggagaatggaaccaagttggaaaacactctgcaggatattatccaggagaacttccccaatctagcaaggcaggccaacattcagattcaggaaatacagagaatgccacaaagatactcctcgagaagagcaactccaagacacataattatcagattcaccaaagttgaaatgaaggaaaaaatgttaagggcagccagagagaaaggtcgggttacccacaaagggaagcccatgagactaacagcagatctctcggcagaaactctacaagccagaagagagtgggggccaatattcaacattcttaaagaaaagaattttcaacccagaatttcatatccagccaaactaagttttgtaagtgaaggagaaataaaatactttacagacaagcaaatgctgagagattttgtcaccaccaggcctgccctaaaagagctcctgaaggaagcactgaacatggaaaggaacaactggtaccagctgctgcaaaatcatgccaaaatgtaaagaccatcgaaactaggaagaaactgcatcaactaatgagaaaaataaccagctaa

SEQ ID NO: 15435 - DNA, 374 bp, Homo sapiens
  SIMILAR (170)..(313): 521254mologous to Homo sapiens Human secreted protein sequence encoded by gene 11 SEQ ID NO:72,accession number B24447,Smith-Waterman Score=117.
  misc_feature (1)...(374): n = a,t,c or g
ggggttggggaactccctcttcaatccaagggaagccattagggactgtgccatgcactttggcacagagattgcgcttttcccatggtcttcacaacccacagacccagaggattccctcaggtgcctacaccaccagggccctgggtttcaagcacaaaactgggcggccatttgggcagacactgagctagccgcaggagnnnnnnnnnnnnnnnnnnnnnnnnnnnnnnnnnnnnnnncatacgccagtggcgcctggaacaccagcaagacaaaaatgttcgctcccctggaaagggggctgaagccaagtagtctggctcggtgggtcccacccccacagagctgagcaagttaagatccactggctt

SEQ ID NO: 15436 - DNA, 1035 bp, Homo sapiens
  SIMILAR (638)..(787): 361254mologous to Mus musculus mutant T-cell surface glycoprotein CD4,accession number U75219,Smith-Waterman Score=71.
atggggaaaaaacagaacagaaaaactggaaactctaaaatgcagagcgcctctcctcctccaaaggaacgcagttcctcaccagcaacagaacaaagctggatggagaatgattttgacgagctgagagaagaaggcttcagacgatcaaattactctgagctacgggaggacattcaaaccaaaggcaaagaagttgaaaactttgaaaaaaatttagaagaatgtataactagaataaccaatacagagaagtgcttaaaggagctgatggagctgaaaaccaaggctcgagaactacaaagggtatcagcgatggaagatgaaatgaatgaaatgaagcgagaagggaagtttagagaaaaaagaataaaaagaaatgagcaaagcctccaagaaatatgggactatgtgaaaagaccaaatctacgtctgattggtgtacctgaaagtgatggggagaatggaaccaagttggaaaacactctgcaggatattatccaggagaacttccccaatctagcaaggcaggccaacattcagattcaggaaatactgagaataccacaaagatactcctcgagaagagcaactccaagacacataattgtcagattcaccaaagttgaaatgaaggaaaaaatgttaagggcagccagagagaaaggtcgggttaccctcaaagggaagcccatcagactaacagtggatctctcggcagaaaccctacaagccagaagagagtgggggccaatattcaacattcttaaagaaaagaattttcaacccagaatttcatatccagccaaactaagcttcataagtgaaggagaaataaaatactttacagacaagcaaatgctgagagatttttgtcaccaccaggcctgccctacaagagctcctgaaggaagcgctaaacatggaaaggaacaaccggtaccagccgctgcaaaatcatgccaaaatgtaaagaccatcgagactaggaagaaactgcatcaactaacgagcaaaatcaccagctaacatcat

SEQ ID NO: 15437 - DNA, 7468 bp, Homo sapiens
  SIMILAR (229)..(354): 901254mologous to Homo sapiens beta-catenin-interacting protein ICAT,accession number AB021262,Smith-Waterman Score=185.
atggggaaaaaacagagcagaaaaactggaaactctaaaaatcagagcgcctctcctcctccaaaggaacgcagctcctcaccagcaatggaacaaagctggatggagaatgactttgacgacttgagagaagaaggcttcagacaatcaaactactctgagctaaaggaggaagttcgaacccatggcaaagaagttaaaaaccttgaaaaaaaattagacgaatggctaactagaataaccaatgcagagaagtccttaaaggacctgatggagctgaaaaccacagcccgagaactacatgatgaatgcacaagcctcaaaagggtatcagtgacggaagatcaaatgaatgaaatgaagcgagaagagaagtttagagaaaaaagaataaaaagaaatgaacaaagcctccaagaaatatgggactatgtgaaaagaccaaatctacacctgattggtgtacctgaaagtgacggggagaatggaaccaagttggaaaacactctgcaggatattatccaagagaacttccccaatctagtaaggcaggccaacattcaaattcaggaaatacagagaacgccacaaagatactcctcgagaagagcaactccaagacacataattgtcagattcaccaaagttgaaatgaaggaaaaaatgttaagggcagccagagagaaaggtcgggttacccacaaagggaagcccatcagactaacagctgatctcttggcagaaactctacaagccagaagagagtgggggccaatattcaacattcttaaagaaaagaattttcaacccagaatttcatatccagccaaactaagcttcatagacagatcaacgagacagaaagttaacaaggatacccaggaattgaactcagctctgcaccaagcggacctaatagacatctacagaactctccaccccaaatcaacagaatatacattcttttcagcaccacaccacacctattccaaaattgaccacatagttggaagtaaagcactcctcagcaaatgtaaaagaacagaaattataacaaactgtctctcggaccacagcgcaatcaaactagaactcaggattaagaaactcactcgagaccactcaactacatggaaactgaacaacctgcttctgaatgactactgggtacataatgaaatgaaggcagaaataaagatgttctttgaaaccaacgagaacaaagacaaaacataccagaatctctgggacacattcaaaacagtgtgtagagggaaatttatagcactaaatgcccacaagagaaagcaggaaagatctaaaattgacaccctaacatcacaattaaaaggacttgagaagcaagagcaaacacattcaaaagctagcagaaggcaagaaataactaagatcagagcagaactgaaggaaatagagacacaaaaaacccttcaaaaaatcaacgaatccaggagctggttttttgaaaagatcaacaaaattgatagaccgctagcaagactaataaagaataaaagagaggagaatcaaatagacgcaataaaaaatgataaaggggatatcaccactgatcccacagaaatacaaactgccatcagcgaatactataaacacctctacgcaaataaactggaaaatctagaagaaatggataaattcctcgacacctacaccctcccaagactaaaccaggaagaagttgaatctctgaatagaccaataacaggctctgaaattgaggcaataattaatagcttaccaaccaaaaaaagtccaggaccagatggattcatggccgaattctaccagagggacaaggaggagctggtaccattccttctgaaactgttccaatcaatagaaaaagagggaatcctccctaactcattttatgaggccagcatcatgctgataccaaagcctggcagagacacaacaaaaaaagagaattttagaccaatatccctgatgaacatcgatgcaaaaatcctcaataaaatactggcaaaccgaatccagcagcacatcaaaaagcttatccaccatgatcaagtgggcttcatccctgggatgcaaggctggttcaacttacgcaaatcactaaacgtaatccagcatataaacagaaccaatgacaaaaaccacatgattatctcaatagatgcagaaaaggcctttgacaaaattcaacagcccttcatgctaaaaactctcaataaattaggtattgatgggatgtatctcaaaataataagagctatctatgacagacccacagccaatatcatactgaatgggcaaaaactggaagcattccctttgaaaactggcacaagacagggatgccctctctcaccactcctattcaatatagtgttggaagttctggccagggcaatcaggcaggagaaggaaataaagggtattcaattaggaaaagaggaagtcaaattgtccctgtttgcagatgacatgactgtatatttagaaaacgccatcgtctcagccccaaatctccttaagctgataggcaacttcagcaaagtctcaggatacaaaatcaatgtgcaaaaatcacaagcattcttatacactaataacagacaaacagagagccaaatcatgagtgaactcccattcagaattgcttcaaagagaataaaatacctaggaatccaacttacaagggatgtgaaggacctcttcaagcagaactacaaaccactgctcaatgaaataaaagaggatacaaacaaatggaagaacattccatgctcatgggtaggaagaatcaatatcgtgaaaatggccatactgcccaagaaatacaaaagatcctcagagactactatgaacacctctatacactcaaactagaaaatctagaggaaatggatgaatttctggaaacacacaacctcccaagcttcctaacattccttgggaatccacgtctgcccagctttcaggctgcaggtccacaagtccaggtgaattttctcccttgccagcgcccaggattccatggggtacagtcctgtccaatcagaacattgcattctcttggccactatgattggctcagagatgaccatgtgactcgatcaaatctgaccctaagaattttgctagaaagaccaagaagaaaagcaccattttaccctctagattttccaagaagttatgatgcaggcctagagctgttggtgccatcatgtcaccacaagggacagcctgcttggaaatggagccaacgcagaggagaatctaatactgttgctgatctgacaggaggcagtgctcaggcagtcacgttcgctcacccaccactcacttcctgccatgtggcccagttcctaacaggctacgaaccagtactagtccacggcctgggggtctgggattcctgctatatacaatatattactacaactgaagttagatgtggccacgtggcagagttccacccaatggcatgtggaggaagtgacctaactctaaaggagcagctgttctttttccatattctttcccattcagcggacaggaaaaaaatgatgatgagaccccgggcttacagacatgcctgctggaaacgctttggtacattttggatgttccagggatcatatccaaatgctgaaaatggtctccaaagctctacgggtaagtcaagctatggcgaaaatggagaaatctacaaagaaggaaaactaacaaccagaaaggacatctacaccgaaaacccatctgtacatcaccatcatcaaagaccaaaagtagataaaaccacaaagatggggaaaaaacagaacagaaaaactggaaactctaaaacgcagagcgcctcttctcctcctccaaaggaacgcagttcctcaccagcaacggaacaaagctggatggagaatgactttgacgagctgagagaagaaggcttcagaaggtcggtaataacaaacttctcagagctaaaggagcatgttgtaacccatcgcaaggaagctaaaaatcttgaaaaaaaaattagacgaatggctaactagaataaccaatgcagagaagtccttaaaggacctgatggagctgcaaaaccatggcatgagaactttgtgatgcatgcacaagcttcaatagctgattcgatcaagtggaacaaagagtatcagtgattgaagatcaaattaatgaaataaagtgagaagacaaggttagagaaaaaagaatgaaaaaaaaaaacgagcaaagccttgaaggaattatgggactatgtgaaaagaccaaaatctacgtctgattggtatacctgaaagtgacgaggagaatggaaccaagttggaaaacactctgcaggatattatccaggagaacttccccaacatagcaaggcaggccaacattcaaattcaggaaatacagagaacaccacaaagatactccttgagaagagcaactccaagacacataattgtcagattcaccaaagttgaaatgataggaaaaaatgttaagggcagccagagagaaaggtcaagtagttacccacaaagggaagtccatcagactaacagtggatctctctgcagaaactctacaagccagaagagagtgggggccaatattccacattcttaaagagaagaattttcaacccagaatttcatatccagccaaactaagcttcataagtgaaggagaaataaataagatcctttacagacaagcaaatgccgagagatttttgtcaccactaggccctgccctaaaagagctcctgaaggaagcgctaaacatggaaaggaacaaccggagaaagcaggaaagatccaaaattgacaccctaacatcacaattaaaagaactagaaaagcaagagcaaacacattcaaaagctagcagaaggcaagaaataactaaaatcagagcagaactgaaggaaatagagacacaaaaaacccttcaaaaaatcaatgaatccaggagctggttttttgaaaggatcaacaaaattgatagaccgctagcaagactaataaagaaaaaaagagagaagaatcaaatagacacaataaaaaatgataaaggggatatcaccactgatcccacagaaatacaaactaccatcagagaatactacaaacacctctacgcaaataaactagaaaatctagaagaaatggatacattcctcgacacatacactctcccaagactaaaccaggaagaagttgaatctctgaatagaccaataacaggctctgaaattgtggcaataatcaatagtttaccaaccaaaaagagtccaggaccagatggattcacagccgaattctaccagaggtacaaggaggaactggtaccattccttctgaaactattccaatcaatagaaaaagagggaatcctccctaactcattttatgaggccagcatcattctgataccaaagccgggcagagacacaaccaaaaaagagaattttagaccaatatccttgatgaacattgatgcaaaaatcctcaataaaatactggcaaaccgaatccagcagcacatcaaaaagcttatccaccatgatcaagtgggcttcatccctgggatgcaaggctggttcaatatacgcaaatcaataaatgtaatccagcatataaacagagccaaagacaaaaaccacatgattatctcaatagatgcagaaaaagcctttgacaaaattcaacaacccttcatgctaaaaactctcaataaattaggtattgatgggaagtatttcaaaataataagagctatctatgacaaacccacagccaatatcatactgaatgggcaaaaactggaagcattccctttgaaaactggcacaagacagggatgccctctctcaccgctcctattcaacatagtgttggaagttctggccagggcaatcaagcaggagaaggaaataaagggtattcagttaggaaaagaggaagtcaaattgtccgtgtttgcagacgacatgattgtttatctagaaaaccccatcgtctcagcccaaaatctccttaagctgataagcaacttcagcaaagtctcaggatacaaaatcaatgtacaaaaatcacaagcattcttatacaccaacaaccgacaaacagagagccaaatcatgagtgaactcccattcacaattgcttcaaagagaataaaatacctaggaatccaacttacaagggatgtgaaggacctcttcaaggagaactacaaaccactgctcaaggaaataaaagaggacacaaacaaatggaagaacattccatgctcatgggtaggaagaatcaatatcgtgaaaatggccatactgcccaaggtaatttacagattcaatgccatccccatcaagctaccaatgactttcttcacagaattggaaaaaactactttaaagttcatatggaaccaaaaaagagcccgcatcgccaagtcaatcctaagccaaaagaacaaagctggaggcatcacactacctgacttcaaactatactacaaggctacagtaaccaaaacagcatggtactggtaccaaaacagagatatagatcaatggaacagaacagagccctcagaaataatgccgcatatctacaactatctgatctttgacaaacctgagaaaaacaagcaatggggaaaggattccctatttaataaatggtgctgggaaaactggctagccatatgtagaaagctgaaactggatcccttccttacaccttatacaaaaatcaattcaagatggattaaagatttaaacgttagacttaaaaccataaaaaccctagaagaaaacctaggcattaccattcaggacataggcgtaggcaaggacttcatgtccaaaacaccaaaagcaatggcaacaaaagccaaaattgacaaatgggatctaattaaactaaagagcttctgcacagcaaaagaaactaccatcagagtgaacaggcaacctacaacatgggagaaaattttcgcaacctactcatctgacaaagggctaatatccagaatctacaatgaactcaaacaaatttacaagaaaaaaacaaacaaccccatcaaaaagtgggcaaaggacatgaacagacacttctcaaaagaagacatttatgcagccaaaaaacacatgaagaaatgctcatcatcactggccatcagagaaatgcaaatcaaaaccactatgagatatcatctcacaccagttagaatggcaatcattaaaaagtcaggaaacaacagcagccagatgccactgactagctcagataacactgctgtcaactgtaaaaaattaagatccaaaccagatgaaattgccaaagagtcagaagctcctccaggcttagccagctttcacctttgctcatcatacatctatggggctcctcttaactcacagatgggctag

SEQ ID NO: 15438 - DNA, 658 bp, Homo sapiens
ctttactgcgtcttttgtactgccccagatcctccttcctctatctcagagcccatatgaaaacttccaagtggccctccaggcaaagccatattgtgattttgctatcttaggaaaaatgaacagagatgttgctggatttgaagataaaggagaagacctcaaactaaggaatacagtggcttccaagaaccacactgggaaaacgggcggcgggacccgggacccagcttggcgacggcgatctcgacgcgggcccccaggatctcccggcgccccacctctggagcagcccctgccgccagcgtcaggtccaccccggaatcccagggactctcggcgccgaacggacccgggccgggtgcaacggggtccccggactggagaagacgcgggtggcaccgtgcgagctccaggagccccgggtccactgcgaggcctcggggggcgcagacctgcagagactgcggccaacgggaaggtgtttctgcagaagtacctcctggggccaagagcaactcacagccagactgggggtagagcaggggccgaagcctcatccctttgcttgacatcgtcgaagagaagcatgcatgatgtcagcagcgggacagttggaacttcttgggagacaagcttaaagactagccagagataa

SEQ ID NO: 15439 - DNA, 1260 bp, Homo sapiens
  SIMILAR (906)..(610): 651254mologous to Crassostrea gigas RNA polymerase II, largest subunit,accession number U10334,Smith-Waterman Score=370.
  misc_feature (1)...(1260): n = a,t,c or g
ttaataaatttcctccaccactttgatggggtgcaggtcggagggaaggcgtgggttgatgtggaagattttctgagcattccagatcatccgcagcaggttacaggggaggacgaccttgctgtctccagttgggaagatgaccctgagcacctcccgatcctcccgcatccgctcaaattcccgctccaactcgttctggatgtgtgcgttgctcagcacgtccttcaccaggtcctcctggttgatggagttccgcacagtcgcgtcgtacttcaccatcactgactccatggacttgatcagccgccgctggatgtatccagtctcagcagtcttgacagccgtgtcaatgagcccctcacgaccccccatggcgtggaaaaagaactcagtgggtgtgaggccggctaggtaggagttctccacaaagccacggctctcaggcccgtagtcatcctgggagatgttaatcttggaacctttagctccggacacgaccatagacttgaagttgttgtattcagacagggatttctgagcagaggagccagtcttgtctcgggcatcgttaagaatgcggttcacctgattctcaaacgtctgccgcagagtgttcccctcgatgaggagccagttgttaatgacagtctgaatgttggagtagaagaggcgagtgatgtcatgacccatctctaggtaggagatgtggaccagggagccagctgacgtgcccagagacttcttacacaggatgcccatgatcagctccccattctccaccaccaccttggtgtccccaggagagatgtgcttgtaagggccactgtcttcatcatcgggatgggtgctgtgggtacggatacaattgatgtgaccaggtatgatgagggagaagatttgcttgcncatggtggccacatggaactggaggagcttcacatcctctgcaatgacatgggccgctgcgccgttctgctcattgcgccgcagctgattgttgatcttcacgatgtcagccagtttgtgagtcaggtcatcntcctcatctgagatgcgtttgaagatctcatgcactcgctctggactcagcaggatcttcttctcctgagagtcctcattaacgtgcttccattccgcatacagctctaggccagaacgccggatcctgggctggtaccgcccacagccaccatggcccttttctttggtcagatcctcgtcaccctcaggttgttccacaccgaacttgttgtccat

SEQ ID NO: 15440 - DNA, 466 bp, Homo sapiens
  SIMILAR (298)..(137): 901254mologous to Ilyanassa obsoleta RNA polymerase II, largest subunit,accession number U10338,Smith-Waterman Score=250.
cagtctcagcagtcttgacagccgtgtcaatgagcccctcacgaccccccatggcgtggaaaaagaactcagtgggtgtgaggccggctaggtaggagttctccacaaagccacggctctcaggcccgtagtcatcctgggagatgttaatcttggaacctttagctccggacacgaccatagacttgaagttgttgtattcagacagggatttctgagcagaggagccagtcttgtctcgggcatcgttaagaatgcggttcacctgattctcaaacgtctgccgcagagtgttcccctcgatgaggagccagttgttaatgacagtctgaatgttggagtagaagaggcgagtgatgtcatgacccatctctaggtaggagatgtggaccagggagccagctgacgtgcccagagacttcttacacaggatgcccatgatcagctccccattctccaccaccac

SEQ ID NO: 15441 - DNA, 6732 bp, Homo sapiens
  SIMILAR (2210)..(2821): 981254mologous to Cloning vector pZC320 SopB,accession number U26464,Smith-Waterman Score=997.
gagagcgcggccgggacggttggagaagaaggcggctccccggaagggggagagacaaactgccgtaacctctgccgttcaggaacccggttacttatttattcgttaccctttttcttcttcctcccccaaaaaccttttccttttcccttctttttttttcctttttgggagctgaaaaatttccggtaagggaaagaagggctcctttcgctccttatttcgccgcctccttccctccgccaccttcccctcctccggctttttcctcccaactcggggaggtccttcccggtggccgccctgacgaggtctgagcacctaggcggaggcggcgcaggctttttgtagtgaggtttgcgcctgcgcaggcgcctgcctccgccatgcacgggggtggccccccctcgggggacagcgcatgcccgctgcgcaccatcaagagagtccagttcggagtcctgagtccggatgaactgaagcgaatgtctgtgacggagggtggcatcaaatacccagagacgactgagggaggccgccccaagcttggggggctgatggacccgaggcagggggtgattgagcggactggccgctgccaaacatgtgcaggaaacatgacagagtgtcctggccactttggccacattgaactggccaagcctgtgtttcacgtgggcttcctggtgaagacaatgaaagttttgcgctgtgtctgcttcttctgctccaaactgcttgtggactctaacaacccaaagatcaaggatatcctggctaagtccaagggacagcccaagaagcggctcacacatgtctacgacctttgcaagggcaaaaacatatgcgagggtggggaggagatggacaacaagttcggtgtggaacaacctgagggtgacgaggatctgaccaaagaaaagggccatggtggctgtgggcggtaccagcccaggatccggcgttctggcctagagctgtatgcggaatggaagcacgttaatgaggactctcaggagaagaagatcctgctgagtccagagcgagtgcatgagatcttcaaacgcatctcagatgaggagtgttttgtgctgggcatggagccccgctatgcacggccagagtggatgattgtcacagtgctgcctgtgcccccgctctccgtgcggcctgctgttgtgatgcagggctctgcccgtaaccaggatgacctgactcacaaactggctgacatcgtgaagatcaacaatcagctgcggcgcaatgagcagaacggcgcagcggcccatgtcattgcagaggatgtgaagctcctccagttccatgtggccaccatggtggacaatgagctgcctggcttgccccgtgccatgcagaagtctgggcgtcccctcaagtccctgaagcagcggttgaagggcaaggaaggccgggtgcgagggaacctgatgggcaaaagagtggacttctcggcccgtactgtcatcacccccgaccccaacctctccattgaccaggttggcgtgccccgctccattgctgccaacatgacctttgcggagattgtcacccccttcaacattgacagacttcaagaactagtgcgcagggggaacagtcagtacccaggcgccaagtacatcatccgagacaatggtgatcgcattgacttgcgtttccaccccaagcccagtgaccttcacctgcagaccggctataaggtggaacggcacatgtgtgatggggacattgttatcttcaaccggcagccaactctgcacaaaatgtccatgatggggcatcgggtccgcattctcccatggtctacctttcgcttgaatcttagcgtgacaactccgtacaatgcagactttgacggggatgagatgaacttgcacctgccacagtctctggagacgcgagcagagatccaggagctggccatggttcctcgcatgattgtcaccccccagagcaatcggcctgtcatgggtattgtgcaggacacactcacagcagtgcgcaaattcaccaagagagacgtcttcctggagcggggtgaagtgatgaacctcctgatgttcctgtcgacgtgggatgggaaggtcccacagccggccatcctaaagccccggcccctgtggacaggcaagcaaatcttctccctcatcatacctggtcacatcaattgtatccgtacccacagcacccatcccgatgatgaagacagtggcccttacaagcacatctctcctggggacaccaaggtggtggtggagaatggggagctgatcatgggcatcctgtgtaagaagtctctgggcacgtcagctggctccctggtccacatctcctacctagagatgggtcatgacatcactcgcctcttctactccaacattcagactgtcattaacaactggctcctcatcgagggtcatactattggcattggggactccattgctgattctaagacttaccaggacattcagaacactattaagaaggccaagcaggacgtaatagaggtcatcgagaaggcacacaacaatgagctggagcccaccccagggaacactctgcggcagacgtttgagaatcaggtgaaccgcattcttaacgatgcccgagacaagactggctcctctgctcagaaatccctgtctgaatacaacaacttcaagtctatggtcgtgtccggagctaaaggttccaagattaacatctcccaggtcattgctgtcgttggacagcagaacgtcgagggcaagcggattccatttggcttcaagcaccggactctgcctcacttcatcaaggatgactacgggcctgagagccgtggctttgtggagaactcctacctagccggcctcacacccactgagttctttttccacgccatggggggtcgtgaggggctcattgacacggctgtcaagactgctgagactggatacatccagcggcggctgatcaagtccatggagtcagtgatggtgaagtacgacgcgactgtgcggaactccatcaaccaggtggtgcagctgcgctacggcgaagacggcctggcaggcgagagcgttgagttccagaacctggctacgcttaagccttccaacaaggcttttgagaagaagttccgctttgattataccaatgagagggccctgcggcgcactctgcaggaggacctggtgaaggacgtgctgagcaacgcacacatccagaacgagttggagcgggaatttgagcggatgcgggaggatcgggaggtgctcagggtcatcttcccaactggagacagcaaggtcgtcctcccctgtaacctgctgcggatgatctggaatgctcagaaaatcttccacatcaacccacgccttccctccgacctgcaccccatcaaagtggtggagggagtcaaggaattgagcaagaagctggtgattgtgaatggggatgacccactaagtcgacaggcccaggaaaatgccacgctgctcttcaacatccacctgcggtccacgttgtgttcccgccgcatggcagaggagtttcggctcagtggggaggccttcgactggctgcttggggagattgagtccaagttcaaccaagccattgcgcatcccggggaaatggtgggggctctggctgcgcagtcccttggagaacctgccacccagatgaccttgaataccttccactatgctggtgtgtctgccaagaatgtgacgctgggtgtgccccgacttaaggagctcatcaacatttccaagaagccaaagactccttcgcttactgtcttcctgttgggccagtccgctcgagatgctgagagagccaaggatattctgtgccgtctggagcatacaacgttgaggaaggtgactgccaacacagccatctactatgaccccaacccccagagcacggtggtggcagaggatcaggaatgggtgaatgtctactatgaaatgcctgactttgatgtggcccgaatctccccctggctgttgcgggtggagctggatcggaagcacatgactgaccggaagctcaccatggagcagattgctgaaaagatcaatgctggttttggtgacgacttgaactgcatctttaatgatgacaatgcagagaagctggtgctccgtattcgcatcatgaacagcgatgagaacaagatgcaagaggaggaagaggtggtggacaagatggatgatgatgtcttcctgcgctgcatcgagtccaacatgctgacagatatgaccctgcagggcatcgagcagatcagcaaggtgtacatgcacttgccacagacagacaacaagaagaagatcatcatcacggaggatggggaattcaaggccctgcaggagtggatcctggagacggacggcgtgagcttgatgcgggtgctgagtgagaaggacgtggaccccgtacgcaccacgtccaatgacattgtggagatcttcacggtgctgggcattgaagccgtgcggaaggccctggagcgggagctgtaccacgtcatctcctttgatggctcctatgtcaattaccgacacttggctctcttgtgtgataccatgacctgtcgtggccacttgatggccatcacccgacacggagtcaaccgccaggacacaggaccactcatgaagtgttcctttgaggaaacggtggacgtgcttatggaagcagccgcacacggtgagagtgaccccatgaagggggtctctgagaatatcatgctgggccagctggctccggccggcactggctgctttgacctcctgcttgatgcagagaagtgcaagtatggcatggagatccccaccaatatccccggcctgggggctgctggacccaccggcatgttctttggttcagcacccagtcccatgggtggaatctctcctgccatgacaccttggaaccagggtgcaacccctgcctatggcgcctggtcccccagtgttgggagtggaatgaccccaggggcagccggtttctctcccagtgctgcgtcagatgccagcggcttcagcccaggttactcccctgcctggtctcccacaccgggctccccggggtccccaggtccctcaagcccctacatcccttcaccaggtggcgccatgtctcccagctactcgccaacgtcacctgcctacgagccccgctctcctgggggctacacaccccagagtccctcttattcccccacttcaccctcctactcccctacctctccatcctattctccaaccagtcccaactatagtcccacatcacccagctattcgccaacgtcacccagctactcaccgacctctcccagctactcacccacctctcccagctactcgcccacctctcccagctattcgcccacctctcccagctactcacccacttcccctagctattcgcccacttcccctagctactcgccaacgtctcccagctactcgccgacatctcccagctactcgccaacttcacccagctattctcccacttctcccagctactcacctacctctccaagctattcacccacctcccccagctactcacccacttccccaagttactcacccaccagcccgaactattctccaaccagtcccaattacaccccaacatcacccagctacagcccgacatcacccagctattcccctactagtcccaactacacacctaccagccctaactacagcccaacctctccaagctactctccaacatcacccagctattccccgacctcaccaagttactccccttccagcccacgatacacaccacagtctccaacctataccccaagctcacccagctacagccccagttcgcccagctacagcccaacctcacccaagtacaccccaaccagtccttcttatagtcccagctccccagagtataccccaacctctcccaagtactcacctaccagtcccaaatattcacccacctctcccaagtactcgcctaccagtcccacctattcacccaccaccccaaaatactccccaacatctcctacttattccccaacctctccagtctacaccccaacctctcccaagtactcacctactagccccacttactcgcccacttcccccaagtactcgcccaccagccccacctactcgcccacctcccccaaaggctcaacctactctcccacttcccctggttactcgcccaccagccccacctacagtctcacaagcccggctatcagcccggatgacagtgacgaggagaactgagggcacgtggggtgcggcagcgggctagggcccagggcagcttgcccgtgctgccgtgcagttcttgcctccctcacggggcgtcacccccagcccagctccgttgtacataaataccttgtgacagagctcccggtgaacttctggatcccgtttctgatgcagattcttgtcttgttctccacttgtgctgttagaactcactggcccagtggtgttctacctcctaccccacccaccccctgcctgtccccaaattgaagatccttccttgcctgtggcttgatgcggggcgggtaaagggtattttaacttaggggtagttcctgctgtgagtggttacagctgatcctcgggaagaacaaagctaaagctgccttttgtctgttattttatttttttgaagtttaaataaagtttactaattttgacc

SEQ ID NO: 15442 - DNA, 941 bp, Homo sapiens
  SIMILAR (539)..(910): 911254mologous to Rattus norvegicus neuroligin 2,accession number U41662,Smith-Waterman Score=604.
  misc_feature (1)...(941): n = a,t,c or g
atgggggatntgtctgtagttctgcggccgctgctggtggttgcagcagcgacggcgacaacgccggtggcggcggcggcggcgacgaacacagcgaagaagactgctactgtgatggttggagaaatggtggcaggagaaagaggagtactgcagatgggtcatgacatcactcgcttcttctactccaacattcagactgtcattaacaactggctcctcatcgagggtcatactattggcattggggactccattgctgattctaagacttaccaggacattcagaacactattaagaaggccaagcaggacgtaatagagacgtttgagaatcaggtgccccgcattcttaacgatgcccgagacaagactggctcctctgctcagaaatccctgtctgaatacaataacttcaagtctatggtcgtgtccggagctaaaggttccaagattaacatctcccaggggggggggtcccagggagggagggggggtcccccgatcagcatgtggctcctggcgctgtgtctggtggggctggcgggggctcaacgcgggggagggggtcccggcggcggcgcccccgggcggccccggcctgggcctcggcagcctcggcgaggagcgcttcccggtggtgaacacggcctacgggcgagtgcgcggtgtgcggcgcgagctcaacaacgagatcctgggccccgtcgtgcagttcttgggcgtgccctacgccacgccgcccctgggcgcccgccgcttccagccgcctgaggcgcccgcctcgtggcccggcgtgcgcaacgccaccaccctgccgcccgcctgcccgcagaacctgcacggggcgctgcccgccatcatgctgcctgtgtggttcaccgacaacttggaggcggccgccacctacggggggtgctttagagtccccaaaaaggcgt

SEQ ID NO: 15443 - DNA, 1171 bp, Homo sapiens; identical to SEQ ID NO: 4630
  SIMILAR (1)..(846): 871254mologous to Homo sapiens putative p150,accession number U93567,Smith-Waterman Score=1362.

SEQ ID NO: 15444 - DNA, 307 bp, Homo sapiens
  SIMILAR (1)..(111): 831254mologous to Homo sapiens PRO1546,accession number AF116638,Smith-Waterman Score=159.
atggaatactatgcagccataaaaaaggatgagttcatgtccttagcagggacatggatgaagctggaaaccatcattgtcagcaaactatcacaaggacagaaaaccaaacaccacatgttctcactcataggagtccacctgtcccgagttggaagtctgaactcatgttcctggattcctcccatgcatcttggtgctggtgtggggcctgaactcagccaatccgcaacacctccaggagtcttcctcttagatgctgaggccacggagaaggaagcagcacaaagaatgaaccctggagagg

SEQ ID NO: 15445 - DNA, 381 bp, Homo sapiens
  SIMILAR (111)..(4): 831254mologous to Homo sapiens PRO1546,accession number AF116638,Smith-Waterman Score=172.
ctacccccaccccatgacaggctctggtgtgtgatgttccccaccctgtgtccaagtgttctcattgttcaattcccgcctatgagtgagaacatgcggtgtttggttttctgtccttgcaatagtttgctcagaatgatggtttccagcttcatccatgtccctacaaaggacatgaactcggggatcctctagagtcgacctgcagacattgaactcttttccataaatcttgttaataaaaagatctttctgaagggcaagttcggggatcccttgtctctgcaaaggcagctgagaaatatagtcttcagtatgccttgttgtttccccagctttttgctgccctgggtcttcagccagctgtccgtaaaacctcat

SEQ ID NO: 15446 - DNA, 278 bp, Homo sapiens; identical to SEQ ID NO: 4633
  SIMILAR (121)..(276): 961254mologous to Homo sapiens bK415G2.1 (synapsin III),accession number Z83846,Smith-Waterman Score=245.

SEQ ID NO: 15447 - DNA, 840 bp, Homo sapiens; identical to SEQ ID NO: 12084
  SIMILAR (3373)..(4545): 901254mologous to Cloning vector pSacBII SacB,accession number U09128,Smith-Waterman Score=1853.

SEQ ID NO: 15448 - DNA, 891 bp, Homo sapiens; identical to SEQ ID NO: 12080
  SIMILAR (1065)..(1478): 971254mologous to Homo sapiens putative p150,accession number U93563,Smith-Waterman Score=685.

SEQ ID NO: 15449 - DNA, 3105 bp, Homo sapiens; identical to SEQ ID NO: 14528
  SIMILAR (16)..(408): 991254mologous to Escherichia coli ORF_f375,accession number U18997,Smith-Waterman Score=661.

SEQ ID NO: 15450 - DNA, 779 bp, Homo sapiens
  SIMILAR (1)..(762): 771254mologous to Homo sapiens RNA-binding protein BRUNOL4,accession number AF248650,Smith-Waterman Score=904.
attcccatgaaggaccacgatgccatcaagctgttcattgggcagatcccccgcaacctggatgagaaggacctcaagcccctcttcgaggagtttggcaaaatctacgagcttacggttctgaaggacaggttcacaggcatgcacaaaggctgcgccttcctcacctactgcgagcgtgagtcagcgctgaaggcccagagcgcgctgcacgagcagaagactctgcccgggatgaaccggccgatccaggtgaagcctgcggacagcgagagccgaggagaagataaaaaactcttcgtgggcatgctcaacaagcaacagtccgaggacgacgtgcgccgcccttttcgaggcctttgggaacatcgaggagtgcaccatcctgcgcgggcccgaacggcaaacagcaaaggggtgcgcctttgtgaagtactcctccccacgccgaagccgcaggccgcccatcaacgcgcttacacggcagccagaccatgccgggagctttcgttccagtttgggtgggtcaagtttcggccgacaccgacaaggagcgcacgatgcgggcgaatgcagcagatggctggccagatgggcatgttcaaccccatggccatccctttcggggcctacggcgcctacgctcaggcactgatgcagcagcaagcggccctgatggcatcagtcgcgcagggcggctacctgaaccccatggctgccttcgctgccgcccagatgcagcagatggcggccctcaacatgaatggcctggcggccgc

SEQ ID NO: 15451 - DNA, 1416 bp, Homo sapiens
  SIMILAR (44)..(1228): 1001254mologous to Escherichia coli CG Site No. 18232; alternate gene name hypF,accession number U29579,Smith-Waterman Score=2116.
  misc_feature (1)...(1416): n = a,t,c or g
atggaatactatgcagccataaaaaaggatgagttcatctcctttgtagggacatggatgaagctggaaaccatcattctgagcaaactatcacaaatgcagaaaaccaaacaccgcatattctcactcatagtgctatgtgacatcacagacatcctaaaagaattcactgtggcagaagcagggggattcgcattgaacgagatcatgaaagaaatctgcaagagcaggttctcagcaaaggtcagcctgcactggaagatgtggcacagcacggccagcctgggctaccacagggtgaacgtgaccaaccctgatccccttaacctgtgtctaggccactgctggctggggctcagagacactggtcagaaacaggcctgcggtggccctggggtctgccctggcatgttccggagggcctgcggaggaaacgccccgtgcaaggaggccccctcagtgactgaggcttcatctccagatggcagcgtcctctgcctcggaagtcatgttcccatcaccccggcccctttatcttcagcacaaatggtttgtcacatggtggaggacaggagaacagtggagctcatccttggtgccacacacaaccttttcttctccaccagccccttaacttggtctcttagagccatccctggcaattgtgtcctgtttctaaaggattatgtcacagagcctgtccgatcccaatcaatactgcacattgcaggacccaccttcaaacagacccctaacctcccctttctgaaatttcccgaggccaccaaggcccacgggcccaacgtataccagaatgactctacctgccctgaacctactgcccaggtttcccactggtcatctgtgtcctcaactctaattgccagcccggtccctggcccggaagatagaaaactcttcgtgggcatgctcaacaagcaacagtccgaggacgacgtgcgccgccttttcgaggcctttgggaacatcgaggagtgcaccatcctgcgcgggcccgacggcaacagcaaggctcggcctctcgcgtcctcgcagggtgcgccttntgtgaagtactcctcccacgccgaggcgcaggccgccatcaacgcgctacacggcagccagaccatgccgctgatgcagcagcaagcggccctgatggcatcagtcgcgcagggcggctacctgaaccccatggctgccttcgctgccgcccagatgcagcagatggcggccctcaacatgnaatggcctggcggccgcacctatgaccccaacctcaggccaatgggcaacctgctgcggaagaaattgttcgccaatggcatccacccctacccagcacagagccccaccgccgcggaccccctgcagcaggcctacgccggagtgcagcagtatgcaggtcgttag

SEQ ID NO: 15452 - DNA, 3587 bp, Homo sapiens
  SIMILAR (3587)..(2874): 881254mologous to Homo sapiens putative p150,accession number U93572,Smith-Waterman Score=1159.
  misc_feature (1)...(3587): n = a,t,c or g
tcacacaagccggtgttgtgtcctccgcgctgccccgacgtctgccccgaaaggcttcccgggcgggacgctgggagagggatccccttgggaaaccaggtggggccgctgggcctgggctgcacgccgcggaggtgcgagagcccagagcagcagcatcgcttcctgcccctcgcgagctccaggagaagtttcctcctccctctctccaccagcgcccccaaccatagagccagggtcgcccctgctctgagatctgcgaaaggactccccatgggaacacagacaatgtgacaagagagaacctggaaactccgcacctccggctccccacagctggggttttgctgtcttcaaccctcgggcgggggacgtccggcagctctgcaaacgcgcagacacgcgaaccccatcgcctcgcgcgccctttggctccgctggtgcgtgtcggggatgcggccgcgcaggcgctcgctccctggcttcccccaaagcccgaacctgcatctcctctgcgaggcgcagggcgggaggaccgctgcagttgggagccggctccggacaggcaaagcgacccgacaggtgaacgcggcgggagggagcaaacgcgtaaaaaaccctgcacttacttcttcgctggcgccttccccgggaggcgttttggcggggttccaggagccgccggggcggccgcaggtagcatgttgtgcggcaactgccgcaggcgggatccgggcgggcgagcggcggcggcggcggctgcagcggcggccccttgggctcagaagctgcggcggctgcggctgcagcggcgggggccccctggctgtcgttagtaaatggtgagctttccacgtcttttctccggtagcaccagccgatgaacttttcagtaattactttttttttttcttcaaacaagaaaacaacactcacagtagcctgtggctgccagtggatttcagagctcaagctagtgataaagggctggtttagctctgcccttctctccttctcttcaccccatataatcttttcttcccagaaacatattttgatttcactttggcctgtggggtatgtcacaggtgtaggcggtttcaagccattatgaaaaagctccaggtgcctggtggtcatgatatttttccaatttggcaggtggtattctatatttgtagataagattgcctcactgagaagtattcttgcatcccaggagtaaagccaacttgatcgtggtgaattaaactttttgatgtgttgctggttttggtttgccagtatgttgttgagaatttttgtgtgtatgttcttcagcgacattggttggtagtttcttcttcttcttgtgtttttggcaggttttggtatcacagtgatgctggcttcaccgaatgagttggggaaaagttcctcctcctcattgactagtttagcagaattggtactacctcttcttttcacaactcccccagtcccccacccagtgacaggccccagtgtgtgatattcccctccctgtgtccaagtgttcttattgttcaattccaacctatgattgagaacatgcggtgtttggttttcggttcttgtgatagtttgctcagaatgatggtttccagcttcatccatgtccctgttcactctggtgatagtttcttttgctgtgcagaggctctttagtttaattagatcccatttgtctattttggcttttgtggccattgcttttggtgttttagtcatgaagtccttgcctatgcctatgtcctgaatggtattgcctaggttttcttctagggtttttacggttttaggtctaacatttaagtctttaatccatcttgaattaatttttgtataaggtgtaaggaagggatccagtttcagctttctccatatggctagccagtttttccagcaccatttattaaatagggaatcctttcctcgttgcttgtttttgtcgggtttgtgaaagatcagatggttgtagatgtgtggtattatttctgaggtctctgttctgttccattggtctatatatctgttttggtacccagtaccatgctgttttggttactgtagccttgcagtatagtttgaagtcaggtagcgtgatgcctccagctttgttctttttgcttaggattgtcttggcaatgcaggctcttttttggttccatatgaactttaaagtagttttttccaattctgtgaagaaagtcattggtaacttgatggggatagcactgaatctataaattactttgggcagcatggccattttcacaatgttgactcttcctatccatgagcatggaatgttcttccaatcgtttgtgtcctcttttatttccttgagcagtggtttgtagttctccttgaagagctctttcacattccttgaaagttggattcctaggtattttattctctttgtagcaattgtgaatgggagttcactcatgatttggctctctatttgtctgatattggtatataggaatgcttgtgatttttgcacgttgattttgtatcctgagactttgctgaagttgcttatcagcttaaggagatttggggctgacatgatggggttttctaaatatacaatcatgtcatctgcaaacagggacaatttgacttcctcttttcctaattgaataccctttatttctttctcttgcctgattgccctggccagaacttccaatactatgagtgagaacatgcggtgtttggttttttgcccttgcgatanttngctgacgatagtttgctgagaatgatggtttccagcttcatccatgtccctacaaaggacatgaactcatcatttttttatggctgcacagtattccatggtggtgtatgtgccacattttcttaatccagtctatcgttgatgggcatttgggttggttccaggtctttgctattgtgaatagtgccgcaataaacataggtgtgcatgcgtctttatagtagcatgatttataatcttttgggtatatacccagtaatgggatctctgggttaaatggtatttctggttctagatccttgaggaattgccacactgtcttccacaatggttgaactagtttacagtcccaccaacagtgtaaaagtgttcctatttctccacatcctctccggcatctgttgtttcctgactttttaatgatcgccattctaactgctgtgagatggtatctcattgtggttttgatttgcatttctctgatggccggtgatgatgagcattttttcatgtgtctgttggctgcataaatatcttcttttgagaagtgtctgtacctatcctttgcccactttttgatggggttgtttgtttttttcttgtaaatttgtttgagttctttgtagattttggatattagccctttgtcagatgagtagattgcaaaaattttctcccattctgtaggttgcctgttcactctgatggtagtttcttttgctgtgcagaagctcttcagtttaattagatcccatttgtcaattttggcttttgtagccattgcttttggtgttttagacacgaagtccttgcccat

SEQ ID NO: 15453 - DNA, 768 bp, Homo sapiens
  SIMILAR (226)..(3024): 951254mologous to Homo sapiens putative p150,accession number U93567,Smith-Waterman Score=4626.
atgtgtgactttgggaaatccacatcactcccagcatcgccaacttcctcatctgcaaatggacgtgataacagcacctaccgcttaaaggagcagggaggattcatgcattctgtggcctccagggacagctgtgcagaatcggcccgctacacagatgcccactatgccaagtcgggctatggtgcctacaccccatcctcctatggggccaatctggctgcctccttactggagaaggagaaacttggtttcaagccggtccccaccagcagcttcctcacccgtccccgtacctatggcccctcctccctcctggactatgaccggggccgccccctgctgagacccgacatcactgggggtggtaagcgggcagagagccagacccggggtactgagcggcctttaggcagtggcctcagcgggggcagcggattcccttatggagtgaccaacaactgcctcagctacctgcccatcaatgcctatgaccagggggtgaccctaacccagaagctggacagccaatcagacctggcccgggatttctccagcctccggacctcagatagctaccggatagaccccaggaacctgggccgcagccccatgctggcccggacgcgcaaggagctctgcaccctgcaggggctctaccagacagccagctgccctgaatacctggtcgactacctggagaactatggtcgcaagggcagtgcatctcaggtgccctcccaggccccctccctcacgagtccctga

SEQ ID NO: 15454 - DNA, 2251 bp, Homo sapiens
  SIMILAR (311)..(2248): 941254mologous to Homo sapiens cleavage stimulation factor 77kDa subunit,accession number U15782,Smith-Waterman Score=3160.
tttcgtctttactgatttgggggtggtttttagtttaatttttcttttctagcttcccatcgacggtcagtgcgcacgttgtaatcagctgaggccatgtcaggagacggagccacggagcaggcagctgagtatgtcccagagaaggtgaagaaagcggaaaagaaattagaagagaatccatatgaccttgatgcttggagcattctcattcgagaggcacagaatcaacctatagacaaagcacggaagacttatgaacgccttgttgcccagttccccagttctggcagattctggaaactgtacattgaagcagagattaaagctaaaaattatgacaagggtgaaaagctatttcagagatgccttatgaaggttttgcacattgatttatggaagtgttatctttcatatgtccgagaaaccaaggggtaaactaccaagttacaaaggaaaaatggctcaagcatatgactttgcactggataaaattggaatggaaattatgtcctatcagatttgggtggattacatcaatttcctaaaaggcgtggaagctgtaggatcttatgcagaaaatcaaagaataacagctgtccgaagagtttatcaacgaggttgtgttaatccgatgatcaacattgaacagctctggagagactataacaagtatgaagagggtatcaatattcatttagctaaaaaaatgattgaagatcggagtagagattatatgaatgctagacgtgtagcaaaggaatatgagacagtaatgaaaggcttggaccgtaatgctccctcggtgcctcctcagaatactcctcaagaagctcaacaagtagatatgtggaagaaatatatacagtgggaaaagagcaaccctcttcgtacagaggatcagacccttataacaaaaagagttatgtttgcttatgaacagtgcctgcttgtgctgggccatcaccctgatatttggtatgaagctgcccagtatcttgagcagtcaagtaaactgctcgcagaaaagggagatatgaataatgccaaattatttagtgatgaagctgctaatatatatgaaagagccataagcactttattgaagaagaatatgcttctttattttgcatatgcagattatgaagagagtcgcatgaagtatgaaaaggttcacagtatatataacagacttctggcaattgaggatattgaccctaccttggtatatatccaatatatgaaatttgcacggagagcagaaggcatcaaatctggaagaatgatatttaaaaaagcaagagaagataccagaacccgccaccatgtctatgttactgcagcactcatggaatattactgtagtaaggacaaatctgttgcctttaagatttttgagctggggctaaaaaaatatggagacattccagagtatgtcctggcctatattgactatctttctcacctcaatgaggacaataatacccgagttttgtttgaacgagttttaacatctggaagccttcctcctgagaagtctggagaaatctgggcccgatttctagcatttgaaagtaatattggtgatctagctagtatactcaaagtggagaaaagacggtttacagcattcaaagaagagtatgaagggaaagaaacggctttactagtagatagatacaagttcatggatttatatccttgctctgcaagtgaattaaaagcacttggttataaggatgtctcccgtgctaagctagcagctataattccggacccagttgtagctccttctatagtgcctgttctgaaagatgaagtggatagaaaaccagaataccctaaaccagacactcagcagatgattccatttcagccacgacatttagcacctccaggtttacaccctgtacctggtggagtgttcccagtccctcctgcagctgttgttttaatgaaacttctccctcctcctatctgtttccagggtccttttgtacaagtggatgaactgatggaaattttccgaagatgcaagataccaaatactgttgaggaagctgtgaggatcattactggtggggccccagagctagctgtagaaggcaacggccccgtggaaagtaatgcagtactcaccaaggccgtcaaaaggcccaacgaggattcagatgaagatgaagaaaagggagccgttgtcccccctgttcatgacatttacagagcacggcagcagaagcggattcggtag

SEQ ID NO: 15455 - DNA, 618 bp, Homo sapiens
  SIMILAR (24)..(134): 971254mologous to Homo sapiens Human secreted protein, SEQ ID NO: 5464,accession number G01383,Smith-Waterman Score=188.
gcacgttgtaatcagctgaggccatgtcaggagacggagccacggagcaggcagctgagtatgtcccagagaaggtgaagaaagcggaaaagaaattagaagagaatccatatgaccttgatgcttggagcatttctcattcgagaggcacaggtttagtgatataggattacatttccttctctatgggtccaatcacactacttggttctgccagtgaataatattttcataatcctaacattgtaaatgctgtttattggttttcaattttagaatcaaccctatagacaaagcacggaagacttatgaacgccttgttgcccagttccccagttctggcagattctggaaactgtacattgaagcagaggttactattttattttattttttcttatatcagtattgcagcattcacctgtagtgataagaaaacaagttaggaacatagccaatttaggacaaggaggatttaaatgtgtcttacctttattttgtaaaatagagtataaaggaggtaattaaaatgaatttttgaaatttgggtcttttacaagctgatgattgttgcattttggagttgcaacaacattaaaacagtttcaaaggtaaaaa

SEQ ID NO: 15456 - DNA, 631 bp, Homo sapiens
  SIMILAR (211)..(390): 861254mologous to Homo sapiens cleavage stimulation factor 77kDa subunit,accession number U15782,Smith-Waterman Score=284.
  misc_feature (1)...(631): n = a,t,c or g
catttnaattcatatttgattgggcggtggcgattggtgttggcggtctggctcagctgggcagggggtaactttactgatttgggggtggtttttagtttaatttttcttttctagcttcccatcgacggtcagtgcgcacgttgtaatcagctgaggccatgtcaggagacggagccacggagcaggcagctgagtatgtcccagagaaggttaagaaagcggaaaaggaatttggaggagaatccatatgaccttgatgcttggagcattctcattcgagaggcacagaatcaacctatagacaaagcacggaagacttatgaacgccttgttgcccagttccccagttctggcagattctggaaactgtacattgaagcagaggttactattttattttattttattttttcttatatcagtattgcagcattcactgtagtgatagaaaacaagttaggaacatagccaattaggacaaggaggatttaaatgtgtcttacctttattttgtaaaataggtataaaggagtaattaaaatgaatttttgaaatttgggtcttttacaagatgatgattagttgcattttggagttgcaacaacattaaaacagtttcaatggtaaa

SEQ ID NO: 15457 - DNA, 837 bp, Homo sapiens
  SIMILAR (319)..(834): 881254mologous to Homo sapiens mutant beta-actin (beta'- actin),accession number X63432,Smith-Waterman Score=781.
atggatgatgatattgctgcgctcgttgttgacaacagctctggcatgtgcaaggccggcttcgcgggtgacgatgtcccctgggccatcttcccttccatcgtggggtgcaccaggcaccaggtcatgatgctgcatgtggctcccgaggagcaccctgtgctgctgaccgaggcccccctgaaccccaaagccaactgtgagaagatgacccagatcatgtttgagaccttcaacaccccagccatgtatgtggccatccaggccatgctgtccctgtacgcctccgtccgtaccgcccatgtacaagggcttcacaccacggccgagcgggaaatcgtgcgtgacatcaagaagctgtgctacgtcgccctggacttcgagcgggagatggccatggtggcctccagctcctccctggagaagagctacaagctgctcgatggccaggtcatcaccatcggcaacgagcggttccactgccccgaggcgctcttccagccttccttcctgggcatggaatcctgtggcatccacaaaactaccttcaactacatcatgaagtgtgacgtggacatctgcaaagacctgtacaccaacacagtgctgtctggcggcaccaccatgtaccctggcatcaccaacaggatgcagaagaagatcaccgccctagcacccagcatgatgaagatcaagatcattgctcctcccgagcgcaagtactccgtgtggatcagcggctccatcctggcctcgctgtctaccttccagcagatgtggatcagcaagcagaagtatgaccagtccggcccctccatcgtccacgaatgcttctag

SEQ ID NO: 15458 - DNA, 732 bp, Homo sapiens
  SIMILAR (517)..(675): 691254mologous to Rhizopus azygosporus actin,accession number AJ287194,Smith-Waterman Score=186.
atgccactgagaacaaaagaatttgggctcatgatggaaagacttagtgaggacacagaagagaccaccgaagatcaaagacaagaagttgagaaggcagcctccaagacacgggccctccgccggcgtcagcgtaaagcccagagacctcctgctcttgaggcacccaaggagatcccaccagaagctgtgaaggagtatgttgacatcatggaatggctggtggggactcacttggccactggggagtcagatggaaaacaagaggaagaagggcagcagcaggaggaggaagggatgtatccagatccaggtctcttgagctacatcaatgagctgtgttctcagaaggtctttgtctccaagcccactatgaccctggaggagggactgccattggctgtgcaggagtgggagcacaccagcaactttgaccggatgatcttttatgagatggcagaaagggcagctgccgcaactgtgcctccacagggaatcacactgctctccgtatccccagccttccttcctgggcatggaacccgtgacatccatgaaactaccttcaactccatcatgaagtgtgacgtggacatccataaaggcctgtacgccaatgcagtgctgtccagcggcaccaccatgtaccctggcatcgcccaacaggatgcaaaaggagatcactgccctggctcccagcatgatgaagatcaagattattgctcctgctga

SEQ ID NO: 15459 - DNA, 1446 bp, Homo sapiens
  SIMILAR (196)..(3030): 941254mologous to Homo sapiens putative p150,accession number U93567,Smith-Waterman Score=4611.
  misc_feature (1)...(1446): n = a,t,c or g
atggaagaagagatcgccgcgctggtcattgacaatggctccggcatgtgcaaagctggttttgctggggacgacgctccccgagccgtgtttccttccatcgtcgggcgccccagacaccagggcgtcatggtgggcatgggccagaaggactcctacgtgggcgacgaggcccagagcaagcgtggcatcctgaccctgaagtaccccattgagcatggcatcgtcaccaactgggacgacatggagaagatctggcaccacaccttctacaacgagctgcgcgtggccccggaggagcacccagtgctgctgaccgaggcccccctgaaccccaaggccaacagagagaagatgactcagattatgtttgagaccttcaacaccccggccatgtacgtggccatccaggccgtgctgtccctctacgcctctgggcgcaccactggcattgtcatggactctggagacggggtcacccacacggtgcccatctacgaggggctacgccctcccccacgccatcctgcgtctggacctggctggccgggacctgaccgactacctcatgaagatcctcactgagcgaggctacagcttcaccaccacggccgagcgggaaatcgtgcgcgacatcaaggagaagctgtgctacgtcgccctggacttcgagcaagaagatggccacggctgctttccagctcctccctggagaagagctacgagctgcctgacggnccaaggtcatcaaccaattggcaattgagcgggttccgcttgcccctgaggcactctttccagccttccttcctggggcatggagtcctgtggacatccacgaaactaccttcagactccatcatgaaagtgtgacgtggacatccgcaaagacctgtacgaccaacacagtgctgtctggacggacaccaccatgtaccctgggcattgccgacaggatgcagaaggagatcactgccctggcacccagcacaatgaagatcaagatcattgctcctcctgagcgcaagtactccgtgtggatcggcgggttccatccttgggcctggttgtcccacctttccagcaagatgtgggttcagcaagcaaggagtatgacggagtccgggcccctccattcgtccaccgcaaatgggttcttaggcggactattgactttagttgcgtttacaccctttctttggacaaaaccttaactttgcgcaggaaaacaaggatgaggattgggcatggctttatttgttttttttgttttgttttgggttttttttttttttttgggcttgacttcagggatttaaaaactgggaacgggtggaagggtgacaggcagtcggttggggagcgagcatccccccaaagtttcacaatgtgggccgaggatttgattgcacatgttgtttttttnaatagtcattcaaatatgga

SEQ ID NO: 15460 - DNA, 2383 bp, Homo sapiens
  SIMILAR (1182)..(2051): 931254mologous to Homo sapiens unknown,accession number AF149422,Smith-Waterman Score=1460.
atgaaacagataacctttgctccccgtaatcacctgctcaccaataccaatacctggacgcccgacagccagtggctggtatttgacatgcgtacttctggcgcgtcgtttaccggcgagaccattgagcgtgtgaatataccaaccggttatgtcgagaagccaaataaacagtgtagacactccgtcactcgctacggccacggcggccactcggatcacactccgtcactcactgtggccacagtggccactcagatcacaccccgtcactcgggccacggcagccactgtgatcgcaacctgtcacttgctacagccacagcagccactctgatcacaccccatcacttgctatggccacgatggccccttggatcacactctgtcacttggtgtggccacggtggccactcggatcacactccatcacccactacggccacagcagtcactcggatcacatcccgtcacccactacggccacagcagtcactcggatcacatcccgtcactcactacagccatggcagccactctgattgcattcccgtcactcgctatgcccacggcggccactcagatcacactccatcacttgctatggccacggcagccactcagatggcactctgtcactcactatggccacggcagccacttggatacttggtcaataaaataagaagaaagcgttgtacggatggggtatcgccaagcggtaaggcaccggtttttgataccggcattccctggttcgaatccaggtaccccagccatcttcttcgagtaagcggttcaccgcccggttattggggtatcgccaagcgccaccaaattctgaatgtatcgaatatgttcggcaaattcaaaaccaatttgttggggtatcgccaagcggtaaggcaccggattctgattccggcattccgaggttcgaatcctcgtaccccagccaatttattcaagacgcttaccttgatttcaaatatgcgtgcattagagaatgattttttcaattctcccccaagaaaaactgttcagtttggtggaactgtgacagaagtcttgctgaagtacaaaacggcgattgaaaaacggctggaaaaactggcggttgatccacatcgcgaccgtgcgcagatgctgaaagtcgaaaacgtccagcaggcgtggcagcaatggatcaacaaactgccgcccgcacgtcgtgaggatgaagacgtgaaagagatccgttggatgatagaagagttgcgcgttagttacttcgctcaacaacttggcaagaactctcgggcagaatccatgctgtggtccttccataaagcggctatagaagcggcacgcaccaatatcattcaggcgcaaacccgcgtcgaagcggcacaagccactgaacggcgcattgccgcagatatcgatgacagcgaactgaaagccccgcgtgacggacgcgtgcagtatcgggttgccaagccaggcgaagtgctggcggcaggcggtcgggtgctgaatatggtcgatctcagcgacgtctatatgactttcttcctgccaaccgaacaggcgggcacgctgaaactgggcggtgaagcccggctgatcctcgatgccgcgccagatctgcgtattcctgcaaccatcagttttgtcgccagtgtcgcccagttcacgccaaaaaccgtcgaaaccagcgatgaacggctgaaactgatgttccgcgtcaaagcgcgtatcccaccggaattactccagcagcatctggaatatgtcaaaaccggtttgccgggcgtagcgtggtcattcctgtattccatcaaccagacaatctgcttgcggttggatagcattgaagccaaattgcaagccctggaggctacttgtaaatccttagaagaaaagctggatctggtcacgaacaagcagcacagccccatccaggttcccatggttgccggctcccctctcaggacaacccagatgtgcaacaaagtgcgatggtgaacccgtgagcaactgtggtacctccacctgtcccacaacctacaactcagcagtaccaagggctggacgctggtgccaccacacgggtcccgcgaagcctgctgcgaagtgaaggaagccagacacaaaagtctccatcctgcgggagtcactcacaggacaattctggaggacgcaaagctgtaggagcgaggagagacaggtggtggttgggggccgggaaggggcctgactgcagaggggcaaaatgtgggctgcctctgtcggggcagaagtgccccactctagacccttaccaagtcgtcggctgtacatcgaaaacgggtgagccttatgtgtgtacgtgataccgcaataaacctgacttgtaaaagca

SEQ ID NO: 15461 - DNA, 1503 bp, Homo sapiens
  SIMILAR (414)..(2981): 981254mologous to Homo sapiens putative p150,accession number U93563,Smith-Waterman Score=4383.
atgtcatcgggccggcgggacgcattagccagagggctgggaaacagcggagatggcgcgccccacctgggagaacacaggcagctggaggacgtcggcggtgttactgtcacggtcacctggactgggcggttgcaggcggccggatgctggacccgcagcgtgagctccacggccgcagcagggaggcgagagccctcaaccagggacggagccgccctgtccacggagcctccagacccaccagaacgcctgggtcaccgcggctcccgggcgggcctcactgcgctgggacacgtcaggacacgtggcagctcccagcgcggtggaaggcctgagccctgggaacactggctggaaaatggaactcggaggacagagcttgtcgacggcgtctcgtatgaatcctggaggagacgcccgtgtcgagggcaattagaatccaggcttgttctggagaatcatgtagcgacagatgaagacgaacctgctttgaaatgccagcgactagaaatcaattgccaggatccatctataaagtcattcctgtattccatcaaccagacaatctgcttgcggttggatagcattgaagccaaattgcaagccctggaggctacttgtaaatccttagaagaaaagctggatctggtcacgaacaagcagcacagccccatccaggttcccatggttgccggctcccctctcaggacaacccagatgtgcaacaaagtgcgatggccatgcactggctctgtgtctcctgcatcttcacttgtctgcctggctggcggccagcggcaccagaccaaggacccgccgctatttccctgtgttcactgccttcctcttcgcaaggacaccgagagcccctggctctgggcctcccatctgcccttcctcccgcccatcgtcagcgtttacgagggtctgccacggttcccattccaccgtgacctggcaggagatgtcagaccgcagctgagggccctgctggtttcctacgaggaggctgcagatgggaatgaggacctcacggtcaagggcgtggacacctcccgcctgacagatgacacatttctgagctgtcttccccggaggccgggctgcaacccgagaaggcgccgcgccatcggccctcaccctgctccgcctaagctgctgcttttcctctgcaaatgccctgggctggacgtcaaaccacagtcaggtgcccccgtggataagctgcacccacctatccccaggagcacagccagcacctctcagggacgccgatatcacgttttggcagaaccgactatacctgctgtgtgcggcatgcagtttgtccagagcatacagcgagacctctctgaagacccccaaatggcctcgaccccggcttttgagggagggctggacagctcagcctcccgtttcctgcgcacgcaccccgatgctgcaagctgccatctgggaggcttggtattcgggttagagacaaacagcgcccgacggtaa

SEQ ID NO: 15462 - DNA, 925 bp, Homo sapiens
  SIMILAR (2)..(922): 851254mologous to Mus musculus Deltex2deltaE,accession number AB015424,Smith-Waterman Score=1386.
agctcctccttccctggggagccagcccctctaccgctccagcctctcccacctgggaccgcagcacctgcccccaggatcctccacctccggtgcagtcagtgcctccctccccagcggtccctcaagcagcccagggagcgtccctgccactgtgcccatgcagatgccaaagcccagcagagtccagcaggcgctcgcagaagcgaccccgaagccagagccagagccagagcaggtcataaaaaactacacggaagagctgaaagtgcccccagatgaggactgcatcatctgcatggagaagctgtccacagcgtctggatacagcgatgtgactgacagcaaggcaatcgggtccctagctgtgggccacctcaccaagtgcagccatgccttccacctgctgtgcctcctggccatgtactgcaacggcaataaggatggaagtctgcagtgtccctcctgcaaaaccatctatggagagaagacggggacccagccccagggaaagatggaggtattacggttccagatgtcgctccccggccacgaggactgcgggaccatcctcatagtttacagcattccccatggtatccagggccctgagcaccccaatcccggaaagccgttcactgccagagggtttccccgccagtgctaccttccagacaaacgcccagggccgcaaagtccttaagagctcctgaaggtggcctggaagaggcggctcatcttcacagtgggcacgtccagcaccacgggtgagacggacaccgtggtatggaacgagatccaccacaagacagagatggaccgcaacattacgggccacggctatcccgaccccaactacctgcagaacgtgctggctgagctggctgcccagggggtgaccgaggactgcctggagcagcagtga

SEQ ID NO: 15463 - DNA, 857 bp, Homo sapiens
  SIMILAR (582)..(809): 971254mologous to Homo sapiens hPMSR6,accession number U38980,Smith-Waterman Score=417.
  misc_feature (1)...(857): n = a,t,c or g
atgggtttagactggattattcgctttngtggcggcttcttacatcatgccagcttcttcgtggggagaggcaggacgctgcttatgtacttctctcttctaggagcgaccccgaagccagagccagagccagagcaggtcataaaaaactacacggaagagctgaaagtgcccccagatgaggactgcatcatctgcatggagaagctgtctgcagcgtctggatacagcgatgtgactgacagcaaggcagtcgggcccctggctgtgggctgcctcaccaagtgcagccacgccttccacctgctgtgcctcctggccatgtactgcaacggcaataagggccctgagcaccccaatcccggaaagccgttcactgccagagggtttccccgccagtgctaccttccagacaacgcccagggccgcaagagctggtgccctacacaccacagataacagcttgggacctggaagggaaggtcacagccaccaccttctccctggagcagccgcgctgtgtcttcgatgggcttgccagcaccaacgataccgtctggctcgtggtggccttcagcaatgcctccaggggcttccagaacccggagacactggctgacattccggcctccccacagctgctgaccgatggccactacatgacgctgcccgtgtctccggaccagctgccctgtgacgaccccatggcgggcagcggtggtgcccccgtgctgcgggtgggccatgaccacggctgccaccagcagcccttctgcaacgcgcccctccctggccctggaccctatcggtgggtggtccccaccggagccctgggactggggctgtgcttggggtag

SEQ ID NO: 15464 - DNA, 1374 bp, Homo sapiens
  SIMILAR (1215)..(1078): 711254mologous to Homo sapiens Human secreted protein, SEQ ID NO: 7077,accession number G02996,Smith-Waterman Score=156.
atgtcctttgcagggacatggttggagctggaaaccattattgtcagcaaacttatgcaggaacagaaagccaaacactgcatgttttctcttttatacttttgcaaaggcggtttcatcgtcacggcatctccagcccttcatagtgcctggcacatagatagagatttattatgggaattcactcacgtgattatggaggtcgagaagtccagtgatctgccatctgcaacgtggagaaccaggaaagctggtggcataactcagtctgagtctgaaggcctgagagccaagattatggggtggaagggaaagggctgcagtataagtctgtatgagctgttggctgctctgccagcccagctgcagccacatgtggatagccaggaagacctgaccttcctctgggatatgtttggtgaaaaaagcctgcattcattggtaaagaaggggaaaggggatcaggcatatcatgtgatgacagctggagccagggtgcagggaggggatgtgccacacactttactcaaccagatctccaaagaacgcactgactgtcagaaggatggcaccaagccacgagggatccgcccccacgacccaaacacctcccaccaggccccacctccaacactggggaccacaattcaatggaggttgctcgtccatgaaacacactccagtctgcagccacctgggagtgggaaccaagggcgagcgaaccgggcgggcaggggtggaacttgcggggactgcgggtatgaggaggagctacagagctgtcaccaatcagagcccagctttgttttctcttgccgaccaatgagggagttctgctggagaggcgtcttcaagtctgagacgcctatcgccttcgcagcctatcagcaggcccctcttacccgcgggcgagaaggttttagtggtctggatagaagatcagaccagccacaacattcccttaagccagcagagcaaaaccctctcttcaattcgatgaaggctgagagaggtaaggaagttacagaagaaaagttggaagctagaagaggttggttcatgaggtttaaggaaagaagctgcttccctaatgtaaaagtgcaaggtgaagcagcaaatgctgatatagaagctgtagcatgttatccagaatatctagctaagatcactgatgaaggtggctacactgaacaacagattttcagtgtagatgaaacagccttatattggaagaagatgccgtctcggactttcttagctagaaggaaaaattgccacagccatccatctttcagcagccagcaccttgttcagtcagcagccatcaacatcaaggcaaaatcctccaccagcaaaaagattatgactccctga

SEQ ID NO: 15465 - DNA, 906 bp, Homo sapiens
  SIMILAR (1)..(1077): 911254mologous to Homo sapiens putative p150,accession number U93563,Smith-Waterman Score=1706.
ctagtccaagtgtgaggaatgtggagatgaatgtggagaagtcttcgttccagaggaaagggcacaacagcgggccagctccaagcctaaaagtctgaaggctgaaaaaccagactgatggtcccggatgaagcgtaccgtttcccgattgattctctctgaataatgcccacctgcgcacttgtagaacctctcctcttgtggctttagcactccaaaaccaagtgccttggaagaagggaataatacgatgacttggtcttgaaatatctgttcagtgctaagctgcacaacttcaggggacatcatccatattgtaatagattgtgatggacatattctgagaggcacaatgtggatggtacccctggagttctgcaaggaagctgcccctagtgccaggctgggtcctgcagcctcaggtacaaggctgataaccacaaacccatactccaagccatcttccatagcccagactctaacagactcaggattcaggtctgcccctgcagacccagataccaggcccagccatgaagacctgagcaagtacagaggagcatagatcttcagggactcctccagggcgcccccggtgatctgcaggaaggagacccggcaggaagggtgccaagtgtggccgatctcatagcagttatgagggatggacttgctgagggccgccatgacgaggaacagcgcggagaagacaggagggggagagcctgagccctcaaagctgctgttgttggtcatgtattgccgtaactgagggccttctagatctctgtcacctagtttcttaataaacttgcttttgctttgcgctgcggacttgccctgaattctttcttgcgcaaaatccaagaaccctctcttggagtctaaatcaggatccctttccat

SEQ ID NO: 15466 - DNA, 560 bp, Homo sapiens
  SIMILAR (158)..(559): 1001254mologous to Homo sapiens A human proliferation and apoptosis related protein,accession number Y84901,Smith-Waterman Score=700.
cacatcctcctggcatatgaggagtataacccgaggaagcccctccttcagaggaagcctctccagtcacctctgccctctccaatgacatgagtcctcccaggtgacctcagccctcccaggtgatgtccttccatggtgactctggctcttgcaggaggtgggctactgcagggacctgagccacatcgccgccttgttcctcctctatcttcctgaggaggatgcattctgggcactggtgcagctgctggccagtgagaggcactccctgcagggatttcacagcccaaatggcgggaccgtccaggggctccaagaccaacaggagcatgtggtagccacgtcacaacccaagaccatggggcatcaggacaagaaagatctatgtgggcagtgttccccgttaggctgcctcatccggatattgattgacgggatctctctcgggctcaccctgcgcctgtgggacgtgtatctggtagaaggcgaacaggcgttgatgccgataacaagaatcgcctttaaggttcagcagaagcgcctcacgaagacgtcca

SEQ ID NO: 15467 - DNA, 1942 bp, Homo sapiens
  SIMILAR (935)..(1609): 561254mologous to Homo sapiens oncogene,accession number X63547,Smith-Waterman Score=574.
gctggtgctggcctctgggatggaggagcttcagaacagatccctgtttcaggctgacttcatcccgctggatggaattccagccaatgtgatccaaagagggaagcagtaccaggctgcagccctcgtcatgctgaagatggagcctcctgggaagctgctacccatggtcatccagtgttggacgcagggcctggtggaaggtgtttgggtcatggcttcatgctgtcctcctgataatgagtgtgtggagatcgtccacctcctccaccaaagggatgacacggtgagggtggaccctgagctgcaggcctgggatcaggagatcatggaggtggggctgtgccaggcccaggaccgagcacacacgaagggcacagacctgctgcacccccgcagcagtgcaaggccagctctagaggccatctcaatactgtatatgctttggctccaacctgaactcaatgccctgacgcttgggtacccccttgagcatcagaaagtatatgtctcaggccctgagcccaaagctgtgctgagacaatttcaaacagatctggacaacctggaaagggaaattgtggcccgaaatgagaaactagaccttccctatgactatctgaagcccagctacatagagaacatatcactatctgagatcaaatattctgtgagtgaattctcaggaaagctgatggttttaaagtgtggcacttccttgttctccacttactccctcctgccaccttgtgaagaagatgcctgcttccccttcaccttccgccatgattcccatcatgggcccttcacccttggcaggtggacaccattgaaactgccggggcaggtgtatgcccatttcatggcatttggggacaatgggactctctgtccaggtcccactgtcctcaagtccttgggaagatgcacacccctgctggagactccagagacccatgcagctgggtcccaccagggctccagagcccaagacccagcatccagggacggctccgggaagcctggtagctccgctaactccaacattcctcatttgacagcaaatgcagcaggagatgagacgcaagagcaagtggatggcaatgctgggaaaatgggagacatatcagaacagcaaaaaggtcatctgatgaagcgagtgtataagggcattcccatgaacgtccgggccgaggtgtggtcagtcctcctgaacattcaggaaatcaaggcgaaaaaccccagacaataccgggtcatgaaggagaagggcaagaggtcatctgagcacatccaccagatcgacctggctgtgagccagacactaaggaaccacatgttcttcagggatcgatatggaaccaagcagcaggaactattctacatcctcctggcatattcgaagtataacccagtggtgggctactgcagggacctgagccacatcgctgccttgttcctcctttatctgcctgaggaggacacattctgggcactggtgcagctgctggccagtgagaggcactcctgcagggtaggtgaacagctgcccctggggcttcacgcagccagacccggggatggccaccctggccagccaaggcaccttccttgtgtcgccagcttgttgggagcctttaggacgtctctgctgacggtcccaaaggaacccggaactgaccccccagagcccaagtcagacgcctttcatccccatcagcagaaggcatctcatcctccccgtggctgccctctgtgtcctggagccacgccctccggctctgattctgtgcagctggctctccgcaacctgagagtcctcctgcccttcagttgctcaggctccagctgcccttggtacccacgaaaggaggccctgcatcctggggggctggaggaacagcgggggctgcagcccctcatggggctggtgacaggctga

SEQ ID NO: 15468 - DNA, 465 bp, Homo sapiens
  SIMILAR (424)..(305): 901254mologous to Homo sapiens Protein sequence encoded by clone p199-7 (PL mutet.rsT4),accession number P93369,Smith-Waterman Score=217.
atgaaaaaagcatcccgaacaaccacagtcagccacccatccatggccccagctcttctgggcctgagcggctttactaaaggagttagacgagcccatactccagtcacttattttcataagcgctcgctgcagccgtgtatccgagccatagcgagcgaactggtgaggaagcaaagaagatctgttctgtcagatagctcttacgctcagcgcaagaagaaatatcctccgtgggaaaaactccaggacgggtgtcctatagaaattgcttcaacgcaaatagcgctaccagcgcgcattaggactggcgatgctgtcggaatggacgatatccccaaaggggccggtcagtaccggcataaccaagcctatgcttacagcatccagggtgacggtgccgaggatgacgatgagcgcattgttagatttcatacacggtgcctgactgcgctagcaatttaa

SEQ ID NO: 15469 - DNA, 6390 bp, Homo sapiens
  SIMILAR (712)..(2883): 991254mologous to Homo sapiens unknown,accession number AF148856,Smith-Waterman Score=3781.
atggcaaatgacttgccacacagcaattcaggggatggccagaaacccagttcccctgatttattcacggctccactcctggcagatcccaccgtgggcttcctccctaatgatgccgaggaactattcatctttctcacggaaataactgagatcaccattccatgccgagtaacagacccacagctggtggtgacactgcacgagaagaaaggggacgttgcactgcctgtcccctatgatcaccaacgtggcttttctggtatctttgaggacagaagctacatctgcaaaaccaccattggggacagggaggtggattctgatgcctactatgtctacagactccaggtgtcatccatcaacgtctctgtgaacgcagtgcagactgtggtccgccagggtgagaacatcaccctcatgtgcattgtgatcgggaatgaggtggtcaacttcgagtggacatacccccgcaaagaagtaatgtggggccaggcaggggtcggaggaggggccaggaacgggtggatatctggcttgcaggctgatttctccccggcccctcctgatttggggggcctgcccaacctgttgctgcagagtgggcggctggtggagccggtgactgacttcctcttggatatgccttaccacatccgctccatcctgcacatccccagtgccgagttagaagactcggggacctacacctgcaatgtgacggagagtgtgaatgaccatcaggatgaaaaggccatcaacatcaccgtggttgagagcggctacgtgcggctcctgggagaggtgggcacactacaatttgctgagctgcatcggagccggacactgcaggtagtgttcgaggcctacccaccgcccactgtcctgtggttcaaagacaaccgcaccctgggcgactccagcgctggcgaaatcgccctgtccacgcgcaacgtgtcggagacccggtatgtgtcagagctgacactggttcgcgtgaaggtggcagaggctggccactacaccatgcgggccttccatgaggatgctgaggtccagctctccttccagctacagatcaatgtccctgtccgagtgctggagctaagtgagagccaccctgacagtggggaacagacagtccgctgtcgtggccggggcatgccccagccgaacatcatctggtctgcctgcagagacctcaaaaggtgtccacgtgagctgccgcccacgctgctggggaacagttccgaagaggagagccagctggagactaacgtgacgtactgggaggaggagcaggagtttgaggtggtgagcacactgcgtctgcagcacgtggatcggccactgtcggtgcgctgcacgctgcgcaacgctgtgggccaggacacgcaggaggtcatcgtggtgccacactccttgccctttaaggtggtggtgatctcagccatcctggccctggtggtgctcaccatcatctcccttatcatcctcatcatgctttggcagaagaagccacgttacgagatccgatggaaggtgattgagtctgtgagctctgacggccatgagtacatctacgtggaccccatgcagctgccctatgactccacgtgggagctgccgcgggaccagcttgtgctggccacagcccgcagcagtgagaagcaagcccttatgtcggagctgaagatcatgagtcaccttgggccccacctgaacgtggtcaacctgttgggggcctgcaccaaaggaggacccatctatatcatcactgagtactgccgctacggagacctggtggactacctgcaccgcaacaaacacaccttcctgcagcaccactccgacaagcgccgcccgcccagcgcggagctctacagcaatgctctgcccgttgggctccccctgcccagccatgtgtccttgaccggggagagcgacggtggctacatggacatgagcaaggacgagtcggtggactatgtgcccatgctggacatgaaaggagacgtcaaatatgcagacatcgagtcctccaactacatggccccttacgataactacgttccctctgcccctgagaggacctgccgagcaactttgatcaacgagtctccagtgctaagctacatggacctcgtgggcttcagctaccaggtggccaatggcatggagtttctggcctccaagaacgtacgtgtggtgttggtggggcagagtgggggctgtggggagtgcgtccacagagacctggcggctaggaacgtgctcatctgtgaaggcaagctggtcaagatctgtgactttggcctggctcgagacatcatgcgggactcgaattacatctccaaaggcagcacctttttgcctttaaagtggatggctccggagagcatcttcaacagcctctacaccaccctgagcgacgtgtggtccttcgggatcctgctctgggagatcttcaccttgggtggcaccccttacccagagctgcccatgaacgagcagttctacaatgccatcaaacggggttaccgcatggcccagcctgcccatgcctccgacgagatctatgagatcatgcagaagtgctgggaagagaagtttgagattcggccccccttctcccagctggtgctgcttctcgagagactgttgggcgaaggttacaaaaaggcccgcttgcctgggttccatggcctccgatctcccctggacaccagctccgtcctctatactgccgtgcagcccaatgagggtgacaacgactatatcatccccctgcctgaccccaaacccgaggttgctgacgagggcccactggagggttcccccagcctagccagctccaccctgaatgaagtcaacacctcctcaaccatctcctgtgacagccccctggagccccaggacgaaccagagccagagccccagcttgagctccaggcccggattgaggccggcgtgctctgtgacaggcagctgctagagcccagattccaggtccaggtgagtcatgatcaggccccaggtaggagaagggcagacagagtgtccaaaagcgtgagagcacgaagtgaggagaaggtggagaagagagaagaggaagaggaagaggaagagaggaagcggagggaactgcggccaggcgagaagtgccaggaaactcagggagccacgagagactataagacagggactcagtcaggcaaagggaggcttatgggccaggtggaagcagaagtatgtggaacaggaagaaggagtgtgggggtgtatgcaggagctgcaagtgttcagtacagcagggagggtggatggagagagaagaggcagagatcagattgcaaaggcccctgtcagggaatcccagtgatagagcccagtgtccctgagctggtcgtgaagccaggagcaacggtgaccttgcgatgtgtgggcaatggcagcgtggaatgggatggccccccatcacctcactggaccctgtactctgatggctccagcagcatcctcagcaccaacaacgctaccttccaaaacacggggacctatcgctgcactgagcctggagaccccctgggaggcagcgccgccatccacctctatgtcaaagaccctgcccggccctggaacgtgctagcacaggaggtggtcgtgttcgaggaccaggacgcactactgccctgtctgctcacagacccggtgctggaagcaggcgtctcgctggtgcgtgtgcgtggccggcccctcatgcgccacaccaactactccttctcgccctggcatggcttcaccatccacagggccaagttcattcagagccaggactatcaatgcagtgccctgatgggtggcagaaaggtgatgtccatcaccatccggctgaaagtgcagaaaagggaggagagcaatatctctatcatgttcagggagcctgggtgttcaggggtctctcccccggtctcagtcatcccagggcccccagccttgacactggtgcctgcagagctggtgcggattcgaggggaggctgcccagatcgtgtgctcagccagcagcgttgatgttaactttgatgtcttcctccaacacaacaacaccaagctcgcaatccctcaacaatctgactttcataataaccgttaccaaaaagtcctgaccctcaacctcgatcaagtagatttccaacatgccggcaactactcctgcgtggccagcaacgtgcagggcaagcactccacctccatgttcttccgggtggtagagagtgcctacttgaacttgagctctgagcagaacctcatccaggaggtgaccgtgggggaggggctcaacctcaaagtcatggtggaggcctacccaggcctgcaaggttttaactggacctacctgggacccttttctgaccaccagcctgagcccaagcttgctaatgctaccaccaaggacacatacaggcacaccttcaccctctctctgccccgcctgaagccctctgaggctggccgctactccttcctggccagaaacccaggaggctggagagctctgacgtttgagctcacccttcgataccccccagaggtaagcgtcatatggacattcatcaacggctctggcacccttttgtgtgctgcctctgggtacccccagcccaacgtgacatggctgcagtgcagtggccacactgataggtgtgatgaggcccaagtgctgcaggtctgggatgacccataccctgaggtcctgagccaggagcccttccacaaggtgacggtgcagagcctgctgactgttgagaccttagagcacaaccaaacctacgagtgcagggcccacaacagcgtggggagtggctcctgggccttcatacccatctctgcaggagcccacacgcatcccccggatgagttcctcttcacaccagtggtggtcgcctgcatgtccatcatggccttgctgctgctgctgctcctgctgctattgtacaagtataagcagaagcccaagtaccaggtccgctggaagatcatcgagagctatgagggcaacagttatactttcatcgaccccacgcagctgccttacaacgagaagtgggagttcccccggaacaacctgcagtttgggcctgtgggggttgcagggagcccatgggcccttggacagaggccctttggtgcccagggacttaagggacctgtgtgcgtggcaggtaagaccctcggagctggagcctttgggaaggtggtggaggccacggcctttggtctgggcaaggaggatgctgtcctgaaggtggctgtgaagatgctgaagtccacggcccatgctgatgagaaggaggccctcatgtccgagctgaagatcatgagccacctgggccagcacgagaacatcgtcaaccttctgggagcctgtacccatggaggccctgtactggtcatcacggagtactgttgctatggcgacctgctcaactttctgcgaaggaaggctgaggccatgctgggacccagcctgagccccggccaggaccccgagggaggcgtcgactataagaacatccacctcgagaagaaatatgtccgcagggacagtggcttctccagccagggtgtggacacctatgtggagatgaggcctgtctccacttcttcaaatgactccttctctgagcaagacctggacaaggaggatggacggcccctggagctccgggacctgcttcacttctccagccaagtagcccagggcatggccttcctcgcttccaagaattgcatccaccgggacgtggcagcgcgtaacgtgctgttgaccaatggtcatgtggccaagattggggacttcgggctggctagggacatcatgaatgactccaactacattgtcaagggcaatgcccgcctgcctgtgaagtggatggccccagagagcatctttgactgtgtctacacggttcagagcgacgtctggtcctatggcatcctcctctgggagatcttctcacttgggctgaatccctaccctggcatcctggtgaacagcaagttctataaactggtgaaggatggataccaaatggcccagcctgcatttgccccaaagaatatatacagcatcatgcaggcctgctgggccttggagcccacccacagacccaccttccagcagatctgctccttccttcaggagcaggcccaagaggacaggagagagcgggactataccaatctgccgagcagcagcagaagcggtggcagcggcagcagcagcagtgagctggaggaggagagctctagtgagcacctgacctgctgcgagcaaggggatatcgcccagcccttgctgcagcccaacaactatcagttctgctga

SEQ ID NO: 15470 - DNA, 3992 bp, Homo sapiens
  SIMILAR (1)..(375): 1001254mologous to Homo sapiens serologically defined breast cancer antigen NY-BR-96,accession number AF308302,Smith-Waterman Score=648.
ggcttcaggaagggcagacagagtgtccaaaagcgtgagagcacgaagtgaggagaaggtggagaagagagaagaggaagaggaagaggaagagaggaagcggagggaactgcggccaggctaaaaggggaagaagaggatcagcccaaggaggaggaagaggaaaacaagacaaacagccagtgcagaggagaggaacgtgtgtccagtgtcccgatccctgcggagctagtagctgagagctctgtgccctgggcaccttgcagccctgcacctgcctgccacttccccaccgaggccatgggcccaggagttctgctgctcctgctggtggccacagcttggcatggtcagggaatcccagtgatagagcccagtgtccccgagctggtcgtgaagccaggagcaacggtgaccttgcgatgtgtgggcaatggcagcgtggaatgggatggccccgcatcacctcactggaccctgtactctgatggctccagcagcatcctcagcaccaacaacgctaccttccaaaacacggggacctatcgctgcactgagcctggagaccccctgggaggcagcgccgccatccacctctatgtcaaagaccctgcccggccctggaacgtgctagcacaggaggtggtcgtgttcgaggaccaggacgcactactgccctgtctgctcacagacccggtgctggaagcaggcgtctcgctggtgcgtgtgcgtggccggcccctcatgcgccacaccaactactccttctcgccctggcatggcttcaccatccacagggccaagttcattcagagccaggactatcaatgcagtgccctgatgggtggcaggaaggtgatgtccatcagcatccggctgaaagtgcagaaagtcatcccagggcccccagccttgacactggtgcctgcagagctggtgcggattcgaggggaggctgcccagatcgtgtgctcagccagcagcgttgatgttaactttgatgtcttcctccaacacaacaacactaagctcgcaatccctcaacaatctgactttcataataaccgttaccaaaaagtcctgaccctcaacctcgatcaagtagatttccaacatgccggcaactactcctgcgtggccagcaacgtgcagggcaagcactccacctccatgttcttccgggtggtagagagtgcctacttgaacttgagctctgagcagaacctcatccaggaggtgaccgtgggggaggggctcaacctcaaagtcatggtggaggcctacccaggcctgcaaggttttaactggacctacctgggacccttttctgaccaccagcctgagcccaagcttgctaatgctaccaccaaggacacatacaggcacaccttcaccctctctctgccccgcctgaagccctctgaggctggccgctactccttcctggccagaaacccaggaggctggagagctctgacgtttgagctcacccttcgataccccccagaggtaagcgtcatatggacattcatcaacggctctggcacccttttgtgtgctgcctctgggtacccccagcccaacgtgacatggctgcagtgcagtggccacactgataggtgtgatgaggcccaagtgctgcaggtctgggatgacccataccctgaggtcctgagccaggagcccttccacaaggtgacggtgcagagcctgctgactgttgagaccttagagcacaaccaaacctacgagtgcagggcccacaacagcgtggggagtggctcctgggccttcatacccatctctgcaggagcccacacgcatcccccggatgagttcctcttcacaccagtggtggtcgcctgcatgtccatcatggccttgctgctgctgctgctcctgctgctattgtacaagtataagcagaagcccaagtaccaggtccgctggaagatcatcgagagctatgagggcaacagttatactttcatcgaccccacgcagctgccttacaacgagaagtgggagttcccccggaacaacctgcagtttggtaagaccctcggagctggagcctttgggaaggtggtggaggccacggcctttggtctgggcaaggaggatgctgtcctgaaggtggctgtgaagatgctgaagtccacggcccatgctgatgagaaggaggccctcatgtccgagctgaagatcatgagccacctgggccagcacgagaacatcgtcaaccttctgggagcctgtacccatggaggccctgtactggtcatcacggagtactgttgctatggcgacctgctcaactttctgcgaaggaaggctgaggccatgctgggacccagcctgagccccggccaggaccccgagggaggcgtcgactataagaacatccacctcgagaagaaatatgtccgcagggacagtggcttctccagccagggtgtggacacctatgtggagatgaggcctgtctccacttcttcaaatgactccttctctgagcaagacctggacaaggaggatggacggcccctggagctccgggacctgcttcacttctccagccaagtagcccagggcatggccttcctcgcttccaagaattgcatccaccgggacgtggcagcgcgtaacgtgctgttgaccaatggtcatgtggccaagattggggacttcgggctggctagggacatcatgaatgactccaactacattgtcaagggcaatgcccgcctgcctgtgaagtggatggccccagagagcatctttgactgtgtctacacggttcagagcgacgtctggtcctatggcatcctcctctgggagatcttctcacttgggctgaatccctaccctggcatcctggtgaacagcaagttctataaactggtgaaggatggataccaaatggcccagcctgcatttgccccaaagaatatatacagcatcatgcaggcctgctgggccttggagcccacccacagacccaccttccagcagatctgctccttccttcaggagcaggcccaagaggacaggagagagcgggactataccaatctgccgagcagcagcagaagcggtggcagcggcagcagcagcagtgagctggaggaggagagctctagtgagcacctgacctgctgcgagcaaggggatatcgcccagcccttgctgcagcccaacaactatcagttctgctgaggagttgacgacagggagtaccactctcccctcctccaaacttcaactcctccatggatggggcgacacggggagaacatacaaactctgccttcggtcatttcactcaacagctcggcccagctctgaaacttgggaaggtgagggattcaggggaggtcagaggatcccacttcctgagcatgggccatcactgccagtcaggggctgggggctgagccctcaccccccgcctcccctactgttctcatggtgttggcctcgtgtttgctatgccaactagtagaaccttctttcctaatccccttatcttcatggaaatggactgactttatgcctatgaagtccccaggagctacactgatactgagaaaaccaggctctttggggctagacagactggcagagagtgagatctccctctctgagaggagcagcagatgctcacagaccacactcagctcaggccccttggagcaggatggctcctctaagaatctcacaggacctcttagtctctgccctatacgccgccttcactccacagcctcacccctcccacccccatactggtactgctgtaatgagccaagtggcagctaaaagttgggggtgttctgcccagtcccgtcattctgggctagaaggcaggggaccttggcattggctggccacaccaagcaggaagcacaaactcccccaagctgactcatcctaactaacagtcacgccgtgggatgtctctgtccacattaaactaacagcattaatgc

SEQ ID NO: 15471 - DNA, 4434 bp, Homo sapiens
  SIMILAR (157)..(1176): 921254mologous to Homo sapiens serologically defined breast cancer antigen NY-BR-96,accession number AF308302,Smith-Waterman Score=1605.
atgctagggctggggctgttgcgcttgcgccaggggtcgcatgcagtcacgcgctgccgaccgcttccggtgcgccgcgagggccgccgggacgggtctccctggcgatccgtggtgtgccgctactgccggtgcagccgccaaaccggtgcctcggtgacgaccgtgtccctgccgtcttcctcgagctccccggggcttgacccccggggccctcggcaggcatcggtgaagaagcctgcggaagcgaaccctgtgctcaggcccctcgtcaggcatgggaccccatatcgcgactccgaggaggggaagcgagaggggctgtcgcgactccgcgccgtgtgtcgccgggcggggccgcggggccggggctccttcagcccccgggatgcgcgcgcgagccctcgcctccacttccttgttgctgctgtcacgactggagccgcctctcgccgacagcggggagcgcgagtgcgccagccatccccctcgtccagccgccgggccaagcgcctccgggaatgtgagcggcgcagcttgcacgctcctccggccatggacgcatcatatgatggtactgaggtaactgtcgtgatggaggaaattgaggaagcctattgttacacctctcctgggccacccaagaagaagaaaaagtataaaatacatggagaaaagacaaagaaacccaggtctgcttaccttctgtactattacgacatctacctgaaagtgcagcaggagctcccccacctccctcagtctgagatcaataagaagattagtgagagttggaggcttctcagcgtggccgagaggagttactacttggagaaagccaaactagagaaggaaggtttggatcctaactctaagctctctgcactgactgctgtggttccggacatcccaggtttccgcaagatcctcccacgctcagattatatcatcatccccaagagcagcctgcaggaggaccggagctgccctcagctagagctatgtgtggctcagaaccagatgtccccgaaaggacctcctcttgtgtccaacactgccccggagacagtgcccagccatgcaggcatggcagagcagtgcctggctgtggaggccctggctgaggaggtgggagcccttacccagtcaggtgctgtacaggagattgccacctcagagatcctcagccaggatgtgctcctagaggacgcttccctagaagtaggggagagccaccaaccttaccagacaagcctggtaattgaagagaccttggtgaatggctcaccagacctccccactggaagcctggctgtgccccacccccaggttggggagagtgtatcagtggtaacagtcatgagggattccagtgagagtagctcctctgcaccagccacacagttcatcatgttgcctctgcctgcctactcggttgtggagaaccccacctccatcaaactgaccactacatatacccgccggggccatgggacatgcaccagcccagggtgctcctttacatatgtcaccaggcacaagccacctaagtgccctacctgtggtaacttcctaggagggaagtggatcccaaaggaaaagccagccaaagtaaaagtggaattggcttctggcgtctcttccaaaggctctgtggtgaaaagaaatcagcaacctgtcaccactgagcaaaattcctctaaggaaaatgcctccaaactgactctggagaattcggaagctgtaagccagctcctgaacgtagctcctcccagagaagtaggtgaggagagtgagtgggaggaagtgatcatctccgatgcccatgttttggttaaggaagctcccgggaattgtggtacagcagtcactaagacgccagtcgtcaaaagtggtgtgcagcctgaggtcactctggggacaactgacaatgacagtcctggagcagacgtaccaacaccatccgaggggacaagtacctccagtccactccctgctcctaaaaaacctacaggagctgacctgcttacccctgggtccagagctccagagcttaaaggcagagcacggggcaagccctcattactggctgcagcaagacccatgagagcaattttgccagccccagttaacgtggggcgaggcagcagcatgggactgcccagggccaggcaggccttttccctgagtgataagactccctctgtgaggacttgtggtctgaagccaagcacactgaagcagctgggccagcccattcaacagccatctggccctggtgaggtgaagctaccaagtggcccatccaacaggacttctcaggtgaaagttgtggaggtcaagcccgatatgtttcctccatataagtacagctgcactgtcacattggatttgggcctggctacatcaagaggccggggaaagtgcaagaatccctcttgtagctatgtctacaccaacaggcacaaacctcgaatttgtcccagctgtggtgttaaccttgccaaagaccggactgagaaaaccaccaaggctatcgaggtgagctcaccactcccagatgtactgaatgccacagagcccctgagcacagcccagagggagatccagcgccagtccacactgcagctgctgcgcaaagtcctgcagattcctgagaatgagtcagagctggctgaggtcttcgccttgattcatgaactcaacagctctcgacttatcttgtccaacgtgagtgaggagacagtcaccatcgagcaaacctcttggtcgaattattatgagtctccgtccacgcagtgccttctctgtagcagcccattattcaaagggggacaaaactccctggctgggccccaggagtgctggctgctgacagccagccgtctgcagacagtgactgcccaggtgaagatgtgtctgaacccccattgtctggccctgcacagcttcatagacatctacacaggtctctttaatgtggggaacaagctgctggtaagcctggacttgctttttgcaatcagaaatcagatcaagctcggagaggaccccagagtgtccatcaatgttgttctgaagtcggtgcaggagcagacagagaagactctgacctcggaggagctgagccagctgcaggagctgctgtgcaatggctattgggcctttgagtgcctcactgtccgagactacaatgacatgatctgtggcatctgtggtgtggcccccaaagtggaaatggctcagaggagtgaagagaatgtgctagcactgaagagcgtggagttcacctggcctgaattcctgggctctaatgaggtaaatgtggaggacttttgggccacgatggagacagaggtgattgagcaggtggcatttcctgccagcatccctatcaccaaatttgatgcgtctgttattgcccccttcttcccaccactcatgagaggagctgtggtcgtcaacactgagaaagacaaaaacctggatgtgcagccagtacctggcagtggcagtgccttggtgaggctgctccaggagggcacctgcaagcttgatgagattggctcctacagtgaagagaagctgcagcacctgctaaggcagtgtggaatcccctttggggcagaagactccaaggaccagctctgcttctccttgttggccctctacgaatctgtacagaatggagctagagctatacggcccccacgtcacttcacaggtggtaaaatctacaaggtgtgcccccatcaggtggtctgcggctccaagtatcttgtgcgaggtgagagtgcccgtgaccatgtggacctgcttgcctcttcccgccactggccgcctgtctatgtggtagatatggccacgtcagtggccctgtgtgctgacctctgctacccagagctgactaaccagatgtgggggaggaaccagggctgtttctctagccccacagagccacctgtgagtgtgtcctgcccagagctcttggaccagcattatactgtggacatgacagaaactgagcactctatccagcacccagtcaccaagactgccacgcggcgcatcgtccatgcaggcctacagcccaatcctggtgaccccagtgctgggcaccactccttggccctgtgccctgaattggcaccttacgcaaccatcctggcctccatcgtggacagcaaaccaaacggtgtccgccagcggcccattgccttcgacaatgccactcactattacctctacaaccgcctcatggacttcctcaccagccgcgaaattgtcaatcgtcagatccatgacattgtacagagctgccagcctggtgaggtggtcattcgtgacaccctctaccgccttggggttgctcagatcaagacagagacagaggaggagggtgaggaagaggaggtggccgcagtggcagaataa

SEQ ID NO: 15472 - DNA, 2066 bp, Homo sapiens
  SIMILAR (1060)..(1305): 971254mologous to Homo sapiens put. c-fms precursor,accession number X03663,Smith-Waterman Score=422.
atgaggccagggaccaggatccgactcaccattccgggagcgaaggaaggcccaggcccggccgactgggcgggacaagagaaccaggacacggagcaccaggggccggccatccgcttgtgcaggccgcctgtatatgtggaagatatggccacgtccagtggccatattagggaagtgggggagttcctgctgccttttcaggtagatgtcgtaatagtacaaagaaaggagcggggtcgcaaccatgagaaagacaaaaaccggaagcgcagccaggacagggaggttggggcaattcccaacaaggagcaagcccgagcccgcgcaagaaacacagataagcacggcgcggtcacgaaggcccgaaagtcgggccaccgggcaggcgtcacgcggaagaagggcatcaaccgggcagggacagacagcccctccatcccaggtatgtcccagcccttaccactcagggaaaaggcctgcctggccctgggcagtcccatgctgctgcctcgccccacgttaactggggctggcaaaattgctctcatgggtcttgctgcagccagtaatgagggcttgccccgtgctctgcctttaagctctggagctctggacccaggggtcccggcagccgggccccgcctccttcggagtccgagcgatgggcggggaaagggacaggcaggtatagctctgtcggcgccgcggtgtccacctcagtcaggccacggtggaagacgcgtgccgcggcgcctggttgcctgcagcggcccggacccgagaggccggaaaacgaagccggccagagtttgcaccaaggccactccaaactccgagagacaacggccgaaaaccaaacgaattacggcggtgtttccgggccgagcaaatcgccgcgacgaagaaccacgcaaagcacacacagtaaagggttcaggacattccggcaaagagaggaataccccaatttcgacccaaaatcaagggaataggacagagttacaaacagcactacccagcccggccctggaacgtgctagcacagaaggtggtgggttcgaggaccaggacgcactactgccctgtctgctcacagacccggtgctggaagcaggcgtctcgctggtgcgtgtgcgtggccggcccctcatgcgccacaccaactactccttctcgccctggcatggcttcaccatccacagggccaagttcattcagagccaggactatcaatgcagtgccctgatgggtggcaggaaggtgatgtccatcagcatccggctgaaagtgcagaaagccgtgaaccgagcataagcgagcgaactggcgaggaagcaaagaagaactgttctgtcagatagctcttacgctcagcgcaagaagaaatatgccaccgtgggaaaaactccaggcaaccaggcgccgcggcacgcgtcttccaccgtggcctgactgaggtggacaccgcggcgccgacagagctatacctgcctgtccctttccccgcccatcgctcggactccgaaggaggcggggcccggctgccgggacctacgggcgcggcgaggacgcaccggcgaagagatgccggaggcagagccagtgtaaacgcccgcggccgaggccgtcacgtggtactgccgggcgagcgacgctaccaccagccaataactcggcccagaccggggaggaagagcacggggatctttagagtccccgagcagggcttctaccctgagtcgttgtgtccagattccgggcgctatattgcctggttgctcaagaaccgggttgtggaacaggcgtttcgatggaggaggccagttcattcaagccaggactatcaatccagtgcctgtatggggggcaggaaggtgatgtccatcagcatccggctgaaagtccagaaaggacaaaaaactcagaacatcacctcaagcacggaaacagactctggagaccaggataagactccctctgtgaggacttgtggtctgaagccaagcacactgaagcagctgggccagcccattcaacagccatctggccctggtgaggtgaag

SEQ ID NO: 15473 - DNA, 431 bp, Homo sapiens
  SIMILAR (1)..(168): 1001254mologous to Homo sapiens axonemal dynein heavy chain,accession number AJ404468,Smith-Waterman Score=291.
cccacccctaaggtggagttggagttctggaagagcaggtatgaagatctgaaatacatctataatcaactgagaacaataacggtgaggggcatggccaagctcctggacaagcttcagagtagctactttccagctttcaaagccatgtacagagatgttgttgcagatgggactgcaatttcctggccatttgagcaccagacaagatctacgcttatcaaaattgccaagccagcaaagtctatgattagaagtaggtaaatttttttaggactccctctccatttcttggagcactgtgcgtcttctccctttttcttgtaaaatctcctctttgctcttcagtaccataggtcaaaatgtgcttttaaaggtctttgtcatttcacatggtctaagcttaattaaagcagtgattttcaaacaaa

SEQ ID NO: 15474 - DNA, 285 bp, Homo sapiens
  SIMILAR (279)..(4): 271254mologous to Molluscum contagiosum virus subtype 1 MC121L,accession number U60315,Smith-Waterman Score=73.
ttttaatgtttgaaaatcactgctttaattaagcttagaccatgtgaaatgacaaagacctttaaaagcacattttgacctatggtactgaagagcaaagaggagattttacaagaaaacgggagaagacgcacagtgctccaagaaatggagagggagtcctaaaaaaatttacctacttctaatcatagactttgctggcttggcaattttgataagcgtagatcttgtctggtgctcaaatggccaggaaattgcagtcccatctgacagtaggaatagaaa

SEQ ID NO: 15475 - DNA, 4219 bp, Homo sapiens
  SIMILAR (3749)..(2772): 951254mologous to Escherichia coli K12 putative EC 2.1 enzymes,accession number AE000230,Smith-Waterman Score=1711.
atgcggctcgcggaggagcgggccgcgctcgcggcggagaacgcggatggggaacccggcgccgaccgacgactgcgactcctggggacctacgtggccatgagcctgcggccggctgcgggcgcctgggagcgttgcgcggggagtgctgaggcggagcagctgctccaggccttcctgggccgcgatgctgccgaggggccgcggccgctgctggtggtgcggcccgggcccaggggcctggcaatacgccccgggctggaggtgggacctgagtcgggcctggctggcgctaaggcgctttttttccttcgcaccgggcccgagcctccagggcccgacagcttccgcggcgcagtggtctgcggggacctgcccgcggcacctctggagcacctagccgcgctgttctcggaggttgttctacccgtcctggccaatgagaagaatcgcctaaactggccccacatgatatgtgaggatgtcaggcggcacgcccacagcctccaatgtgacctctcagttatacttgagcaagtgaagggaaaaactttgctgcctcttccagcaggctcagaaaaaatggagtttgcggattccaaaagtgagacagtcttggattctatagataagtcagtcatctatgccattgagtctgcagtgatcaaatggagctaccaagtccaggtggtactcaagagagagtcttcccagccactcttacaaggggagaatcccacccctaagggtggagttggagttctggaagagcaggtatgatgatctgacatacatctataatcaactgagaacaataacggtgaggggcatggccaagctcctggacaagcttcagagtagctactttccagctttcaaagccatgtacagagatgttgttgcaggtccgtgtgagattatacaggtggaagaacttattgacttaacacaacaatgttcctggagctgtccctttgtgtctttcaaacactggggccaggacatacagttctggggtggccattatggagcctgtgtgaccaactccagggtggtcatctccattctgcattttctattcctactgtcagatgggactgcaatttcctggccatttgagcaccagacaagatctacgcttatcaaaattgccaagccagcaaagtctatgattagaactctagcagaggcacaggacatccatgtgcacctgataccgctccagcgccacctggaagctctggagaatgcagaatttccggaggtgaagccccagctgcggcccctgctccacgtggtctgtctgatttgggccacatgcaagtcctaccgctccccgggaaggctgactgtgctgctccaggagatttgcaaccttctcatccagcaggcctctaattatctcagcccagaagacctgctgagaagtgaggtagaagaaagtcagagaaaactgcaagtggtctcagacactttgagcttcttcaagcaagagtttcaggacagaagggagaatctccacacttacttcaaagagaaccaggaagtcaaggaatgggatttccagtcttctttggtctttgtgcgattggatggcttcctgggacaactgcacgtggtggagggtcttctgaagacggccctggatttccacaaactgggaaaggtggagttcagcggcgtcagagggaatgctctgagtcagcaggtccagcaaatgcatgaagaatttcaagagatgtacaggcttctctcaggatcctcctccgactgcctgtacctccaaagcacggactttgaaaatgacgtctctgaatttaaccagaaagtagaagatcttgaccgaagattggggactatctttattcaagcttttgatgatgcacctggcttggagcatgcctttaagctgctagacatagcaggaaacctccttgaaagaccgctggtagcgagggatacatctgataaatacctggtcctcatccaaatgttcaacaaagatctggatgcagtgaggatgatctacagtcagcacgtccaggaggaagcagaacttgggttctccccggtgcacaagaacatgcccaccgtggctggcggcctccgctgggcacaggagctgaggcagcgcatccagggtcctttcagcaactttggacgcatcacacacccgataactctggaaaacctgttaaagatgcacattccagggcctcacctgtcactggctgaatctgaatctggtgtgggctgtgaatctgccccttcagcaagctcctcctgtgattctgacggtgaccaggaatttatagagatcctttcaggaacagcactcatgaggaagggaggggaaacagatcgggcagagaaagaagttgagctgctgagctgcaagaaagttgcaatgggggtctcagctggtcctccagggagtttgggcccttcagagctgttctgcctccgtacccctacatcagctgatcatgaccaggcaccggtgagctgggagggggcttatgaggtggctgttgtctctgacccttgcaggtatgagacaagactttatgaggattggtgccggacagtatcagagaagtcacagtacaatctttcccaaccacttctaaaacgtgacccagagacgaaggagatcactatcaactttaacccacagctgatttcagtgctgaaagaaatgagctatcttgaacccagagagatgaaacacatgcctgagacagcagcagccatgttctcctccagggatttctatcggcagcttgtggctaatttagagttgatggcaaattggtacaacaaggttatgaaaactctgctggaggtggaatttccattagtggaggaagagctgcaaaatattgatctccgcctcagagcagcagaggagactttgaactggaaaacagaaggcatttgcgattatgtcactgaaatcaccagtagtattcatgatcttgaacaaagaattcagaaaactaaagacaatgtggaagagatccaaaacatcatgaaaacatgggtgactccaatatttaagacaaaagatggaaaaagggaatcccttctttctctggatgatcggcatgatcgaatggaaaaatattacaatctcatcaaggaatctggccttaagatccacgcccttgttcaggtcgacctggacggtataccagatttggcaaacatgcggcgcacactcatggagagagtccagagaatgatgggcctctgctgtggctatcagagcaccttcagccagtattcgtacctctatgtggaggaccggaaggaggttctgggtcagtttctgctgtacgggcacatcctcactccggaagaaattgaagaccatgtggaagatggcatcccagagaaccctcccctcctttctcagtttaaagtgcaaatcgactcctatgaaacgctctatgaagaggtgtgcaggctggaacccatcaaggtgtttgacggctggatgaaaattgatattcgaccctttaaggcatctctgctgaatattattaagaggtggagcctcctgttcaaacagcatcttgtggaccacgtcactcacagcttggccaacctggatgcgtttataaagaagagtgagagcggcttactcaagaaagttgaaaaaggagatttccaaggcttggttgagatcatgggacaccttatggctgttaaagaacggcagagtaacactgatgagatgtttgagcccttaaagcagactattgaattgctgaagacctatgaacaagaattgccagaaacagtgtttaagcagctggaggagctgcctgagaaatggaacaacataaaaaaggtggccattactgtgaagcagcaggtggccccactgcaggcaaatgaagtgacactcctccgccagaggtgcacagccttcgatgcagaacagcagcaattctgggagcaattccacaaagaagccccgttcaggtatgggccgaacactgctgcctctctttctgtgaacactgcagtctttgagtcatggataatctttttgtggggcggatttcctcccgtggtgaagcggtctgcttctggtccactgctcagcatcaacggctccaaccaggaggccaagctggagctcaatggtcctacatctgctgatgtgccagctagattgggtgccctttgccctaacgctccagctctgtga

SEQ ID NO: 15476 - DNA, 656 bp, Homo sapiens
  SIMILAR (244)..(654): 341254mologous to Mus musculus Iroquois homeobox protein 3,accession number Y15001,Smith-Waterman Score=118.
cacctgcgcccagcagtgcaggtgaaggcctggctgcggagagtggctgggaaacgctgagctttggggtcaggaatgccagctccactactcaccgcctgtgtcaccctgggaaaacagctctggccccaggttctccataagtaaaacagggtcactcatccctcccctccttaacgacatatgtcagaatcagaagccacaaatcattctctcccacccagcacgctgccttggtctcctagaccactttccccaacaatgggaaaggcgccaggcccagaacagggccgagaccggatgaggccagcgaagcgcccagggacaaactttcaggcagcgcccactctcggtctcgggcaattgcagggtccctccgagagcgaccgtctccagaaaacgcggccggcgcctgcctatgccctgagcctgaagagcccccggcgccgcccgccccgcactgggcccgcccctccgggattggtgccctgctaggggtggttgcctgtgacgtcaccggacgcgcccgcttctcgctggagtgcgcaccgagcggcagtgacttcgccgctgctgtagttccccggctggatgcggtgactggtgccagtgctcaggcgcccgctgcccttgacctcccgccccgcgagccctaa

SEQ ID NO: 15477 - DNA, 1242 bp, Homo sapiens
  SIMILAR (418)..(1038): 911254mologous to unidentified cloning vector 29kD protein essential for the replication of mini F plasmid,accession number AB015619,Smith-Waterman Score=970.
atgttagaactgtgtaggcctccagagaacctgagctataaaaggcagatccccctgcctggatcaagtttcaacaccctggccttgaaaaggaagcaacgaatacagcagccttcaaataaccccactttcccagacagtgatttcagggaagcctggggtgagtccctgctgctgcaagtgcccaagcctgtgagctcagtgcagggcccatcactggactgctggacagtctcaatggattcagagagattcaatataaagaggtacaaggagccaagctcattcttctctgggacacacagagtggctttggaactggctgtgaagatgtctgaaagctactaccgctatatggaagaaaccaaattcctacctgctgccacatgctgggaactgtcacagcaggaggacttcaaaaccaatattctttctgaagatctagtgtccgttgccagaaagccagtctctgcaaattctgagcctaatgaacaatgcgtgggatccacagggagacaaagagatattggagagagcccacagagtagctttgcaactggctttggggacttccgaaagctaccagcactgcactgtgagactctcatccctgagctgaattcatctgattcgacggcaagctttggtgagaacatagatatatttctgagggaaccatcaccgaaaatggacttcaaaaccaatattcttctgaagaatttagtgaccattgccagaaaagccagtctctggcaattcctgagctctgagaaacaaatatgtgggacccataggcaaacaaagaagatgttctgtgacatggacaagagtctcctctgcttgctgtgctccaactctcaggagcacggggctcacaaacaccatcccatcgaagaggcagctgaggaacaccgggagaaactcttaaagcaaatgaggattttatggaaaaagattcaagaaaatcagagaaatctatatgaggagggaagaacagccttcctctggaggggcaatgtggttttacgggcacagatgatcaggaatgagtataggaagctgcatccggttctccataaggaagaaaaacaacatttagagagactgaacaaggaataccaagagatttttcagcaactccagagaagttgggtcaaaatggatcaaaagagtaaacacttgaaagaaatgtatcaggaactaatggaaatgtgtcataaaccagatgtggagctgctccag

SEQ ID NO: 15478 - DNA, 1219 bp, Homo sapiens
  SIMILAR (799)..(1317): 991254mologous to unidentified cloning vector 29kD protein essential for the replication of mini F plasmid,accession number AB015619,Smith-Waterman Score=897.
atgacaacgctgaccggaacaggatctcgacaaaagaggatgcgctacagaaactggcacaaaccagctagaaccaagatggtgacaaaaacgacctctagagcacagtgtgagtggatcttcccccgggggctcccgtcagacagagtggcagccatggctcagtactgcgtgatcataaaactgaaggtgaagcccgagttctccctcttcaccagagagttggaaaagcaggaggaagaggagcaacaccaggtccccacgtccacgaggaccctgtcaccatctgctgtgggcacagcttctgcaggccctctctgcctttcctgggaggaagcccaaagtcctgccaactgccgtgcatgcagggaaccatcacagaaaaaggacttcaaaaccaatattcttctgaagaatttagtgaccattgccagaaaagccagtctctggcaattcctgagctctgagaaacaaatatgtgggacccataggcaaacaaagaagatgttctgtgacatggacaagagtctcctctgcttgctgtgctccaactctcaggagcacggggctcacaaacactatcccatcgaagaggcagctgaggaacaccgggagaaactcttaaagcaaatgaggattttatggaagaagattcaagaaaatcagagagatctatatgaggagagaagaacagccttcctctggaggaagaggacactgagactcaaagggatgacgtcaggtgcccaaggtactagtcagaaagtggccctggggcttctgcaacaaccactatgtcacacagtccgagctcaatccaactctgcaagagtccataagcaaaggggcggcgacgcggtgagtagtggagctggcattcctgaccccaaagctcagcgtttcccagccactctccgcagccaggccttcacctgcactgctgggcgcaggtggggaagtggggaaacggtgctccatcccctgcagagggcaggcgtgcggggagcggtggctgaactccacagacagctactgctcagctcttcagctgccggctttgaagagtgtgaggggctctgtacaagtggcccccacattactcaaggaccagatcatcaagagctttacttgtcccacgaaggagtctggaccttgtttacgtgcacaggagaccgctggaaggttctcagtggcgtgccatgtcccgacttctatttga

SEQ ID NO: 15479 - DNA, 2697 bp, Homo sapiens
  SIMILAR (373)..(891): 991254mologous to unidentified cloning vector 29kD protein essential for the replication of mini F plasmid,accession number AB015619,Smith-Waterman Score=897.
atgcgaatggctgccactgcctgggcggggctccaagggccacccctccccaccctctgtcccgcagtgaggacgggactctactgccgagaccaggctcacgctgagagggccacagatgtcgtgctcctggccccgttttgccagcccaagactaggagccacggcacctgtcctcccacagagagagacccccggggcgaaggctccactgagtacccaggcagagtggacggcattcagggctgggggacacgggcactcactggatggacagacagacgcctgctgtgccaggcctgccagacgctcccgccccggcactggtttcttcctggagctcgtggctggctagggggttctccatgtgctcatggccaggagagtctgccgagccagcccagccccattctactccgagtcgagtctgtaaagagcaggatgctgcggcgacgggcccaggaagaggacagcaccgtcctgatcgatgtgagcccccctgaggcagagaagaggggctcttacgggagcacagcccacgcctcggagccaggtggacagcaagcggccgcctgcagagctgggagtcctgccaagccccggatcgcagacttcgtcctcgtttgggaggaggacctgaagctagacaggcagcaggacagtgccgcccgggacagaacagacatgcacaggacctggcgggagacttttctggataatcttcgtgcggctgggctgtgtgtagaccagcaggacgtccaggacgggaacaccacagtgcactacgccctcctcagcgcctcctgggctgtgctctgctactacgccgaagacctgcgcctgaagctgcccttgcaggagttacccaaccaggcctccaactggtcggccggcctgctggcatggctgggcatccccaacgtcctgctggaggttgtgccagacgtaccccccgagtactactcctgccggttcagagtgaacaagctgccacgcttcctcgggagtgacaaccaggacaccttcttcacaagcaccaagaggcaccaaattctgtttgagatcctggccaagaccccgtatggccacgagaagaaaaacctgcttgggatccaccagctgctggcagagggtgtcctcagtgccgccttccccctgcatgacggccccttcaagacgcccccagagggcccgcaggctccacgcctcaaccagcgccaagtccttttccagcactgggcgcgctggggcaagtggaacaagtaccagcccctggaccacgtgcgcaggtacttcggggagaaggtggccctctacttcgcctggctcgggttttacacaggctggctcctgccagcggcagtggtgggcacactggtgttcctggtgggctgcttcctggtgttctcagacatacccacgcaggaactgtgtggcagcaaggacagcttcgagatgtgcccactttgcctcgactgccctttctggctgctctccagcgcctgtgccctggcccaggtacgagaagaggccggccggctgttcgaccacggcggcaccgtgttcttcagcttgttcatggcactgtgggccgtgctgctgctggagtactggaagcggaagagcgccacgctggcctaccgctgggactgctctgactacgaggacactgaggagaggcctcggccccagtttgccgcctcagcccccatgacagccccgaaccccatcacgggtgaggacgagccctacttccctgagaggagccgcgcgcgccgcatgctggccggctctgtggtgatcgtggtgatggtggccgtggtggtcatgtgcctcgtgtctatcatcctgtaccgtgccatcatggccatcgtggtgtccaggtcgggcaacacccttctcgcagcctgggcctctcgcatcgccagcctcacggggtctgtagtgaacctcgtcttcatcctcatcctctccaagatctatgtatccctggcccacgtcctgacacgatgggaaatgcaccgcacccagaccaagttcgaggacgccttcaccctcaaggtgttcatcttccagttcgtcaacttctactcctcacccgtctacattgccttcttcaagggcaggtttgtgggatacccaggcaactaccacaccttgtttggagtccgcaatgaggagtgcgcggctggaggctgcctgatcgagctggcacaggagctcctggtcatcatggtgggcaagcaggtcatcaacaacatgcaggaggtcctcatcccgaagctaaagggctggtggcagaagttccggcttcgctccaagaagaggaaggcgggagcttctgcaggggctagccaggggccctgggaggacgactatgagcttgtgccctgtgagggtctgtttgacgagtacctggaaatgggagcaggtttctgccccaacgcctgccctgagttagttcctgagctcaccgagccggagaaggcccgtgaccagccagaagcacggagcgcagggcaggacagccggcctgaggccgtgctgcagttcggcttcgtcaccatcttcgtggccgcctgtccgctcgcgccgctcttcgccctgctcaacaactgggtggagatccgcttggacgcgcgcaagttcggggggtcttctagagcgcaccagggactgggggttgcctggggatag

SEQ ID NO: 15480 - DNA, 924 bp, Homo sapiens
  SIMILAR (421)..(1071): 881254mologous to unidentified cloning vector 29kD protein essential for the replication of mini F plasmid,accession number AB015619,Smith-Waterman Score=963.
atgatttcacaattcattccagaaaattatttttcaggaaagtccagcgcgacttccgggtgggcgcgggctcagcgcgacttccgggtgggcgcgggctcggcgcgccccgcactcttgagcggtcggctggcgccgccggccctgggcagtgagaggcttagcacccgggccagcagctgcggagggctcccgcgcgccaccccgaggggacgggcgccacctcctgctacgcggcacccggtcccgtcaaccgcccaacggctgaggagtgcggcagcgcgccagagactggcgggcagctccgcccgcggccgggatgcactaggcaaagccagctgggctcctgagtccgtgttggaagttctggccagggcagtcaggcaagagaaagaaataaagggcattctattaggaaaagaggaagtcaaattgtccctgtttgcaggtgatatgattgtatatttagaaaaccccatcatctcagcccaaaatctccttaagctgatgagcaacttcagcaaagtctcaggttacaaaatcagtgtgcaaaaatcacatgcatttgtatacaccaataacagacaatcagagagccaaatcatgagtgaactcccattcacagttgctacaaagagaataaaatacctaggaatccaacttacaagggatgtgaaggacctctttaaggaaaactacaaaccactgctcaacgaaatacaagaggacacaaacaaatggaagaacattccatgctcatgggtaggaagaatcaatatcgtgaaaatggccatactgcccaaggtaatttatagattcaatgccatccccatcaagctaccaatgactttcttcacagaattggaaaaaactaaagttcatatggaatcaaaaaaagagcccatattgccaagacaatcctaa

SEQ ID NO: 15481 - DNA, 828 bp, Homo sapiens
  SIMILAR (295)..(771): 551254mologous to Homo sapiens reverse transcriptase homolog= pol {retroviral element},accession number S61070,Smith-Waterman Score=308.
atggtggcgggccacttccaaggtggtgcaagccttgtgttctctgacctggggtacttggcctcacagactacaaggaatggaatcttgggccacgtgctatactcactctttgttgagtctcccacaattaccattgttcctggcccagacttcaatcttgcctcccacattattccggataccacacctgaccctcatgactgcatctctctgacccacctgacattcaccccatctccccacatttccttcttccctgtttctcactctgatcacacttggtttattgatggcagttccacaaggcctaatcgccactcaccagcaaaggcaggctatgcaatagtatcttccacatctgttattgaggctaccattctgccctgctccactacctctcagcaagccaagctagttgccttatctcaggccctcactcttgcaaaaggactacatgtcaatatttatactgactctaaatatgccttccatattctcactaccatgcagtcatattggctgaaagaattttccttactacacaaggaagctggggtcattcactgcaagaggcatcaaaaggcgtcagatcccattgctctaggcaacgcttgtgctgataaggtggctaggcaagcagctagctttccaacttctgtctctcacagcaattctgatgcagataaggtggctagacaagcagctagctctccaacttctgtcctgacggccagtttttctccttcacatcggccactcccacctactcccccgctgaaacctccacctatcaatctcttctcacacaaggcaaatggttcttag

SEQ ID NO: 15482 - DNA, 1491 bp, Homo sapiens
  SIMILAR (1)..(621): 921254mologous to Leishmania major probable levansucrase precursor,accession number AL160371,Smith-Waterman Score=982.
atggttggatactttcgcctttggatacctggttttgccatcctaacaaaaccattatataaactcacaaaaggaaacttagctgaccccatagatcctaaatcctttccccactcctctttctgttccttgaagacagctttagaaactgcccccactctagctctccctgactcatcccaacctgcttcattacacacagccgaagtgcagggctgtgcagtcggaattcttacacaaggaccaggatcgcgtcctgtagcctttttgtccaaacaacttgatcttactgttttaggctggccatcatgtctccgtgcagccgctgctgctgccctaatacttttagaggccctcaaaatcacaaactatgctcaactcactctctacagctctcataatttccaaaatctattttcttcctcacacctgacacatatactttctgctcccggactccttcagctatacttacactttgttgagtctcccacaattaccattgttcctggcccggacttcaatccggcctcccacattattccggataccacacctgaccctcatgactgcatctctctgatccacctgacattcaccccatttccccacatttccttcttccctgtttctcaccctgatcacacttggtttattgatggcagttccaccaggcctaatcgccactcaccagcgaaggcaggctatgctatagtatcttccacatctatcattgaggctactgctctgcctccctccactacctctcagcaagctgaactagttgccttaactcaagccctcactcttgcaaaaggactatgcgtcaatatctatactgattctaaatatgccttccatatcctgcaccaccatgcagtcatatgggctgaaagaggtttcctcactacacaagggtcctccatcattaatgcctctttaataaaaactctgctcaaagccgctttacttccaaaagaagctggggtcattcactgcaaggggcatcaaaaggcatcagatcccattgctctaggcaatgcttatgttgataaagtggctagacaagcagctagctctccaacttctgtctctcacagcaattctgatgcagataaggtggctagacaagcagctagctctccaacttctgtccctgacggccagtttttctccttcacatcggccactcccacctactcccccgctgaaacctccacctatcaatctcttctcacacaaggcaaatggttcttagatctaggaaaatacctccttccagcctcacaggccccttctattctgtcgtcatttcataacctcttccatgtaggttacaagccactagcctgtctcttagaacctctcatttcctttccatcatggaaatctatcctcaaggagatcacttctcagtttcccatctgctattctactacccctcatggattgttcaggcctcctccctttcctacacatcaagctcagtga

SEQ ID NO: 15483 - DNA, 1476 bp, Homo sapiens
  SIMILAR (1)..(555): 1001254mologous to Cloning vector pZC320 SopA,accession number U26464,Smith-Waterman Score=981.
atgcctatcaaggtagactggataaagaaatctaggacacatacaccaagagatacaatgagccctaaaaggggaataaacatatccatacaggaatacaggaacacacctgacgccagtatactaagtgaactgagactggaacgggataccaatacgcaagtatacacatatgaacaggagcataccaataagaacaatggacatcaagcaatagacaaacaaaacaaaggacacataagaagggagagtgaccggggagagtattatcccctggactgcagacctacaggcagtctaaccgacaaaggatggggcatgcttctctgtgggatgatgacagctgggaaacccacacctattcttaccttcttgctagacgtgggcttgcctggtggaactgccatcaataaatcaagtgtgatcagggtgagaaacagggaagaaggaaatgtggagaaatggggtgaacgtcaggtggatcagagagatgcagtcatgagggtcaggtgtggtatccggaataatgtggaggccggattgaagtacgggccaggaacaatgaaggtatctctctctgtgttctacactacacaacaatgcagaaggtatctctctgtgctgtgctttgcaggcttagcccgcgcctcggtgcccttcaatgaggatttccaaatgtcccttgatgagaaactgttttcaaacctgcatcctctgggctcaagttcctcgcctccaaaaagtctgctgcactgccctctgctggaacatcagttcaccatgctgggattctcagacttaggagcccagctggcttcacctagtggatcccacaccagggctgcaggtgttgctgcctgccagcctgcgccgacactcacatggctcagcccttgggtggcgaggggactgggcaccttggagcagggggtggtgctcgttggggaggctcgggccgcacaggagcccatggagtgggtgggaggctcatgcatggtgggctgcaggtcccgagccctgccccgcgggaaggcagctaaagcttggcgagaaatccagcgcagcgccggtgcgggcggcgctcctgtgtccccgtggtccggcggcgccccctccagagcctgtcctccttccgcttcctctgtgcgtttcctctgcgccgctcgccgtctcgcgtgcaatacttactctcccgtcctttattgtgtccggaattggtggattcttggtctcactgacttcaacaatgaagccacggaccctcgcgatccctttctggcgaatgtaccaggtcaactggcggccgtggctatcgggacctgcgatggcaacgtctatagtgcgggtgacagagattaccgctttgcactggaatccattttgaaagcctgtacgttagcccttgctttagaagaggtcggcccgccagcggtacaagacaaaattggcgctgacccggaccggattgccctttaa

SEQ ID NO: 15484 - DNA, 654 bp, Homo sapiens
  SIMILAR (287)..(349): 1001254mologous to Homo sapiens Human secreted protein, SEQ ID NO: 7678,accession number G03597,Smith-Waterman Score=108.
ttttttttttttgggtttccatgtattttattccattccactcataccaagagacaattctttttgaggtgtgtttagctctctagacttaattactgctgtgtttgtcacattggctgaattgagatcggtgacataaggattcctgggagcctgcgctgggcgcgaatttaagatggctcctccatgatcttcactctctgggtgaaaactgtcggtcagcccatgcccaggattgttgatcagtgctgaaggtcctgaggctgtttttagcatagtctaaaacgcgagggtccgtggcttcattcttgaagtcagtgagaccaagaacccaccaattccggacacaatatcgacaaaacatgcatctttgatgtctgatagttacagagagaagaaattagttcctgtggtttacccccattctagcactccctccttccagtaattcctggaaggagggagtgcaccaatcgacactctgtatctagctactctggtggggccttggagaatctttacgtctagctcagggattgtaaatacaccagtcggcactctgtatctagctcaaggtttgtaaacacaccaatcagcaccctgcgtttagctcaaggtttgtgaatgcaccaatcgacactctgtatctagctg

SEQ ID NO: 15485 - DNA, 1003 bp, Homo sapiens
  SIMILAR (613)..(846): 781254mologous to Homo sapiens inhibitor 2,accession number X78873,Smith-Waterman Score=305.
atggaggctccacagggagctctggagcaggatggccctgcagtgttgtcccaacagaggcacaggaaaaagccctttacagccactccaattgatccatcataccatagatcacatgccatttccctgagcgtaattataggatattgtgtgcccccatcccacgctgccgaaatggcagcttatggctggacaatgggtaaaagcaagcttatggctggacaatggattacccagtctcaggtattttgtgatagcagcactgacggaccaagacagcacaaagctcagactgctattcttactaaacttcagagtcaacagagaagcaccaataacagtacagtgtctcaccgtcagcagtgggtcaactgcaggctgctaagggtcaagtgccagcggctaagggcacataaggagctgctaccagttcagcgttggctctggcgtcagggtcgttgtgtcccgacaacctctctggtagccgtttctgagacagcaggtgcaggtgcggccgctttagccctgagcaggctctgccgctgcttgcaggtctctgctagcgcccgacccttctcttcacggaccttgagcccacagcccaagtgctgggcaatggcagcctcgcaccagcccatcaaggggatcctgaagaacaagacctccaggacttcctctatggtggcgttgtcggaacagccctgcagaactgtccacgaggagctgagtaaaaaatgccagaagtgtgatgaaatgaacatcctgtcaacatatcatccagcagacaaagactatggtttaatgaaaatagatgagccaagccctccttaccatgggtataacgggtgatgatgaaaatgcatgtagtgatacagaaaccactgaaaccatggtatcagatatcttagctaagaaattagctgctgctgaaggcttagagccaaaatattgggttcaggaacaagaaagcagtggagaggaggacctcttagctgaagaatga

SEQ ID NO: 15486 - DNA, 1854 bp, Homo sapiens
  SIMILAR (1)..(888): 1001254mologous to Cloning vector pZC320 SopA,accession number U26464,Smith-Waterman Score=1548.
atgggtcagcagtgtgttgctggtagagatagtgccagcgtcagcccccagtccaagagaactacgcagccacttgggctggcctctggatctattgccgcctggaccaccaagactgtgtccaccctgcaagcacagagcctcaccctcaccactctgccgcccatccacacctgccaccagttcaccatggataatgatattgctgtgcttgtcgtcgacaatggctctggcatgtggaagggtgtgatgatgggcatgggtcggaaggacttctatgtgagcaacaaggcccagagcaagagaggtatcatgaccctgaagtaccccatggagcatggcatcatcaccaactgggatgacatggagaagatctggcaccacaccttctacaatgagctgcatgtggctcccaaggagcaccgtatgctgctgactgaggccaaccacaagaagatgactcagatcatgtttgagaccttcaacaccccagccgtgtatatggccatccaggccatgttgtccctgtacacctatggctgtaccactggcattgtgatggactccagcgatggagtcacccacacagtgcccatctacgagggttacgccctcccccgtgccatcctgtgtctggacgtggctggccgggaccttactaactacctcatgaagatcctcaccgagcacagctacagctttaccaccatggccgagcgggaaatcgtgtgtgacatcaaggagaagctatactatgtcaccctggactttgagcaggagatggccacagcggcctccagctcctccctggagaagagctatgagctgtccgatggccaggtcatcaccattggcaatgagctatcctgctgccctgaggcgctcttccagccttccttcctgagcatggaatcctgtgacatccacaaaactaccttcaactccatcatgaaatgtgacatggacatccgcaaagacctgtacaccaacacagtgttgtttggcggcaacaacatgtaccctggcattgcgaacagggtgcagaagatcgtcactctggtgtggatgggcagctccatcctggccttgctgtccaccttccagcagatgtggcatccagttttggatgaaccaatagcagaagctgtctgtattatagctgacatggataaatggactgttcaagtggccagtagccagagacgagtgacagataataaattgggaaaggaagtattggtttccagtcttgtttccaatctgcttcattccacacttcagctttataagcataacttgtctccaaatttttgtgtaatgcatcttgaagaccggttgcaggagctatacttcaaaagtaaaatgctgtctgaatacctgagggggcagatgcgtgttcatgtcaaggagctgggagtggttctgggggcaggggtccccagtccccagtccccagtccccaggccggtactggttcatggcctgttaggaagcagccgcacagcaggaggacgtccgtttcgaatagatcaagcacttctctgtcggcagctttcacaagagatctcgttttatttaaagagatatgaggtgtgcgtggaattccttctttgccgaatggcggcttctacttccgcatattcaaagtcggcagtagaagttgcagaggagagcgcaaagccggacttggccacaccctgggcttccggatttgggcacaacagttctctccagtcagaacgcctccccacggttctgccccaaaatgctatttttgctcaggtcctcagcgcgtttccggtgtctccaacggatggagaagacggaaccacaacgccaaggcagaccccgtga

SEQ ID NO: 15487 - DNA, 1428 bp, Homo sapiens
  SIMILAR (1)..(321): 861254mologous to Cloning vector pBACe3.6 levansucrase,accession number U80929,Smith-Waterman Score=471.
tcatatgtttttgcagtggctgttaccgttttcccttgccatatttagtgcttccttcaggagctcttgtaaggcaagcctgatggtgacaaagtctctcagcatttgcttctctggaaaggatttcatttctccttcgcttatgaagcttagtttggctggatatgaaattctgagttgaaaattcttttctttaagaacgttgaatattggtcccccactctcttctggctttagagtttctgcagagagatccactgttagtctgatggactttcctttgtgtataacccaatgtttctctccggctgcccttaacattttttccttcatttcaaccttggtgaatctgacgattatgtgtcttggggttgctcttctcgagcagtatctttgttgtgttctctgtatttcctgaattttaatgttagcctgtcttgctatgttgggaaagttctcgtggataatatccttaagagtgttttccaacttggttccattctccctgtcacagtcaggcccctccgctgcaggtctgctggtgtttgctggtggtccactccagtccctgtttgcctgggtatcaccactggaggctgcagaacagcaaagattcctgtctgtcccttcctctggaagcttcattccagaggagcccctgccagatgccagccggagctctcctgtatgtgatgtctgttgaccaccgctgggaggtatctcccagtgaggagtcataggggtcagggacccacttgaggaggtagtctgtcccttaccagagcttgaaagctgtgctgagagatccactgttctctggtacttaagacactggtcttttatatcagaagatgaagtcacagaactatctaaagaggaagaactgtctcctccaggtttcagttggcagcatttcccaaagactttaacttgagcatcactgccgagtttcttgggcagtatggctattttcacgatattgattctttctatccatgagcatggaatgttcttccatttgtttgtgtcctcttttatttcgttgagcagtggtttgtagttctccttgaagaggtccttcacatcccttgtaagttggattcctaggtattttattctcgatactgatatgtcctcatttcttctcttaacactggagtcaaacaaaacatttctccctcgtctttcacagtcttgatatacaatcagtcgaatctggcttggatcaaactctggtaaaggccaacatttagcgtttccttctattaaaatgcaggcaacaaacttcagaggtataaggttcctataactttgatcaccaataggaatcatagatagtttcatcattgtacagctgatgtagatacccgcattttctcttgcccacgtgatgcctttttccacgggatcaccagctgccagcaccat

SEQ ID NO: 15488 - DNA, 460 bp, Homo sapiens
  SIMILAR (17)..(460): 1001254mologous to Homo sapiens beta-actin,accession number X00351,Smith-Waterman Score=765.
cggacgcgtggggttcatctacgaggggtatgccctcccccatgccatcctgcgtctggacctggctggccgggacctgactgactacctcatgaagatcctcaccgagcgcggctacagcttcaccaccacggccgagcgggaaatcgtgcgtgacattaaggagaagctgtgctacgtcgccctggacttcgagcaagagatggccacggctgcttccagctcctccctggagaagagctacgagctgcctgacggccaggtcatcaccattggcaatgagcggttccgctgccctgaggcactcttccagccttccttcctgggcatggagtcctgtggcatccacgaaactaccttcaactccatcatgaagtgtgacgtggacatccgcaaagacctgtacgccaacacagtgctgtctggcggcaccaccatgtaccctggcattgccgacagg

SEQ ID NO: 15489 - DNA, 2031 bp, Homo sapiens
  SIMILAR (2248)..(1814): 271254mologous to Drosophila melanogaster eyelid,accession number AF053091,Smith-Waterman Score=104.
atggccacagaggtatttcttatcccatatgctcttttgcaatgcagtcttgccagttacccatcaaaacctggaatctatgtgccctccccacagatgtgggttggctctgtgacttgttctgaccaaaagaatacgatagaagtcctggttccaaaggcctatactcttgccaggcaacagtacaagagtctcagtgaacaagtttacagctgccaccagggcactttaaacaccagggcccaagaatcagcagcttcactcctgaagccagcgagaccacgaacccgccagaagaaagaaactccaaacacgtccgaacatcagaaggaacaaactctggacacaccacctttaagaactgtaacactcactacgagggtccgcggcttcattcttgaagttagtgagaccaagaacccaccaatttcggacacaatggggctggatataagcaagcaagaggaggtgctgggcagagagtcagatgagcagggggagcaaagccaaggattgagtgagatgcagactgccctggcgatgttgctcacacgcgagccaataagcgccaaacaggcaccacacgaacccccaagaaggcaagaagacaacacgcaagcacgagagggagagacgcgcagccgaaaaacacgagcagaagggcagaaaggacacgcacacgcagaaaacgagcggaacgcaaaggaaagagaatcagagagaaagaggcaggaagcggaggatgagaacgggaaagagaagcaggagaggaacgagggaacgcacgcacgacacatgaaaagaagaaagagagacgaaaaaaaaagacagggacaaaacaagccaggcaacaaaagaccagaaggaaacgaagaggcgcaaagaagaagaaagaaaaacagagagcgacagaggttttccttctaccagtcaggcccctccgctgcaggtctgctggtgtttgctggtggtccactccagtccctgtttgcctgggtatcaccactggaggctgcagaacagcaaagattcctgtctgtcccttcctctggtcccttgcgaaaattctgcctatattttggcttcgttgggaatgcgacaccccttcgcggtctcaacacacatgggcgccttctaacgccggcacacgggacgcggagaaggcacacaaggccactaaacagccctgtcccggaaaaagccgggtccacaaccgagtcgaacggaagtccttacggacaaaaccccgggcctttacccccaaagggcaaccgggcacagggtgaaaaatggatgggtcggaggattcaagggaccacaaggcccagagcaagagaggccaaccacaagaagatgactcagatcatgtttgagaccttcaacaccccagccgtgtatatggccatccaggccatgttgtccctgtacacctatggctgtaccactggcattgtgatggactccagcgatggagtcacccacacagtgcccatctacgagggttacgccctcccccgtgccatcctgtgtctggacgtggctggccgggaccttactaactacctcatgaagatcctcaccgagcacagctacagctttaccaccatggccgagcgggaaatcgtgtgtgacatcaaggagaagctatactatgtcaccctggactttgagcaggagatggccacagcggcctccagctcctccctggagaagagctatgagctgtccgatggccaggtcatcaccattggcaatgagctatcctgctgccctgaggcgctcttccagccttccttcctgagcatggaatcctgtgacatccacaaaactaccttcaactccatcatgaaatgtgacatggacatccgcaaagacctgtacaccaacacagtgttgtttggcggcaacaacatgtaccctggcattgcgaacagggtgcagaagatcgtcactctggtgtggatgggcagctccatcctggccttgctgtccaccttccagcagatgtgggtcagcaagccaggagtatga

SEQ ID NO: 15490 - DNA, 1272 bp, Homo sapiens; identical to SEQ ID NO: 1973
  SIMILAR (241)..(11): 401254mologous to Homo sapiens dJ534B8.3 (novel protein similar to an aspartic protease),accession number AL121905,Smith- Waterman Score=100.

SEQ ID NO: 15491 - DNA, 435 bp, Homo sapiens
  SIMILAR (266)..(201): 1001254mologous to Homo sapiens super cysteine rich protein; SCRP,accession number U63332,Smith-Waterman Score=195.
atgacaacgtcctttcatggagatgacccttctgggacaccgtcagcaaagttcatcattgacatggtggaaattgcaccaggttggttccgggaaattctgccttcaggttccaacgtgacctttccagctccaacaagaaaaggaaaacaaaaaagaggaaggcatcttcaaaatggattgttccaaggagaaaagaaaaagcagcagcagcagcagcagcagcagcagcagcagcagcagcagcagcagcagcagcagcagcagaaaaagaccttccttccaccttatttttcactgactggacaggctgtatataggaagaatatgagagaattctcaaaaaagcagcaaaagcaatctgaccttgtgccccggctgctcaatggtgttgtagataaacatcttgcaactggacatcagcttctcagggag

SEQ ID NO: 15492 - DNA, 346 bp, Homo sapiens
  SIMILAR (339)..(7): 811254mologous to Homo sapiens Spinocerebellar ataxia type 2 (SCA2) disease associated protein,accession number W60213,Smith- Waterman Score=426.
ccaccgatgttccacaggcgccttctccactgcggcctcgaacagcaatgcggatcggccaccacccgcgcgccggagaggtctgcccaggccgggcctcccgccgccggaggtcgccgcgaccaccgaggagggagccgtggccgaggacgaggagaccgaggacgaggacggcgaaggcgcggcggcgggcgacgctagaaggccgctgccgccgggcttgcggacattggcagccgcgggcggcggctgctgctgctgctgctgctgctgctgttgctgctgctgctgctgctgctgctgctgctgctgctgctggggcttcagcgacatggtgagggaattc

SEQ ID NO: 15493 - DNA, 3346 bp, Homo sapiens
  SIMILAR (1486)..(1878): 321254mologous to Human papillomavirus type 75 E4 protein,accession number Y15173,Smith-Waterman Score=125.
agccactttgacttaatgaaaatgactgctggcaagaggagtcccccaatcaaacctctgcttggcatgaatccctttcagaagaaccccaagcacgcgtctgtgttggcagaaagtggaatcaactatgacaagccgctgcctcccatccaggtggcatctctccgtgcagagcgaatcgcaaaagagaaaaaggctctggctgatcagcagaaggcacagcagccggccgtggcccagccacccccgccccagccgcagcccccaccacccccgcagcagccaccgccaccgctgccacaaccacaggcagcgggcagccagccgccagcagggccaccagctgtccagccccaaccccagccacagccccagacccagccacagcctgtgcaggccccagcgaaggcgcagcccgcaatcacgacggggggcagtgcagccgtactggcaggaaccattaaaacatcagttactgggacgagcatgcccactggtgccgtgagtggaaatgtgatcgtgaacaccatcgcaggggtcccagctgccaccttccagtccatcaacaagcgcctggcgtcgccagtggctcctggggccttgactacgccgggaggctctgctcccgcccaggtggtgcacacccagcccccgccacgggcagtcggctccccagccacggcgacccctgacctggtgtccatggcaacgactcagggtgttcgagcggtcacttctgtgacagcctcggccgtggtcactaccaacctgaccccagtgcagaccccggcacggtctttggtgccccaagtgtcccaagccacaggagttcagctccctggaaaaaccatcacacctgcacatttccagcttctcaggcagcagcagcagcagcagcagcaacagcagcaacagcagcagcagcagcagcagcagcagcagcagcagcagcagcagcagcaacagcagcagcagcaacagacgacgacgacctctcaggtgcaagttccacagatccagggccaggcccagtccccagcacagatcaaagctgtgggcaagctgacgccggaacacctcatcaaaatgcagaagcagaaactgcagatgcccccgcagcccccaccgccacaggcccagtctgcgcccccgcagccagcagcccaagtgcaagtgcagacctcgcagccgccgcagcagcagagcccccagctcacgacggtcacggccccaaggcctggtgccctgctgacgggcaccaccgtggccaacctccaggtggcccggctcacccgggttcccacttctcaactgcagtcgcaagggcagatgcagacccaggcaccccagccagcccaggtgcccttgccgaagcctccggtggtgtccgtcccggcagctgtggtctcctcaccgggagtcaccaccctgcccatgaacgtcgcggggatcagcgtggcgatcggtcagccacagaaggcagcaggacagaccgtggtggacccagcccgtgcacatgcagcagctgctgaagctgaagcagcaggccgtccagcagcagaaggccatccagccccaggctgcacagggcccggcagccgtccagcagaagatcaccgcacagcagatcaccacccctggcgcgcagcagaaggttgcctacgccgcgcagckggcccttaagaacccagtttcttaccacacccatctcccaggcccagaaactggccggggcccagcaagtgcagacccagatccaggttgcaaaacttcctcaagttgttcaacagcaaacacccgtggccagcatccagcaagttgcctctgcttcccagcaggcttctccacagactgtggcgctcacgcaggcgacggcggccgggcagcaggtgcagatgatccctgcagtgaccgcgactgcccaggtggttcagcagaaactcattcagcagcaggtggtgaccacggcgtcggccccgctccagactccaggcgctcccaacccagcccaggtgcccgccagctccgacagcccaagccagcagcccaagttacagatgagggtccctgctgtcaggctaaagacacctactaagcctccgtgccagtagtcagggcaagcagggctgcctctcatcttaaaagcaaaactaccttcctcacaagaaaacgctttattagtgaaccttgggaccatgtcacgcaagagattcagcactgggaaagatataattgaaacaaaatagtgtaatcattttattaaaatgcatcccacactgcaggacaaatggtccttatggagtgccgcgttctctgtactacgtggctcatggaaaaagtgacaacatggcttcctctaaatcatttcacctttcagtccccacccgcacccgtcccctagagccatagtactgtgttctgaaagccatttagaatttctttgtgagcatgtagtgctttgcacgccacagaagccgtctgccgtgtgtgaggagcatacaatggactttctaaagataaggcgtgggcttccacagtgtcttgccagagtttagttctttataccttactgaaaaatgcctcgtggtcttcgcagaggggaaggcctgtctaaagtcaatcatccgagatgggttttccattccaaagaaaggcaatatggttccttccttccctcctaaaatatgacttaacttttaagagaaatgttctgacacccacctaaacacacaaggcacgttcctggcctgtgttcaagggaaatgatcagtcattgcattgttattccaaagagcagccaacagtggcctcccccaggccctaccctgcaatgggattcgctttcatttaatggaaacttctgggactgatgcccaactcagtgcactcaagacgcatctccagttttcgggggaagctggtatttgacatagtgtgttaaacagctcctgagaacctttgggacactctgccatggctggcgtgaggcccagaggaccacgcagaggcaatggtagtacagatgtcacagctgagggtacgatgaggcctgggctcagtgagccaggacgaatgtgacagacaccccttgctgccacagtcagccctttgacgaaggtgggctggtgattctggaagtattggctatagcggtgggcccagtcaactcttccttgtggacttacgacagcagattttctctaggataagcttgtgtggttctgccagtgaagcagagaaccacctgtgctgttgtggaaggcgtgccgttgagggggaaaacgaagcccagtatttgctactgtttttcctttttttactatgacaggacaaggaaaaataaatg

SEQ ID NO: 15494 - DNA, 9732 bp, Homo sapiens
  SIMILAR (763)..(1257): 961254mologous to Escherichia coli O157:H7 rhsA protein in rhs element,accession number AE005586,Smith-Waterman Score=855.
ttcggctagagagcactttgtggagaaagtcgtcttccacttgcacgaaagctttcctaggccaaaaagagtgtgcaaagatccaccttacaaagtagaagaatctgggtatgctggtttcattttgccaattgaagtttattttaaaaacaaggaagaacctaggaaagtccgctttgattatgacttattcctgcatcttgaaggccatccaccagtgaatcacctccgctgtgaaaagctaactttcaacaaccccacagaggactttaggagaaagttgctgaaggcaggaggggaccctaataggagtattcataccagcagcagcagcagcagcagcagtagcagcagcagcagcagcagcagcagcagcagcagcagcagcagcagcagcagcagcaacaacagcagcaacagccgccaccgccgccgccgccgccgccgcctcctcagcttcctcagccgccgccgcaggcacagccgctgctgcctcagccgcagccgcccccgccgccgcccccgccgccacccggcccggctgtggctgaggagccgctgcaccgaccaaagaaagaactttcagctaccaagaaagaccgtgtgaatcattgtctgacaatatgtgaaaacatagtggcacagtctgtcagaaattctccagaatttcagaaacttctgggcatcgctatggaactttttctgctgtgcagtgatgacgcagagtcagatgtcaggatggtggctgacgaatgcctcaacaaagttatcaaagctttgatggattctaatcttccaaggttacagctcgagctctataaggaaattaaaaagaatggtgcccctcggagtttgcgtgctgccctgtggaggtttgctgagctggctcacctggttcggcctcagaaatgcaggccttacctggtgaaccttctgccgtgcctgactcgaacaagcaagagacccgaagaatcagtccaggagaccttggctgcagctgttcccaaaattatggcttcttttggcaattttgcaaatgacaatgaaattaaggttttgttaaaggccttcatagcgaacctgaagtcaagctcccccaccattcggcggacagcggctggatcagcagtgagcatctgccagcactcaagaaggacacaatatttctatagttggctactaaatgtgctcttaggcttactcgttcctgtcgaggatgaacactccactctgctgattcttggcgtgctgctcaccctgaggtatttggtgcccttgctgcagcagcaggtcaaggacacaagcctgaaaggcagcttcggagtgacaaggaaagaaatggaagtctctccttctgcagagcagcttgtccaggtttatgaactgacgttacatcatacacagcaccaagaccacaatgttgtgaccggagccctggagctgttgcagcagctcttcagaacgcctccacccgagcttctgcaaaccctgaccgcagtcgggggcattgggcagctcaccgctgctaaggaggagtctggtggccgaagccgtagtgggagtattgtggaacttatagctggagggggttcctcatgcagccctgtcctttcaagaaaacaaaaaggcaaagtgctcttaggagaagaagaagccttggaggatgactctgaatcgagatcggatgtcagcagctctgccttaacagcctcagtgaaggatgagatcagtggagagctggctgcttcttcaggggtttccactccagggtcagcaggtcatgacatcatcacagaacagccacggtcacagcacacactgcaggcggactcagtggatctggccagctgtgacttgacaagctctgccactgatggggatgaggaggatatcttgagccacagctccagccaggtcagcgccgtcccatctgaccctgccatggacctgaatgatgggacccaggcctcgtcgcccatcagcgacagctcccagaccaccaccgaagggcctgattcagctgttaccccttcagacagttctgaaattgtgttagacggtaccgacaaccagtatttgggcctgcagattggacagccccaggatgaagatgaggaagccacaggtattcttcctgatgaagcctcggaggccttcaggaactcttccatggcccttcaacaggcacatttattgaaaaacatgagtcactgcaggcagccttctgacagcagtgttgataaatttgtgttgagagatgaagctactgaaccgggtgatcaagaaaacaagccttgccgcatcaaaggtgacattggacagtccactgatgatgactctgcacctcttgtccattgtgtccgccttttatctgcttcgtttttgctaacagggggaaaaaatgtgctggttccggacagggatgtgagggtcagcgtgaaggccctggccctcagctgtgtgggagcagctgtggccctccacccggaatctttcttcagcaaactctataaagttcctcttgacaccacggaataccctgaggaacagtatgtctcagacatcttgaactacatcgatcatggagacccacaggttcgaggagccactgccattctctgtgggaccctcatctgctccatcctcagcaggtcccgcttccacgtgggagattggatgggcaccattagaaccctcacaggaaatacattttctttggcggattgcattcctttgctgcggaaaacactgaaggatgagtcttctgttacttgcaagttagcttgtacagctgtgaggaactgtgtcatgagtctctgcagcagcagctacagtgagttaggactgcagctgatcatcgatgtgctgactctgaggaacagttcctattggctggtgaggacagagcttctggaaacccttgcagagattgacttcaggctggtgagctttttggaggcaaaagcagaaaacttacacagaggggctcatcattatacagggcttttaaaactgcaagaacgagtgctcaataatgttgtcatccatttgcttggagatgaagaccccagggtgcgacatgttgccgcagcatcactaattaggcttgtcccaaagctgttttataaatgtgaccaaggacaagctgatccagtagtggccgtggcaagagatcaaagcagtgtttacctgaaacttctcatgcatgagacgcagcctccatctcatttctccgtcagcacaataaccagaatatatagaggctataacctactaccaagcataacagacgtcactatggaaaataacctttcaagagttattgcagcagtttctcatgaactaatcacatcaaccaccagagcactcacatttggatgctgtgaagctttgtgtcttctttccactgccttcccagtttgcatttggagtttaggttggcactgtggagtgcctccactgagtgcctcagatgagtctaggaagagctgtaccgttgggatggccacaatgattctgaccctgctctcgtcagcttggttcccattggatctctcagcccatcaagatgctttgattttggccggaaacttgcttgcagccagtgctcccaaatctctgagaagttcatgggcctctgaagaagaagccaacccagcagccaccaagcaagaggaggtctggccagccctgggggaccgggccctggtgcccatggtggagcagctcttctctcacctgctgaaggtgattaacatttgtgcccacgtcctggatgacgtggctcctggacccgcaataaaggcagccttgccttctctaacaaaccccccttctctaagtcccatccgacgaaaggggaaggagaaagaaccaggagaacaagcatctgtaccgttgagtcccaagaaaggcagtgaggccagtgcagcttctagacaatctgatacctcaggtcctgttacaacaagtaaatcctcatcactggggagtttctatcatcttccttcatacctcaaactgcatgatgtcctgaaagctacacacgctaactacaaggtcacgctggatcttcagaacagcacggaaaagtttggagggtttctccgctcagccttggatgttctttctcagatactagagctggccacactgcaggacattgggaagtgtgttgaagagatcctaggatacctgaaatcctgctttagtcgagaaccaatgatggcaactgtttgtgttcaacaattgttgaagactctctttggcacaaacttggcctcccagtttgatggcttatcttccaaccccagcaagtcacaaggccgagcacagcgccttggctcctccagtgtgaggccaggcttgtaccactactgcttcatggccccgtacacccacttcacccaggccctcgctgacgccagcctgaggaacatggtgcaggcggagcaggagaacgacacctcgggatggtttgatgtcctccagaaagtgtctacccagttgaagacaaacctcacgagtgtcacaaagaaccgtgcagataagaatgctattcataatcacattcgtttgtttgaacctcttgttataaaagctttaaaacagtacacgactacaacatgtgtgcagttacagaagcaggttttagatttgctggcgcagctggttcagttacgggttaattactgtcttctggattcagatcaggtgtttattggctttgtattgaaacagtttgaatacattgaagtgggccagttcagggaatcagaggcaatcattccaaacatctttttcttcttggtattactatcttatgaacgctatcattcaaaacagatcattggaattcctaaaatcattcagctctgtgatggcatcatggccagtggaaggaaggctgtgacacatgccataccggctctgcagcccatagtccacgacctctttgtattaagaggaacaaataaagctgatgcaggaaaagagcttgaaacccaaaaagaggtggtggtgtcaatgttactgagactcatccagtaccatcaggtgttggagatgttcattcttgtcctgcagcagtgccacaaggagaatgaagacaagtggaagcgactgtctcgacagatagctgacatcatcctcccaatgttagccaaacagcagatgcacattgactctcatgaagcccttggagtgttaaatacattatttgagattttggccccttcctccctccgtccggtagacatgcttttacggagtatgttcgtcactccaaacacaatggcgtccgtgagcactgttcaactgtggatatcgggaattctggccattttgagggttctgatttcccagtcaactgaagatattgttctttctcgtattcaggagctctccttctctccgtatttaatctcctgtacagtaattaataggttaagagatggggacagtacttcaacgctagaagaacacagtgaagggaaacaaataaagaatttgccagaagaaacattttcaaggtttctattacaactggttggtattcttttagaagacattgttacaaaacagctgaaggtggaaatgagtgagcagcaacatactttctattgccaggaactaggcacactgctaatgtgtctgatccacatcttcaagtctggaatgttccggagaatcacagcagctgccactaggctgttccgcagtgatggctgtggcggcagtttctacaccctggacagcttgaacttgcgggctcgttccatgatcaccacccacccggccctggtgctgctctggtgtcagatactgctgcttgtcaaccacaccgactaccgctggtgggcagaagtgcagcagaccccgaaaagacacagtctgtccagcacaaagttacttagtccccagatgtctggagaagaggaggattctgacttggcagccaaacttggaatgtgcaatagagaaatagtacgaagaggggctctcattctcttctgtgattatgtctgtcagaacctccatgactccgagcacttaacgtggctcattgtaaatcacattcaagatctgatcagcctttcccacgagcctccagtacaggacttcatcagtgccgttcatcggaactctgctgccagcggcctgttcatccaggcaattcagtctcgttgtgaaaacctttcaactccaaccatgctgaagaaaactcttcagtgcttggaggggatccatctcagccagtcgggagctgtgctcacgctgtatgtggacaggcttctgtgcacccctttccgtgtgctggctcgcatggtcgacatccttgcttgtcgccgggtagaaatgcttctggctgcaaatttacagagcagcatggcccagttgccaatggaagaactcaacagaatccaggaataccttcagagcagcgggctcgctcagagacaccaaaggctctattccctgctggacaggtttcgtctctccaccatgcaagactcacttagtccctctcctccagtctcttcccacccgctggacggggatgggcacgtgtcactggaaacagtgagtccggacaaagactggtacgttcatcttgtcaaatcccagtgttggaccaggtcagattctgcactgctggaaggtgcagagctggtgaatcggattcctgctgaagatatgaatgccttcatgatgaactcggagttcaacctaagcctgctagctccatgcttaagcctagggatgagtgaaatttctggtggccagaagagtgccctttttgaagcagcccgtgaggtgactctggcccgtgtgagcggcaccgtgcagcagctccctgctgtccatcatgtcttccagcccgagctgcctgcagagccggcggcctactggagcaagttgaatgatctgtttggggatgctgcactgtatcagtccctgcccactctggcccgggccctggcacagtacctggtggtggtctccaaactgcccagtcatttgcaccttcctcctgagaaagagaaggacattgtgaaattcgtggtggcaacccttgaggccctgtcctggcatttgatccatgagcagatcccgctgagtctggatctccaggcagggctggactgctgctgcctggccctgcagctgcctggcctctggagcgtggtctcctccacagagtttgtgacccacgcctgctccctcatctactgtgtgcacttcatcctggaggccgttgcagtgcagcctggagagcagcttcttagtccagaaagaaggacaaataccccaaaagccatcagcgaggaggaggaggaagtagatccaaacacacagaatcctaagtatatcactgcagcctgtgagatggtggcagaaatggtggagtctctgcagtcggtgttggccttgggtcataaaaggaatagcggcgtgccggcgtttctcacgccattgctcaggaacatcatcatcagcctggcccgcctgccccttgtcaacagctacacacgtgtgcccccactggtgtggaagcttggatggtcacccaaaccgggaggggattttggcacagcattccctgagatccccgtggagttcctccaggaaaaggaagtctttaaggagttcatctaccgcatcaacacactaggctggaccagtcgtactcagtttgaagaaacttgggccaccctccttggtgtcctggtgacgcagcccctcgtgatggagcaggaggagagcccaccagaagaagacacagagaggacccagatcaacgtcctggccgtgcaggccatcacctcactggtgctcagtgcaatgactgtgcctgtggccggcaacccagctgtaagctgcttggagcagcagccccggaacaagcctctgaaagctctcgacaccaggtttgggaggaagctgagcattatcagagggattgtggagcaagagattcaagcaatggtttcaaagagagagaatattgccacccatcatttatatcaggcatgggatcctgtcccttctctgtctccggctactacaggtgccctcatcagccacgagaagctgctgctacagatcaaccccgagcgggagctggggagcatgagctacaaactcggccaggtgtccatacactccgtgtggctggggaacagcatcacacccctgagggaggaggaatgggacgaggaagaggaggaggaggccgacgcccctgcaccttcgtcaccacccacgtctccagtcaactccaggaaacaccgggctggagttgacatccactcctgttcgcagtttttgcttgagttgtacagccgctggatcctgccgtccagctcagccaggaggaccccggccatcctgatcagtgaggtggtcagatcccttctagtggtctcagacttgttcaccgagcgcaaccagtttgagctgatgtatgtgacgctgacagaactgcgaagggtgcacccttcagaagacgagatcctcgctcagtacctggtgcctgccacctgcaaggcagctgccgtccttgggatggacaaggccgtggcggagcctgtcagccgcctgctggagagcacgctcaggagcagccacctgcccagcagggttggagccctgcacggcgtcctctatgtgctggagtgcgacctgctggacgacactgccaagcagctcatcccggtcatcagcgactatctcctctccaacctgaaagggatcgcccactgcgtgaacattcacagccagcagcacgtactggtcatgtgtgccactgcgttttacctcattgagaactatcctctggacgtagggccggaattttcagcatcaataatacagatgtgtggggtgatgctgtctggaagtgaggagtccaccccctccatcatttaccactgtgccctcagaggcctggagcgcctcctgctctctgagcagctctcccgcctggatgcagaatcgctggtcaagctgagtgtggacagagtgaacgtgcacagcccgcaccgggccatggcggctctgggcctgatgctcacctgcatgtacacaggaaaggagaaagtcagtccgggtagaacttcagaccctaatcctgcagcccccgacagcgagtcagtgattgttgctatggagcgggtatctgttctttttgataggatcaggaaaggctttccttgtgaagccagagtggtggccaggatcctgccccagtttctagacgacttcttcccaccccaggacatcatgaacaaagtcatcggagagtttctgtccaaccagcagccatacccccagttcatggccaccgtggtgtataaggtgtttcagactctgcacagcaccgggcagtcgtccatggtccgggactgggtcatgctgtccctctccaacttcacgcagagggccccggtcgccatggccacgtggagcctctcctgcttctttgtcagcgcgtccaccagcccgtgggtcgcggcgatcctcccacatgtcatcagcaggatgggcaagctggagcaggtggacgtgaaccttttctgcctggtcgccacagacttctacagacaccagatagaggaggagctcgaccgcagggccttccagtctgtgcttgaggtggttgcagccccaggaagcccatatcaccggctgctgacttgtttacgaaatgtccacaaggtcaccacctgc

SEQ ID NO: 15495 - DNA, 1013 bp, Homo sapiens
  SIMILAR (1)..(957): 1001254mologous to Escherichia coli penicillin-binding protein 3,accession number K00137,Smith-Waterman Score=1628.
gaagcgccggtgctggtgcggcgggggactgcggggccagcctcaggtagcagtagcagcagcagcagcagcagcagcagcagcagcagcagcagcagcagcagcagcagctgcttcattgtttcacttcttcagaaagcctccggattctaaaaagccctcagtaccagagacagaagcagatggattcgtccttttaggagatacaacagatgagcaaagaatgacagcaagaggcaaaacttcggacatagaggccaaccaacctttggagcggacaaggcaaagggggagcgcgttcggacctctagtacaataaggcgaacctcctatttggatacaataacaggaccttacctcacaggacagtggccacgggatcctcatggtcactacccttcatgcatgaaagacaaagctactcagacacctaggctgttgggcagaagagggtgcagaaaagaggtcacatcagcgttctgcgttcatgggggagtgctgatcaactaaaagaggaaaccccaacagacttacagcagaatgctcagcagaaactctataagccagaagaggttgggtgcctaatttcagacttcttaaaagaaaaagaaaactgtcagccacgaattttgtatgctggtaaactcagctcggaatgtactcctgatgaagaagctgtgaacattgttgaaatgataacaaaagatttagaatattacataaacctagttgataaagagtggcagggtttgagaggattgactccaattttaaaagaagtcctgcgagtaaaatgctatcaaacagcatcacatgctacaaagaaatctggtatgaaaggaaaagtcagtcaatttggcaaacttcactgttattttaagaaattaccacaactgcctctgccttcagcaaccgccatcctgatcagtcagctaacatctacgagacaagagcttcaccataaaaaagattgtaacttgctgaagactcagatgatcattagcattttttag

SEQ ID NO: 15496 - DNA, 387 bp, Homo sapiens
  SIMILAR (215)..(370): 881254mologous to Homo sapiens melanoma-associated chondroitin sulfate proteoglycan (MCSP),accession number X96753,Smith-Waterman Score=236.
gcagcaccaggccatcatggtgctggaggtgcaggccttggagccttacctctgtgtggccaacggctccagcctcatggtccctcaaggagaccagggtaccatcaacatggccgagctccaccttggcaccaacctcgacatccgcagcggggatgaggtccactaccaccctcagctcccgcaacaccctggccttctcaatggatgtggggccttctcaatggatgtggggccagtgcacacagatgccaccctacaagtgaccattgccctagagggcccactagccccactgaagctggcctggcacaagaagatctacatcttccagggagaggcagctgagatcagaagagaccagctggaggtgaggagctgggggtg

SEQ ID NO: 15497 - DNA, 189 bp, Homo sapiens
  SIMILAR (129)..(176): 561254mologous to Homo sapiens hPer,accession number AB002107,Smith-Waterman Score=47.
cttttcatgtttttctgcctgctttatattcgctagcagctgctgcatccagggtacaatgcgcctttccagaacacagcagcgacccggggtagagggatcgctcaaacagcaccagaggctgcattccaacttttcctccatcaacgagtccgttttcattgttagtttctccttaaacacgattgg

SEQ ID NO: 15498 - DNA, 1139 bp, Homo sapiens
  SIMILAR (654)..(4): 951254mologous to Homo sapiens putative p150,accession number U93563,Smith-Waterman Score=1045.
ctatgctgttttggttactgtagccttgtagtatagtttgaagtcaggtagtgtgatgcctccagctttgttcttttggcttaggattgacttggcaatgtgggcccttttttggttccatatgaactttaaagtagttttttccaattctatgaagaaagttcttggtagcctgatggggatggcattgaatctataaattaccttgggcagtatggccattttcatgatattgattcttcctacccatgagcatggaatgttcttccatttgtttgtatcctcttttatttcattgagcagtggtttatagttctccttgaagaggtctttcacatcccttgtaagctggattcctaggtattttattctgtttgaagccattgtgaatgggagttcactcatgatttggctctctgtttgtctgttattggtgtataagaatgcttgtgatttttgcacattgattttgtatcctgagactttgctgaagttggctgtcagcttaaggagattttgggctgagacgatggggttttctagatatacaatcatgtcatctgcaaacagggacaatttgacttcctcttttcctaattgaatgccctttatttccttctcctgcctgattgccctggccagaacttccaacactctggtagaatttggctgtgaatccatctggtcctggacttttttggttggtaagttattaattattgcctcaatttcagagcctgttattggtctattcagagattcaacttcttcctggtttagtcttgggagggtgtatgtgtcaaagaatttatccatttcttctagattttctagtttatttgtgtagaggtgttgatagtattctctgatggtagtttgtatttctttggtctttgatgatggtgacgtacagatggggttttggtgtggatgtcctttctgtttgttagttttccttctaacagtcaggaccctcagctgcaggtctgttggagtttgctggaggtccactccagaccctgtttgcctgggtatcagcagcggaggcttataccttctagccctatgattggattcagccttttctccagccagccctagttcctttttggagaccataagctgtgtgcttgggtgca

SEQ ID NO: 15499 - DNA, 2850 bp, Homo sapiens
  SIMILAR (1537)..(2013): 951254mologous to Escherichia coli Transposase,accession number AB024946,Smith-Waterman Score=809.
atgtcagaaaaaacacaacaggggaaattggccgcagccaagaaaaagttaaaagcatattggcagaggaagagccctggcattccagcaggagctaacaggaaaaagaaagtcaatggcagtagccctgacacagccacttctggtggttaccactcacctggggattcagcaacaggtatctacggggagggccgtgcatcctctactaccctggaggatctggagagccagtaccaagaactatcagtggccctggattcaagctccgcaataatcagtcaactcactgaaaacatcaattcactggttcgcacatctaaggaggagaagaagcatgagatacatctggtacagaagcttgggaggagcttgttcaaactcaaaaaccagatggctgaacccctggccccagagcccccagcagggccatctaaggtagagcagctacaagatgagaccaaccacctaaggaaggagctagagagtgtgggaagacagctccaggctgaggtggaaaacaatcagatgttgagtctcctgaacaggagacaggaggagaggctacgtgaacaggaggagaggctacatgaacaggaggagaggcaacgtgaacaggaggataggctacatgaacaggaggagaggctacgtgaacatgaggagaggctgtgtgaacaggaggagaggctatgtgaacaggaggagaggctacgtgaacaggaggagaggctacatgaacaggaggagaggctacgtgaacaggaggagaggctgtgtgaacaggaggagaggctacgtgaacatgaggagaggctgtgtgaacaggaggagaggctacgtgaacaggaggagaggctgtgtgaacaggaggagaggctacgtgaacaggaggagaggctgtgtgaacaggaggagaggctacgtgaacaggaggagaggctgtgtgaacaggagaagctgccagggcaggagaggctgctggaagaggtggagaagctgttagaacaggagaggcggcaggaggagcaggagaggctgctggagagggagaggctgctggaagaggtggagaagctgttagaacaggagaggcagcaggaggagcaggagaggctgctggagagggagaggctgctggaagaggtggagaagctgttagaacaggagaggcggcaggaggagcaggagaggctgctggagagggagaggctgctggacgaggtggaggagctcctggacgaggtggaggagctcctggagcaggagaggcttcggcaacaggatgagaggctgtggcagcaggagactctgcaggagctggagaggctgcgggagctggagaggctgcgggagctggagaggatgctggagctggggtgggaagccctgtacgagcagcgggccgagccacgcagcggcttcgaggagctgaacaacgagaacaagagcacactgcagttggagcagcaagtaaaggagctgaagaagtcggccctactccgactagagttgaggcatcagggagaggcggagctgggagagcgccgccgagaggtcccgcgggtggttgcggccgtgacagcggctcccgacgggctcaccttccgcgcccctcccgccagaggagaaactaacaatgaaaacggactcgttgatggaggaaaagttggaatgcagcctctggtgctgtttgagcgatccctctatcccgggtcgctgctgtgttctggaaaggcgcattgtaccctggatgcagcagaccctctccattcaaagcccctcttcaactgcccccccccccccactacctccaagacagagattctggattcttgcaactgcagcccctcagagagtgtaagaggggcagaaaaaggagatcaggagctgctagcgaatataaagcaggcagaaaaacatgaaaagaaccacccggaggtgactgtggccatggctctgactgacatagacctgcagctgcagttctccatgtcccaacccgaagccctccttctcctggcagcaggcccagctgaccacctcctgctgcagctctactctggacacctgcaggtcaggcttgtcctgggccaggaggagctgaggctgcagaccccagcagaaattctactgagtgactccgtcccccacaccacagttctgactgtctcagaggactggcccacattgtcagtcaatgggtttctgaatgcctcctctgtagtcctgggagcccccctagaagtcccctatgggctctttgttgggagcactgggagacttggcctgccctacctgaggggaaccagccatcccctgaggggttgcctccatgcagccgctctcaatggccgcagactcctccagcctctgacccccaataagcatgagggctgtgctgaagagttttctgccaatgacgatgtggccctgggcttctctgggtcccactctctggctgccttgcctgcctggggcactcaggatgaaggaaccctggagtttacactcaccacacagagctggcaggcacccttggccttccaggcagcaggctggcatggggacttcatccatgtggacatatttgagggccacctgtggtccatggttgagaagggccagggtactgtattgctcctcaacagtgtgcctgtgactgatgcacagccccacaaggtcagcatccacatcaacattcaccagctagaaatctccatggaccagtaccccacatgtactttgaaccgaggagtcctcagctacctggagccacgtgacagtctccttcttggggagctggtgcagaggcctctcgtcacctccaggaacaccgctcaggcctga

SEQ ID NO: 15500 - DNA, 2835 bp, Homo sapiens; identical to SEQ ID NO: 7486
  SIMILAR (1102)..(1602): 1001254mologous to Escherichia coli O157:H7 putative L-serine deaminase,accession number AE005540,Smith-Waterman Score=852.

SEQ ID NO: 15501 - DNA, 551 bp, Homo sapiens
  SIMILAR (261)..(368): 861254mologous to Homo sapiens Human secreted protein, SEQ ID NO: 4473,accession number G00392,Smith-Waterman Score=172.
caatcactgataccctttcttccagttgattgaatcagctactgaagcttgtgcattcatcacatagttctcatgccatggttctcagctccatcaggtcatttaaggacttttctacactggatattctagttagccatttgtctaatcttttttcaaggtttttagcgtctttgccatgggttcgaacttcctcctttagctcaaagaagtttgatcgtctgaggcgtgacgtacagatgggattttggtgtggatgtcctttctgtttgttagttttccttctaacaatcaggaccctcagctgcaggtctgttggagtttgctggaggtccactccagaccttgtttgcctgggtatcagcagcaccctgaaagccctacttgctttctcagtggggaggcttgtagcctggggcaagttctcagccctgctcaccagctgcctgggaacaaactcagtgcagttggcgggggcatggtggaagtaagaggctcttacctataagcgccatctactggcttacaagtcaaaccgcatagcccaataa

SEQ ID NO: 15502 - DNA, 5724 bp, Homo sapiens
  SIMILAR (223)..(558): 441254mologous to Escherichia coli ATP-binding protein,accession number D90227,Smith-Waterman Score=175.
atggctgtcctcagccttcctcttgctcctccaactcttatgccacctgcacattttaacctagtggaaatgcaagtcaaagctacattaaaagaatattggcagaggaagagccctggcattccagcaggagctaacaggaaaaagaaaatcaatggcagtagccctgacacagccacttctggtggttaccactcacctggggattcagcaacaggtatctacggggaaggccatgcatcatctgctaccctggaggatctggagctgagacaacccacaccctccaccagccctaatgattgttctctctacccctccccacaatcttcctccaactcctcctctctgcatgcacctcacagccagtaccgagaactagcagtggccctgcactcaagctccgcaataatcagtcaactcagtgaaaacatcaattcactgaataatgagaacaagagtgcactgcagttggagcggcaagtaaaggagctgaagcttggtgagctgaaagagacggtaacctctgacccatctaataatggttgggaggcagtcaccagcctctgggaaggggagcgtcttcctgcacgtggagctgaagagccaagaggctcagagtccacagcagcagcaagaccagtacctgtgtcacctgcagcagttcgtggtcgcttagtagcaggagaacctggaagctaccagccagcagaaacagcagctaaagcccagttgagcctcatggctctccctggggaaggatatggaggaggacatctggacaatgaggaggaggcacctcggcccatgctgaacattccaggggacctggagagccgggaggccatggtggcatttttcaactccgctggagccagtgcccaggaggagcaaagcgtgtgctgccagcccctggctcacccagtggcctcatcccagaaaaagccagaggcagcggccccagccccagagactgggggtgaatctgtgtgtggggacacccactgggccctgcaggaggccatggagaagctgcaggaaagtacatcagccagggggcagtgccaaagacgcagcactgggagaggaggacatcgtcaggctggcccaggaccaggaggagatgaaggagaaactaacaatgaaaacggactcgttgatggaggaaaagttggaatgcagcctctggtgctgtttgagcgatccctctatcccgggtcgctgctgtgttctggaaaggcgcattgtaccctggatgcagcagaccctctccattcaaagcccctcttcaactgccccccaccgccccaccacctccaagacagagattctgggttcctgcaactgcagcccctcagagagtgtaagagggtcagaaaaaggagattaggaaatgagggaagcagcgctgtcagagtttccaaagccctggccagcaaggcatcagaggcctctgttggggtgggggcctccctggctatgcgctccagcagcacaaggcagcctctggctgtgaccaccaagccaggtgatcaggccagtgatgtttccctttcagccaggtcggggagccagacctgggagggagactcctctggggcccaggggatgcaagtcagaactggcagaggcctctggctccaggaacctccaagaaggagacctgagttgctgggaatttctgggtctgacctcctgcaaagtcaaggtctgggctggacacaagcttccttctttggtgagaaccacctggaggtgactgtggccatggctctgactgacatagacctgcaactgcagttctccacgtcccaacccgaagccctccttctcctggcagcaggcccagctgaccacctcctgctgcagctctactctggacacctgcaggtcagggttgtcctgggccaggaggagctgaggctgcagatcccagcagaaatgctgctgagtgactccatcccctacactacagttctgactgtctcagagggctggcccacattgtcagtcaatgggtttctgaatgcctcctctgtagtcctgggagcccccctagaggtcccctatgggctctttgttgggaacactgggagccttggcctgccctacctgaggggaaccagccatcccctgaggggttgcctccatgcagccactctcaatggccacagcctcctccggcctctgacccccgatatgcatgagggctgtgctgaagagttttccaccagtgacgatgtggccctgggcttctctgggccccactctctggctgccttccctgcctggggcactcagaacaaaggaaccctggagttggcactcaccacacagatctggcaggcacccttgaccttccaggcagcgggctggcatggggacttcatccatgtggacatatttgagggccacctgtggttcatggtcgagaagggccagggtactgtattgctcctcaacagtgtgcttgtggctgacgtgcagaccctcaaggtcagcatccacatcaacactcaccagctagaaatctccatggaccagtaccccacacacctcagtgtcaatggccagaggtgggggcttcgggaagccttgctgacacacaacatggcggcaggctgcagactggaggaggtggaggagtatgaggacaatacctatggccattatgaagctttctccaccctggcccccagggcttggctgtccatggatctagctgagccatgcatgcttgagccagggctgcctcctgtctttaccaatttcacccagctgctgactatcagcccagtggtggtgaccgagggtggcacagccgagtggtggcatgtgcagcccatgctggccctgatggaggctgaactgcataaatcccaggacttgacgttccgggtcagcaatggactgcaggccagccccccgtccatgctgaaggtggtggccatccagccggccatacagatccactgcagcacagggctgcatctggcccaggactctgccatgcccatcttgcctaccaacctgtcggtggagaccagcaccgtggggcaggatgtgactgtgttgttctgtgtcaccagaggcctgcagttcagggaggtgcagaagcagggggctggtggggtggagggtgctgagtggtgggccacacagtcattccaccagcaggatgtggagcagggccacatgaggtacctgagcactaacccacagcactatgccgaggacaccgtgaagaacctggatctgcaggtgcaggtgagctgggaaatcctgagcaatctgtccttcctagtgaccatccagagagccactgtgtggatgctgcagctgcggccactgcacactcaacacccagcagaggccctcaccacagcccacctggaggccaccctggaagaggcaggcccaagccccccaaccttccactctgaggtggttcaggctcccaggaaaggcaaccttcaactacagggcacgacactgtcagatggtcagggcttcacccaggatgatgtacaggctggagaggtgacctatagggccatggcacatgcctcagtggcagtggaggacaccttctgtttccatgtcacagctccactatatttctccccactctgtactttctccatccatactggcggtgacccagacatgcctgtcctcaccaatgtcctcttggtgcccgagggtggtgggtgtgtcctctctgctgaccagctcttcgtcaagagcctcaacagtgccaggtggcagctgctgactccacacaacatggccttcagcaatgctgattcaggctttgtggatgcccagctggtgctgacccacaaggacctcctgtctggcagtatcatggccacggatgagcccatgcagcccatcttctgcttcatccaggaggggcctcaggaagaggcgagtcctgttcacgcactcaggctgaccatggctggatcctgctgcatgtgtccgacaggcagcaccaggccatcttggtgctggagacagcccttgctggggacagttgctccaggccactcagccagcacagccttcgcccagaaggacctgctggttggggccgttctctttggccacaatggcagcctcagctcccgcaacaccctggccttctcaatggatgtggggccttctcaatggatgtggggccttctcaatggatgtggggccagtgcacacagacagtgcacacggtgcactctacaagtgaccattgccctagagggcccactagccccactgaagctggcctggcacaagaagatctacatcttcctgggagaggcagctgagatcagaagggaccagctggaggcagaacgggagttgttccatagcagggcagagcagggcagactctttgtgggccgtcctgggcaggcagcacacctgatgctcccaccaggagactgcgtgagcatctggacccagcacatgatcacaaccacggagttcatcatctcggagccgctggccaatctgtactcatgtggggaccagaacacactgatggaggagttggcaaagcaggcacagcagcgcgacaagatgctgtgcatgcaccacgcgctgaaggaggcaaatgacatcaacaggaccaccgtcagcatgcccatgcccccgcctgtggatgacacctggctgcaggtgcagagtgtccctgaggaacacaggtaccagggactggcccccatagccccaaagtcccccatccgggccacacagaggagtgcccagggcttagtggcacgctccctcatggggtggttcccacctggacctggcttcaatgcagtccggggcatgactgagataggcatacgttgtgaggaactggagggtaactgggtaaagagctgcagtgtgggcagaagtgtagtgtgggtcacattgaggatagccactggccaaagcagggaacagagacagaatgaggaagagctctgtggggagggtggggcaccgggtggagaaccttcaaagtccaaagagtatgactttttgggattcaatgctgtaggcagtagggagccatggaaggctcttaggtggagaaatgacagccggacattagtgagcaagccctgtctccctgagcagcatgggtggtcctctgagcacgccaggcacgagtgtgcagggagctggtgcacatgcctctgtgtgcgggtgagcatctgtgttgtgactctgcccacgcatgtacttcagtgtgccgagtggctgcacgccccagatccatgcagcacgtgccggccgaggaccctgggctttctgatggctcagaggggcctctggcattcactccagccagccgtcccttatagatccaccattttggttcagtgttccttctctatcaggcttggtggctgttggatggggctctccaagcaagaggtggccctgggccagtgggttggaagacatggggaccacagaagagggaagcccgagggggctggcattggtctgaactctctagcactgggaatcagtccccgtgctgtgcttgcggagtcttgtggaccagcaagaggaagctgtctcctgacatcgcccctccaacgtgcaccacctccattgagcttccgggacatgcgtggcctgcggacagctagcccccgccatccctcccacccttctggccaagcatggcggtgctgtgcaggcagctgtgtggcctga

SEQ ID NO: 15503 - DNA, 1287 bp, Homo sapiens; identical to SEQ ID NO: 7487
  SIMILAR (793)..(1263): 911254mologous to Homo sapiens putative p150,accession number U93567,Smith-Waterman Score=711.

SEQ ID NO: 15504 - DNA, 855 bp, Homo sapiens
  SIMILAR (8)..(1807): 531254mologous to Homo sapiens vascular Rab-GAP/TBC- containing protein,accession number AB024057,Smith-Waterman Score= 1641.
atgaatggaatttattcaagagacaccagagagctctttcctctttgtgccatgggagcactgaaggagaagtcagtagcgtgtaatgtggagaggccctcaccagaacccaaccatgatggacaaggagtagatgaacctctttcagaaactggatttaaacaagcagcagctgctggtatatttctgaataatgtgaagtttactcatgctttctccagtgatctcatgaggacaaagcagcctccactgctgatacccaggcaaacagggtctggagtggacctccagcaaactccaacagacctgcagctgaggatcctgactgttagaaggaaaactaacaaacagaaaggacatccataccaaaaccccatctgtacgtcaccatcatcaaagaccaaagcaaggcaggccaacattcaaattcaggaaatacagagaatgccacaaagatactcctcaagaagagcaactccaagatgcataattgtcagattcaccaaagttgaaatgaaggaaaaaatgttaagggcagccagagagaaaggtcaggttacccacaaagggaaccccatcagactaacagcagatctcttggtaaaaactctacaagccagaagagagtgggggccaatattcaacattctcaaagaaaagaattttcaacccagaatttcatatccagccaaactaagcttcataagtgaaggagaaataaaatcctttacagacaagcaaatgctgagagatttcggcaccaccaggcctgccctaaaagagctcctgaaggaagcactaaacatggaaaggaacaaccagtaccagccactgcaaaaacatgtcagattgtaa

SEQ ID NO: 15505 - DNA, 1698 bp, Homo sapiens
  SIMILAR (1084)..(1677): 951254mologous to Homo sapiens putative p150,accession number U93568,Smith-Waterman Score=968.
atggggtcttgcccaggtggattcacagccgaattctaccagaggtacaaggaggagctggtaccattccttctgaaactattccaatcaatagaaaaacagggaaccctccctaactcattttatgaggccagcatcatcctgataccaaagcctggcagagacacaaccaaaaaagagaattttagaccaatatccctgatgaacatcgatgcaaaaatcctcaataaaatactgacaaaccgaatccagcagcacatcaaaaagcttatccaccatgatcaagtgggcttcatccatgggatgcaaggctggttcaacatacgcaaatcaataaatgtaatccagcatataaacagaaccaacgacaaaaaacacatgattatctccatagatgcagaaaaggcctttgacaaaattcaacaacccttcatgctaaaaactctcaataaattagggacatggatgaagctggaaaccatcattctcagcaaacgatcgcaaggacaaaaaaccaaacaccggatgttctcactcatagtaaatattatccctaccataaagatactaattaagcaaaacatgacagcaatggaaactctctgtccaatatttaagttagaaggtgataccatggataaccctattgcaaatagaagagtgaggacagcagttcccacaagtgtggtgtgcctccacgtgggcacagagccagaagcaagactgccacatgggcctatgatcacggcacaaagtccttttggacagtgcctccctggagttgtggggcagttcaggaagagagaggatctcaagaaagaaggacatactaaactcctgtcaaaaaaggaagccaggcctcagactgggctcaggacttgggctctggattcaggcaccaaaggcacagatgagggagagccaccgctgctgatacccaggcaaacagggtctgcagtggacctccagcaaattacaacagacctgcagctgagggtcctgactgttagaaggaaaactaacaaacagaaaggacatccacaccaaaaccccacctgtacgtcaccatcatcaaagaacaaagaaaaagagggaatcctccctaactcattttatgaggccagcatcatcctgataccaaagcctggcagagacacaaccaaaaaagagaattttagaccaatatccctgatgaacatcgaagcaaaaatcctcaataaagtactggcaaaccgaatccagcagcacatcaaaaaccttatccaccatgatcaagtgggcttcatccatgggatgcaaggctggttcaacatacgcaaatcaataaacgtaatccagcatataaacagaaccaatgacaaaaaccacattattatctcaatagatgcagaaaaggcctttgacaaaattcaacaacccttcatgctaaaaactctcaataaattaggtattgatgggacgtatctcaaaataataagagctatttatgacaaacccacagccaatatcatactgaatgagcaaaaactggaagcattccctttgaaaaccggcacaagacagggatgccctctctcaccactcctattcaacatagtgttggaacttctggccagggcaatcaggcaggagaaggaaataaagggtattcaattaggaaaagaggaagtcaaattgccctgtttacagatgacatga

SEQ ID NO: 15506 - DNA, 1167 bp, Homo sapiens; identical to SEQ ID NO: 11170
  SIMILAR (471)..(67): 881254mologous to Homo sapiens NAG13,accession number AF194537,Smith-Waterman Score=609.

SEQ ID NO: 15507 - DNA, 2805 bp, Homo sapiens; identical to SEQ ID NO: 7495
  SIMILAR (673)..(1527): 971254mologous to Homo sapiens putative p150,accession number U93574,Smith-Waterman Score=1405.

SEQ ID NO: 15508 - DNA, 1989 bp, Homo sapiens; identical to SEQ ID NO: 3796
  SIMILAR (334)..(981): 881254mologous to Homo sapiens putative p150,accession number U93565,Smith-Waterman Score=978.

SEQ ID NO: 15509 - DNA, 762 bp, Homo sapiens; identical to SEQ ID NO: 988
  SIMILAR (250)..(759): 921254mologous to Homo sapiens p40,accession number U93564,Smith-Waterman Score=805.

SEQ ID NO: 15510 - DNA, 1023 bp, Homo sapiens; identical to SEQ ID NO: 12159
  SIMILAR (202)..(993): 861254mologous to Homo sapiens p40,accession number U93569,Smith-Waterman Score=1157.

SEQ ID NO: 15511 - DNA, 382 bp, Homo sapiens
  SIMILAR (218)..(382): 941254mologous to Homo sapiens melanoma-associated chondroitin sulfate proteoglycan (MCSP),accession number X96753,Smith-Waterman Score=253.
ggctgtgaccaccaagccaggtgatcaggccagtgatgtttccctttcagccaggtcggggagccagacctgggagggagactcctctggggcccaggggatgcaagtcagaactggcagaggcctctggctccaggaacctccaagaaggagacctgagttgctgggaatttctgggtctgacctcctgcaaagtcaaggtctgggctggacacaagcttccttctttggtgagaaccacctggaggtgactgtggccatggctctgactgacatagacctgcaactgcagttctccacgtcccaacccgaagccctccttctcctggcagcaggcccagctgaccacctcctgctgcagctctactctggacacctgcag

SEQ ID NO: 15512 - DNA, 993 bp, Homo sapiens
  SIMILAR (1)..(681): 811254mologous to Homo sapiens melanoma-associated chondroitin sulfate proteoglycan (MCSP),accession number X96753,Smith-Waterman Score=936.
gtcagggttgtcctgggccaggaggagctgaggctgcagatcccagcagaaatgctgctgagtgactccatcccctacactacagttctgactgtctcagagggctggcccacattgtcagtcaatgggtttctgaatgcctcctctgtagtcctgggagcccccctagaggtcccctatgggctctttgttgggaacactgggagccttggcctgccctacctgaggggaaccagccatcccctgaggggttgcctccatgcagccactctcaatggccacagcctcctccggcctctgacccccgatatgcatgagggctgtgctgaagagttttccaccagtgacgatgtggccctgggcttctctgggccccactctctggctgccttccctgcctggggcactcagaacaaaggaaccctggagttggcactcaccacacagatctggcaggcacccttgaccttccaggcagcgggctggcatggggacttcatccatgtggacatatttgagggccacctgtggttcatggtcgagaagggccagggtactgtattgctcctcaacagtgtgcttgtggctgacgtgcagaccctcaaggtcagcatccacatcaacactcaccagctagaaatctccatggaccagtaccccacacacctcagtgtcaatggccagaggtgggggcttcgggaagccttgctgacacacaacatggcggcaggctgcagactggaggaggtggaggagtatgaggacaatacctatggccattatgaagctttctccaccctggcccccagggcttggctgtccatggatctagctgagccatgcatgcttgagccagggctgcctcctgtctttaccaatttcacccagctgctgactatcagcccagtggtggtgaccgagggtggcacagccgagtggtggcatgtgcagcccatgctggccctgatggaggctgaactgcataaatcccag

SEQ ID NO: 15513 - DNA, 460 bp, Homo sapiens
  SIMILAR (206)..(343): 821254mologous to Homo sapiens melanoma-associated chondroitin sulfate proteoglycan (MCSP),accession number X96753,Smith-Waterman Score=184.
acagcccttgctggggacagttgctccaggccactcagccagcacagccttcgcccagaaggacctgctggttggggccgttctctttggccacaatggcagcctcagctcccgcaacaccctggccttctcaatggatgtggggccttctcaatggatgtggggccttctcaatggatgtggggccagtgcacacagacagtgcacacggtgcactctacaagtgaccattgccctagagggcccactagccccactgaagctggcctggcacaagaagatctacatcttcctgggagaggcagctgagatcagaagggaccagctggaggcagaacgggagttgttccatagcagggcagagcagggcagactctttgtgggccgtcctgggcaggcagcacacctgatgctcccaccaggagactgcgtgagcatctggacccagcacatgatcaca

SEQ ID NO: 15514 - DNA, 487 bp, Homo sapiens
  SIMILAR (76)..(2): 761254mologous to Homo sapiens HTRM clone 3340290 protein sequence,accession number Y73387,Smith-Waterman Score=96.
accgttccagacctgatgtcagatttggctcatcagagtccacagaccatatcggtgaagaagatgaatagtattcctgctgcatccagggtacaatgcgcctttccagaacacagcagcgacccgggatagagggatcgctcaaacagcaccagaggctgcattccatcttttcctccatcaaagagtccgttttcattgttagtttctccttaaacacgattggcgtgatgttgcagtggagcgtgagctgcggcggcggctcctggttcttgtggaagatagaggccaacaacttcagcttggccttgaaccctcacacggacattttactctcacctctggcgggaggggcgcggaaggtgagcccgtcgggagccgctgtctcggccgcaaccacccgcgggacctctcggcggcgctctcccggctccgcctctccctgatgcctcaactctagtcggagacgaaatcgtcgacccgggga

SEQ ID NO: 15515 - DNA, 561 bp, Homo sapiens
  SIMILAR (388)..(543): 801254mologous to Homo sapiens Human secreted protein HLYES38, SEQ ID NO:220,accession number Y86305,Smith-Waterman Score =209.
atggatccaaaccaagaagaaatccctgatttacctgaaaaagaactcaggaggttaattattaaactattcagggaggggccagagaatggcaaagcccaatgcaaggaaatccaaaaaatgatgcaagaagtgaagggagaggctggaataatcggtgttactgaggaagaagacaattctaaaagcttggaaaacatctttggtggaataatcgaggaaaacttccctggccttgttagagacctagacatacaaatacaagaagcacaaagaatacctgggaaattcatcgcaaaaagatcttcacctaaacacattgtcatcaggttatccaaagttaagacaaaggaaaaaagtcttaagagctgtgaaacagaagcaccagtcacaaccctcagctgcaggtctgttggagttgactggaggtccactccagaccctgtttgcctgggtatcagcagcactggctgcagaacagcggatattggtgaaccgcaaatgctgctgcctgatcattcctctggaagttttgtctcagaggagtacctggccgtgtga

SEQ ID NO: 15516 - DNA, 420 bp, Homo sapiens
  SIMILAR (261)..(416): 751254mologous to Mus musculus dynamin,accession number L29457,Smith-Waterman Score=194.
cctcttggcatgataggtcttaagtcccctcccagatctgtgacatttgacaggtgtcttttcctctggacctcggtgtccccatctgagtgagaaaaggcagtggggaggtggatcttccagtcgaagcggtatagaagcccgtgtgaaaagccatactccaaggggctccaagtccagcgcacagtcccagaagggcccagcaaggcagccagggcggcacaggcaccaggtcccaaccttcttccctgtttgcccactctcagaccccggagttcatcatctcggagccgctggccaatatgtactcatgtgggaaccagaacacactgatggaggagttggcagagcaggcacagcagcacgacgagatgctgcacatgcaccacgcgctgaaggaggcgctcagcatcatcagtg

SEQ ID NO: 15517 - DNA, 781 bp, Homo sapiens
  SIMILAR (10)..(759): 801254mologous to Homo sapiens melanoma-associated chondroitin sulfate proteoglycan (MCSP),accession number X96753,Smith-Waterman Score=1014.
tcctgttcacacactcaggctgaccacggctggatcccgctgcaggtgtccgatgggcagcaccaggccatcacggtgctggaggtgcaggccttggagccttacctctgtgtggccaatggctccggcctcatggttcctcaaggaggccagggtaccatcaacatggccgagctccacctgggcaccaacctcaacatctgcagtagggatgaggcccactaccacgtcacagacagccctcactggggacagttgctccaagccactcagccagccacagccttctctcagcaggacctgctggttggggctgttttctatggccacaatggcagcctcagctcccgcaacaccctggccttctcaatggatgtgggaccagtgcacacagatgccaccctacaagtgaccattgccctagagggcccagtagccccactgaagctggcccagcacaaggagatctacatcttccagggagaggcagctgagatcagaagggaccagctggaggtagcccaggaggcagtgccgccagcagacatcgttttctcagtgaagagcccaccgagtgccggctacctggtgatggtgctgcgtggcatcttggcagatgagccacccagcctggaccccgtgcagagcttctcccaagaggcagtggacacaggcaggatcctctacctgcactcccgccctgaggcccggagccatgccttctcgctggatgtggcctcggcctgggtgctccccttgaggacgtcacgtggagctggag

SEQ ID NO: 15518 - DNA, 581 bp, Homo sapiens
  SIMILAR (453)..(367): 441254mologous to Mus musculus GD3 synthase,accession number AJ401102,Smith-Waterman Score=69.
gcatgcacactctaacacatgcccacaaacaacacgcatacgtcgccctctccgccacctcccggtgcccaacacccctcaccagccggcacgtgccgcatggatctggggcgtgcagccactcggcacactgaagcacatgcgtgggcagagtcacaacacagatgctcacccgcacacagtaggcatttgcaccagctccctgcacactcgtgcctggcgtgctcagaggaccacccatcctgctcagggagacagggcttgctcactaatgtccggctgtcatttctccacctaagagccttccatggctccctactgcctacagcgttgaatcccaacaagtcatactctttggactttgaaggttctccaccctgtgcgctggacttggagccccttggagtatggcttttcacacgggcttctataccgcttcgactggaagatccacctccccactgccttttctcactcagatggggacaccgaggtccagaggaaaagacacctgtcaaatgtcacagatctgggaggggacttaagacttatcatgccaagaggaaaaaaaaaaaaaaaaa

SEQ ID NO: 15519 - DNA, 511 bp, Homo sapiens
  SIMILAR (383)..(463): 441254mologous to Hordeum bulbosum chitinase,accession number AJ400135,Smith-Waterman Score=64.
agaggctgccttgtgctgctggagcgcatagccagggaggcccccaccccaacagaggcctctgatgccttgctggccagggctttggaaactctgacagcgctgcttccctcatttcctaatctcctttttctgaccctcttacactctctgaggggctgcagttgcaggaacccagaatctctgtcttggaggtggtggggcggtggggggcagttgaagaggggctttgaatggagagggtctgctgcatccagggtacaatgcgcctttccagaacacagcagcgacccgggatagagggatcgctcaaacagcaccagaggctgcattccaacttttcctccatcaacgagtccgttttcattgttagtttctcctctggcgggaggggcgcggaaggtgagcccgtcgggagccgctgtcacggccgcaaccacccgcgggacctctcggcggcgctctcccagctccgcctctccctgatgcctcaactctagtcggagtaggg

SEQ ID NO: 15520 - DNA, 1684 bp, Homo sapiens
  SIMILAR (4732)..(7944): 911254mologous to Homo sapiens putative p150,accession number U93563,Smith-Waterman Score=5071.
tcatgatattgattcttccaatccgtgggcatggaatgctcttccatttgtgtcctcttttatttcgttgagcagtggtttgtagttctccttgaagagatccttcacatcccttgtaagttggattcctaggtattttattctctttgaagcaattgtgaatgggagttcactcatgatttggctctctgtttgtctgttattagtgtataagaatgcttgtgatttttgcacattgattttgtatcgtgagactttgctgaagttgcttatcagcttaaggagattttgggctgaaacagtggggttttctagatatacaatcatgtcgtctgcaaacagggacaatttgacttcctcttttcctaattgaatacactttatttctttctcctgcctgattgccctggccagaacttccaacacagctcctccttgtacctctgatagaattcggctgtgaatccgtctggtcctgtacttttttttggttggtaagctattgattattacctcaatttcagagcctgttattggtctattcagagattcaacttcttcctggtttagtcttgggagagtgtatgtgtcgaggaatttatccatttcttctagattttctagtttaattgcgtagaggtgtttatggtagtctctgatggtagtttgtgtttctgtgggatcggtggtgatatccaacttatcattttttattgcatctttttgactcttctctcttttcttctttattagtcctgctagtggtctatcaattttgttgatcttttcaaaaaaccagctcctggattcattgattttttgaagggttttttgtgtctctatttccttcagttctgctgtgatcttagttatttcttgccttctgctagcttttgaatgtgtttgctcttgcttctctagttcttttaattgtgatgtcagggtgtcaattttagatctttcctgctttctcttgtgggcatttagtgctataaatttccctctacacactgctttgaatgtgtcccagaaattctggtatgttgtgtctttgttctcgttggtttcaaagaacatctttatttctgccttgatttcgttatgtgcccagtagtcattcaggagcaggttgttcaatttccatgtagttgagcagttttgagtgaatttcttaatcctgagttctagtttgattgcactgtggtctaagagacagtttgttataatttctgttcttttacatttgctgaggagtgctttacttccaactatgtggtcgattttggaataagtgcagtgtggtgctgcgaagaatgtatattctgttgatttggggtggagagttctgtagatgtctattaggtctgcttggtgcagagctgagttcaattcctggatatccttgttaactttctgtctcgttgatctgtctttggtctttgatgatggtgacatacagatgggtttttggtgtggatgtcctttctgtttgttagttttccttctaacagtcaggaccctcagctgcaggtctgttggagtttgctggaggtccactccagaccctgtttgcctgggcatcagcagtcgtggctgcagaacagcagatattggtgagcagcaaatgttgctgcctgatcgttcctctggaagttttgtctcagaggagtacctggccgtgtga

SEQ ID NO: 15521 - DNA, 582 bp, Homo sapiens
  SIMILAR (179)..(352): 741254mologous to Homo sapiens Human secreted protein, SEQ ID NO: 5176,accession number G01095,Smith-Waterman Score=239.
tttttttctatccatgatatcaatccctctcagtcactaactgattgtgacaacaccttgtacagttgttggtggcattaaaccagatggtgtataagagtattttgtcaaaactgtaaaggaggatgtggctataggggctgattgttctcatgagtgttactactcttctttcccacagttaaaagaatattggcagaggaagagccctggcattccagaaggagctaacaggaaaaagaaaatcaatggcagtagccctgacacagccacttctggtggttaccactcacctggggatgtgagtcttggctggccagggtcctgggggcagggggcccaaggggcagtagagggtaattgttaagattgtagatggactgttgggtactggttaagaattctggatttgaatcctgcctctccatctgctaagaattgattagggattgattagcatatgatttagggcaagttgcttgaggtctttgggcctctcttttcacatctgtataatagaggtggtattttttgacttccatttgtgaagtttaaatgagattcgttattgatgcttttaag

SEQ ID NO: 15522 - DNA, 807 bp, Homo sapiens
  SIMILAR (292)..(480): 671254mologous to Homo sapiens golgin-95,accession number L06147,Smith-Waterman Score=214.
actcgcagacgttactgccctcttgcgtgccccggccacccccgggcggcttgtagccggtgcgcggggtggctggggctacgtgcagagctgtcgcggagccggagcagcagcggtgaagcccctcggctcggccgagaccgccgtgcccactgctcgcctcggttgccgccgctttagccgcagccgctgctgccgccgccgggggagaggcagcctattgtctttctccgcggcgaaggtgaggagctgtctcggctcggcccgcgggggagccccgggagccgcacggtggcatttttcaactccgctggagccagtgcccaggaggaacaaagggtgtgctgccagcccctggctcacccagtggcctcgtcccagaagaagccagaggtagcggccccagccccagagagtgggggtgagtctgtgtttggggagacccaccgggccctgcagggggccatggagaagctgcagcgactttatggaaggagaaggtggacctgaaggagcgggtagagaaactagagcttcaattcatccacctctcaggacagacagacaccatagggagaaagtacatcagccagggggcagtgtcagagacgcagcactgggagaggaggacatcgtcaggctggcccaggaccaggaggagatgaaggtgaacctgcaggagctgcggggcaggtgttgcagcttgtgggagaccacaaggaggggcatggcaaattctgaccattgcccagaaccctgctgatgagcccactctaggagccccaatagcccaggagcttgggtgtg

SEQ ID NO: 15523 - DNA, 1411 bp, Homo sapiens
  SIMILAR (1)..(1170): 981254mologous to Homo sapiens putative p150,accession number U93563,Smith-Waterman Score=1977.
gaattcccgggtcgacgatttcgtcacgagttggtggttgtgctgcccggagcctctatgtccgcgagtgtgaagaacggaccagatgggtccagcagtgctgggtcaaggcgaggagggggcagccggaagcgcgcgcatgctctggactcctgcagccgccgaaacggtcaggttttccttgttcccgcatgttcagccaatcgtgtttaaggagaaactaacaatgaaaacggactcgttgatggaggagaagttggaatgcagcctctggtgctgtttgagcgatccctctaccccgggtcgctgctgtgttctggaaaggcgcattgtaccctggatgcagcaggaatcctattcatcttcttcaccgatatggtctgtggactctgatgagccaaatctgacatcagttctggaacgtctagaagatactaaggacaacagttcgctgctagcgaatataaagcaggcagaaaaacatgaaaagaaccacccggaggtgactgtggccatggctctgactgacatagacctgcagctgcagttctccatgtcccaacccgaagccctccttctcctggcagcaggcccagctgaccacctcctgctgcagctctactctggacacctgcaggtcaggcttgtcctgggccaggaggagctgaggctgcagaccccagcagaaattctactgagtgactccgtcccccacaccacagttctgactgtctcagaggactggcccacattgtcagtcaatgggtttctgaatgcctcctctgtagtcctgggagcccccctagaagtcccctatgggctctttgttgggaacactgggagacttggcctgccctacctgaggggaaccagccatcccctgaggggttgcctccatgcagccgctctcaatggccgcagactcctccagcctctgacccccaataagcatgagggctgtgctgaagagttttctgccaatgacgatgtggccctgggcttctctaggtcccactctctggctgccttgcctgcctggggcactcaggatgaaggaaccctggagtttacactcaccacacagagctggcaggcacccttggccttccaggcagcaggctggcatggggacttcatccatgtggacatatttgagggccacctgtggtccatggttgagaagggccagggtactgtattgctcctcaacagtgtgcctgtgactgacgcacagccccacaaggtcagcatccacatcaacattcaccagctagaaatctccatggaccagtaccccacatgtactttgaaccgaggagtcctcagctacctggagccacgtgacagtctccttcttggggagctggtgcagaggcctctcgtcacctccaggaacaccgctcaggcctga

SEQ ID NO: 15524 - DNA, 1493 bp, Homo sapiens
  SIMILAR (612)..(4): 891254mologous to Homo sapiens p40,accession number U93569,Smith-Waterman Score=919.
ttacaatttggcatgtttttgcagtggctggtaccagttgttcctttccaggtttagtgcttccttcaggagctcttgtaaggcaggcctggtgatgacaaaatctcttagcatttgtttgtctgtaaaggattttatttctccttcacttatgaagtttagtttggctggatatgaaattctgggttgaaaattcttttctttaagaatgttgaatattggcccccactctcttctggcttttagagtttctgccaagagatcagctgttagtctgatgggcttccctttgtgggtaacccgacctttctctctggctgcccttaacattttttccttcatttcaactttggtgaatctgacaattatgtgtcttggagttgctcttctcaaggagtatctttgtggcattctctgtatttcctgaatttgaatgttggcctgccttgctagattggggaagttctcctggataatatcctgcagagtgttttccaacttggttccattctccccgtcactttcaggtacaccaatcagacatagatttggtcttttcacatagtcccatatttcttggaggctttgtttcttttctttttattcttttttctctaaacttctcttctcgcttcatttcattcattttgtcttccatcgctgatatcctttcttctaattggttgcattggctactggggcttgtgcattcgtcacgtagttctcgtgctgtggttttcagctccatcaggtcctttaaggacttctctgcattggttattctagttatccattcgtctaattttttttcaaagtttttaacttctttggcattggttcgaacttcctcctttagctcagagaagtttgttattactgatcttctgaagcctacttctgtcaactcgtcaaagtcattctccatccagctttgttccattgttggtgaggaactgtgttcctttggaggagaagaggcactctgatttttagagtttccggtttttctgctctgttttttcccccatctttgtggttttatctacctttcgtctttgatgatggtgacctacagatggagttttggtatgagttgtcctttttgttgatgttgctgctgttcctttgtgcttgttggttttccttctaacagtcaggaccctcagcagcaggtctgttggagtttgctggaggtccactccagaccctgtttgcctgggtatcagcagcggtggctgaagaacagtggatattggtgaaccgcaaatgctgctgcctgattgttcctctggaagttttgtctcagaggagtacccggccgtgtgaggtgtcagtccatccgtatgttcattgttgtctaggcattgaagaattaaatatctattgtagtcttcacagtctgggtttgtttgaagccatccttcttgggaaggcttttgaagaacttgggtgttgtgatccaagtcttttcgccactgttgccgtatctgcat

SEQ ID NO: 15525 - DNA, 5800 bp, Homo sapiens
  SIMILAR (634)..(1899): 991254mologous to Homo sapiens organic-cation transporter like 3,accession number AB010438,Smith-Waterman Score=2149.
atggacagccacaggccaactgcctggccagccgcagtcttggccggccgctctcctgtggctgcagaaagtgagaggtactgcagccgccagcccccgctaccccgccgccaggctctcctgtctgtcctagtcctcgcatcagacaccaggcttcccttcccctggagcagccagaccttctgtggtatcttgagcaagcccctggtcctgtctgggcctctgcagactcaaggagaaactaacaatgaaaatggactcgttggtggaggagaagttggaatgcagcctctggtgctgtttgagcgatccctcttccctggtcgctgctgtgttctggaaaggcgcattgtaccctggatgcggcaggaatcctattcatcttcttcaccaatatggtttgtagactctgatgagctaaatctgacatcagttttggaatgtctggaagatgataagaacaacaatttgcttcatcagcaattgaagtggttgatatgtggactctgcagattatataaccttcctaagcacctggatgttgccatgccagatcaaccactacccatgggtcagtcaggaccctcagctgcaggtctgttggagtttactggaggtccacttcagaccctgtttgcctgggtgtcagcagcgttggctgcagaaaagcagatattggtgaactgcaaatgctgctgcctgattgttcctctggaagttttgtctcagaggagtacctggcagtatgagttaaaagaatattggcagaggaagagccctggcattccagcaggagctaacaggaaaaagaaaatcaatggcagtagccctgacacagccacttctggtggttaccactcacctggggattcagcaacaggtatctacggggaaggccatgcatcatctgctaccctggaggatctggagctgagacaacccacaccctccaccagccctaatgattgttctctctacccctccccacaatcttcctccaactcctcctctctgcatgcacctcacagccagtaccgagaactagcagtggccctgcactcaagctccgcaataatcagtcaactcagtgaaaacatcaattcactggagaggcttcaggagcaggatgagaggctgtggcagcaggagactctgtgggagctggagaggatgctggagctggagtgggaagccctctacaagcagcaggccgagccccacagcagctttgaggagctgaataatgagaacaagagtgcactgcagttggagcggcaagtaaaggagctgaagcttggagaacctggaagctaccagccagcagaaacagcagctaaagcccagttgagcctcatggctctccctggggaaggatatggaggaggacatctggacaatgaggaggaggcacctcggcccatgctgaacattccaggggacctggagagccgggaggccatggtggcatttttcaactccgctggagccagtgcccaggaggagcaaagcgtgtgctgccagcccctggctcacccagtggcctcatcccagaaaaagccagaggcagcggccccagccccagagactgggggtgaatctgtgtgtggggacacccactgggccctgcaggaggccatggagaagctgcaggaaagtacatcagccagggggcagtgccaaagacgcagcactgggagaggaggacatcgtcaggctggcccaggaccaggaggagatgaaggagaaactaacaatgaaaacggactcgttgatggaggaaaagttggaatgcagcctctggtgctgtttgagcgatccctctatcccgggtcgctgctgtgttctggaaaggcgcattgtaccctggatgcagcagcttccttctttggtgagaaccacctggaggtgactgtggccatggctctgactgacatagacctgcaactgcagttctccacgtcccaacccgaagccctccttctcctggcagcaggcccagctgaccacctcctgctgcagctctactctggacacctgcaggtcagggttgtcctgggccaggaggagctgaggctgcagatcccagcagaaatgctgctgagtgactccatcccctacactacagttctgactgtctcagagggctggcccacattgtcagtcaatgggtttctgaatgcctcctctgtagtcctgggagcccccctagaggtcccctatgggctctttgttgggaacactgggagccttggcctgccctacctgaggggaaccagccatcccctgaggggttgcctccatgcagccactctcaatggccacagcctcctccggcctctgacccccgatatgcatgagggctgtgctgaagagttttccaccagtgacgatgtggccctgggcttctctgggccccactctctggctgccttccctgcctggggcactcagaacaaaggaaccctggagttggcactcaccacacagatctggcaggcacccttgaccttccaggcagcgggctggcatggggacttcatccatgtggacatatttgagggccacctgtggttcatggtcgagaagggccagggtactgtattgctcctcaacagtgtgcttgtggctgacgtgcagaccctcaaggtcagcatccacatcaacactcaccagctagaaatctccatggaccagtaccccacacgctgcagactggaggaggtggaggagtatgaggacaatacctatggccattatgaagctttctccaccctggcccccagggcttggctgtccatggatctagctgagccatgcatgcttgagccagggctgcctcctgtctttaccaatttcacccagctgctgactatcagcccagtggtggtgaccgagggtggcacagccgagtggtggcatgtgcagcccatgctggccctgatggaggctgaactgcataaatcccaggacttgacgttccgggtcagcaatggactgcaggccagccccccgtccatgctgaaggtggtggccatccagccggccatacagatccactgcagcacagggctgcatctggcccaggactctgccatgcccatcttgcctaccaacctgtcggtggagaccagcaccgtggggcaggatgtgactgtgttgttctgtgtcaccagaggcctgcagttcagggaggtgcagaagcagggggctggtggggtggagggtgctgagtggtgggccacacagtcattccaccagcaggatgtggagcagggccacatgaggtacctgagcactaacccacagcactatgccgaggacaccgtgaagaacctggatctgcaggtgcaggtgagctgggaaatcctgagcaatctgtccttcctagtgaccatccagagagccactgtgtggatgctgcagctgcggccactgcacactcaacacccagcagaggccctcaccacagcccacctggaggccaccctggaagaggcaggcccaagccccccaaccttccactctgaggtggttcaggctcccaggaaaggcaaccttcaactacagggcacgacactgtcagatggtcagggcttcacccaggatgatgtacaggctggagaggtgacctatagggccatggcacatgcctcagtggcagtggaggacaccttctgtttccatgtcacagctccactatatttctccccactctgtactttctccatccatactggcggtgacccagacatgcctgtcctcaccaatgtcctcttggtgcccgagggtggtgggtgtgtcctctctgctgaccagctcttcgtcaagagcctcaacagtgccaggtggcagctgctgactccacacaacatggccttcagcaatgctgattcaggctttgtggatgcccagctggtgctgacccacaaggacctcctgtctggcagtatcatggccacggatgagcccatgcagcccatcttctgcttcatccaggaggggcctcaggaagaggcgagtcctgttcacgcactcaggctgaccatggctggatcctgctgcatgcagcaccaggccatcttggtgctggaggtgcaggccttggagccttacctctatgtggccaatggctccggcctcaaggtccctcaaggagaccagggtaccatcaatatggccgagctccacctgggcaccaacctcgacatccgcagtggggatgagcccttgctggggacagttgctccaggccactcagccagcacagccttcgcccagaaggacctgctggttggggccgttctctttggccacaatggcagcctcagctcccgcaacaccctggccttctcaatggatgtggggccttctcaatggatgtggggccttctcaatggatgtggggccagtgcacacagacagtgcacacggtgcactctacaagtgaccattgccctagagggcccactagccccactgaagctggcctggcacaagaagatctacatcttcctgggagaggcagctgagatcagaagggaccagctggagaccacggagttcatcatctcggagccgctggccaatctgtactcatgtggggaccagaacacactgatggaggagttggcaaagcaggcacagcagcgcgacaagatgctgtgcatgcaccacgcgctgaaggaggcaaatgacatcaacaggaccaccgtcagcatgcccatgcccccgcctgtggatgacacctggctgcaggtgcagagtgtccctgaggaacacaggtaccagggactggcccccatagccccaaagtcccccatccgggccacacagaggagtgcccagggcttagtggcacgctccctcatggggtggttcccacctggacctggcttcaatgcagtccggggcatgactgagataggcatacgttgtgaggaactggagggtaactgggtaaagagctgcagtgtgggcagaagtgtagtgtgggtcacattgaggatagccactggccaaagcagggaacagagacagaatgaggaagagctctgtggggagggtggggcaccgggtggagaaccttcaaagtccaaagagtatgactttttgggattcaatgctgtaggcagtagggagccatggaaggctcttaggtggagaaatgacagccggacattagtgagcaagccctgtctccctgagcagcatgggtggtcctctgagcacgccaggcacgagtgtgcagggagctggtgcacatgcctctgtgtgcgggtgagcatctgtgttgtgactctgcccacgcatgtacttcagtgtgccgagtggctgcacgccccagatccatgcagcacgtgccggccgaggaccctgggctttctgatggctcagaggggcctctggcattcactccagccagccgtcccttatagatccaccattttggttcaggcagtgttccttctctatcaggtctggtggctgttggatagggctctccaagcaagaggtggccctgggccagtgggttggaagacatggggaccacagaagagggaagcccgagggggctggcattggtctgaactctctagcactgggaatcagtccccgtgctgtgcttgcggagtcttgtggaccagcaagaggaagctgtctcctgacatcgcccctccaacgtgcaccacctccattgagcttccgggacatgcgtggcctgcggacagctagcccccgccatccctcccacccttctggccaagcatggcggtgctgtgcaggcagctgtgtggcctga

SEQ ID NO: 15526 - DNA, 523 bp, Homo sapiens
  SIMILAR (236)..(283): 931254mologous to Mus musculus GTF2I,accession number AF289666,Smith-Waterman Score=68.
atgctctgccgcctgggcgcccaagctgcagttgctctctgtgtgcaggcagcagctgcctggcaacccccgagcccgctcgcactcccaccatcgcagaaccagggccaggtgtcccagtggctgcggccaagccaggcattctgccggatcatggcacaagttgcagtttccactctgcccatggaagatgaggagtccattgaagatgaggagtctgttgaagatgattccgtcggagagcaggatggtggtgacatttctcatatcagctctcgagtccacggaacaataccacgggggcgtgtacaccccctgcgatattgacagtaatatcatcctctcccccccagatattagtaacaatatcaccgaaggtgtctacaccccctgtgatattgacagacacctgattcccttcttcctgcccttggacatgagactccaggttcttatgcctttggactctgggacttgcaccagcggcttccccgaggctctcaggccctcggcctcagactga

SEQ ID NO: 15527 - DNA, 1261 bp, Homo sapiens
  SIMILAR (508)..(1077): 271254mologous to Chlamydomonas reinhardtii amino acid feature: Rod protein domain, aa 266 .. 468; amino acid feature: globular protein domain, aa 32 .. 265,accession number L29029,Smith -Waterman Score=94.
atgagtgagcataatattacagaggaatgtcaacaggaaaaccagagcatagagcagtggagatccatagctcacagtgatagcatagaagtttcctggttacatgaagtaattaagacatatttaaaagccaaaagtacaaaattagacctgatgaaaaagctgaaggagttatcatcccagccaagcaggaaacccaaaccttttattccttctcaagaaggaacaggagacaatgatgtgatctattctacagaaagactttccaaactgctcaatcaaaagaaaggttcaacacggttgtacgataagcctctttccaatctgctcaatcaaaagaaagtttccactcgaacagaaggtctcaccgtggactcgagagctgatatgagaaatgttaccaccatcctgctctccacggaatcatcttcaacagactcctcatcttcaatggactcctcatcttccatggactcctcatcttccattggcagggtggaaactgcaacttgtgccatgatccctgtgcaaaaaagtaagagatcggggccaccccaggggccgtctgcagccaccggggatggtgctgagggtcggttcctgccccggtgcagccgcccctgggcagaccgcctggcttggtcgcagccacggcgacatctagccccggggccctctgcagccacaggggatggggctgagggccggttcccgcccctgtgcagctgctgcgggacagaccgcctggcttggccacagccacagggacatttggccctgcttccgagatgtggggagtgtgggcgggctcgggagttgcctggagactgctgcctgcacgcagaaggcggctgcagctcggtactggaagtcctagccagagcaatcagacaaaagaaggaaatagaggaaatccaaatcggtaaacaggaagtcaaactgtcacttgttgctgatgatataatcttttgcctagaaaacgctacggactcctctagaaacctcctagaactgataaaagaattcagcaaagtttccagatacaagattaatggacacaaatcagtagctcttccatacatcaacagctaccaagcagagaatcacatcaagaactcaaccccttttacaatagctgcgacaaacaacaacaacaaaaaaacaaaacttaggaatatacctagcaaaggaatcaaaggacagctacaatgaaaattacaaaaccgctactgaaagaaatcatagatggagccaagcacgg

SEQ ID NO: 15528 - DNA, 590 bp, Homo sapiens
  SIMILAR (83)..(496): 901254mologous to Homo sapiens nuclear protein Skip,accession number U51432,Smith-Waterman Score=676.
ttcttgggtcgacccacgcgtccgccaatccactgtccatacccttggattggttgaagagtttttggttttactgaacttcattggaagtccgaggattaggaacaccgagagcaataacttcaaccaatccaagggtatggacagtggatttgcaggtggagaagatgaaatttataatgtttatgatcaagcctggagaggtggtaaagatatggcccagagtatttataggcccagtaaaaatctggacaaggacatgtatggtgatgacctagaagccagaataaagaccaacagatttgttcccgacaaggagttttctggttcagaccgtagacagagaggccgagaaggaccagttcagtttgaggaagatccttttggtttggacaagtttttggaagaagccaaacagcatggtggctctaaaagaccctcagatagcagccgccccaaggaacacgagcatgaaggcaagaagaggaggaaggaataaggcacaggtctctccaaagttgaattgaactcttacccataaccctaattgattgcaagtcatatgggggaacactttgtaaatggtcagg

SEQ ID NO: 15529 - DNA, 1419 bp, Homo sapiens
  SIMILAR (367)..(948): 481254mologous to Homo sapiens golgin-95,accession number L06147,Smith-Waterman Score=394.
atgcctcagaccacagatctaagacatacctacaagagcactccaaggagagtagcgccaactccctcccaccccggtgagcaccgccgggtcagcactgtggggcgagtgctcagagccccagaccagatgaaggaccagcatctgctggacgatggactcaagtgtgcagaatacagtgctaggccctacaaggagttcagtaaagggagtgatggagtggctgcagtatctacaaatggagagacgagtacgctgagtatctccatggagagcatgccgcgtgtggcagaggatgcaggagatgttggagcagctgaacccctacacctggagcccccagcaggacccttggaggtggagcagcagctacaagcggagatcaagcacctgcggaagacgctggagagtctggcaggacagctccaagcccaagtggaagccaatgagggctcgagtcacctgaaccggcagcaggacgagaggctgcgggagtggaaagcagagctctgggaggagcagggggagacgggcaggtcctccgtgcagaaagaccgcaccaccatcagccacgcgctctcccagaatcaccagctcgaggagcagctggccaaggagcgcctggaagctaccagccagcagaaccagcagctacagtcccagatgagcctcatggctctccctggggaaggcgatgaactgggcagtaaggaggaggaggaggcgcctcagcccatgccgagcatcttggaggacctgaagagccgggaggccatggtggcctttttaaactcagctttagtcagtgccgaggaggagcagcaggcacagctacatgggcagctgaaggagcaaagggtgtgttgccagcacctggctcacccagtggccttggcccagaaggagccagaggcggcagccccaaccccaaggaccgggggcgattccgcggtatggacagtggatttgcaggtggagaagacaaaatttataatgtttacgatcaagcctggagaggtggtaaataaagatatggcccagagtatttataggtctggtaaaaacctggacaaggatatgtatggtcatgacctagaagccagaagaaagaccaacaggcctctggaaaccaccttctactttctgtcttatgaactcgactactctaggtgcttcataggctgtttgaagtgcctctgtctcccttcaccttccgccacgattggaagcttcctgaagccttcccagaaacagaagccagtatgcttgctgtacagcctgcagaaccacgaaccaattaaacctcttttctttataaattacccagactcagacagctaccgtcatactcaagtaattcgcattctcctctctggcagtattcacgtgcaggttcctgccacaaagacgcccttgtag

SEQ ID NO: 15530 - DNA, 1668 bp, Homo sapiens
  SIMILAR (172)..(1356): 961254mologous to Homo sapiens serine kinase,accession number U09564,Smith-Waterman Score=1990.
atggggggtcatgtgggagggagacacagaatgcttactcctaaactcattccagaaactctggcagctgggtcaatgaaaatcaacccggaagagcccaacagacctcccataaatggagctcctggtggccctgcccttcctctcgcagcgggagactcaggctctgagcaggctggggagccggcccttgccgccagcgagctgcagggctgggactcgaccctcggctcaccaggttccctgcgcggcactggcatcgtggccacccgctctggaagccggggcttcagactctctccagcaagcctgggccgcagaagccgggaccgcaaaacaaaggagctcgcgtttgcggggagcggcctggccaccagggggcagcgtgcgtcctccgatgccgccgctgggccgcctttgtcgcggtgcagcccggcccgcaccccgcagctgcccgtccggggatccctcacaggcccccgagcccccgcgcccccgcgcgcccgggtctgcctcctgagctgctcctgccgccagcccttccctcctttgactggcgggttgaatgtcggccgtccctctgggcctagctggaagatctgcccacgcagccttccttcggcttcggcagagacaggcatccgccgccgccgggccgcagcccacccgcccctccagcagcccccgctctgcggtgaaagtcttcccagcgtccagtgcagcgcaaatgcagattccagcatcccagtgccgtctagatggagccaagacgcctgcagaaatacgggggctgccgggcctcctggatacccggcatgtgttaataacagaaatagaacggataaaaatagtcaacttgatgaaacgcaccacatgaagacaaaggtgacggacagaggaggctttggagcgtttacgatgctgttacgggttgtggacacagggcatacttcatgctcaggctctgttgagtgggacccaaggctgtatggagaccaagccgacctttcccgctcaggacacctggaccgtcccggtgcccaccatgattactacacagccattaaaaaatgtgaagagggtaaatctcttgacaccacggtgaaggtgaaggctggagtcaatggatttggtcgtattgaacacctggtaaccaagcctgcttttaactctggtaaagtggatattgtcaccatcaatgaccccttcgttgacctcaacaacatggtctacatgttccagtatgattccacccatggcaaattctgtggcaccgtcaaggctgagaacaggaagcttgtcgccagtggaaatcccatcaccgtcttccagggcgagatccctccaaaatcaaatgggtacattgcggagtccacttgtatcttcaccaccatggagaaggctggggctgacttgcagggaggagccaaaagggtcatcatctctgccccctctgctgatgcccccatgttcgtgatggatgtgaaccacgagaagtatgacaacagcctcaagatcgtcagcaatgcctcctgcatcaccaactgcttagcgcccctggccaacgtcatccacaactttggtatcgtggaaggacccatgaccacagtccatgctatcactgccacccagaagattgtggatggcccctccgggaaactggcataa

SEQ ID NO: 15531 - DNA, 1312 bp, Homo sapiens
  SIMILAR (508)..(669): 811254mologous to Homo sapiens Human membrane channel protein -5 (MECHP-5),accession number Y70455,Smith-Waterman Score=207.
cggacgcgtgggctgttcgacagtcagccgcatcttctcttgcgtcgccagccgagccacatcgctcagaacacctatggggaaggtgaaggtcggagtcaacggatttggtcgtattgggcgcctggtcaccagggctgcttttaactctggtaaagtggatattgttgccatcaatgaccccttcattgacctcaactacatggtttacatgttccaatatgattccacccatggcaaattccatggcaccgtcaaggctgagaacgggaagcttgtgatcaatggaaatcccatcaccattcttccaggagcgtttatccctccaaaatcaagtggggcgatgctggcgctgagtacttcgtggagtccactggcgtcttcaccaccatggagaaggctggggctcatttggcaggggggagccaaaagggtcatcatctctgccccctctgctgacgcccccatgttcgtcatgggtgtgaaccatgagaagtatgacaacagcctcaagatcatcagcaatggcctcctgcaccaccaactgcttaacaacccttggccaaggtcatccatgacaactttggtatcgtggaaggactcatgaccacagtccatgccatcactgccacccagaagacttttggatggcccctccgggaaactttggcgtgatggccgcggggcttttccagaacatcaatccctgcctctactggcgctgccaaggctgtgggcaaggtcatcccctgagctgaacgggggaagctcactgggattggccttccgtgtccccactgccaacgtgtcaagtggtggacctgacctgccgtctagaaaaacctgccaaatatgatgacatcaagaaaggtggtgaagcaaggcgtcggagggccccctcaaggggccatcctgggctacactgagcacccaggtgggtctcctctgactgtaacagcggacccccagtctttccaccttttgacgctgggggctggcattgccctcaacgaccactttgtcaagctcatttcctggtatgacaacgaatttggctacagcaacagggtggtggacctcatggcccacatggcctccaaggagtaagacccctggaccaccgagccccagcaagagcacaagaggaagagagagaccctcactgctggggagtccctgccacactcagtcccccaccacactgaatctcccctcctcacagttgccatgtagaccccttgaagaggggaggggcctatgggagccgcaccttgtcatgtatccatctaataaagtatccctgtgctcaacc

SEQ ID NO: 15532 - DNA, 404 bp, Homo sapiens
  SIMILAR (80)..(274): 381254mologous to Corynebacterium striatum BacA,accession number AF024666,Smith-Waterman Score=79.
aaactgggatatacgggccaaggttgctcacgtgattggtttactggcttcgcacacaactgagctccaggaaaatacacctgttgttgaggcaattgttctcttaactgaattaattagggaaaacttcaggaacagcaaattaaaacagtgccttttaccaacccttggggagctgatctatcttgtagccccccaggaagaaaaaaaaaagaaccctagagagtgctgggctgttcccttggctgcatacacagtgctaatgaggtgccttcgggaaggggaactctgaatcctctacagcctattattataaaatgtttcaaagattagaaaagaaaagaaagctgtaataatcacctttgtttccatcacctagattaaccagtaaacatttaaaaaaa

SEQ ID NO: 15533 - DNA, 560 bp, Homo sapiens
  SIMILAR (767)..(1162): 251254mologous to Zea mays hydroxyproline-rich glycoprotein,accession number X63134,Smith-Waterman Score=95.
cttcctgggtggctacaagatagatcagctccccaagggttggtaaaaggcactgttttaatttgctgttcctgaagttttccctaattaattcagttaagagaacaattgcacaaggcactgtctaggcactggagtggagtgttgaacaagacagttcaaaatcccgattccaatggagcttgtagtctcaacaacaggtgtattttcctggagctcagttgtgtgcgaagccagtaaaccaatcacgtgagcaaccttggcccgtatatcccagtttggagctatccgcaaatgctggattagcaattggaacaggggggaatggaggagcctggtggccacctcctggtgaccagccaccacgcacaaatagcaaaggagattcagcttggctcgggaggcccccatgctcttctcagtggagtcgatctgcgagcacacttgttgcaaaaagtcattccaatcttgatctttcagaaataataacttatccactgaatatgttggtagatgcaatatttttgcatcaaatttaactggtggctgtttcattatct

SEQ ID NO: 15534 - DNA, 2511 bp, Homo sapiens
  SIMILAR (99)..(55): 461254mologous to Homo sapiens Fragment of human secreted protein encoded by gene 53,accession number Y36659,Smith-Waterman Score=41.
ccgatcgtgcaggaccaccaggagcacccaggcttgggcagcaactgctgtgtgccattattttgttgggcttggctgccaagaagaaggagataaacatcaccatcatcaaacagctgctcaagaaatttttaaataagaaaccaagttatgggctggagcggcaaatggaaaccacccagaaccttgtggactcctacatggccattgtcaacaagaccgtgtgggacctcatggttggtgtcatgcccaagaccatcatgcacgtcatgatcaacaacaccaaggagttcatcttctcggagctgctgtccaacctgtactcacgtggggaccagaaaacgctgatggaagagtcggcagagcaggcacagtggcgcgacgagatgctgcgcatgtaccacgtgctgaaggaggcactcggcatcatcggcgacatcaacacgaccaccatcagcacgcacatgggggcccgtggacaactcctggctgcaggtgcagagcgtccttgccagacgcaggtaccagggctggctcccacggccccaagtctccccacgccccataggctgagcctgggggctcttggaacaggctccgtgcccacgctgcttcatcatcctggttcaagcagtgtttcttctctatcaggcctggtggctgttgttttgggctccccaaggcgagaggtggccctggacaaagacttccctttccaagcctgcctgggcggctgttctgtgacttggcagtggctcccccagccccaaaggcagcccccttcatctgtgacttcgtctattgttgcgatcaggcttctgagcctgttggctgtcagggccagactgcgccccatagactacatggcagtccccttggaatcccccaggcgccaccaggcagcatacaggcctggctgcgcgctgctgtgttctggaaaggcgcattgtgccctcgctgtggcaggcatattcaagagttcctgctacatcgatgtacgctggtttccctttgatgtgcagcactgcaaactgaagtttgggtcctggtcttacggaggctggtccttggatctgcagatgcaggacggcagatatcaagtggctatatccccaatggagaatgggacctagtgggaatccccggcaagaggagtgaaaggttctatgagtgctgcaaagagccctaccctgatgtcaccttcacagtgaccatgcgccgcaggacactctactaatgggcctcaacctgctgatcccctgtgtgctcatctccgccctcggcctggctggtgttcctgcttcctgcagattccggggagaagatttccctggggataacagtcttactctctcttaccgtcttcatgctgctcgtggctgagatcatgcccgcaacatccgattcggtaccattgatagcccagtacttcgccagcaccatgatcatcgtgggcctctcggtggtggtgacagtgatcgtgctgcagtaccaccaccacgaccccgacgggggcaagatgcccaagtggaccagagtcatccttctgaactggtgcgcgtggttcctgcgaatgaagaggcccggggaggacaaggtgcgcccggcctgccagcacaagcagcggcgctgcagcctggccagtgtggagatgagcgccgtgggcccgccgcccgccagcaacgggaacctgctgtacatcggcttccgcggcctggacggcgtgcactgtgtcccgacccccgactctggggtagtgtgtggccgcatggcctgctcccccacgcacgatgagcacctcctgcacggcgggcaaccccccgagggggacccggacttggccaagatcctggaggaggtccgctacattgccaaccgcttccgctgccaggacgaaagcgaggcggtctgcagcgagtggaagttcgccgcctgtgtggtggaccgcctgtgcctcatggccttctcggtcttcaccatcatctgcaccatcggcatcctgatgtcggctcccaacttcgtggaggccgtgtccaaagactttgcgtaaccacactggttctgtacatgtggaaaactcacagatgggcaaggcctttggcttggcgagatttgggggtgctaatccaggacagcattacacgccacaactccagtgttcccttctggctgtcagtcgtgttgcttacggtttctttgttactttaggtagtagaatctcagcactttgtttcatattctcagatgggctgatagatactccttggcacatccgtaccatcggtcagcagggccactgagtagtcattttgccattagccctcagcctggaaagcccttcggagagctccccatggctcctcaccaccgagacagttggttttgcatgtctgcatgaaggtctacctgaaaattcaacatttgctttttgcttgtgtacaaacccagattgaagctaaaataaaccagactcactaaatcctttccaataattgactggtggaaggaaaa

SEQ ID NO: 15535 - DNA, 1242 bp, Homo sapiens
ccgtattccggttacgacacacgcgctcgccacgcgtcgactggctccttttccgcgcccctcccgttggaggtgaggggaagatgtccatgtcagggttcaaggccaaaccgaagttactggcctctatcttccaggagaaccaggagccacagccgcggctcacgccccaccgcaacattaagattacaagtggacacctgagtcagcaggacctggaatcccagatgagagagcttatctacacgactcagatcttgttgtcacccccattattgacaatccaaaggtgcagaaagcactctgacaaataatgaaacaaccaccatcggttaaatttgatgcaaaaatattgcatctaccagcattttcagttccaattgctaatccagcatttgtggatagctgcaaactgtgatatatgggccaaggttgctcgggtgattggtttactggcttcgcacaaaactgatctccaggaaaatacacctgttgttgaggccttccctaacagtcccagaactcctacattgcctggtgtgctgacctaaagccctcattaagaccagtaacaaatcaagcctatcttatcaactgacaacacattctggaaccatggcgtgtccatggataagacatgaagtccttctttcaagacttggttttctggtactggaaaataccaatatggataaaagaccttcaaagctgctacgatggctggagcggcaaatggaaaccacccagaaccttgtggactcctacatggccattgtcaacaagaccgtgtgggacctcatggttggtgtcatgcccaagaccatcatgcacgtcatgatcaacaacaccaaggagttcatcttctcggagctgctgtccaacctgtactcacgtggggaccagaaaacgctgatggaagagtcggcagagcaggcacagtggcgcgacgagatgctgcgcatgtaccacgtgctgaaggaggcactcggcatcatcggcaacatcaacacgaccaccatcagcacgcacatgggggcccgtggacaactcctgcctgcaggtgcagagcgtccttgccggatgcagcttcatcatcctggttcaagcagtgtttcttctctatcaggcctggtggctgttgttttgggctccccaaggcgagaggtggccctggacaagtgggttggaagacacggtgaccagagaagagggaagcccaaaggggctgagcatcagtcttaa

SEQ ID NO: 15536 - DNA, 540 bp, Homo sapiens
  SIMILAR (379)..(152): 1001254mologous to Homo sapiens Human secreted protein encoded by gene 17,accession number Y76140,Smith-Waterman Score= 389.
atagaaaattgtgtctttgcatttccagccctcaaaatccatgggcacacctgaatgacattaactcacagtaaattgtcactggtgggcctgtgaattgtgtgtaagctcaaaagcatcacttgacctgactttctttcctaccacgtcactgaattctgacatagaatctcactaaaatccccaccagcaagattaagaagacccccaggagcagaagccctcgccgcagcaccagctgtttcctggacaatttagcgccgtcctgtggatgttccggcaaaggttcttcttggcgcatctgctgatctgactgaggctcgcctgtctttccaacatcgttcgttaaaattccttcaaggttttcagggcaccctgggaggaaaaaggaacttagcagcttaaaagggattttttttttttcatttttataaagggctatgtataaaaggaatatgtgctaatagtggagagaaagttaattcaggacactattgctacagtgaataaataaaagaaatcttatcgcaaaaaaaaaaa

SEQ ID NO: 15537 - DNA, 1940 bp, Homo sapiens
  SIMILAR (361)..(525): 671254mologous to Homo sapiens Human secreted protein, SEQ ID NO: 7678,accession number G03597,Smith-Waterman Score=173.
ggcgcctgtggtggagtcctgagaggtacaggaaaacaaaacattggcgctatcttgaatgccattgggtactatgtctttggttttcccattggagtatctctgatgtttgccactaaactcaggataatagaacaccaccactcgtgcactgcaggcagagagcattccatcactgtgaacacatccggcgctcttgaaacactcccatctcccgagcacttcatattctgtgctaaaatccatgggtgccctgaaaaccttgaaggaattttaacgaacgatgttggaaagacaggcgagcctcagtcagatcagcagatgcgccaagaagaacctttgccggaacatccacaggacggcgctaaattgtccaggaaacagctggtgctgcggcgagggcttctgctcctgggggtcttcttaatcttgctgtcctttggaggcaagaacctcaagcgcgtggggatcatacttcagagaggggtcctcatccttatgctgtgctgctttccctgctgggccgacttggtcaacaccgagcgcatcctcctgctcttaaaacaagacccgaagtctccaggtgaggggcgaaatcaggcacccaccgtgacggcgagcgtgacagcgtccggctcgaccttgcccagatgtccacagaagatggagctgacgaggctgattagaaagatcatcaactgcgcaagaaactgcggaggcgcggaaagcaaggcgcgttcacagccgccctccctcctggaagcccgcgcccacccctgcgcggcggccgctccggaggcgtcgggctgggcgtccgggggcagcgcaccccgcaggccccacaagccgtcacgccatccgagggcccggagccgctatgggggccggtccttggcggcggcggggagcatcggcggggaaccggggcgtcggcggccgcaggggcctccatgcggaggctgggagcggctggcggcggcgcgggcgcgggaccgcagcgcggtgtgggggccagagtcgtggtcagtgaagaagctaactcacctggggctgccatcaccagtaaccgtgagacccaggacgcaaatgagggtctttcagcccctcgtcctgaatgcctcctgcaccctacctgcaggctactctatgtgcccttaattgtcagggactgggtctgccacaccaggtctgtggttctcttgcaggtggtgaacgttactgggattgcagttggcactggcttagcctcagcttatgacaccctcatgtctcagtcctttggagtcaagaacctcaagcgcgtggggatcatacttcagagaggggtcctcatccttatgctgtgctgctttccctgctgggccgacttggtcaacaccgagcgcatcctcctgctcttaaaacaagacccgaagtctccaggttggacgagggagtgcttccaggagtggggctcctacatccacctggttattcccagtatgttcatggtgtgcactgagcagtggacctttgagatcggaaacttccttgcaggactgattgatgtgatggagctcggcactcagggcatcatctgtgagctggcgtcagtagcctacatgaactatttccgattaaatccgcaaccccccatctctgactttaccatcaacctagcattccttacactcactgaacggaaaatcttaggctatatacaactacgcaaaggacctgacattgtaggtccctatggactgcttcaaccattcactgatgcagtaaaacttcaccaaagaacccttatggccctcaacatctactattaccctttatattattgctccaaccctggccctttctatcattgtcctcttagcattgcccactcggatgctggctgcaactccaaggcccaggggtacctgagaattaagaagcataaatcacagtcgtaa

SEQ ID NO: 15538 - DNA, 1176 bp, Homo sapiens
  SIMILAR (3)..(470): 881254mologous to Mus musculus piL,accession number AF229032,Smith-Waterman Score=732.
atgaacgagtgcagaggagtggaaattaccacagtttgttctgaagactggatacagcggcaccttcctggagcagtggtaccccttaaaggtgaagggaacgtgggtgttgcaacagaggaccattatcaagaagactcttttgggtttggtctgagaggcactgggaaacctcttaaacttgaaaaatcacgaccaggtgcagtgactcatacatctcccagtgatggcctgacccagtatgtgcctgacagcctgacagccatgccagctgcagcagttgtcatttgggtcatcagacctggctgtggggtacagcagcagattgggtttttgaggcacagcaacattgatgacattaggccacggacaattattagggctgtggctcctgtaaaacttcatggcattagaataaaaatggctagttttactagtgctacaagacttacggatgaacaggtaattactgctcctgctgatagtgggatagttatacctagattttctgataattgggtggctggtgggaagactcacctaacacataaggactcacataaacttaaagttaaggggtggaaaaaggcatttcatgcaaatggacaccaaaagcaagcaggagtagctattcttacatcggacaaaacaaactttaaagcaacagcagttaaaaaagataaagagggacattatataatggtaaaaggccttgaccaacaggaaaatatcacaatcctaaacatatatgcacctaacactggagctcccaaatttatgaaacaattactaatagatgtaagaaatgagatagacagcaacacaataatagcaggggacttcaatactccactgacagcactagacaggtcatcaattcagaaagtcaacaaagaaacaatggatttaaactataccttggaacaaatggacttaaaggatatatacagaacactccatccaacaactgcagaatacacaatctattcaacagtgcatggaacattctccaagatagactatatgacaggtcacaaaacgagcctcaataaatttaagaaaagtgaaattatatcaagcagtctgtcagaccacagtggaataaaactggaaatcgactccaaaaggaaccatcaaaaccatgcaaatacatggaaattaataacctgctcctga

SEQ ID NO: 15539 - DNA, 1448 bp, Homo sapiens
  SIMILAR (579)..(1349): 731254mologous to Homo sapiens p40,accession number U93566,Smith-Waterman Score=901.
gggctcaggcccagggagatctgaattttgtccctgagcctctggctggagttattgaagatcctgagggaaagctccacccactgacgaaggatgtgtcagggattcctggggccctgatgacagctgtgtctactaggccctatcatcagtattccaatgctcaaattgaatactgtgaagaccaagttgtatacctccccaaagccctcaaacccttgactgatgacagatctgaaaaagaagagcctgagagaagtcaaatgtttgaggattttgaggaagccacatccataggaaaagggggagagtactacatcaaggaaacaccatgtgggacaaaagaatctgaacaacagccttcagcccaagaccttccctctgacagagcctacccaaatgagaaggaaccagaaaaccagctctgcctaaatgctccacttaaaaaatacagaattgcagaatggataagaattcaccaaccaactatctgctgccttcgagaaacttacctaacacataaggactcatataaacttaaggatcacaactccttgccagcaaggaaatgcaacttgatggagaatgagtttgacgaactgacagaagtaggcttcagaaggtgggtaataataaactcctccaagctaaaagagcatgttgtaacccaatgcaaggaagctaagaactgtgaaaaaaggcaaatcgatcaagtggaagaaaggatatcagtgattgaagatcaatttaatgaaataaagagagaagacaagattagagaaaaaagaataaaaaggaacgaacacagccgccaagaaatatgggactatgtgaaaagaccaaatctacatttgattggtgtacctgaaagtgacggggagaatggaaccaagttggaaaacactcttcagcgtattatccaggaaaacttccccaacctagcaagacaggccaacattccaattcaggaaatacagagaataccacaaagatactcctcgagaagagcaaccccaagagaaataatcatcagattcaccaaggttgaaatgaaggaaaaaatgttaagggcagccaaagagaaaggtcgggatatgcacaaagggaatcccatcagactaacagcagatctctctgcagaaaccctacaagccagaagacagtgggggttaatattcaacattcttaaagaaaagaattttcaacccagaatttcatatccagccaaactaagcttcataagcaaaggagaaacaaaatcctttacagacaagcaaatgctgagagactttgtcaccaccaggcctgccttacaagagctcctgagggaaaacactaaacatgaaaagaaacaactggtaccaaccatggcaaaaacataccaaattataaagaacatcgaaactatgaagaaactgcatcaactaatgggcaaaacaaccagctag

SEQ ID NO: 15540 - DNA, 324 bp, Homo sapiens
  SIMILAR (49)..(204): 441254mologous to Homo sapiens putative p150,accession number U93565,Smith-Waterman Score=139.
atggatccaaaacaagaagaaatccctgattcacctgaaaaagaattcagaagatacagaattgcagaatggataagaattcaccaaccaattatctgctgccttcaagagactcacctaacacataaggactcacataaacttaaagtgaggggtggaataaggcatttcatgcaaatggacaccaaaaatcagcagcaagggagaccaaatgaactggtgcctgacagtaatggtggaagtgaaagcatgttatgcttgcatatcgcgatatgctacttgcatattgatggatttgctgcagcactgacaagttcacagtga

SEQ ID NO: 15541 - DNA, 1527 bp, Homo sapiens
  SIMILAR (3456)..(2680): 911254mologous to Homo sapiens putative p150,accession number U93570,Smith-Waterman Score=1208.
atgaagttggaggacttacatacttgttatcaaaatttgccatgtagctccagtaatcaagacatcttagtattgccacaagctcagcaggagagcatctgggcatttggacatggaaggtgtggggcacaagcatctcatggccagggaacgggggaggagcatctcagagctgcatcagagttcatgctggtcctaagacaagagtcaagcacaccctgctttcaccagctgctggtagctttcactcaggattttgtgccactgtatcaagactttgaaaatttttatacaagaaacctttacatgcgaatcagagacaactggaaccggcccatctgcagtgccccagggcctctgtttgatgtgatggagagggtatcggacgactataactggacgtttaggtttactggaagagtcatcaaagatgtcatcaacatgggctcctataacttccttggtcttgcagccaagtatgatgagtctatgaggacaataaaggatgttttaaaggtgtatggcacaagcgtggccagcaccaggcatgaaatgggtgaattcacctcatcctggcagaatgccctctgtgtgggaggggtcttgcaagctgactcagtgccacaggggccaccctggtcatggaaaatgggcaggcactcttccctgttggagcaaaatgggaagccacatttttatgataagctcattgttgaatcgtttgaggaagcaccccttcatgttatggttttcacttacatgggatatggaattggaaccctgtttggctatctcagagactttttaagaaactggggaatagaaaaatgcaacgcagctgtggaaagaaaagaacaaaaagagactcacttaacacataaggactcacataaacttaaagtaaacgggtggaaagaggcatttcatgcaaatagacaccaaaagatagcaggggtagctattcttatattagacaaaacaaactttaaagcaacagcagttaaaaaagacaaagaggaacattatataatgaaaaaaggccttgtccaacaggaaaatatcacaatcctaaacatatatgcacctaacactggagatcctaaatttataaaacgattactaacagacctaagaaatgagacagacagcaacacgataatagtgagggacttcagtactccactgacagcactagacagaataaccagtttagagaagaacataaatgacctgatggagctgaaaaacacagcacaaaaacttcgtgaagcatacacaagtatcaatacccaaattgatcaagcggaagaaaggatatcagagattgaagatcaacttaatgaaataaagcgtgaaaacaagattagggaaagaagaataaaaaggaacgaacaaagcctccaagaaatatgggactatgtgaaaagaccaaacctacatttgattgatgtacctgaaagtgacagggagaatggaaccaagttggaaaacactcttcaggatattatccaggagaaaaatgtttaa

SEQ ID NO: 15542 - DNA, 806 bp, Homo sapiens
  SIMILAR (106)..(330): 801254mologous to Homo sapiens septin 2-like cell division control protein,accession number AF146760,Smith-Waterman Score=314.
atggcgctaagtgaaagaagccagccacaagatcacgtgtcgcatgaccgcatttatgtgaaacatccggagtacgcaaatctatacagacagaaagtagattatacattgcctagagtgagtatctctatccacgtggggcaggcaggtgtccagataggcaatgcccgctgggaactgtactgccttgaacttgcaattcagcctgacggtcaaatgccaagtgacaaaaccatcggtggtggggatgactccttcaacatgttcttcagtgagattggggctggcaagcacgtgcccagagcagtgtttgtggacctggagcccactgtggttgataggtgcctcgggcactggatggcagctttcctgggagagtgaagtgcacacagggacctacaggcagctcttccacccagagcagctgatcagtgggaaggaagatgcagccaataattactccagaggccattataccatcggcaaggagaccttgtcctggaccggatccacaaactgctcacttcgcagtgccgcaagccaaaggcaacaatgtggttatcacaagctacatgacaaacagaggcttcttcgaggataaaaaggcaacatttgcgccaagcttcttaatgaacatcaaaggcaataaaacatccgttgtcaaaaacagcatcctggagcaaggacagctgacagtcaactaaagcaaatgctgagagattttgtcaccaccaggcctgccttacaagagctcctgaaagaagcactaaacatggaaaggaacaaccagtaccagccgctgcaaa

SEQ ID NO: 15543 - DNA, 465 bp, Homo sapiens
  SIMILAR (241)..(465): 1001254mologous to Homo sapiens alanine:glyoxylate aminotransferase 2 homolog 1, splice form 1,accession number AJ298293,Smith-Waterman Score=380.
  misc_feature (1)...(465): n = a,t,c or g
gtgcgaccggtccggattcccggtcgannnnnctgccccggcaagagaacgccaggagggataacgggaggaaggccggccggggccgccaaggcagtcccaggctcgcgtaggaggcgcgcagaccttgcaccttgcaccttcgcagcgccctgcaccccgccaccatgtgcgagctgtacagtaagcgggacactctggggctgaggaagaagcacatcggtgggacactgtcacccaggagtggtcaaagctgccctgaaacagatggaactgctaaatacaaattctcgattcctccacgacaacattgttgagtatgccaaacgcctttcagcaactctgccggagaaactctctgtttgttattttacaaattcaggatccgaagccaacgacttagccttacgcctggctcggcagttcagaggccaccaggatgtgatcactcttgaccatgcttac

SEQ ID NO: 15544 - DNA, 954 bp, Homo sapiens
  SIMILAR (161)..(334): 1001254mologous to Homo sapiens alanine:glyoxylate aminotransferase 2 homolog 1, splice form 1,accession number AJ298293,Smith-Waterman Score=314.
ttcccgggtcgacgatttcgtccgacgccccgggcaagagaacgccaggagggataacgggaggaaggccggccggggccgccaaggcagtcccaggctcgcgtaggaggcgcgcagaccttgcaccttgcaccttcgcagcgccctgcaccccgccaccatgtgcgagctgtacagtaagcgggacactctggggctgaggaagaagcacatcgggccctcatgcaaagttttctttgcatcggatcccatcaaaatagtgagagcccagaggcagtacatgtttgatgagaacggtgaacagtacttggactgcatcaacaatgttgcccatgtgggacactgtcacccaggaagtggtcaaagctgccctgaaacagatggaactgctaaatacaaattctcgattcctccacgacaacattgttgagtatgccaaacgcctttcagcaactctgcccggagaaactctctgtttgttattttacaaattcaggggctattggccgtcatccaccaacccctctagccggccggcagcccccgctagtccgccggctgcagagcgagccggggactttcgagcgggcaggaagcccagcgttccgggttccaggagcgtttctgggagtccgcgcggcccctgcagccggctttctctctccaccttctgcactcgttattgccccctctctgcacttacttccgggccagggtgcccttacccgatgtgcttcttcctcagccccagagtgtcccgcttactgtacagctcgcacatggtggcggggtgcagggcgctgcgaaggtgcaagaacagtcactgagcaaaagacttaccctaaaattctcagtggcaaaggaaagataattctcagtggcaaaggaaaaatgtggaatgaacctcagatggaaattgccatgacatcttggagtttagaaagtaatatatag

SEQ ID NO: 15545 - DNA, 1218 bp, Homo sapiens
  SIMILAR (772)..(1377): 1001254mologous to Cloning vector pSacBII SacB,accession number U09128,Smith-Waterman Score=1092.
gtgggggattgtgggaaaagatggcggctgccgcagcaatcccgggttgtccggtacctgtcaatgtcacgttctgccattactgctaatagccacatctgtgtgtcacggcccaccctgtcgccagcttcatcatgccctcatgcctcatgggaaaggtggacgttcctcagtcagtgggattgtggccactgtgtttggagcaacaggattcctgggggcgatatgttgtcaaccaccttgggacggcatgggggtcacagggtaatcatacccctatcgggtgtgaataaaatattgacaatcaatgcacctttcgttcccatggggttgaccggggggccagctttctgtttttctggggaattgggggacggcgagagattaaagatttttattccgacgagttagttacaacacaggcaatgtgggttcatcaatcttatttgggacgagacttggggaaaccaaaaacttttgatttttggagggatgtttttgtgaagattccccaagcaattgcttcaactgtccaagggaagctgggagtttgaaaaattcatttcatgttttcacatctggaatggcggaattatttaaaaggctctttcttaggatatttgaggaaataaggctgttggagagaaagtagtgagagatgcatttccgggaagccattatcgtaaagccgtcggacatctttggaagagaagatagattccctaaattccttttgccagtatgcatcggtttgggtcctataccccttgggttccttgggctggaagacagttaaacaaccagtatatgtcgtagatgtatccaaaggaattgttaatgcagttaaggatcctgatgccaatgggaaatcctttgctttcgttggtcccagtcggtacctcccttttccacctggtgaagtacatctttgctgtggctcacagattgttcctcccattccccttgccgctttttgcctatcgatgggtagcaagagtctttgaaataagcccatttgagccctggataacaagggataaagtggagcggatgcacatcacagacatgaaattgcctcacctgcctggcttagaagaccttggtattcaggcaacaccactggaactcaaggccattgaggtgctgcggcgtcatcgcacttaccgctggctgtctgctgaaattgaggatgtgaagccggccaagaccgtcaacatt

SEQ ID NO: 15546 - DNA, 800 bp, Homo sapiens
  SIMILAR (475)..(954): 861254mologous to Homo sapiens DNA-binding protein TAXREB107,accession number AF261087,Smith-Waterman Score=658.
gggattgtgggaaaagatggcggctgccgcacaatcccgggttgtccgggtccgtgtcaaatgtcacgttctgccattactgcaatagccacatctgtgtgtcacggcccaccctgtcgccagcttcatcatgccctcatgcctcatggggaaaggtggacgttcctcaagtcagtgggattgtggccactgggtttggagcacacaggattcctgaggcgatatgttgtcaaccacccttggacgcatggggtcacaggtaatcataccctatcggtgtgataaatatgacatcatgcaccttccgtcccatgggtgacctgggccagcttctgtttctggaatgggacgcgagagataaagattctatccgacgagtagtacaacacagcaatgtggtcatcaatcttaattgggacgagaccgtgaaatccaaaaactctgattatgaggatgtttttgtgaagattccccaagcaattgctcaactgtccaaaggaagctggaagttgaaaaattcattcatgttttcacatctgaatgcgaatattaaaagctcttctagatatttgagaaataagaatagaaaaagagagaaagaggaaatgaagaaggacttgttaagcaaaaaggaaccggaacctgaagatttggaaaattctcagcttatccatattgcaaaaaatgagaaagcttgttttgaagagaacactaagagtgtggctgaacaaccatttgatgaagagattgtggatgcgactcaccaactaacaagctatcttggcagaagccaggaatag

SEQ ID NO: 15547 - DNA, 1396 bp, Homo sapiens
  SIMILAR (1168)..(1365): 951254mologous to Mus musculus M-TAXREB107,accession number X81987,Smith-Waterman Score=329.
tttttttttttttgagacggaatctcactctgttacgcaggttggaccatcttatagattatcaattgtacagataattgcactccggcctgggagacagagtgagtacctgtctcaaaaaataaaataaaataaaataaaattaaaaaaaacacttaaattagtgaataaccttggtgaaaagcaacgtccatgcttctacggcatttctcttcaaaggtcacaacccgcggaaggcgccgtgcgccggttgctatacaggccgcacttcacaccccgtgcctccccgcctttcctggctcctccgcccagatccccggcgctcccgcgttcggtgacggccgggtaggctgtaggcagcgcaatgccaagacagagctgctggcggcggcgggcgaatctccctgcaccatgagccgtcggctccggccccgttaggggccgataagcacagcgcacgccgccctccatttgccccggggcctcggctgcgaagatagcggcggccggacaggaagctcgaggaaagcgctgggccgggtcttctacgaacacgtgaaggaaaagcagctccgtccacaacgccgcttcggggctcctagggagtcgggccccgggcgctcaccgtcacctcggccgctgccgctgtcgccatcgccttgtttccccatcccccgccatggccgaggacctctctgcggccacgtcctacaccgaagatgatttctactgccccgtctgtcaggaggtgctcaaaacgcccgtgcggaccacggcctgtcagcacgttttctgtagaaaatgtttcctgactgcaatgagggaaagcggagcacattgtcccctatgtcgtggaaatgtgactagaagagagagagcatgtcctgaacgggccttagaccttgaaaatataatgagggaagttttctggtagctgcagatgctgtgcaaaaacagattaaattctatcgcatgagacatcattacaaaatcttgtaagaagtatcaggatgaatatggtgtttcttctatcattccaaactttcagatctctcaagattcagtagggaacaggattgagaacaacactggcataaaacagatccccggcgctcccgcgttcggtgacggccgggtaggctgtaggcagcgcaatgccaagacagagctgctggcggcggcgggcgaatctccctgcaccatgagcctcggctccggccccaaccttggtccgtcccctcggtccaagagctcttctgtaacttcccctcaaccctgcttcacagaacaccctcgagagcgttttgtttcgtttccagtccactatgtgttagagggatctagaatgagttttcttctctggtctcttaaaactgacaggattttcgggcattga

SEQ ID NO: 15548 - DNA, 1029 bp, Homo sapiens
  SIMILAR (199)..(246): 501254mologous to Halobacterium sp. NRC-1 Vng1384h,accession number AE005057,Smith-Waterman Score=49.
atgaaggttgtgtgcaaagaagtgaaatttgagaaacagtgtcctgaagcagttctccttcactgggaacagacagatgatgatgagaacaaaagatgtgacctcagggaacctaggaagccagaaacccacaccaaggggcctggcctgttagttcctaccacccaaccaggaaggaatgagggtcagtcgggagcagacgggaagcatgcacgttgcagcaaaacttcctgctgtctttctggcaaggagcctagcttcatcatcactgagcactgccctttggtgcctgtgcagaacacgacaataaagcctgacagtgggattaggattctgcagaccctcgacagcagggaaactttcacaatgtccacagcccttgatgtcctgcaaatgaaagaggaggatgtccttaagttccttgcagcaggaacccacttaggtggcaccgaccttgacttccgaatggaacagcacatctgtaagaggaaaagtggtggcatctacatcataaatctaaagaggagctgggagaagcttctgctggtggctcctgccatcgttgccattgaaaaccctgctgatgtcagtgtcatatcctccagtagcactggccagagggccatgctgaagtgtgctgctgccactggagccactcctattgctggccacttcactcctggaaccttcactaaccagatccaggcaacattcccgaatccacgggttcttgtggttactgattgcaggaccggccaccagcctctcgcagaggcatcttatgttataacctacctaccattgctctgtgtcacacagattctcctctgcaccatgtggacattgccatcccatgcaacaggaagctcactcagtggacttgatgtggatgctggcccgggaaattctgcccatgcagcggcacaattgcccgcaaacactggtgggagcgatcctgaagagattgaaaaagaagagcaggctgctgctgacaaggctttgaccaaggaggaatttcagggtgaatga

SEQ ID NO: 15549 - DNA, 512 bp, Homo sapiens
  SIMILAR (311)..(153): 811254mologous to Homo sapiens Human secreted protein, SEQ ID NO: 4473,accession number G00392,Smith-Waterman Score=231.
aaccctgaacgcctggtagaccgccgagatagccatcccatgcaacaacaagggagctcactcagtgggttagatgtggcggatgctggctcgggaagatctgcgcatgcgtggcaccatttccggtgaacacccatgggaggtcatgcctgatctgtacttctacagagatactgaagagattgaaaaagaagagcaggctgctgctgacaaagcagtgaccaaagaggaatttcagggtgaatggactgctcccgctcctgagttcactgctactcagcctgaggctgcagactggtctgaaggtgtacaggtgccctctgtgcctattcagcaattccctactgaagactggagcgctcagcctgccacggaagactggtctgcagctcccactgctcaggccactgaatgggtaggagcaaccactgactggtcttaagctgttcttgcatacgctcttaagcagcatggaaaaatggttgatggaaaataaacatcagtttctaaaa

SEQ ID NO: 15550 - DNA, 569 bp, Homo sapiens
  SIMILAR (88)..(528): 1001254mologous to Homo sapiens laminin-binding protein,accession number J03799,Smith-Waterman Score=737.
ccgggtcgacccacgcgtccgacctgcagaggggtccatacggcgttgttctggatttccgtcgtaacttaaagggaaactttcacaatgtccggagcccttgatgtcctgcaaatgaaggaggaggatgtccttaagttccttgcagcaggaacccacttaggtggcaccaatcttgacttccagatggaacagtacatctataaaaggaaaagtgatggcatctatatcataaatctcaagaggacctgggagaagcttctgctggcagctcgtgcaattgttgccattgaaaaccctgctgatgtcagtgttatatcctccaggaatactggccagagggctgtgctgaagtttgctgctgccactggagccactccaattgctggccgcttcactcctggaaccttcactaaccagatccaggcagccttccgggagccacggcttcttgtggttactgaccccagggctgaccaccagcctctcacggaggcatcttatgttaacctacctaccattgcgctgtgaacacagattctcctctgcgctatgtggacattgccatc

SEQ ID NO: 15551 - DNA, 1305 bp, Homo sapiens
  SIMILAR (1033)..(1683): 971254mologous to Escherichia coli UDP-N-acetylglucosamine enolpyruvyl transferase,accession number M92358,Smith-Waterman Score=1074.
atggattcctttgggcaacccagaccagaagataatcagtcagtagtcagaagaatgcaaaagaaatactggaaaactaaacaggtctttatcaaagcaacaggaaaaaaagaggatgagcacttggtggcgtctgatgctgaactggatgctaaacttgagactcccatagtgaccctctctggccacatggaggcagtttcctcagttctgtggtcagatgctgaagaaatctgcagtgcatcttgggaccatacaattagagtgtgggatgttgagtctggcagtcttaagtcaactttgacaggaaataaagtgtttaattgtatttcctattctccactttgtaaacgtttagcatctggaagcacagataggcatatcagactgtgggatccccgaactaaagatggttctttggtgtcgctgtccctaacgtcacatactggttgggtgacatcagtaaaatggtctcctacccatgaacagcagctgatttcaggatctttagataacattgttaagctgtgggatacaagaagttgtaaggctcctctctatgatctggctgctcatgaagacaaagttctgagtgtagactggacagacacaggggtcagcctgggcaacagagtgagactctgtcgtcgaaaagacgaaaccgaacgagacaaaagaggccccacagatttgcaacaatctgatgttagcacagccgaaaagccgtctgagttccacaaacatgtggagtttgatttccttattaagggccagtttctgcgaatgcccttggacaaacacatggaaatggagaacatctcatcacagcttcttgtaagtggagatcttgatgtccatggccagtttaacattcaccagctcctgttactcaagcagctgacaggccatgtcttgcttggctctctggaggatggcttccagcttggcactggcatccttaatggccagctccccctgctactcagcatctgggatggcagcctccaaggaagccctctggcctttgaggccctcattctcagcctgaagcaagctgatgttctggaccagggatgtgaccaagaactgggactacagctcacagatctcctcttcatacagctgaatgaggaagttgatcttgtcagtcagctcttccaggttgttgatgtagctctcaaacatgctgtccatgttgctccaagctactttttgctgctgcaaaaggatccacttggtctccagtatcttgttctgctgctccaggaagggtaccttctcagtgaagggggcaaacttgtttag

SEQ ID NO: 15552 - DNA, 960 bp, Homo sapiens
  SIMILAR (506)..(928): 871254mologous to Homo sapiens putative p150,accession number U93563,Smith-Waterman Score=606.
cccgggtcgacgatttcgtcgtctgtagaagggcaacctcgtgctttctgcagaggataccggagggcagaaggcagagtccaggcttagactgcagttcctcgcttacctgtgcagactaattttgagctgcctctttgtagtcttaaaaggcaggagcttcgtgttgtgggtctgctaacccgtacgtttccgtgggcaagtcgtgtgtactcctcgccatggctcagctccaaacacgcttctacactgataacaagaaatatgccgtagatgatgttcccttatcaatccctgctgcctctgaaattgccgaccttagtaacatcatcaataaactactaaaggacaaaaatgagttccacaaacatgtggagtttgatttccttattaagggccagtttctgcgaatgcccttggacagacacatggaaatggagaacatctcatcagaagaagttgtggaaatagaatacgtggagaagtatactgcaccccaagccagaagcaatgcatggttccatgatgactggatcagttcaattaaaaggggcagaggaatggatcttgactggttcttatgataagacttctcggatctggtccttggaaggaaagtcaataatgacaattgtgggacatacggatgttgtaaaagatgtggcctgggtgaaaaaagatagtttgtcctgcttattattgagtgcttctatggatcagactattctcttatgggagtggaatgtagagagaaacaaagtgaaagccctacactgctgtaaaggtcatgctggaagtgtaaattctatagctgttgatggctcaggaactaaatattttggtcttcgaattgagcctaaacctgcagtcagtttagtagaagagattaacagtttgtcatatagatggactgctgataattataaagttgggagtggagggaaggaggaggaggactga

SEQ ID NO: 15553 - DNA, 410 bp, Homo sapiens
  SIMILAR (188)..(391): 1001254mologous to Homo sapiens bA145L22.2 (novel KRAB box containing C2H2 type zinc finger protein),accession number AL050328,Smith-Waterman Score=379.
atgtcttctgttgcccccattgttctttgacttttagcaagtctttcagctcattttccaggctggtcagacaccagcagacccactggaagcagaagagctacctttgccctatctgtgacctctcctttggggagaaagagggccttatggatcactggaggggctataaaggcaaggacctggccagagcagccaccataaatgccgggtgatcctgggccagtggcttggcttctctcatgatgtccccactatggctggggaggaatggaagcatggaggtgatcaatctccccccaggatccatacccccaggagaagaggcctaagagagaaggcctgcaaaggagacaaaacaaaggaggcagtgagcatcttgaaacataaataaatggcctttctgactg

SEQ ID NO: 15554 - DNA, 537 bp, Homo sapiens
  SIMILAR (851)..(1393): 631254mologous to Homo sapiens putative p150,accession number U93569,Smith-Waterman Score=573.
ctacaaaacaatgatgatgatgatgatggtgatggtgatgatgatgatggtgatgatgatagtgatgatgatgatggtgatgatgatagtgatgatgatgctgataatgatggtgatggtgatggcgatgatggtgatggtgatgatgatgtaacgatgatggtgatgataatgatggcaatggtgatggtgatgatggtgatggtgatgataatagtgatggtgatgatgatggtgatggtgctgaatccaattcacatcttgtttttcctctccaagagcagcctttgcacacatacacacacgtgaacactcaatatgatttagccgatgagtgtatttcaagcaggtcacgttagacagctcttgccgactttgagaaaggcaggtgaagtccacatcctcatggaacatcttgtcttcaacttggaggttgccgttctgtcccacctctgtggtgctccgattcttaacctggatctgcctgaggacaatatccacgtcttctatatcctggttccccgcagattccagcat

SEQ ID NO: 15555 - DNA, 828 bp, Homo sapiens
  SIMILAR (465)..(238): 1001254mologous to Homo sapiens Human secreted protein sequence encoded by gene 8 SEQ ID NO:61,accession number B25672,Smith-Waterman Score=416.
tttcgtcgggagaccctgtgcccctaaatcgcggtccactgcgcgcgtcaggtttctagaagcagggtagaacagacggcagacacctagcccaggctggtgttgttactaaacaatggcagctggtgagccaagggtgaccagggccctgaactcggtggcccagctttgagggaagcaaaattgttctcaattgtggaagaggagaatttggacagcagaacgaaaaagggaagaacagcctcttggagcagatacatttgtcacaggaagccacatcaaaccctggggcctttgctgggcctctccatctgcccagttactgggaggtagatagccccaggaaggaatccagtcaggcctgggcaccaggccaggagtggataaagctagaaagagacaccacagaagagaagatgtttgaacagctgaagccaatcgaacctgtacagaagacgctcccatgggtgggcgaggtagctgccaccctgcaggaagccatgaagagagattgctggagggaggcacgggtgaagaagaagccagtcacctttgaggatgtggcagtgaatttcacccaggaagagtgggactgtctagatgccagccagagggtcctttaccaggatgttatgtcggaaacctttaagaatctaacatctgtggcctgggtccgaaaaaaagaagaagaagaagaagaagaagaagaagaagaagaagaagaagaagaagaagaagaggaagaggaagaagaagaggaagaggaagaggaagaggaagaggaagagggagaggaagaagaagaagaagaagaagaaggagagaaca

SEQ ID NO: 15556 - DNA, 2036 bp, Homo sapiens
  SIMILAR (886)..(1887): 851254mologous to Homo sapiens putative p150,accession number U93572,Smith-Waterman Score=1459.
atgctggaatctgcggggaaccaggatatagaagacgtggatattgtcctcaggcagatccaggttaagaatcggagcaccacagaggtgggacagaacggcaacctccaagttgaagtgtcatacactcaggctcacattgcccctaggccacttgccagccaagggacatggccacattttgtgtcttctgcacctcagccttgctttcaagtgcagaatcactctaagtaccaaaatctgtattattctggattcatcagagaaacagaaccaataagtaagggagatgtgggtgagtggctgtcagcaggaaaaggtgagagttcagctatgtttgcatctgagcaggaaatttccaaggatgagcagggaactccagtgctgggctcattttactgggaggtagatagccccaggaaggaatccagtcaggcctgggcaccaggccaggagtggataaagctagaaagagacaccacagaagagaagatgtttgaacagctgaagccaatcgaacctgtacagaagacgctcccatgggtgggcgaggtagctgccaccctgcaggaagccatgaagagagattgctggagggaggcacgggtgaagaagaagccagtcacctttgaggatgtggcagtgaatttcacccaggaagagtgggactgtctagatgccagccagagggtcctttaccaggatgttatgtcggaaacctttaagaatctaacatctgtggaaggcaagaagaaagagcttcgagaacaacatcccagtctgagagatgaggggactagtgatgacaaggtcttccttgcatgcagaggggccggccagtgccccctatctgccccagctgggactatggacaggacccgggtgcttcaagcatcccaggctgggccacccttttttttgctaccactgtgggcaaatgtttcagcaggcgctcctacctctatagccaccagtttgttcacaatcccaagctgactaacagctgcagtcagtgtgggaagttgtttcggagccccaagtccctcagctatcacagacgcatgcatcttggggagaggcccttctgttgcacgctctgtgacaagacctactgtgatgcttctggactaagtcgtcaccgccgcgtccatctgggttaccggccccattcatgctctgtgtgtgggaagagcttccgggaccagtctgagctcaaacgccaccagaagatacaccaaaaccaggagccagtggatggaaaccaggagtgtactttgaggattccaggcacccaggctgaattccagacacccatcgccagaagccagaggtccatccaggggcttttggatgtgaaccatgcaccagtggccaggtcccaggaacccatatttagaactgagggtcctatggcccagaaccaggcatctgtacttaagaaccaagcacctgtgaccaggacccaggcacccatcactggaaccctctgtcaggatgccagatccaactctcatccagtgaagccctcaagactcaatgtcttctgttgcccccattgttctttgacttttagcaagaaatcctatctctccagacaccagaaggcccacctcacagagccgcccaactactgcttccattgcagcaagtctttcagctcattttccaggctggtcagacaccagcagacccactggaagcagaagagctacctttgccctatctgtgacctctcctttggggagaaagagggccttatggatcactggaggggctataaaggcaaggacctgtgccagagcagccaccataaatgccgggtgatcctgggccagtggcttggcttctctcatgatgtccccactatggctggggaggaatggaagcatggaggtgatcaatctccccccaggatccatacccccaggagaagaggcctaagagagaaggcctgcaaaggagacaaaacaaaggaggcagtgagcatcttgaaacataaataaatggcctttctgactgaaaaaaaaaaaaaaaaa

SEQ ID NO: 15557 - DNA, 1048 bp, Homo sapiens
  SIMILAR (412)..(909): 771254mologous to Mus musculus Pro-Pol-dUTPase polyprotein,accession number Y12713,Smith-Waterman Score=685.
atgcccagccttgcagagctttttgaggggtcatctaaagcctttggtgcggctgcatcacagctcaacttccccgtcgccagtggggagatgttgaagttcaaatatggatcttcggaatcctttgcatgctgtcgctgctgaacccattgccagccggacctccaggctgaatctgttcttccaggggaaaccaccctttatgactcaacagcagatgtctcctctttcccgagaagggatattagatgccctctttgttctctttgaagaatgcagtcagcctgctctgatgaagattaagcacgtgagcaactttgtccggaagtattccgacaccatagctgagttacaggagctccagccttcggcaaaggacttcgaagtcagaagtcttgtaggttgtggtcactttgctgaagtgcaggtggtaagagagaaagcaaccggggacatctatgctatgaaagtgatgaagaagaaggctttattggcccaggagcaggtttcattttttgaggaagagcggaacatattatctcgaagcacaagcccgtggatcccccaattacagtatgcctttcaggacaaaaatcacctttatctggtcatggaatatcagcctggaggggacttgctgtcacttttgaatagatatgaggaccagttagatgaaaacctgatacagttttacctagctgagctgattttggctgttcacagcgttcatctgatgggatacgtgcatcgagacatcaagcctgagaacattctcgttgaccgcacaggacacatcaagctggtggattttggatctgccgcgaaaatgaattcaaacaagatggtgaatgccaaactcccgattgggaccccagattacatggctcctgaagtgctgactgtgatgaacggggatggaaaaggcacctacggcctggactgtgactggtggtcagtgggcgtgattgcctatgagatgatttatgggagatcccccttcgcagagggaacctctgccagaaccttcaataacattatgaatttccag

SEQ ID NO: 15558 - DNA, 508 bp, Homo sapiens
  SIMILAR (190)..(603): 681254mologous to Mus musculus Pro-Pol-dUTPase polyprotein,accession number Y12713,Smith-Waterman Score=463.
atgggtatctggggaacagcccaaaagtggagccctagaggaaagccaagggcccaggtgcctggaagaggggttggaggagaatggaagatgtggttagaagaggcagcaagcttttggactcttggacttacaccagtggtttgccaggggctctcagggctttcggctacagactgaaggctgcattattggcttccctacttttgaggttttgggacttggagtggcttcctggctcctcagcttgcagacagccaattatgggacttcaccttgtgatcatctgactcctgagttctcacaacgcttgaccaataagattcgggagcttcttcagcaaatggagagaggcctgaaatcagcagaccctcgggatggcaccggttacactggctgggcagcaccttcaaacattaaagggacatcagcccacacagatgagaaagaaccagtgcaagaactctggcaactcaaaaagccagagtgtcttcatacctccaaatga

SEQ ID NO: 15559 - DNA, 808 bp, Homo sapiens
  SIMILAR (686)..(808): 701254mologous to Homo sapiens Human secreted protein, SEQ ID NO: 7344,accession number G03263,Smith-Waterman Score=152.
atggttaatattgagtgtcaacttgatcgaaggatacaaagtattgttcctgtgtgtatctgtgagggtgttgccaaaggagataaacatttgagtcagtggactgggagaggcagacctaccctcaatctggtgtcctctaatcagctgccagcatggctagaatacagcaggaagaagttgaagggatttgaattgctgagtcttctggctttcatctctctcccatgctggatgcttcctgctctcgaacatcagactccaagttcttcagcttttggactcttggacttacaccagtggtttgccaggggctctcaggccttcagccacagactgaaggctgtactattggcttccctacttttgaggttttgggactcagactggcttccttgctcctcagcttgcagacggcctattgtggggacttcaccttgtgatcgtgtgcatcaatactccttaataaactccccttcatatatacatatatcctattagttgtgtccctttagtgaactctaatataaggatgatgatatggaaacataaatacacaaatataggccagaagtagagcaaatttctaatagtaaataacaatgaaaagtcagagacagataattaaaaaagcagtaactacaaaggaaatgaaatcagtgtgtcgaagagatatccagcttttatgttcattgcagcactgttcaaaatagctaagataaggattcaacgtctatgtctatcaacagatgaatggataaagaaaatgtggtacatacacacaatggaatactactcaaccttaaaa

SEQ ID NO: 15560 - DNA, 4594 bp, Homo sapiens
  SIMILAR (652)..(810): 811254mologous to Homo sapiens Human secreted protein, SEQ ID NO: 5210,accession number G01129,Smith-Waterman Score=227.
agcccccaatgagaccatcgactgagcgcgtaggcaaggcccgggccgagaagggcttcaggacgcgggaggcgcacttgcttcaagtcgcgggcgtgggaacggggttgcaaaacggggcctctttgtccgggcttgcttccggcgtcatggctcaaagggccttcccgaatccttatgctgattataacaaatccctggccgaagagctactttgatgctgccgggaggctgactcctgagttctcacaacgcttgaccaataaaattcgggagcttcttcatcaaatggagagaggcctgaaatcatcacaccctcgggatggcaccggatacactggctgggcagggattgctgcgctttacttacatctttatgaaggactgggcgaccctgcctacctacaggtagcacatggctatgtgaagcaaagtctgaactgcttaaccaagcgctccatcaccttcctttgtggggatgcaggccccctggcagtggccgctgtgctatatcacaagatgaacaatgagaagcaggcagaagattgcatcacacggctaattcacctaaataaggtttgatcctcatggttccaaatgaaatgctctatggggcgaatagggttacatctatgctcttctttttgtcaataagaactttggagtggaaaagattcctcaaagccatattcagcagatttgtgaaacaattttaacctctggagaaaacctagctaggaagagaaacttcacggcaaagtctccactgatgtatgaatggtaccaggaatattatgtaggggctgctcatggcctggctggaatttattactacctgatgcagcccagccttcaagtgagccaagggaagttacatagtttggtcaagcccagtgtagactacgtctgccagctgaaattcccttctggcaattaccctccatgtataggtgataatcgagatctgcttgtccattggtgccatggcgcccctggggtaatctacatgctcatccaggcctataaggtattcagagaggaaaagtatctctgtgatgcctatcagtgtgctgatgtgatctggcaatatgggttgctgaagaagggatatgggctgtgccacggttctgcagggaatgcctatgccttcctgacactctacaacctcacacaggacatgaagtacctgtatagggcctgtaagtttgctgaatggtgcttagagtatggagaacatggatgcagaacaccagacacccctttctctctctttgaaggaatggctggaacaatatatttcctggctgacctgctagtccccacaaaagccaggttccctgcatttgaactctgaaaggatagcatgccacctgcaactcactgcatgaccctttctgtatattcaaacccaagctaagtgcttccgttgctttccaaggaaacaaagagtcaaactgtggacttgattttgttagcttttttcagaatttatctttcattcagttcccttccattatcatttacttttacttagaagtatccaaggaagtcttttaactttaatttccatttcttcctaaagggagagtgagtgatatgtacagtgttttgagattgtatacatatattccagaacttggaggaaatcttatttaagtttatgaatataaccatctgttactgttctaaaaatgtttaaaagaaactcaatacagataaagataaatatgtgactattattgggtattacacttcacttctctttaatatttttcctccaactggagggcagacaattttctgacttgcttttctctaggtggttcattttgaaaggggacagaaatataactaaatgcttccaggagaaaaattccaagagttacaatctggacttggtacctaaatatcattttttaaattcttgatgcctatttggactagaggtaaacatactttcagattggcctgtttttgtcggtaaggcatacagccttcagaagccaacatttttaatcaaaaacttataaaacatgatgatcattgtgaaaattctgagttgaaggttagtttaagataagctaacaataacagtctgtgttttctctaaaataatctgagttttttggaactctttatttaaatatgtgtgtttttcagtattcaaataagatcaggaagccaattttctatgtatgaatatgctttaacctaggatttcagtccactctgactgactttctaaactttaacttgggtttttacagtgactatgcattagtgctgactctttggtataagccataaaatattttccttcctatcaatttatctgaactttggtcttttcactaaattgtacagtattctacttctgtttaaaaaggggagatgagaaagggaatactatctaaccaataacttgaacaaaaacactaaactaagcatttaatagaaatgctttttattgaggaggtattatccagagttcatgcttagaacaaatgcatctttgcgtatcctagacttaacaattcatcagtttctgagaccacagaatcaggttttccgtagtagataaagactctctggtgcttcaaattctgttcaagtgttttgactcatcagcttctactctttctattactgcctttgcctggcttgttttgtctctttgcaactgattttgcaaaaaaaaattgtagctttaaaataacagggtctaagtattttaaatgtgcctatttcacagctctcttggtcacaaaaacatgctatttttattggaacttcaaaccaaatccccactgagtgtgtactggttcctgcaggtagcagtctcctattatctcctgtttagcaccaaaagagctaatattattggaaactgaccttttaaaggccactggcagtaggatttaaaaagcagcccactgctcagtttccaggatcagcttcctccttctgtcacttgtgtaagttggcactaccttgtgcctctcagattgctgaagtgctgctggtaagcatgtgcatgctctgcctttcttgtgaaagttttcaatcagcgatatcagcacttacagtaagaagtaaaagtagtgcacagcaaagctaatttgcctttgcctggggtgttcagcttgaaagaataaagctcatttggtttagttaaatgtcttactctactgtgcctatgcttttagctgcgttactaagcaagggaaaaataacagtttctctgagccagagaagacttgatcacagttctccaagcatcgtgatagcaatgcttaaccccaggaagatttcaaggcagggagaagaacatttcaaataagattcttgttaacccatttatgcctagtgttccattattggaatgctaagcttgtgggagtcatttacatcctactgctcaaagtcattgccaaggtctgatttttcacacaaaaaattgcaacccccagcataaatgggttagctactgtcatcagttagcaaattcatccacacaaacacaattagagtttggtttttttttaagcttttcaaaacttactaaactggcacaattttatatgtatgctatttgttgtatttatgcttaagagcaaaaaagttttgatgggattttaaattcagcaaagcctacaacgctgagacaatcccctaacaacatggtagtaactaaagaaacttttatactaggcttcttagttttaaaaggaagtggcatcattgtttcagttctagtttgtatttttctctcagatatttttcttctttaaaaatctttcccagaagttggttcctagaaaactcaataccatcatctcttatctctatacagggactaggtaataaaaccttcaaaggttgtcaaaggtcatcaagcagtgttcatttatcctgtcacatgtttctgtttctatagtaatttagaaattgcaaatagttaacttttcatcatgtaaaaagttaacattatcctatttccatagataccatggacggcggtgtggcctgagttgtcagtctttaatcctgagtcatgtggctctcttttcatctttgatgtcagttccaattatttggcatcaaaaaccttcatggtaggtagagttttaggtaaaagtggatctagggttactttctttattaacatttcctaaataactgaattgagagacatactctgctactatgtcctcaggttaatttttgtctgatcttacgatgccctgccttttactagctactttagaaatagaaaatgtgaagagtgactatttacatgtatactcctttggctgctagaactcatctgtagtcctttattatttacactgaattccaatttcatttctcttccgctaagtaagagcacctcattcctgtgttttctctactattgagctgtagacgaactgtttctctaattataaagcaaactgtttgggatattcagggaaactaccccaatgttatgttgtcatttaatgggaaaggctgggatcatatgtatttctatgttctgtaaagtatttgacttactagttctcaataaaattttattaggactataaaaaaa

SEQ ID NO: 15561 - DNA, 371 bp, Homo sapiens
  SIMILAR (44)..(154): 371254mologous to Escherichia coli nitrogen assimilation control protein,accession number L31639,Smith-Waterman Score=64.
attcagctgctgaatctgtctcctccagactagtgcgagtcccctgccagcaaggtccaccttcacccctccagcccagtcactctccagacagaaggagaaggtagtttcatctcggagcttcctgcaacagcgtggttggagagctgtaagttgctcattactcttctacacctgttcccctcaactggcaactgaaaacccccccactgaccttggaagaggtgggcgccatgttacatctggcctttttgtgcctttgacaatttgagtgctcactttgttgccaggtatagggccagttgctgattcatttaaaaactacatctagtccattatagtagaagaaaagataccagattctttggata

SEQ ID NO: 15562 - DNA, 1821 bp, Homo sapiens
  SIMILAR (1282)..(1623): 751254mologous to Homo sapiens neutral protease large subunit,accession number M27826,Smith-Waterman Score=429.
gcacgagggaaagagtggcgggagaagttgcagggaattatttgatagcacatactgatggctctaaagaagtcatcaccctcactggattctggtgatagtgactctgaggagttgccaacatttgcctttctgaagaaggaaccatcttcaacaaagaggagacagcctgaaagggaagagaagattgtagtggttgacatctcagattgtgaagcctcctgtcctccagcaccagagttattttcaccacctgtcccagacatagctgaaactgtcacacaaacacagccagtcaggttgctaagcagtgaaagtgaagatgaaggaagaatttattcctctgggcttcaaaggctttacatgttaagttttcttgacccacaaggcaactgagccctgaggactctagctccccagtttaaaagtgttttggatcatcaaaataatgaaggtgcatcatgtgactggaaaaagcagccctttccaaagatccctgaagttcccctccatgataccccagagaggagtgcagcagataacaaggacctgatcttagatccatgctgtcagcttccagcctacctgtctacctgccctggccagagcagcagcttggcagtaaccaaaacaaattctgacatccttccaccccagaagaaaaccaagccgagtcagaaggtccagggaagaggctcacacggatgccggcagcagagacaagcaaggcagaaggaaagcaccctgagaagacaggaaagaaagaatgcagcactggttaccaggatgaaagcccagaggccagaggaatgcttaaaacacatcattgtagtgctggatccagtgctcttacagatggaaggtgggggccagctcctaggagcactgcagaccatggagtgccgctgtgtgattgaggcgcaggctgtgccttgcagtgtcacttggaggagaagggctgggccgtctgaggacagagaggactgggtggaggagccaacagtactggtgttgctccgggcagaggcatttgtgtccatgatcgacaatggaaagcagggaagcctggacagcactatgaaagggaaggaaacgcttcagggctttgtaactgacatcacagcaaagacagcagggaaagctctgtcactggtgattgtggatcaggagaaatgcttcagcctggagctgctgttctttgatttcctcccctgcaccagtgctcagaatcctccaagaagagggaaacagggagcaaataaacagaccaagaagcagcagcagagacaaccagaggccagcatagggtccatggtatccagggtagacgctgaagaggcattggtggatctgcagctacacacagaagcccaggctcaaattgtgcagagctggaaagagctggccgacttcacatgcgcattcacaaaggctgtggctgaggcgcccttcaagaagctccgagatgaaactaccttctccttctgtctggagagtgactgggctggaggggtgaaggtggaccttgctggcaggggactcgcactagtctggaggagacagattcagcagctgaaccgagtcagcctggaaatggccagtgcagttgtgaatgcctatccctccccacagctcctggtacaggcttatcagcagtgtttttcggataaagaacgccagaatttgctcgcagacatacaggtgcgccgtggggaaggtgtgacatccacttctcgccgcattggaccagaactatccaggcgtatctaccttcagatgaccactttacagccacatctctctttagatagtgctgactga

SEQ ID NO: 15563 - DNA, 2415 bp, Homo sapiens
  SIMILAR (652)..(1302): 681254mologous to Homo sapiens Aminopeptidase P- like,accession number X95762,Smith-Waterman Score=672.
atggctaaatcaaaaggatgttcagcagcaaccctggcctctacccaccagatactagtaacaccctggagttgtgacaaccagaaatgtctccagacattgccaaatgtccctggaggcacaaagttactcctctgtgaggaccactggtttagaaatgattcttgcaatcaagccattccaaccatcgctaccctcctctcattcccatcactacaagcttctctgtggaccactcacttcttatctccactgaatcatcatccagtcaatcctgacagtcacctggaacagccacctggccagagtccacgcctcaacttcgaggctggcgatccagaaagagcacctcacgccctgggctgcaagcgcagccggacgcgcgcgaccagtgatcgccagccaatggcaagccgggacccggggtggggtaaagccagcgttgggaaagcctgtgcattaggcagcgctgttctgcctgcagggaacgattgcacaactgataacttgggcctaggctcagctggatttgaggatttgagacttagactgggtcagggtcccccgcgtcgccagggggcgctgcaggccgctccccggaaggcctcatcctgcgcggctggacagcgcctggcgccggactcctctttctcccggaagcggagaccgagccggcaaaggcttgggtgtgagacagcagcggtggcagacaccgcagaagcaaagagcagtgaggctcctgcattcgggtggagcaccatggacgaagctggcagctctgcgagcggcgggggcttccgccgggccctggacgaaccgcccaacagccgcatcttccttgtgatcagcaagtacacacctgagtcggtgctgagggagcgcttctcgccttttggcgacatccaggacatctgggtggtgcgggacaagcacaccaaggagtccaagggcattgctttcgtcaagttcgcccgcagctcacaggcctgcagggccatggaggagatgcatggccagtgcctcggccccaacgacaccaagcccatcaaggtgcgggtgcccgggtcggggtgccctcgggggaaggagtgggcctcttggacctcccttcacctgctgctctgccggggtgagggaggagtggaacatccgttcccggcagctgaccagacagcacctggcttggggacaggggctgctttgaggagaggctcccctcccacgaagctgcgccgggttgcagggaaggggacgggatgcggagtgtttgccccacgagagcggacccggcagccgcggccaccgggtgacagaacagcagtggctgggcttcccctctccctcgccctcactaatccaccagctcttgagttcactgccaaactcgtcctagcctactttgagtacttttctgaccttcctctctcagatgcccagatttccatatataaaaaacggaaaaactctacttttcctcaggttttcattgctcagtcccgatcatctggaagtcaccgagatgttgaagatgaagaacttacaagaatctttgttatgataccaaagtcctacacagaagaagatctgcgggaaaaatttaaggtgtatggagatatcgagtattgcagcattattaagaataaagtgactggagaaagtaaaggtttgggctacgtacgatacttaaaaccatcacaagctgcccaagcaatagaaaactgtgatcgaagttttagagcaatcttggctgaacctaaaaataaagcatctgaatcctctgaacaagattattatagtaatatgaggcaagaagctttgggacatgaacctagagtaaatatgtttccatttggtcatggagtggttcagtattttaatgtagcatcagctatttatgcaaaatacaaattacatggatttcagtaccctcctgggaaccgaataggtgtttccttcattgatgatggaagtaatgcaacagaaaaaatggcaacacagatggtagctgcacagcttgcatcaatggtgtggaataacccaagtcagcaacaatttatgcaatttggaggaagctctggatcacagttgcctcaaatccagacagatgttgtacttccatcatgcaaaaaaaaagctcctgctgaaactcctgtgaaagaaagactttttattgtgtttaatcctcatcctttacctttagacgtattagaagatatattctgtcgttttggtaacctgatcgaagtttaccttgtgtcaggaaaaaatgtggggtatgccaagtatgccgatagaataagtgctaatgatgccattgccactctacatggaaagattctgaatggggtgagacttaaagttatgctggcagattcgccaagagaagaatctaacaaacggcaaagaacttactga

SEQ ID NO: 15564 - DNA, 2401 bp, Homo sapiens
  SIMILAR (1444)..(1677): 571254mologous to Homo sapiens PRO2221,accession number AF116695,Smith-Waterman Score=219.
atggtgaaaagccgcaaggaattggagcagaagatccaagttttggttctggtgccagatctctctaggtgtcaacacagaagcagtcacctggaacagccacctggccagagtccacgcctcaacttcgaggctggcgatccagaaagagcacctcacgccctgggctgcaagcgcagccggacgcgcgcgaccagtgatcgccagccaatggcaagccgggacccggtcccactgctgattggcccccagatcccggggcgctgcaggccgctccccggaaggcctcatcctgcgcggctggacagcgcctggcgccggactcctctttctcccggaagcggagcaccgagccggcaaaggcttgggtgtgagacagcagcgtgtggcagacaccgcagaagcaaagagcagtgaggcccctgcattcgggtggagcaccatggacgaagctggcagctctgcgagcgacgaggggcttccgcccgggcgtggacagcctggacgaaccgcccaacagccgcatcttccttgtgatcagcaagtacacacctgagtcggtgctgagggagcgcttctcgccttttggcgacatccaggacatctgggtggtgcgggacaagcacaccaaggagtccaagggcattgctttcgtcaagttcgcccgcagctcacaggcctgcagggccatggaggagatgcatggccagtgcctcggccccaacgacaccaagcccatcaaggtgcgggtgcccgggtcggggtgccctcgggggaaggagtgggcctcttggacctcccttcacctgctgctctgccggggtgagggaggagtggaacatccgttcccggcagctgaccagacagcacctggcttggggacaggggctgctttgaggagaggctcccctcccacgaagctgcgccgggttgcagggaaggggacgggatgcggagtgtttgccccacgagagcggacccggcagccgcggccaccgggtgacagaacagcagtggctgggcttcccctctccctcgccctcactaatccaccagctcttgagttcactgccaaactcgtcctagcctactttgagtacttttctgaccttcctctctcagatgcccagatttccatatataaaaaacggaaaaactctacttttcctcaggttttcattgctcagtcccgatcatctggaagtcaccgagatgttgaagatgaagaacttacaagaatctttgttatgataccaaagtcctacacagaagaagatctgcgggaaaaatttaaggtgtatggagatatcgagtattgcagcattattaagaataaagtgactggagaaagtaaaggtttgggctacgtacgatacttaaaaccatcacaagctgcccaagcaatagaaaactgtgatcgaagttttagagcaatcttggctgaacctaaaaataaagcatctgaatcctctgaacaagattattatagtaatatgaggcaagaagctttgggacatgaacctagagtaaatatgtttccatttggtcatggagtggttcagtattttaatgtagcatcagctatttatgcaaaatacaaattacatggatttcagtaccctcctgggaaccgaataggtgtttccttcattgatgatggaagtaatgcaacagatcttcttataaaaatggcaacacagatggtagctgcacagctttgcatcaatggtgtggaataacccaagtcagcaacaatttatgcaatttggaggaagctctggatcacagttgcctcaaatccagacagatgttgtacttccatcatgcaaaaaaaaagctcctgctgaaactcctgtgaaagaaagactttttattgtgtttaatcctcatcctttacctttagacgtattagaagatatattctgtcgttttggtaacctgatcgaagtttaccttgtgtcaggaaaaaatgtggggtatgccaagtatgccgatagaataagtgctaatgatgccattgccactctacattggaaagattctgaatggggtgagacttaaagttatgctggcagattcgccaagagaagaatctaacaaacggcaaagaacttactgattcttgagaacacccgactaaataatgacataatcctcagctgactgactgaaaatgtgactggacgcattccctgtggacagttgacagcttttttttttttccatatacctgatagtctgtgtacagcattgttttgtctgggaagcagggattgctgacatgtatttttgaatccatacattaatgctaaaacgaatatagtagttgttccttagagcaatatgttgttacgtgtagcagaaataaagttttctttgcttaactaaaaaaaaaaaaaaa

SEQ ID NO: 15565 - DNA, 534 bp, Homo sapiens
  SIMILAR (534)..(103): 751254mologous to Homo sapiens Human bladder tumour EST encoded protein 18,accession number Y66160,Smith-Waterman Score= 550.
tgacgccaagtttgagtcaggcgatgtgaaggccacagtggcagtgctgagtttcatcctctccggtgcggccaagcacagtgtcgatggcaaatccttggccagtgaactgcagcagctggggctgcccaaagagcacgcggccagcctgtgccgctgttatgaggagaagcaaagccccttgcagaagcacttgcgggtctgcagcctacgcaaactgaagcaggcccagaccctgatgagctccctgggctgaggagaagggtgttccaggcctgtgtggagccgccctgcccgtatggagtcacgccctctgaactgctcttcgggaggcagccctggttctaggatgctgatgccctggcccggactctggcctcccagatccccagctgcctcacttctctcttgagaacttggctcagggctcctgaggacctttcccagcattaccttcccttcccttgaaaggcaattgttggctgttttcataagcaggaaaaataaacagaagtataaaggaaaaaaaaaaaa

SEQ ID NO: 15566 - DNA, 917 bp, Homo sapiens
  SIMILAR (649)..(873): 961254mologous to Cloning vector pEH1 lac repressor,accession number AJ007659,Smith-Waterman Score=339.
agcacgcggccagcccgtgctgctgttatgaggagaagcaaagccccttgcagaagcacttgcgggtctgcagcctacgcacgtggtccctggcagcacgagtggcagaagggacagcagagactgtggacccctcagctgcacctaagacctctgtgtggtctagccgtgtgtgctgggggaggcttttggccaccatttccccctctgtaaatgagaccgatacctgtggcatggaggacaggaggctggtggtgtgcaggccctggcgtgcacagtgccacatgaaggcctggggctggcgccaccctgaagaaggtggcacccactctggcgccccctctgctgtcctgcaggctctggcggtggccatccagcttggtggccatctggctgatccactcctccaggtggaccctctgtcctcatgtggtgcagtaagtttggacattctgatctacttggtgttttattatagaactgctagtgtgcccgagacttacattgtgaagacactttttaaaaaacttgagagccaaagcctaatccagagcaatgtcctaactcgctccaattctatgaaggctgagagaggtgaggaagctgcaaaagaaaagtcagaagctagcagaggttggttcatgaggtttaaggaaagaagctgtctccacaacataaaaatgcaaggtgaggcagcaagtgctgatgtagaagctgcagcaagttatccaaaagatctagctaagatcactgatgaacatggctacactaaacaacaggttcgatgtatacaaaacagccttctgttggagggtaatgctgaagaagtacgtaaaattattgtttgttctatgtcccctcccttaaaaccaggtggacctgtgactctggtagaagagttcctatgtgcttctaag

SEQ ID NO: 15567 - DNA, 1036 bp, Homo sapiens
  SIMILAR (239)..(886): 851254mologous to Homo sapiens XAB2,accession number AB026111,Smith-Waterman Score=931.
tacgcctgcggtaccgctccggaatttccgggtcgacgatttcgtagaaaaatggtggtgatggcgcgactctcgcggcccgagcggccggaccttgtcttcgaggaagaggacctcccctatgaggaggaaatcatgcggaaccaattctctgtcaaatgctggcttcgctacatcgagttcaaacagggcgccccgaagcccaggctcaatcagctatacgagcgggcactcaacgctgctgccctgcagctacaaactctggtaccgatacctgaaggcgcgtcgggcacaaggtgaagcatcgctgtgtgaccgaccctgcctattgaagattgtcaacaactgtcatgagaggggcctttgtgttcattgcacaagatgcctcgtctgtggctagattactgccaatttcctcatggaccaggggcgcgtcacacacacccgccgcaccttcgaccgtgccctccgggcactgcccatcacgcagcactctcgaatttggcccctgtatctgcgcttcctgcgctcacacccactgcctgagacagctgtgcgaggctatcggcgcttcctcaagctgagtcctgagagtgcagaggagtacattgagtacctcaagtcaagtgaccggctggatgaggccgcccagcgcctggccaccgtggtgaacgacgagcgtttcgtgtctaaggccggcaagtccaactaccagctgtggcacgagctgtgcgacctcatctcccagaatccggacaaggtacagtccctcaatgtggacgccatcatccgcgggggcctcacccgcttcaccgaccagctgggcaagctctggtgttctctcgccgactactacatccgcagcggccatttcgagaagatccggaaagcccccgtaaacggcggtccaacttggatggttggccaaaacagtgtgccaaggttccagacacgaagattgacacccttgaagcggaagggtccccttgtcacagacttccgcgaaaagcaaccaacacccttagcgcaagagtag

SEQ ID NO: 15568 - DNA, 423 bp, Homo sapiens
  SIMILAR (757)..(1203): 371254mologous to Homo sapiens p40,accession number U93569,Smith-Waterman Score=175.
cgtagggggattctgcaacaaagaacatagagggcccccgaatgagtgggctatcaaagtcataataagcaccaacgcctgattgtagataccagcgggtcatgtccaggaagaaggcgcacccgacaggattgagctgaaacccgagcagcctctgaaactcggagatgagcacgtccttgtcggtggtgcccaggcagctaaacttctgcatcagctccgggtccaggtctacgtccatgccctccatggcggggaccggacacccgcttccccgcctcttcacaaccaagccgccgccgcgccgccgggcccggggacctggaggggggccgctgctagctagcttcgcgaccccgctcctttgaggtaggccccgggcctctcacagtctcataggtgtaaactcactctgccacgaaa

SEQ ID NO: 15569 - DNA, 631 bp, Homo sapiens
  SIMILAR (50)..(229): 781254mologous to Homo sapiens lymphocyte-specific protein 1,accession number AF043350,Smith-Waterman Score=224.
cagtgtgccctctatgtcctttgttgaagatgtcaccataggagaaggggagtcaatacctccggatactcagtttgtaaaaacatggcggatccagaattctggtaagtacataatgggcaatcctcccttgcctagttttcattttcttaataaactagtgccattgttcctgcgaccacagttcattgatgttatcaggggagatcaccccattgtttatattttcactaccacccaaggtctaaacttttactgccttttatattcatgtggtctcttgagctcttgagaatttggacatgtgaacatggtgatggtgagatcgctagagccccaagagattgcagatgtcagcgtccagatgtgcagccccagcagagcaggaatgtatcagggacagtggcggatgtgcactgctacaggactctactatggaggtgagtatgtccttgtgcagcccagggtaaaggaactaaggtaacatcttataacatccccagtgttgctcacagagcctgtcaaattgcacaacagcagcagcagcagcagcagcaacaacaacagcaatgtgaaatgactgtactgttcagattaacctctaaaatgcatatatgtgggtcttgaacct

SEQ ID NO: 15570 - DNA, 859 bp, Homo sapiens
  SIMILAR (265)..(372): 1001254mologous to Homo sapiens JM5,accession number AJ005897,Smith-Waterman Score=209.
catccatccacacacacacacctcactccatgcacactgacagattcttcccaagtctgaacccctctgtctccccaactgggttcagaccctatcacctaaccatggtgtctgcctcacctcctgggtgccagacgcaggtggtcctgcccagaggtggcctgccacttggtgaagattctaagaggagcagggactattggggctgagaggtagccactaccaccccactaggcaggggagcagagaggggccctaggcattgctctgaacccatacccagtgaggggagagagaatgaatgatactgataccctccctgggctggggaagccatggacccctctgcctgcactccatgacttgcacttactctggccctctgcaaggagctcatctcgcctccaaggatgtgcacagaaatggtttgttcttgggaagggagacaaggtgcttgggacatttaacttgccaagtgtggttgcctagaagcaagaggaagagcaagacagacttctggcaggcccagacccactgacggtggcccatgaagcccctgctgggaaactgggaaggggcacccagtgttgggcagaagaggaagtcaggaaagcaggggttgtgaagcctcccacaatcctgccagggacagtggagatgtgctgcttcaaggctactaagcagtaagaacagctgggcatgcatgggctccagggaggcagtgtctcaggagactggtaccagcagcagcagtctgggcctaatgaggccctcagacaaaaagccatcctgaggcctgtggcgtgggtacctggcagagacttccctctgctctgctagggagtggagcactcccatg

SEQ ID NO: 15571 - DNA, 1018 bp, Homo sapiens
  SIMILAR (200)..(1081): 521254mologous to Homo sapiens JM5,accession number AJ005897,Smith-Waterman Score=519.
acgcgtgtgaatacctcctgatactcagtttgtataaacttggtggatccagaattctgtggcagaggcctggcctccaggggtttgtcttaaatatgtcgggggagaccaatttggacatgtgaacatggcgatggtgagatcgctagagccccaagagattgcagatgtcagcgtccagatgtgcagccccagcagagcaggaatgtatcagggacagtggcggatgtgcactgctacaggactctactatggagatgtcatctgggtgattctcagtgtggaggtgggtggacttttaggagtaacgcagcagctgtcatcttttgaaacggagttcaacacacagccgcatcgtaaggtagaaggaaacttcaacccttttgcctctccccaaaagaaccgacaatcagatgaaaacaactttaaaagaccctgggggctccgagttcgactcgaacagcaaaaacacatgggctcctgctcctgacacatgggctcctgctcctgaccaaactgagcaagaccagaatagactgtcccagaactctgtaaatctgtctcccagcagtcacgcaaacaaccttatcagtagtgacttacagtaaggggctccatgggccttaccccttcggccagtcttaaacgggtgtcagcaagaagaaaaattaacaaaagacagaaggcctgactttggggggttagggcaaggggttcctctgggattgcagaccacatcgcacagacccctgggctctgaccccctctcatcccggaagaagaggaagaagcagaacagactagttttgagtaaacttcagtattgcatgtgtggaatgctgaatcacaggaatggtgttgaggctaccaagaagaaatccatgcagccactttgggttttgttataggcatcagtctaacaagtcattaggtcactcgggaagggggaaaaagtttaaaatgggggaaaaaaagccatctttttaaacaaaaattattttgcctacagaaaggttgt

SEQ ID NO: 15572 - DNA, 1536 bp, Homo sapiens
  SIMILAR (497)..(339): 491254mologous to Homo sapiens Human neurofilament-M mutant protein fragment 7,accession number Y20725,Smith-Waterman Score=83.
tttttttttttttttttaaattctcatgactttattttgattgggttgttcctgacggagtgggtggaaggttatggatgtttgtatcgagaccttttttatcttccggagacacgatgctaccgttgcataacacaaacagcaccgataaaatgtagtaataggaaagagtgccagggaatcaagactttaaggcagcatcccactgggaaagcagctcttcaaacacgtccttcaagcgcgagtggcagactccttgctgggagggcctgagtgcactttgctacttgaccttgccactgtctctccgggactttcagtttcctcacctcaaaggagcggggtcgcgaagctagctagcagcggcccccctccaggtccccgggcccggcggcgcggcggcggcttggttgtgaagaggcggggaagcgggtgtccggtccccgccatggagggcatggacgtagacctggacccggagctgatgcagaagttcagctgcctgggcaccaccgacaaggacgtgctcatctccgagttccagaggctgctcggcttccagctcaatcctgccggttgcgccttcttcctggacatgaccaactggaacctacaagcagcaattggcgcctattatgactttgagagcccaaacatcagtgtgccctctatgtcctttgttgaagatgtcaccataaggggaagggggagtcaatacctccggatactcagtttgtaaaaacatggcggatccagaattctgatgtcatctgggtgattctcagtgtggaggtgggtggacttttaggagtaacgcagcagctgtcatcttttgaaacggagttcaacacacagccgcatcgtaaggtagaaggaaacttcaacccttttgcctctccccaaaagaaccgacaatcagatgaaaacaacttaaaagaccctgggggctccgagttcgactcgatcagcaaaaacacatgggctcctgctcctgacacatgggctcctgctcctgaccaaactgagcaagaccagaatagactgtcacagaactctgtaaatctgtctcccagcagtcacgcaaacaacttatcagtagtgacttacagtaaggtaggtgcccttggagaagagaaggggtaggtggtgggccttgggacttgtcagtggaatctgaaatgtggatgggcctcccggtttgaaagtacctccatccagaaggtaccgcgatggtcttcctgcttggcctactgccataggactccccagacaagaacaaaccatttctgtgcacatccttggaggcgagatgagctccttgcagagggccagagtaagtgcaagtcatggagtgcaggcagaggggtccatggcttccccagcctagatgagggaatggatggtgtccaggccaggggtgacaccacccaggaaccaggctgcaagtgcatggaggagtggagccagagccctagtagggcctagtttaattcctgtggtccttcctcccaagatccagtctggggctctggagcc

SEQ ID NO: 15573 - DNA, 1818 bp, Homo sapiens; identical to SEQ ID NO: 3697
  SIMILAR (447)..(211): 371254mologous to Arabidopsis thaliana putative proline-rich protein,accession number AL161531,Smith-Waterman Score=115.

SEQ ID NO: 15574 - DNA, 1914 bp, Homo sapiens; identical to SEQ ID NO: 14148
  SIMILAR (173)..(259): 1001254mologous to Homo sapiens RNA polymerase subunit hRPB 33,accession number J05448,Smith-Waterman Score=148.

SEQ ID NO: 15575 - DNA, 1128 bp, Homo sapiens
  SIMILAR (79)..(528): 311254mologous to Mus musculus Cdc42 GTPase-activating protein,accession number AF151363,Smith-Waterman Score=111.
atggggtccagccactgcccacagccaggcactctggctgcagcagggtgggcagtgccaggcaccagctccctgcaaggctgtggctggatgaggcacactgcaagtagcttccatggctggcaccagggaatgtggtggcacccagaaacttggagatgccaggaaccacagaaccccaaaaagggcatcacagccctggctcagggtgctcccagccccaccattcggcaggtcccaagttcttgtactgcatccaggaagaatgagttatgcagacaagtagagggtgagcaaggtgaagaggcaggccatcccatcatctgctcaagtctggctgagtccaagatttttatgggcttaagaggggagaaagtaggtgctgatcggcccttctatggagcactcagccctggctgtgcctcccccattgtagccagtgtcatgcagcggccactcaaggtgggccgccgctgccatcagtattgctctgtcaatgatagaaacagtaaacatggtattcaccttttacagcaggcatcatgggaccataagtacccgtgttctgttggcaagagaccagagagacaggacggccaagacactgtaaaccttggaactttggaagaaacagcttccccatccccagtagtgacaacatcccctcctcaacccatgctgccatcagcctttccacctttgtctgaggagataaaccctgcgctgcctgaggcaacggtgatggcctcccctgaggcggttgccaggcaagataatgttgattctgctcaggagccacccccaacacccctgtgtgcttctagacctacaactagacaaaagtcctggtggggcgctagaggtgaggttgagagtgtgacccatgaggagatgcactacacgggaaaagaactgcttgagttctctaatttatataaagagaaatctggagaacaggcatgggaatggatattaagggtgtgggataatggtggaaggaacatacagttggatcaccctgaatttgttgatttgggcccactaagtaggaactctgcatttaatgttgcagttcggggagttaaaaaaggttctaagagtttatttgcttggttaggtgaaatatag

SEQ ID NO: 15576 - DNA, 504 bp, Homo sapiens
  SIMILAR (346)..(50): 721254mologous to Homo sapiens Similar to ribosomal protein L14,accession number BC000606,Smith-Waterman Score=331.
tttcaacaggtcaaaaagaacctttattactttttatgattgccacttatgctttcttgccagatgcctttggagcaggtgctttctgggctggagctttttgacccctctgagcctttggagcaagcgctgctttctgggccgtgggtttcttggcaagaaccctcttggctggaggccttttaatcgcgggggtgaacctttttgccggaactttagcagcagcaacaacagcaacagcaacagcagcagcagtacccctagtaacaagtgctttttttggagaagccttcaggagagctgccttttgaagcctcttaacttcaatcctgaataatccgttcctccgtgcggaaacttgaggatgaaatcagtgagccgcatgcactggaaaggcatggcctgtctcctcacttgagtgcaaggtccatccgacaaagccctgttctgattaataacatctccaatggggacaattttccggcaatagggtccaaagggaat

SEQ ID NO: 15577 - DNA, 1016 bp, Homo sapiens
  SIMILAR (693)..(118): 321254mologous to Streptomyces coelicolor A3(2) putative translation initiation factor IF-2(fragment),accession number AL355913,Smith-Waterman Score=113.
caacatggtgagtcttactgttgcgggctccggtgccgtcgaccatgccgctcgacctccacctccgctgggaagctgaggcgccgaacggctcccagagggtcccgggaagcgcatggtgttcaggcgcttcgtggagtgttggccgggtggcctatgtctcctttggacctcatgccgggaaaattggtcggcgatggtagatgtattttgatcagaacaagggcttttggtcgaatggaccttgcactcaagtgaggaagacaggcccatgcctttcaaagtgcatgcagctcacgtgatttcatcctcaagtttccgcacagtgcccaccaagaagtatgtccgacaaagcctgggcagaagggaagacatcaatacaaaattggggcagcccacacgatggggccaaggaagatttgaaagccaggaggaaaaggaaaagccaagattgacagatttttgatccgttttttaaagttaatgaagggccaaagaaaattgaagggacaggattaatccaagaaatgaagtttaagaagctttcaaaagggcagcttttcctggaaaagcttcttcccaaaaaaaagcacctgggtactaaggggtactgcttgctgctgctgctgctgctgctgctgctgctgctgctgctgctgctgctgctgctgctgctgctaaaagttccagcaaaaaagatcacccgccgcgagtaaaaaggctccagcccagaaggttcctgcccagaaaagccacaggccagaaaagcagcgcctgctccaaaagctcagaatgggtcaaaaagctccaagccccagaaagcacctgctccaaaggcatctggcaaggaaagcataagtggcaatcataaaaagtaataaaggttctttttgacctgttgacaaatgtatttaagcctttggatttaaagcctgttgaggctagagttaggaggcagattgatagtaggattataataaacattaaataatcaaaaaaaaaaaaaaaaaaaagtc

SEQ ID NO: 15578 - DNA, 1860 bp, Homo sapiens
  SIMILAR (401)..(291): 971254mologous to Homo sapiens Human prostate cancer- associated protein 12,accession number Y48226,Smith-Waterman Score= 191.
ctatgatcccgcagcgtccaaggcagggctcaggccccgggattctccccacacgctgctgcactggcgcagccgatcgccaaactttgtctccccaaagccagtgcccccgcagttacttggcgggcagccgctagcccactctcggcgggatgatctgggagaagcgggcgtgggacgagggggctgctgttttgcagccctgcgaggcgtgcagtcggagaagtggtcggggttccacaccgtccctgagcctgcccccggccaaggtggcccgacgtgctgcagtggctggcgcaggtgatccgggcagcgcgtccggcactgcattgccagcagcagcaacagagccaggacaagccgtgcccgcccttcgcgcccctcccgcaccctcaccaccacccgcacctcgcgcaccagcagccggccagcggcggcagcagcccatgcctccggtgcaacagctgcgcctcctccggtgccccggcggcgggggcgggagataacctgtccctgctgctccgcacctcctcgcccggcggcgccttccggacccgcacctcctcgccgctgtcgggctcgtcctgctgctgctgctgctgctcgtcgcgccggggcagccagctcaatgtgagcgagctgacgccgtccagccatgccagtgcgctccggcagcagtacgcgcagcagtccgcgcagcagtcggcgtccgcctcccagtaccaccagtgccacagcctgcagcccgccgccagccccacgggcagcctcggcagtctgggctccgggcccccgctctcgcaccaccaccaccacccgcacccggcgcaccaccagcaccaccagccccaggcgcgccgcgagagcaaccccttcaccgaaatagccatgagcagctgcaggtacaacgggggcgtcatgcggccgctcagcaacttgagcgcgtcccgccggaacctggcgctctatggaaccggcggcggaggcagcactggaggaggcggcggcggtggcgggagcgggcacggcagcagcagtggcaccaagtccagcaaaaagaaaaaccagaacatcggctacaagctgggccaccggcgcgccctgttcgaaaagcgcaagcggctcagcgactacgcgctcatcttcggcatgttcggcatcgtggtcatggtcatcgagaccgagctgtcgtggggcgcctacgacaaggtacaggcttgaaccccagcccacgctaccggagtcgggcactgggtggttgggatgggcactggcggggaccctttgcgtgcggatccctagcctctccgggacgatcaagggagcccgccaggacagcgggcgcgtcttctcaaggacagttacagatctttttgcttgtaagcaacataagctatgccagtgtatgctgccatccagtgttgctgaaccatcttgttttgccagagtgtgtataaacattttataaaaggtcacacggatctgctttccaaggttctccatgaaaatgtcagggcctcctcttgcttcattaagcaattccagaggacatagagccagaaagtcagctataacacttacttttctatgcggatgccattcgttataatgctcgaacgcctctgcaaggttctttgctgccgttaacccgtctggtttgggcatgatactgatgtagtcacgctttatcgttttcacgaagctctctgctatggggtcctctagagtccgtaaagggcgccatgtaaatatgtggtaaagcctgtctgctgcctgccgtcgagcgtaagacatcttcacagcgtctgtgaaatattcagtgacgcgcaggttttgtgactcatacttataagcccagca

SEQ ID NO: 15579 - DNA, 1819 bp, Homo sapiens
  SIMILAR (2608)..(3153): 891254mologous to Homo sapiens p40,accession number U93564,Smith-Waterman Score=824.
atgtggcacatatacaccaaggaatactatgcagccatagaaaaggatgagttcatgtcctttgcagggacatggatgaagctggaaaccgtcatcctcagcaaactaacacaggaacagaaaaccaaacatcacatgttctcactgtgctttgaatataccatcccactggcttctggtcactatggtttagtgatgagaagctgcgactaccggggtgaatcagcccgcgccaggcccctttcccacccgccgctgcagttaggacttggcaaagatgctcgatatttgcgtatttgtgaccggtctttgctttgtgtctgcgctgcaggtgatgtcatgcccattgttttggtgcgcccaaccaatcggactcgccgcctggattctaccggagccggcatgggcccttcctcgcaccagcagcaggagtccccgctcccgaccataacgcattgcgcaggttccagcgcggcttcttcccagagcagccgccgccgccgccgcgctcctcacacctgcattgccagcagcagcaacagagccaggacaagcccgtgcccgcccttcgcgcccctcccgcaccctcaccaccacccgcacctcgcgcaccagcagccggccagcggcggcagcagcccatgcctccggtgcaacagctgcgcctcctccggtgccccggcggcgggggcgggagataacctgtccctgctgctccgcacctcctcgcccggcggcgccttccggacccgcacctcctcgccgctgtcgggctcgtcctgctgctgctgctgctgctcgtcgcgccggggcagccagctcaatgtgagcgagctgacgccgtccagccatgccagtgcgctccggcagcagtacgcgcagcagtccgcgcagcagtcggcgtccgcctcccagtaccaccagtgccacagcctgcagcccgccgccagccccacgggcagcctcggcagtctgggctccgggcccccgctctcgcaccaccaccaccacccgcacccggcgcaccaccagcaccaccagccccaggcgcgccgcgagagcaaccccttcaccgaaatagccatgagcagctgcaggtacaacgggggcgtcatgcggccgctcagcaacttgagcgcgtcccgccggaacctccacgagatggactcagaggcgcagcccctgcagccccccgcgtctgtcggaggaggtggcggcgcgtcctccccgtctgcagccgctgccgccgccgccgccgctgtttcgtcctcagcccccgagatcgtggtgtctaagcccgagcacaacaactccaacaacctggcgctctatggaaccggcggcggaggcagcactggaggaggcggcggcggtggcgggagcgggcacggcagcagcagtggcaccaagtccagcaaaaagaaaaaccagaacatcggctacaagctgggccaccggcgcgccctgttcgaaaagcgcaagcggctcagcgactacgcgctcatcttcggcatgttcggcatcgtggtcatggtcatcgagaccgagctgtcgtggggcgcctacgacaaggcgtcgctgtattccttagctctgaaatgccttatcagtctctccacgatcatcctgctcggtctgatcatcgtgtaccacgccagggaaatacagttgttcatggcgaactatggagcagatgactggcgaagcgccctgacttatgagcctattttcctcatccttttggaagcactgaggggggtcattcatgccacaccatgcagagtatctctctctctctgggacggcctggatttgcccg

SEQ ID NO: 15580 - DNA, 2868 bp, Homo sapiens; identical to SEQ ID NO: 7463
  SIMILAR (457)..(1011): 941254mologous to Homo sapiens p40,accession number U93564,Smith-Waterman Score=887.

SEQ ID NO: 15581 - DNA, 381 bp, Homo sapiens
  SIMILAR (97)..(252): 321254mologous to Pseudonaja textilis short neurotoxin precursor,accession number AF082977,Smith-Waterman Score=66.
tcagaacccccacacagaggccccactggggcactgccaagtggagctgtgagaagagggccactgtcctccagaccccagattggtagatccacagacagcttgcactgtgtgcctggaaaagccacagacgctcaacgccagccggtgaaagcagcggggagtggagctgtaccctgcaaagccacagggtggagctgcccaaagctgtaggagcccatctcttgcatcaacgtgaccatatgttaaaaatatcagtggaatatcacagttgagtccagagcccagatgagtttctgtgttcctttctacttcttgcctgcctcttgttttgctgtctacccttcccccctccacttctccatttgtatcacaactcat

SEQ ID NO: 15582 - DNA, 741 bp, Homo sapiens
  SIMILAR (43)..(330): 911254mologous to unidentified cloning vector 29kD protein essential for the replication of mini F plasmid,accession number AB015619,Smith-Waterman Score=436.
tgtgacaatctaaaaacttgtcacacttcacatggttctgtcatggcggaaacagcggttatcaatcacaagaaacgtaaaaatagcccgcgaatcgtccagtcaaacgacctcactgaggcggcatatagtctctcccgggatcaaaaacgtatgctgtatctgttcgttgaccagctcccacaatctgatggcaccctacaggaacaaaaaagtatctgcgaaatccatgttgctaaatatgctgaaatattcggattgacctctgcggaagccagtaaggatatacggcaggcattgaaccgcttcgcggggaaggaagtggtttttatcgggacaggaccctcagctgcaggtctgttggagtttgctagaggtccactccagaccctgtttgcctgggtatcagcagcggtgtttgtagaacagcggtttttcgtgaaccgcgaatgctgctgtctgatcgttcctctggaagttttgtctcagaggagtacccggccccgtgaagtgtcagtctgcccctactggggggtgcctcccagttcagcattcctggtggaagcaatctgggcctggttaaaggaagtggctgttccaaaagtagaagggcagacaaagccaaatctgggggaagctttgtgtcctagcatggttatgggaaggcagcgcatccgccacagagggcagtccactgtgctagaaaaagatgctgaagaaacatatcaagtagaaaagtga

SEQ ID NO: 15583 - DNA, 2663 bp, Homo sapiens
  SIMILAR (1702)..(2712): 941254mologous to Homo sapiens p40,accession number U93564,Smith-Waterman Score=1642.
atgggcaaagacttcatgactaaaacaccaaaagcaatggcaacaaaagccaaaactgacaaatgggatctaattaaactaaagagcttctgcacagcaaaagaaactatcatcagggttaacaagcaacctacagaatttggggaaattgaaataaaaagtacaaaagaaacaagtaaaggaacagttaatgacatacaaagggaaccaagagactatggcctcctgaaagccagatacataaagacttctggtaacgccactgttgatcacttatccaagtatctggctgtgaggttagctttagaagaacttcgaagcaaaggtgaatcaaaccagatgaaccttgatacagccagtgagaagcagtataccatttatatagcaacagccagtggccagttcactgtattaaatggctctttttctttggaattggtcaggataatgggattacagtgggcaaaacatcttggaaatgcagtcaaagttacaatcaatgacttgaatgaaaattctgtgacactgattcaggaaaactgccatttaaacaaattgaaagtggtggtggacagtaaggaaaaggaaaagagtgatgatattcttgaagaaggagagaaaaatcttggtaatattaaggtgaccaaaatggatgccaatgtactgatgcatttgagatcttttgatttcatacatctagacccttttggaacatcagtgaattatctagattctgcattcagaaatataagaaaccttggcatagtgtcagtgacttctacagatatcagttctttatatgccaaggcacagcatgttgcccggcgtcactacggatgtaacattgtccgaactgaatattacaaggaactagcagccagaattgttgtagctgcagtggcaagagctgcagcccgatgcaacaaaggcatagaagtactgtttgcagtggctctggaacattttgtgttggtagttgtgagagttttgaggggacctacttcagcagatgaaacagccaagaagattcaatacctgatccattgtcagtggtgtgaagagagaatttttcagaaggatggtaatatggtagaagaactcaggattaagaaactcactcaaaaccacacaacgtcatggaaactgaacaacctgctcctgaatgactaccgagtaaataacgaaatgaaggcagaaataaataagctctttgaaaccagtcagaacaaagacacaatgttaccagaatctctgggacacagctaaagcagtgtttagagggaaatttatagcactaaaagcacacaagagaaagcaggaaagatctaaaattgacaccctaacatcacaattaaaagacgtagagaaacaagagcaaacaaattcaaaagctagcagaagaaaagaaataactaagatcacagcagaactgaaggagatagagacacaaaaaacccttcaaaaactcaatgaatccaggagctggttttttgaaaagatcaacaaaatcgatagaccactagcaagactaataaagaagaaaagagagaagaatcaaatagatgcaataaaaaatgataaaggggatatcaccactgatcccacagaaatacaaactaccatcagagaatactataaacacctctacacaaataaactagaaaatctagaagaaatggataaattcctcgacacaaacaccctcccaagactaaaccaggaagaagttgaatctctgaatagaccaataacaggctctgaaattgaggcaacaattaataacttaccaaccaagataagtccaggaccagatggattcacagccgaattctaccacagcttcaagacccataccagagagcagtttttaaaacctgatttatctccttttgtaggctcggtcacagagttaagtagcagcaacagtgggaggcaggacacttctctttgctccgttttgactgctgtcacccagaagctgatgctgctagaggggattgaggagacaggaccctcagctgcaggtctgttggagtttgctagaggtccactccagaccctgtttgcctggctatccagcagcagtggctgcagaacagcggattttcgtgaaccgcgaatgctgctgtctgatcgttcctctggaagttttgtctcagaggagtacccagccgtgtgaggtgtcagtctgcccctactggggggaaagggaattccctgacccttgcgcttcccgggtgtggcaatgcctcgccctgcttcggctcatgcacggtgtgctgcacccactgtcctacacccactgtctggcactccccactgagatgaacctggtacctcagttggaaatgcagaaatcacccgtcttctgtgtcgctcacactgggagctgtagactggagcttttcctatttggccatcttggctccaccccagttgatccattttctaagaaagattggcatgatgtgaaagcccctgctgtgttcaatataagaaatattggaaagaccctagtcaccaggacccaaggaaccaaaactgcatctgatggcctcaagggtcacatgtttgaagtgagtcctgctgatttgcagaatagtgaagttgcatttagaaaatttaagctgatttttgaagatatttgggcaaaaactgcataa

SEQ ID NO: 15584 - DNA, 2193 bp, Homo sapiens; identical to SEQ ID NO: 12655
  SIMILAR (622)..(1137): 1001254mologous to Homo sapiens p40,accession number U93564,Smith-Waterman Score=873.

SEQ ID NO: 15585 - DNA, 669 bp, Homo sapiens
  SIMILAR (157)..(804): 841254mologous to Homo sapiens p40,accession number U93574,Smith-Waterman Score=943.
atggggttttgccatgatggtaggagcattgcttttcgtggtgaaagaggcaatgatgaatctgccatcgaaatgattaaagtatctcatttgaagcagtatttggcagtcgtattcagagataaacccctggagctatgggatgttaggacttgtacccttcttagagagatgtccaaaaacttccctacaataactgctttgatacttactggaagatgtgcttcactaaaatggagaagtaaaccaaaaaaagaggaatttatgggatacagacagtggaatccaacacaagaaagcagcaaaggggatttcgagatacagttagagggaggtcccagtatggcaactgtgtaccggactgaaatgcagccagtccagattggtatagaactgctgccctccccactcagtttccatccaagccccaactctggtattcccaatgaccccagctggctgctctccactgcaaccctgcatcccccgacaggggtggaacgcagctcctcaccagcaacggaacaaaggtggacggagaatgactttgacgagctgagagaagaaggcttcagacgatcaaattactctgagctacgggaggacactcaaaccaaaggcaaagaagttgaaaactttgaaaaaaaatttagaagaatgtataactag

SEQ ID NO: 15586 - DNA, 484 bp, Homo sapiens
  SIMILAR (131)..(283): 461254mologous to Homo sapiens Human potassium channel K+ Hnov27,accession number Y34125,Smith-Waterman Score=101.
atggctcatgaatcagcagaggacttgtttcatttcaacgtagggggctggcatttctcagttcccagaagcaaactctctcagtttccagactccctgctgtggaaagaggcttcagccttgacctctttcagaaagccagaggctatttatcgacagagatggttccacatttaggcacgtgcactattacctctacacctccaaactctccttctccagttgtgcagaactgaacttgctgtatgagcaagcattgggtttgcagctgatgcctttgctgcaggtaagatgctcttgttttctgggagtggtggatcagtaacatggctttacatcactaaatattgtttcctgttatatattggttgctgagatgaccctcttaatgggcaaatgtaataagtgtgttaaagtaataaataatttcctcattagtataggggtgagtaaaaaggaaaaaaaagtaataaccaataccctg

SEQ ID NO: 15587 - DNA, 1443 bp, Homo sapiens
  SIMILAR (643)..(1656): 981254mologous to Homo sapiens p40,accession number U93564,Smith-Waterman Score=1710.
atgctagccagcacacaagggcaagattctaatccatcggtgaaccatgtcacgtggcccccgatttggctggaaaagttcgtatctataccaggaactgccattgctgccctaataaaattagaattatctcaacaagaaagaagtgggaaatggtcactaaacagccctcttacgcttgtgaagaacgcatgtgctgacccccagagcctggtcctgccgagctgctccctggtgctggggaaaggtggcacaactgtagagacagaagagtattttgggggcctggcagggggcagagtgttcacggtggtccagaagattggcagtcattccaaacagctcctggccagcatcagtgaacttcagtactctcagcttcactggcctgtgcaaatgcaaatacaggtcctgagaatggctgcacagctgcctacaccctcctcaaagcatcacgggacagacagctcagaccaagccaaaggcaaccaagcacctagcacacaggagatgccaaatgtgaaacaaccatttcaaccagcttggacaaaagagagaagccaagatggggctgagaaaccaatgcaggcaggcccagggacccaggagtcagggaccaggtgctaccagatgcttgctccgactcgtgttgctgctgtcttctctgtgcctcaactctgtcctctgtcactgcaggcagcttcctcccaaggtgctttcttttctactattatctggtacaaaactggttttctgtacatctcctcaacctctgaccagaaagccttggccctggaacctcttggtgatagtcgtttgcctgtgctaaataacaacctcacttcctgttttctcttttatctcaacacaacagggcaggaaactgaagctcttgggaaggtggaagttgcacgtggtctcacagtcaactgtgccagaataggaggccaggaaccatctctgctggaggaagacccaccacgcatcccttcaagaatgccaaggtccagagcaagtgcttcccttctatgggcacaggagggctgtgggagcccacagaatgtgcttctggccagagatgaactcaaaggtgtgacactaactggaaagataaaaaggatgattaaaaatcaaggtattggccagcgtgcagtagagaatctgcttttaaagcatctttccgatatgattcaccacttcatggtacagatggaggcgaatttggagactgtcattaggatttccatccgcccagcggccatctttcgcccaatcacagcggcggcgcggcgggggaggaggggagccggctgccagctcgcaccgcagcccgcggcggaccccaagccaccgcggacccatgcgcggagcctgctgggccgccgctgccgtcgtcctaaggctgtcattttttacttgccccttctgaaaattcactgttga

SEQ ID NO: 15588 - DNA, 708 bp, Homo sapiens
  SIMILAR (232)..(966): 921254mologous to Homo sapiens p40,accession number U93564,Smith-Waterman Score=1161.
atggaagtcacagccagccctcagggagtgtccgcagtatccaaaggagaccaaaagtggactgccctgggaaagggtctgacttttattaaagcagttggcagtatccaacgcaatcgctggaggggctggcagctgaaggctctctaccaatgcacaaccatagcaggggcaacaggtgtcttcctgagagtgtacagagcccttgatgtcctgcaaatggaggaggaggatgtccttaagttccttgcagcaggaatccacttaggtggcaccaaccttgacttccaaatgaaacaatacatttataaaaagaaatgtgacggcgtctatatcataaatctgaagaggacctgggagaagcttctgttggcagcttgtgccattgttgccattgaaaaccctgctgatgtccgcgtcatatcctccaggaatactggccagagggccatactgaagtttgctgctgccactggagccactccaattgctggccgcttcactcctggaatcttcactaaccagatccaggcaaccttccaggagccacagcatcttttctttactgattccagggctgaccactgcctctcacagaggcatcttatgttaacttacataccattgctccacgtaatacagattctccgctgtgctatgtggacattgccatcccatgcaagaagggagctcactcagtgggtttga

SEQ ID NO: 15589 - DNA, 757 bp, Homo sapiens
  SIMILAR (123)..(449): 991254mologous to Homo sapiens laminin-binding protein,accession number J03799,Smith-Waterman Score=543.
aagttccgggtcgacccacgcgtccgacctgcagaggggtccatacggcgttgttctggattcccgtcgtaacttaaagggaaatttttatcaatgtccggagtctcttgatggcctgctttgtgaaggaggaggatgtccttaagttccttgcagcaggaacccacttaggtggcaccaatcttgacttccagatggaacagtacatctataaaaggaaaagtgatggcatctatatcataaatctcaagaggacctgggagaagcttctgctggcagctcgtgcaattgttgccattgaaaaccctgctgatgtcagtgttatatcctccaggaatactggccagagggctgtgctgaagtttgctgctgccactggagccactccaattgctggccgcttcactcctggaaccttcactaaccagatccaggcagccttccgggagctcacggcttcttgtggttactgaccccagggctgaccaccagcctctcacggaggcatcttatgttaacctacctaccattgcgctgtgtaacacagattctcctctgcgctatgtggacattgccatcccatgcaacaacaagggagctcactcagtgggtttgatgtggtggatgctggctcgggaagttctgcgcatgcgtggcaccatttcccgtgaacacccatgggaggtcatgcctgatctgtacttctacagagatcctgaagagattgaaaaagaagagcaggctgctgctgaagagg

SEQ ID NO: 15590 - DNA, 1767 bp, Homo sapiens
  SIMILAR (976)..(1671): 411254mologous to Homo sapiens p40,accession number U93571,Smith-Waterman Score=346.
atgcaaactgctgcttttcttcttgatttttgctctctgactcttccccgcggttgctgcgtggccagcgtccctgtcagtccgttcggtagcccacatttagaatatgcctcgctgccatctcggctggcagcgagatacgccggagaagacgtaggcgagcagttatcgcgcgacaaatttgaggtcagaggcgaaagggaaatgtctggtgcaaacatccgctacacgggcgctgtaaaggctgggcaggtcgtacgtctgcggtatccagagaaatctattagggctcatccatgtccctttcacggtccaacagtcgtgagcacttgggaggtggaagcgaatctgataactggagagaccgaaatggaattggacctggaagtcatagtgaatttgcagcttctattggcagccctaagcgtaaacaaaacaaatcaagagctgcttcctttggtgctgatgtttgagctaccaattgctggaattcttcaaccggttcctgatcctaattccccctctattcagcatatatcacaaacgtacaatatttcagtatcatttaaacagcgttcccgaatgtatggtgctactgtcatagtacgagggtctcagaataacactagtgctgtgaaggaaggaactgccatgctgttagaacatcttgctgggagcttagcatcagctattcctgtgagcacacaactagatattgcagctcaacatcatctctttatgatgggtcgaaatgggagcaacatcaaacatatcatgcagagaacaggtgctcagatccactttcctgatcccagtaatccacaaaagaaatctaccgtctacctccagggcaccattgagtctgtctgtcttgcaaggcaatatctcatgcccaccgcagcaccgggcaacaacgagcaccctcgaggtctcagtcacaagaagcatcacaccaacgacgaacgaccgccactctccaatgacgcccccactaagcaacacctccctcctccgaccgtcgggacgtcagcgggcgcaagggacgtcgcacgacccgaccgacaaaggctcaaccctatgaacgcaagctacaacgtactcacgagcctcacggagtccggctaccaacaactctttgtggataagctgcttcctctgttggagctgtatgatgcaaaactcataaaaaactttgacagctgccagacagcccctcccgtccacccgctgaacaatctcggtcgcccccgcctcaacattcggcgacgtatacagccaccctcgcgcgagcacgggtgtatcatacccgcgcgcacggacctaactgcgtacacgaccctacggcgcactcacttcacgtttacgcacgcgacccaaccccggcacgatcgggtgacacgactacgtcgcacacctctactgcagaacttgcacttcccgcgctggaacgcgttaataagtgggtacgtactcgccgtcgacatccgtacacgcgcccgagagattgcgcggtccttccgccccggggtgaattactgggaaaactggctagccatatgtagaaagctgaaactggatcccttccttacaccttacacaaaaattaattcaagatggattaaagacttaattgttagacctaaaaccataaaaaccctagaagaaaacctaggcaataccattcaggacataggcatgggcaaggacttcatgactaaaacaccaaagcaatggcaacaaaagccaaaattgacaaatgggatctaa

SEQ ID NO: 15591 - DNA, 412 bp, Homo sapiens
  SIMILAR (409)..(287): 1001254mologous to Homo sapiens HSPC300,accession number AF161418,Smith-Waterman Score=210.
acgaggatggggctgcctgacgcgtctaggagaaggacttgtagaatggatccagagggatggcaggaagccatgagctcagcgtagggcaggataaccctacagagactgtctacgggagcctgagggtcagggcgggagggagaaggtgggacctgaaggaggaagtgaaaacccgcaacagccgaaggctgcgggagtcctctcaaagcatctccccggcgccccagcccaaccacctcagcggcctccctcctccccgcctccccttgctggcccgctgaccgaacgagttgagaaagtctgcgattttcttgatgctgctggtgattatctcaatgtactcccggttagcccagtcctggtgaatctcccgctgcacaggatcctcctgtcccgccatggccgccgc

SEQ ID NO: 15592 - DNA, 600 bp, Homo sapiens
  SIMILAR (113)..(769): 971254mologous to Homo sapiens CGI-27 protein,accession number AF132961,Smith-Waterman Score=1128.
cccaggctttttggctgtgaatggtctcaaattacatttgaccaagttaggatgtataaaatgttactgaaaaaggtaaaaatgcctaacgttcgtttcccaaccggttcctctggaaactttctttcccacataccacaccaccacccccagaattgccagaccccaaaaggcccaacacttttgaaaaaaaaggaaaacacgagaataaagcccctggttgctctttaaaggaagaaaaggaaggagctgaaaggcctgctggggccctttccccatgtggccctaatgttgtgtaaaagcaaacttccccaagcagcagcacgggcactgttgctaggtgagtgttctacccttttgtcacccgaggcttcaatgtactctaattctccgttcaaagggctgtcaatttctcgtttagtgttgcaagtccttgacgacaagacatatcgaacgagttgagaaagtctgcgattttcctgatgctgctggtgaatatctcaaatgtactcccggttagcccagtcctggtgaatctccccgctgcaaccggatcctcctgtcccgccatggccgccgcctgaggaagagcctcgtgcc

SEQ ID NO: 15593 - DNA, 285 bp, Homo sapiens
  SIMILAR (23)..(151): 1001254mologous to Escherichia coli htrD,accession number M95935,Smith-Waterman Score=216.
ccatgtccgtctgttggttactaaagagttaacccgctggttaaaacagcaaagcgtcatctcccaacgttggctgaatatttctcgtctgctgggctttgtgagcggcatattgatcattgcccaggcctggttcatggcgcgaattctttgtactgcgcgcatgggtggtctggttacgcgaacgggtgggttatcacgccgggcagcatatccgctttgccatccgccgtcaggttctcgaccgtctgcaacaagcagggccagcgtggattcagggtaaac

SEQ ID NO: 15594 - DNA, 468 bp, Homo sapiens; identical to SEQ ID NO: 4816
  SIMILAR (115)..(132): 831254mologous to Drosophila hydei testis-specific RNA,accession number X58114,Smith-Waterman Score=36.
  misc_feature (1)...(468): n = a,t,c or g

SEQ ID NO: 15595 - DNA, 840 bp, Homo sapiens
  SIMILAR (649)..(885): 681254mologous to Homo sapiens CGI-27 protein,accession number AF132961,Smith-Waterman Score=251.
atggcttataagctttgtgggaaggaattcaaccggatgcacaacctgatgggccacatgcacctgcactcagacagcaaacccttcaagtgcctctattgcccaagcaaattcaccctgaaggggaacctgacacgccacatgaaagtcaagcatggagtcatggagcggggccttcattcccaagaaattatcgacctacgaaccaacattgatccgcacggtactgcgcaggcattaatgcaggcggatttgcaacaagatttgcgcgtcgatagcggtaaaccactggtctttcatcagctgatacaggtggcggataaccgctggtactggtatcagcgttatcaccatttgctggtcgatggctttagtttcccggccattacccgccagatcgccaatatttactgcacatggctgcgtggcgaaccaacgcctgcttcgccatttacgcctttcgctgatgtagtggaagagtaccagcaataccgcgaaagcgaagcctggcagcgtgatgcggcattctgggcagaacagcgtcgtcaactgccgccgcccgcgtcactttctccggcacctttaccggggcgcagcgcctcggcagatattctgcgcctgaaactggaatttaccgacggggaattccgccagctggctacgcaactttcaggtgtgcagcgtaccgatttagcccttgcgctggcagccttgtggctggggcgattgtgcaatcgtatggactacgccgccggaaggcagtatttttcatacaaaatagccgatgcatccggcgtccaggcgcggcttggtttggctgtcggaaatcacccccaataa

SEQ ID NO: 15596 - DNA, 1176 bp, Homo sapiens
  SIMILAR (343)..(621): 281254mologous to Homo sapiens Amino acid sequence of salivary protein CON-1,accession number W50192,Smith-Waterman Score =94.
atgtggcccaggccggtctctacctcttgggctcaagcaatcaaggttggacaatcgatgctcgtaccctccttatttgccctatttctcggtaagatcggcgcgccagacgttacgaccattgatcagacccgcagacagcaaccagtcagaaggcaggcgcttgtgcagttcagcaacgtcatctttaccatgtacgaggtcaacatgcagaccctgaacaggcagcgcagtaatcgtgtcgagatttggcgttacgccttcaaaataggtggtcagcagcagtttcacctgtccctggagcgcgtctaccagcgcgggttcatcaatctgtacccactcgatgccgcgtttcgccagttctgccagcacttgctgataaaccggcagaatgtcattcagcaggctcaggcggtcaaattgttcacctttcactttccccagccacagccaggtaaccgttcccagcagcacaggtttcaccttgtggcccagcgccagcgcctaggacacttcgtccagcagctgcgtccaggtcagtttgaactgttggcctttaacgaactccggcaccatgtagtgatagttggtgttaaaccatttggtcatttccgctgccgctatttcactgagacccttcatcagtctggcctgttgggcttcccttatgtcactccgaatgtccacatctccttagccctagccatcattatgctcggtacccgtgatgcggcattctgggcagaacagcgtcgtcaactgccgccgcccgcgtcactttctccggcacctttaccggggcgcagcgcctcggcagatattctgcgcctgaaactggaatttaccgacggggaattccgccagctggctacgcaactttcaagtgtgcagcgtaccgatatatcccttgcgctggcagccttgtggctggggcgattgtgcaatcgtatggactacgccgccggatttatctttatgcgtcgactgggctcggcggcgctgacagctaccggacccgtgctcaacgttttgccgttgggtattcacattgcggcgcaagaaacgctgccggaactggcaacccgactggcagcacaactgaaaaaaatgcgtcgtcatcaacgttacgatgccgaacaaattgtccgtgacagcgggcgagcggcaggtgattaa

SEQ ID NO: 15597 - DNA, 2934 bp, Homo sapiens
  SIMILAR (67)..(705): 991254mologous to Escherichia coli K12 diaminopimelate epimerase,accession number AE000457,Smith-Waterman Score=1097.
atggatctgtttatgaacgtcgccatgttgcgtgcggcacgttatttatggagcgaagcggtcagtggatttggcgcacaggacccgaaatcactggcgctgcgtacccactgccagacctcaggctggagcctgactgaacaggatccgtataacaacgttatccgcaccaccattgaagcgctggctgcgacgctgggcggtactcagtcactgcataccaacgtctttgacgaagcgcttggtttgcctaccgatttctcagcacgcattgcccgcaacacccagatcatcatccaggaagaatcagaactctgccgcaccgtcgatccactggccggatcctattacattgagtcgctgaccgatcaaatcgtcaaacaagccagagctattatccaacagatcgacgaagccggtggcatggcgaaagcgatcgaagcaggtctgccaaaacgaatgatcgaagaggcctcagcgcgcgaacagtcgctgatcgaccagggcaagcgtgtcatcgttggtgtcaacaagtacaaactggatcacgaagacgaaaccgatgtacttgagatcgacaacgtgatggtgcgtaacgagcaaattgcttcgctggaacgcattcgcgccacccgtgatgatgccgcctccgacacccgtgaaatagtagatttgaccaacggaaatattaaaacgttcaacggcagcatcatcatatatgcgagatttgacaccggtcgtcacctgtttagcggaggcaatacggtcaagaccgcccatttccatatcgcgttcaaagaccattttgccgtcaactttgaattgcggcattacgcggttaacggattcgtccagcttggtcgtgtttctggagttataccagtcaagattggtttgctgataatgggttgccagcaacttcgcttcggtattgatgctgccccagttattagagagcggcaaattgatggtcggttccaggtgaacacgggttgcttcaggcatgtcgtctctggtgttaacaaagtgcactgcctggccgtaaatacgcgtatcaaacggaccaacatcattctggccatctgcagggcatcgcaggccagttgcgccgtcatgcgtggcgacattgaccagccaataacggcacgtgaccacaggtcaatgaccactgccagatacagccagccttcatctgtactgttggcggaactgctgacgcgtgcttatccttgtccgccgctgacaccacgtataccagccgctgcgggccacccggagcacgcggcacattgctttgatgctgaactcagcctgatgtttttcaataaagacatacttcatttcaggcgcttcgcgaagtatgtcgcggccttttggaggatagccagctcttcatcccgttctgccagctggcgtttgagacgtgcaatctcgccttgcacccaacccgtcgtgccaacggcgcggatcaatctggcttacaccaaagtcacctctccgattagcggtcgcattggtaagtcgaacgtgacggaaggcgcattggtacagaacggtcaggcgactgcgctggcaaccgtgcagcaacttgatccgatctacgttgatgtgacccagtccagcaacgacttcctgcgcctgaaacaggaactggcgaatggcacgctgaaacaagagaacggcaaagccaaagtgtcactgatcaccagtgacggcattaagttcccgcaggacggtacgctggaattctctgacgttaccgttgatcagaccactgggtctatcaccctacgcgctatcttcccgaacccggatcacactctgctgccgggtatgttcgtgcgcgcacgtctggaagaagggcttaatccaaacgctattttagtcccgcaacagggcgtaacccgtacgccgcgtggcgatgccaccgtactggtagttggcgcggatgacaaagtggaaacccgtccgatcgttgcaagccaggctattggcgataagtggctggtgacagaaggtctgaaagcaggcgatcgcgtagtaataagtgggctgcagaaagtgcgtcctggtgtccagcccggcatctggatggcagaaaaactgtcagaattaccctccgcctggagcgtggcgcattacgttgagttaaccggagaggttgattcgccattactggcccgcgcggtggttgccggactagcgcaagcagatacgctgcggatgcgttttacggaagataacggcgaagtctggcagtgggtcgatgatgcgctgacgttcgaactgccagaaattatcgacctacgaaccaacattgatccgcacggtactgcgcaggcattaatgcaggcggatttgcaacaagatctgcgcgtcgatagcggtaaaccactggtctttcatcagctgatacaggtggcggataaccgctggtactggtatcagcgttatcaccatttgctggtcgatggctttagtttcccggccattacccgccagatcgccaatatttactgcacatggctgcgtggcgaaccaacgcctgcttcgccatttacgcctttcgctgatgtagtggaagagtaccagcaataccgcgaaagcgaagcctggcagcgtgatgcggcattctgggcagaacagcgtcgtcaactgccgccgcccgcgtcactttctccggcacctttaccggggcgcagcggctcggcagatattctgcgcctgaaactggaatttaccgacgggaatactgcagctggctacgcaactttcaggtggtcaaattgcccgacgcgcgccgacttgatgaacgggtcgtctgcacgaatttgtgccgccatccccttgagtaccgagttcaggtttacatcttcgatatccaccaccacgcgttcagggttactcaacgcgaactgcttatatttcagctga

SEQ ID NO: 15598 - DNA, 1779 bp, Homo sapiens
  SIMILAR (1)..(516): 991254mologous to Escherichia coli UDP-MurNAc-Tripeptide:D- Ala-D-Ala-Adding Enzyme,accession number U67893,Smith-Waterman Score=865.
atgagcgtaagatttgtggccgataggggttacccgcatcggcatgaccaacgatcacgttatcagtcatttcaggctggatggctccagcctcgcattagcaaagatgagattatttcgcctgtggtgcagttttgctggtggattgaacacgctgacgggccgtccctctccccagcggccagcgacagcgactaccctcccggggagatgttcctggacagcgacgtgaacccagaggacccgggcgcagatggcgtgctggccggtatcaccctggtgggctgtgccacccgctgcaacgtgccgcggagcaactgctcctcccgaggggacaccccagtgctagacaaggggcagggggaggtggccaccatcgccaacgggaaggtcaacccgtcccagtccacagaggaggccacagaggccacggagcatcccgtggcgctgctcttcgctgctgacgcttgtctggtcgcctcatcttttgaagcagacgccgatgatgccgatgacgccgccgaactggctgacgatgcggcagccgtttttgaggattctgcgcttgtttccgacgctttcgcgttcgtttcggatgtcttcgctgcggaagcagacctcgctgctgcgctggcctgttcagtggcttcgccagccttcgttgtggctgttgaagcagacgatgcggcgctttctgccgattttccggcggcggtggcactggctgaggcctgcccggcacttgttgacgctgcactggcagacgacccacaaacaccgtctgcacaggcccagttcaaggtcatcaaccggaccggttgccagggtatgggtttgcgcctgaacatcaggaatatccagttggtaatcaaataccttgatattgagtaccggaccaaacagcggttcatcacctgccgctcgcccgctgtcacgggcaatttgttcggcatcgtaacgttgatgacgacgcatttttttcagttgtgcggccagtcgggttgccagttccggcagcgtttcttgcgccgcaatgtgaatacccaacggcaaaacgttgagcacgggtccggtagccgtcagcgccgccgagcccagtcgacgcataaagataaatccggcggcgtagtccatacgattgcacaatcgccccagccacaaggctgccagcgcaagggcccccgaaaagacggcggtgtgggggggacacagaggggaggtcgcatgagtctgctgcaaatcagtggcctgtttgttgtctggctgctctgcacgctgtttattgccacgctgacctggtttgagtttcgccgtgtgcgctttaacttcaatgtcttcttttcattgctgtttttgctcacctttttcttcggcttcccgctgaccagcgtgctggtatttcgctttgatgttggtgtcgcgccgccagaaatcttgttgcaggcgttgctttctgcgggctgcttctacgcggtttactatgtcacctacaaaacccgcctacgcaaacgcgttgctgatgtaccgcgccgtccgctgtttaccatgaaccgcgtggagaccaatcttacgtgggtgatcctgatgggtatcgcgctggtaagcgtcggcatcttcttcatgcacaacggctttttgctgttccggcttaactcctacagtcagatcttttccagtgaagtctccggcgtggcgttaaaacgcttcttttactttttcatgggaccctgtaagtggtccccaaggctcacgaagcatgatccggaacgctacgagtga

SEQ ID NO: 15599 - DNA, 1649 bp, Homo sapiens
  SIMILAR (487)..(1005): 991254mologous to Escherichia coli ThiJ,accession number U34923,Smith-Waterman Score=873.
atgttcaactgctcagtagccatgtgtggccagaggcggccgtatgggacagtgcagatggtgcatgagggtgttcgggcagtgggaacagccagtacagaggcccagtgggggcacatgcctgctgctacgggaacagtgaggagccccgtgtggctgcagtggagtcagctgacgcaccgcccgaatactgcgattttcgaagggcagctggaactggaaaacggctacatcaaagtacagtcgggtattcatggtaatgccacccagaccagcattcctggcgtctttgccgcaggcgacgtgatggatcacatttatcgccaggccattacttcggccgagttaacccgctggttaaaacagcaaagcgtcatctcccaacgttggctgaatatttctcgtctgctgggctttgtgagcggcatattgatcattgcccaggcctggttcatggcgcgaattctgcaacatatgattatggagaatattccccgtgaagccctgctgcttccctttacgttactggttctgacctttgtactgcgcgcatgggtggtctggttacgcgaacgggtgggttatcacgccgggcagcatatccgctttgccatccgccgtcaggttctcgaccgtctgcaacaagcagggccagcgtggattcagggtaaacctgcggggagctgggcgacgctggtactcgagcaaattgacgatatgcatgattactatgcacgctatctgccgcaaatggcgctggcagtgtcggtgccgttgctgattgtggtggcaatcttcccctctaactgggctgcggcgctcattctgctgggcactgcaccgttaaatccgttggttatggcgctggcattaatgcaggcggatttgcaacaagatctgcgcgtcgatagcggtaaaccactggtctttcatcagctgatacaggtggcggataaccgctggtactggtatcagcgttatcaccatttgctggtcgatggctttagtttcccggccattacccgccagatcgccaatatttactgcacatggctgcgtggcgaaccaacgcctgcttcgccatttacgcctttcgctgatgtagtggaagagtaccagcaataccgcgaaagcgaagcctggcagcgtgatgcggcattctgggcagaacagcgtcgtcaactgccgccgcccgcgtcactttctccggcacctttaccggggcgcagcgcctcggcagatattctgcgcctgaaactggaatttaccgacggggaattccgccagctggctacgcaactttcaggtgtgcagcgtaccgatttagcccttgcgctggcagccttgtggctggggcgattgtgcaatcgtatggactacgccgccggatttatctttatgcgtcgactgggcttgggggggcttgacggttaccggaaccgggcgtcaccgttttgccgatgagtatacacattgcggccaagaaacgctgccggaactggcaacccgactggcagcacaactgaaaaaaatgcgtcgtcatcaacgttacgatgccgaacaaattgtccgtgacagcggacgagcggcaggtgatgaaccgctgtttggcccgtactcaatatcaaggatttgattacaaactggtt

SEQ ID NO: 15600 - DNA, 412 bp, Homo sapiens; identical to SEQ ID NO: 15591
  SIMILAR (409)..(287): 1001254mologous to Homo sapiens HSPC300,accession number AF161418,Smith-Waterman Score=210.

SEQ ID NO: 15601 - DNA, 600 bp, Homo sapiens; identical to SEQ ID NO: 15592
  SIMILAR (28)..(774): 941254mologous to Escherichia coli alternate gene name srlQ,accession number U29579,Smith-Waterman Score=1161.

SEQ ID NO: 15602 - DNA, 454 bp, Homo sapiens; identical to SEQ ID NO: 10523
  SIMILAR (451)..(260): 371254mologous to Lycopersicon esculentum extensin (class II),accession number X55686,Smith-Waterman Score=88.
  misc_feature (1)...(454): n = a,t,c or g

SEQ ID NO: 15603 - DNA, 2256 bp, Homo sapiens
  SIMILAR (2139)..(1663): 1001254mologous to Escherichia coli Spermidine/putrescine transport protein A,accession number D90748,Smith-Waterman Score= 834.
atgtcgcctgaagaatggacgtatctagtggttcttcttatctccatccccatcggcttcctctttaagaaagccggtcctgggctgaagagatggggagcagccgctgtgggcctggggctcaccctgttcacctgtggcccccacactttgcattctctggtcaccatcctcgggacctgggccctcattcaggcccagccctgctcctgccacgccctggctctggcctggactttctcctatctcctgttcttccgagccctcagcctcctgggcctgcccactcccacgcccttcaccaatgccgtccagctgctgctgacgctgaaggaaggaaatggcctcaggcttcagcaaggggcccaccctgggctgctgcccgacgtgccctccctgatggagacactcagctacagctactgctacgtgggaatcatgacagcgtattgggagcaaagagaagagataaaggagaagcaggaccggattgagggcttgaagcggcacatcgagaagcaccgctaccacgtgcgcatgctagagaccatcctgcgcatgctggacaatgactccatcctcgttgacgccatccgcaagatcaaggacgacgttgagtactatgttgactcatcccaggaccccgacttcgaggagaacgagtttctctacgatgacctggacctcgaggacattcgtgaggccctggggctgatcgtggcacaggaagtgagggcccagaatgggctgtcacaggcgctggtcgccacctccccccccagccacagccacatggaggatgagatcttcaaccagtccagcagcacgcccacctcaaccacctccagctctcccatcccgcccagcccagccaactgtaccacggaaaactctgaagatgataagaagaggggacgttccacagacagtgaagtcagccaggcaggacttgggaagctgggcaggctggaaatcagtgtgagtgttttaagcatgaaggtgattgaagccatgagggtgagtaaggtcacccaggtccccaagagggcaggagcagtctccagcaaaaacggctccaagcctgtccacagcaaccagcaccctcagtccccagctgtgccgcccacctacctctccggccccccgcctgctgcctctgccttgagcaccactcctggcaacaatgtttccccgcccccgcagcacccccaagtgccctggccccaaggccagtccagctcccagccacaactcgggcacccctgctccctatgcccaggctgtgccccaccagctcccagtgggcccagcacgacccagccccggccccccagcgtccagcctagcggaggcggaggcggcggcagcggaggcggagggagcagcagcagtagtaacagcagtgccggtggaggggctggcaagcagaatggcgccaccagtgagttacagctcagttgtggcagacagcccggcagaggtggctttgagcagcagtgggggcaacaatgccagcagccaggccttgggcccccttccggcccccacaacccacctcccagcacctcctccccaacgcccagcttcagtgatgccaaggcagccggtgccctgctcaatgggcctccacagttcagcaccgccccagaaatcaaggcccctgagcctctgagctccttgaagtccatggcggaacgggcagccatcagctctggcattgaggaccctgtgccaacgctgcacctgaccgagcgagctgtcagaggtgaacataccgctgtcgctgggtgtctgtccactgggccctgtgccctcaccaaggagcagctctatcagcaggccatggaagaggccgcctggcaccacatgcctcacccctctgactctgagcgtattcggcagtacctcccccggaacccctgtccgacgcccccctaccaccaccagatgccacccccacactcggacactgtggaattctaccagcgcctgtcgaccgagacactcttcttcatcttctactatctggagggcactaaggcacagtatctggcagccaaggccctaaagaagcagtcatggcgattccacaccaagtacatgatgtggttccagaggcacgaggagcccaagaccatcactgacgagtttgagcagggcacctacatctactttgactacgagaagtggggccagcggaagaaggaaggcttcacctttgagtaccgctacctggaggaccgggacctccagtga

SEQ ID NO: 15604 - DNA, 1901 bp, Homo sapiens
  SIMILAR (79)..(3096): 661254mologous to Mus musculus sperm tail associated protein,accession number AB029919,Smith-Waterman Score=3295.
ccacactttgcattctctggtcaccatcctcgggacctgggccctccattcaggcccagccctgctcctgccacgccctggctctggcctggactttctcctatctcctgttcttccgagccctcagcctcctggcctgcccactcccacgcccttcaccaatgccgtccagctgctgctgacgctgaagctggtgagcctggccagtgaagtccaggacctgcatctggcccagaggaaggaaatggcctcaggcttcagcaaggggcccaccctggggctgctgcccgacgtgccctccctgatggagacactcagctacagctactgctacgtgggaatcatgacaggcccgttcttccgctaccgcacctacctggactggctggagcagcccttccccggggcagtgcccagcctgcggcccctgctgcgccgcgcctggccggccccgctcttcggcctgctgttcctgctctcctctcacctcttcccgctggaggccgtgcgcgaggacgccttctacgcccgcccgctgcccgcccgcctcttctacatgatccccgtcttcttcgccttccgcatgcgcttctacgtggcctggattgccgccgagtgcggctgcattgccgccggctttggggcctaccccgtggccgccaaagcccgggcccggaggcggccccaccctccaatgcccaccccccagcagtccggagaaggcggcttccttggagtatgactatgagaccatccgcaacatcgactgctacagcacagatttctgcgtgcgggtgcgcgatggcatgcggtactggaacatgacggtgcagtggtggctggcgcagtatatctacaagagcgcacctgcccgttcctatgtcctgcggacggcctggaccatgctgctgagcgcctactggcacggcctccacccgggctactacctgagcttcctgaccatcccgctgtgcctggctgccgagggccggctggagtcagccctgcgggggcggctgagcccagggggccagaaggcctgggactgggtgcactggttcctgaagatgcgcgcctatgactacatgtgcatgggcttcgtgctgctctccttggccgacacccttcggtactgggcctccatctacttctgtatccacttcctggccctggcagccctggggctggggctggctttaggtgggggcagccccagccggcggaaggcagcatcccagcccaccagccttgccccggagaagctccgggaggagtaagctgtcacgaccctccctctgccagctggtcccgggaattctgtgaaccaggctgctgtctcctccccagaaagagtccttaccttggagagggtcctggagagaatttcctcttccccagctaaataccctgcctgcaactgaagcagacccgggggtgtcctccctgccctctgcccagaggcacctccactcctacaaaatcaaagtattgtccagacaagagtcactggcccctgctccagcttctgggtatccagagagcactgcacttccccaaaacggaaggggcccctgggcagtgggttttgggcaaattccctttctttgcatccacaatgtgggtcggagcttgggggcaggtcctgggagtgggaagcctcttccttgtgtctttcgctccacttttagctcatcgcaccaatattgcagacttggaaggaagcataacttccatttcacaaaggggaaactgaggtgcgggtgcgggcctggggacggccgtcccatggcttccatctgagccacctcgggaccccagcactcctggcgccctcttcttcatcgcttggcctatgacaggtcaccgtgtgtaaatctttcccaataaagtgttgcacaaaa

SEQ ID NO: 15605 - DNA, 697 bp, Homo sapiens
  SIMILAR (478)..(537): 1001254mologous to Homo sapiens BB1=malignant cell expression -enhanced gene/tumor progression-enhanced gene,accession number S82470,Smith-Waterman Score=105.
gctgggactgctcggccgcctcctgcccggcgagcagctcagaccatgtcgcctgaagaatggacgtatctagtggttcttcttatctccatccccatcggcttcctctttaagaaagccggtcctgggctgaagagatggggagcagccgctgtgggcctggggctcaccctgttcacctgtggcccccacactctgcattctctgggcaccatcctcgggacctgggccctcattcaggcccagccctgctcctgccacgccctggctctggcctggactttctcctatctcctgtgattccgagccctcagcctcctgggcctgcccactcccatgcccttcaccaaagccggacagatggctgctgacgctgaagctggtgagcctggccagtgaagtccaggacctgcatctggcccagaggaaggaaatggcctcaggcttcagcaaggggcccaccctggggctgctgcccgacgtgccctccctgatggagacactcagctacagctactgctacgtgggaatcatgacagcgtattgggagcaaagagaagagataaaggaggccagaccaccatcatattcgtgcaggtataagagcgcactgaccgaacccgcggaccaaaaagacgagcggctggcgcggaaccgggaggcagggagcgggaacaggcccaacacacaagggcgg

SEQ ID NO: 15606 - DNA, 612 bp, Homo sapiens
  SIMILAR (1596)..(868): 1001254mologous to Escherichia coli IS5 39.3kDa protein,accession number U70214,Smith-Waterman Score=1249.
  misc_feature (1)...(612): n = a,t,c or g
cgaaccctngacgcgctgccgccagactactcggtggtgcgcggctgcacaactgacaaatgcaacgcccacctcatgactcatgacgccctccccaacctgagccaagcacccgacccgccgacgctcagcgggctcgagtgctacgcctgtatcggggtccaccaggatgactgcgctatcggcaggtcccgacgagtccagtgtcaccaggaccagaccgcctgcttccagggcaatggcagaatgacagttggcaatttctcagtccctgtgtacatcagaacctgccaccgggccctcctgcaccacctgatgggcaccaccagcccctggacagccatcggacctccaaggggctcctgcttgttgaggggttacctctgcaacaggaaatccatgacccagcccttcaccagtgcttcagccaccacccctccccgagcactacaggtcctggccctgctcctcccagtcctcctgctggtggggctctcagcatagaccgcccctccaggatgctggggacagggctcacacacctcattcttgcttgcttcagcccctatcacataggttcactgggaaaatgattgttaaagtaagaattgc

SEQ ID NO: 15607 - DNA, 707 bp, Homo sapiens
  SIMILAR (1)..(177): 1001254mologous to Homo sapiens TC10-like Rho GTPase,accession number AJ276567,Smith-Waterman Score=328.
agtcaggtagcacatcacacgcgggaggagctgtaccaggtggaccagctcagcaatggcaaagggggcccccagagtcattctgctctgcctctttggggctgcgctctgcctgacagggtcccgagccctgcagtgctacagctttgagcacacctactttggcccctttgacctcagggccatgaagctgcccagcatctcctgtcctcatgagcgctttgaggctatcctgtctctggacaccgggtatcgcgcgccggtgaccctggcgcggaagggctgctggaccgggcctcctgcgggccaagacgcaatcgaacccggacgcgctgccgcaagactactcggtggtgcgcggctgcacaactgacaaatgcaacgcccacctcatgactcatgacgccctccccaacctgagccaagcacccgacccgccgacgctcagcggcgccgagtgctacgcctgtatcggggtccaccaggatgactgcgctatcggcaggtcccgacgagtccagtgtcaccaggaccagaccgcctgcttccagggcaatggcagaatgacagttggtaaggggctggaagggtggaagggcctgggcaagggatatggaggcagggcagccatgagggtagtgataccagacaggcccaacagggagacatggccctgctctgaggtgggaggcatgaccctggtctga

SEQ ID NO: 15608 - DNA, 1650 bp, Homo sapiens
  SIMILAR (2022)..(268): 1001254mologous to Homo sapiens precursor polypeptide (AA -19 to 791),accession number X05199,Smith-Waterman Score=3374.
agatgaaggaagagcaaagggacatcatacatggcagcagacaagagaaaatgagagccaagcgaaaggggaaacaccttataaaaccatcagatttcgtgagacttactatcacaagaacagtatgggggaaaccacccccatgattcaattatctcccaccgggtccctcccacaacacgtgggaattatgggagctacaattcaagataagatttgggtgaggactggacttcctggatttccagggacaccaggtcttcctgtaagtagtggatttccaggcagtcccggttttcctggtttacagggtcctccagtaagttatggtcccactggtataccagggccaattggtcccccaggaccaccaggtttgatggtaagctctggtccaccaggacttccaggacctaaggtaattttgggcttaaatttccagggacccaaaggtgaaaaagtgagtaaaggtcttcagggcccacctgggccacctgggcagatcagtgaacagaaaagaccaattgatgtagagtttcagaaaggagatcaggtgagtaatggtgaccgagggcctcctggacctccagggatacgtggtcctccagtaagtacaggtggtgagaaaggtgagaagggtgagcaaggagagccaggcaaaagagtaagtgaaggcaaagatggagaaaatggccaaccaggaattcctgtaagtagtggtgatcctggttaccctggtgaacccggaagggatggtgaaaaggtaagaatgttatgggtcctcctggccctcctggatttcctggagaaaggggtcagaaaggtgatgaaggaccacctggaatttccattcctggacctcctggacttgacggacagcctggggctcctgggcttccagggcctcctggccctgctggccctcacattcctcctagtaagctaggtgacacttgcttcaactgcattggaactggtatttcagggcctccaggtcaacctggtttgccaggtctcccaggtcctccaggtaaattaaggagctccaggtgctccaggctttcctggatctaaaggtgaacctggtgatatcctcacttttccaggaatgaagggtgacaaaggagagttgggttcccctggagctccagggcttcctggtttacctggcactcctggacaggatggattgccagggcttcctggcccgaaaggagagcctgtgagttgtacttttaagggtgaaagaggtccccctgggaacccaggtttaccaggcctcccagggaatatagggcctatgggtccccctggtttcggccctccaggcccagtaggtgaaaaaggcatacaaggtgtggcaggaaatccaggccagccaggaataccaggtaagtttggggatccaggtcagactataacccagccggggaagcctggcttgcctggtaacccaggcagagatggtgatgtaggtcttccaggtatgtgaggacttccagggcaaccaggcttgccagggatacctggtagcaaaggagaaccaggtatccctggaattgggcttcctggaccacctggtcccaaaggtatgttgctcacaaatggcaagagcacacagtggtctgaggacagttcttaaatatatct

SEQ ID NO: 15609 - DNA, 495 bp, Homo sapiens
  SIMILAR (811)..(1254): 751254mologous to Mus musculus Pro-Pol-dUTPase polyprotein,accession number Y12713,Smith-Waterman Score=554.
ttaagatgatgtagataaattacaagatgccgaggaggaccgacgctctttcagaaggcgcctctccaagcctttctccacttcaactaaagaacgtgtttcaatgagtctgcgatctcggtggcctcttattactgtcatctcattcatatccaaatcaggaaaccagagaaagttctgaaatgaggggccggcgttcttattaacgccagccatggcaggcactggaaggaggtgcggactaggggctttttccacttgagccaggtgccaacgggatatgagggtgcagggcagaataagagcccagcgttggcttcctggaagacccaaattcactggcgagagcttcatcagatgaccaccgagagtggcaaaagagtctgggcagctgatttggtttggctgtgtccccacccaaatctcgtcttgaattgtagctcccataattcccacgggttgtgggagggtcccagtgggagataattgaatcat

SEQ ID NO: 15610 - DNA, 6691 bp, Homo sapiens
  SIMILAR (2702)..(459): 991254mologous to Homo sapiens precursor polypeptide (AA -19 to 791),accession number X05199,Smith-Waterman Score=4177.
aggggggaaggaagagtagctccttcttcttcttcttttttttttcttccactcttaaaaagcttctttctcttcacccaagcctcactgtccctctccggctctagctctctccatataaaccctcaagattatgtcaattggttagagccagccgggaatttcgtgcgggtgctgaaggagctgcgggagccggagaagaatgaaactgcgtggagtcagcctggctgccggcttgttcttactggccctgagtctttgggggcagcctgcagaggctgcggcttgctatgggtgttctccaggatcaaagtgtgactgcagtggcataaaaggggaaaagggagagagagggtttccaggtttggaaggacacccaggattgcctggatttccaggtccagaagggcctccggggcctcggggacaaaagggtgatgatggaattccagggccaccaggaccaaaaggaatcagaggtcctcctggacttcctggatttccagggacaccaggtcttcctggaatgccaggccacgatggggccccaggacctcaaggtattcccggatgcaatggaaccaagggagaacgtggatttccaggcagtcccggttttcctggtttacagggtcctccaggaccccctgggatcccaggtatgaagggtgaaccaggtagtataattatgtcatcactgccaggaccaaagggtaatccaggatatccaggtcctcctggaatacaaggcctacctggtcccactggtataccagggccaattggtcccccaggaccaccaggtttgatgggccctcctggtccaccaggacttccaggacctaaggggaatatgggcttaaatttccagggacccaaaggtgaaaaaggtgagcaaggtcttcagggcccacctgggccacctgggcagatcagtgaacagaaaagaccaattgatgtagagtttcagaaaggagatcagggacttcctggtgaccgagggcctcctggacctccagggatacgtggtcctccaggtcccccaggtggtgagaaaggtgagaagggtgagcaaggagagccaggcaaaagaggtaaaccaggcaaagatggagaaaatggccaaccaggaattcctggtttgcctggtgatcctggttaccctggtgaacccggaagggatggtgaaaagggccaaaaaggtgacactggcccacctggacctcctggacttgtaattcctagacctgggactggtataactataggagaaaaaggaaacattgggttgcctgggttgcctggagaaaaaggagagcgaggatttcctggaatacagggtccacctggccttcctggacctccaggggctgcagttatgggtcctcctggccctcctggatttcctggagaaaggggtcagaaaggtgatgaaggaccacctggaatttccattcctggacctcctggacttgacggacagcctggggctcctgggcttccagggcctcctggccctgctggccctcacattcctcctagtgatgagatatgtgaaccaggccctccaggccccccaggatctccaggtgataaaggactccaaggagaacaaggagtgaaaggtgacaaaggtgacacttgcttcaactgcattggaactggtatttcagggcctccaggtcaacctggtttgccaggtctcccaggtcctccaggatctcttggtttccctggacagaaaggggaaaaaggacaagctggtgcaactggtcccaaaggattaccaggcattccaggagctccaggtgctccaggctttcctggatctaaaggtgaacctggtgatatcctcacttttccaggaatgaagggtgacaaaggagagttgggttcccctggagctccagggcttcctggtttacctggcactcctggacaggatggattgccagggcttcctggcccgaaaggagagcctggtggaattacttttaagggtgaaagaggtccccctgggaacccaggtttaccaggcctcccagggaatatagggcctatgggtccccctggtttcggccctccagggcccagtaggtgaaaaaggcatacaaggtgtggcaggaaatccaggccagccaggaataccaggtcctaaaggggatccaggtcagactataacccagccggggaagcctggcttccgtggtaacccaggcagagatggtgatgtaggtcttccaggtgaccctggacttccagggcaaccaggcttgccagggatacctggtagcaaaggagaaccaggtatccctggaattgggcttcctggaccacctggtcccaaaggctttcctggaattccaggacctccaggagcacctgggacacctggaagaattggtctagaaggccctcctgggccacccggctttccaggaccaaagggtgaaccaggatttgcattacctgggccacctgggccaccaggacttccaggtttcaaaggagcacttggtccaaaaggtgatcgtggtttcccaggacctccgggtcctccaggacgcactggcttagatgggctccctggaccaaaaggtgatgttggaccaaatggacaacctggaccaatgggacctcctgggctgccaggaataggtgttcagggaccaccaggaccaccagggattcctgggccaataggtcaacctggtttacatggaataccaggagagaagggggatccaggacctcctggacttgatgttccaggacccccaggtgaaagaggcagtccagggatccccggagcacctggtcctataggacctccaggatcaccagggcttccaggaaaagcaggtcggtctggatttccaggtaccaaaggtgaaatgggtatgatgggacctccaggcccaccaggacctttgggaattcctggcaggagtggtgtacctggtcttaaaggtgatgatggcttgcagggtcagccaggacttcctggccctacaggagaaaaaggtagtaaaggagagcctggccttccaggccctcctggaccaatggatccaaatcttctgggctcaaaaggagagaagggggaacctggcttaccaggtatacctggagtttcagggccaaaaggttatcagggtttgcctggagacccagggcaacctggactgagtggacaacctggattaccaggaccaccaggtcccaaaggtaaccctggtctccctggacagccaggtcttataggacctcctggacttaaaggaaccatcggtgatatgggttttccagggcctcagggtgtggaagggcctcctggaccttctggagttcctggacaacctggctccccaggattacctggacagaaaggcgacaaaggtgatcctggtatttcaagcattggtcttccaggtcttcctggtccaaagggtgagcctggtctgcctggatacccagggaaccctggtatcaaaggttctgtgggagatcctggtttgcccggattaccaggaacccctggagcaaaaggacaaccaggccttcctggattcccaggaaccccaggccctcctggaccaaaaggtattagtggccctcctgggaaccccggccttccaggagaacctggtcctgtaggtggtggaggtcatcctgggcaaccagggcctccaggcgaaaaaggcaaacccggtcaagatggtattcctggaccagctggacagaagggtgaaccaggtcaaccaggctttggaaacccaggaccccctggacttccaggactttctggccaaaagggtgatggaggattacctgggattccaggaaatcctggccttccaggtccaaagggcgaaccaggctttcacggtttccctggtgtgcagggtcccccaggccctcctggttctccgggtccagctctggaaggacctaaaggcaaccctgggccccaaggtcctcctgggagaccaggtctaccaggtccagaaggtcctccaggtctccctggaaatggaggtattaaaggagagaagggaaatccaggccaacctgggctacctggcttgcctggtttgaaaggagatcaaggaccaccaggactccagggtaatcctggccggccgggtctcaatggaatgaaaggagatcctggtctccctggtgttccaggattcccaggcatgaaaggacccagtggagtacctggatcagctggccctgagggggaaccgggacttattggtcctccaggccctcctggattacctggtccttcaggacagagtatcataattaaaggagatgctggtcctccaggaatccctggccagcctgggctaaagggtctaccaggaccccaaggacctcaaggcttaccaggtccaactggccctccaggagatcctggacgcaatggactccctggctttgatggtgcaggagggcgcaaaggagacccaggtctgccaggacagccaggtacccgtggtttggatggtccccctggtccagatggattgcaaggtcccccaggtccccctggaacctcctctgttgcacatggatttcttattacacgccacagccagacaacggatgcaccacaatgcccacagggaacacttcaggtctatgaaggcttttctctcctgtatgtacaaggaaataaaagagcccacggtcaagacttggggacggctggcagctgccttcgtcgctttagtaccatgcctttcatgttctgcaacatcaataatgtttgcaactttgcttcaagaaatgactattcttactggctctctaccccagagcccatgccaatgagcatgcaacccctaaagggccagagcatccagccattcattagtcgatgtgcagtatgtgaagctccagctgtggtgatcgcagttcacagtcagacgatccagattccccattgtcctcagggatgggattctctgtggattggttattccttcatgatgcatacaagtgcaggggcagaaggctcaggtcaagccctagcctcccctggttcctgcttggaagagtttcgttcagctcccttcatcgaatgtcatgggaggggtacctgtaactactatgccaactcctacagcttttggctggcaactgtagatgtgtcagacatgttcagtaaacctcagtcagaaacgctgaaagcaggagacttgaggacacgaattagccgatgtcaagtgtgcatgaagaggacataacattttgaagaattccttttgtgttttaaaatgtgatatatatatatataaaattcctaggatgcagtgtctcattgtccccaactttactactgctgccgtcaatggtgctactatatatgatcaagataacatgctgactagtaaccatgaagattcagatgtacctcagcaatgcgccagagcaaagtctctattatttttctactaaagaaataaggaagtgaatttactttttgggtccagaatgactttctccaagaattataagatgaaaattatatattttgcccagttactaaaatggtacattaaaaattcaattaagagaagagtcacattgagtaaaataaaagactgcagtttgtgggaagaattatttttcacggtgctactaatcctgctgtatcccgggtttttaatataaaggtgttaagcttattttgctttgtaagtaaagaatgtgtatattgtgaacagccttttagctcaaaatgttgagtcatttacatatgacatagcatgaatcactctttacagaaaatgtaggaaaccctagaatacagacagcaatattttatattcatgtttatcaaagtgagaggacttatattcctacatcaagttactactgagagtaaatttattttgagttttatcccgtaagttctgttttgattttttttaaaaaacaaacccttttagtcactttaatcagaattttaaatgttcatgttacataccaaattataatatctaatggagcaatttgtcttttgctatattctccaagattatctcttaagaccatatgccccctgttttaatgtttcttacatcttgtttttactcatttctgactggacaaagttcttccaaacaattctgagaaacaaaaacacacacgcagaattaacaattcttttccctgtgcttcttatgtaagaatcctcctgtggcctctgcttgtacagaactgggaaacaacacttggttagtctcttttaagttacaaaaagccaattgatgtttcttattctttttaaattttaaatattttgttataaatactcacaggataccttatttccctagctatcatctcctgacttaatgttttttaaacccaccaatataaatttaattaaagatatatgttgtaaggatggtctgttgtgtatctcttcagcctgtgtggaaaaaacccctgctcatttacagatgattaccaatctgcacatcaacaagtatctcttcccagggaatcagtttctccacgctttgatcactctgttagtagatagaaaacatatagtaatgtaaactttttccaatgaagaaaactacctattggaagacatttccaagataataaatttcttgacaacattgtgttaatggctaagaaaggaaacaactggcttctattt

SEQ ID NO: 15611 - DNA, 623 bp, Homo sapiens
  SIMILAR (2195)..(2374): 951254mologous to Homo sapiens Human GEF containing NEK-like kinase substrate sGNK,accession number Y95293,Smith-Waterman Score= 273.
atggcagaagatgaaggaagagcaaagggacatcatacatggcagcagacaagagaaaatgagagccaagcgaaaggggaaacaccttataaaaccatcagatttcgtgagacttactatcacaagaacagtatgggggaaaccacccccatgattcaattatctcccaccgggtccctcccacaacacgtgggaattatgggagctacaattcaagataagatttggggtcctcctggacttcctggatttccagggacaccaggtcttcctggagaacgtggatttccaggcagtcccggttttcctggtttacagggtcctccaggcctacctggtcccactggtataccagggccaattggtcccccaggaccaccaggtttgatgggccctcctggtccaccaggacttccaggacctaaggggaatatgggcttaaatttccagggacccaaaggtgaaaaaggtgagcaaggtcttcagggcccacctgggccacctgggcagatcagtgaacagaaaagaccaattgatgtagagtttcagaaaggagatcaggtgagtaatggtgaccgagggcctcctggacctccagggatacgtggtcctccagtaagtac

SEQ ID NO: 15612 - DNA, 687 bp, Homo sapiens
  SIMILAR (170)..(391): 741254mologous to Homo sapiens nonmuscle myosin heavy chain (NMHC),accession number M31013,Smith-Waterman Score=275.
gcccgttccagtagaaaagacagctttgctcctttgaaagcgcagaccgccgcacctccagccccttctccccggggaagtaggccccgctaagaatgtgggaaggtggtggggcggcgactgaagtcgcttccgattggcgttgtcccaaggaagcctgcgcggagttgatcggcggcaggcttcccaataagagcctgctaaggggaattggctgctacgcggctggggcccttgtttccggttacctaggcgggcagccatggtgaccggcgagcggcatgcgacgccgcctctgtggcctgtggaggcccgcttggcggcgctgcttcccgacctactggtctttcggaagcctcggggatgggaacccgagctcgccacggcccagggcgtcctcctaggcgtccatgtgacgggtgagggcgacggccggcacttgcacttaagtctcctggcctgcgggagaggcggccgttgggtctaacatatcttcagttattacattagtgacatcgtggagcgtgagtgatcattgtagggtaacaaggtgtggtgctgggctcctgggggtttataaaagaagggggccgggcaggttgtagtgatgtccagttagctcagcgtttggctcaggcgaatgaaattgtcctatcctggaactgctggatgctttgcaagcagtat

SEQ ID NO: 15613 - DNA, 570 bp, Homo sapiens
  SIMILAR (216)..(446): 291254mologous to Mus musculus mu-heavy chain precursor (AA - 19 to +65),accession number X06011,Smith-Waterman Score=65.
tagtagtttctaagttacaccatgttaatggataaaggaattactcagcttgaagggatctgtttcctttacactgccctgatgtgtggggagaaagggcccaaaaagtttaggattgggagttaacaccgtaaattcctgctttgttgggtccagggtttaaccagcattaaatggacaggttcacccctgaccctacaagtcggaacgtgacatggacaaactggccccatatccttcagttattacattagtgacatccgtggagcgtgagtgatcattgtagggtaacaaggtgtggtgctgggccccctgggggtttataaaagaagggggccagaagtactttaaaacaggtaccaaagggtcattcctttagcatcattcatctttggtttcttcaagttgccactgaaaagctagacctttgcctattatctgctaatctacccagtctcacattctattgactcattgttcaaaggggggggcaggaggagctaatttcctttgcacatttgtattttatttcaaaataaagtattctcttctaacaaaaaaaaaaaaaaa

SEQ ID NO: 15614 - DNA, 390 bp, Homo sapiens
  SIMILAR (150)..(371): 871254mologous to Mus musculus 5S ribosomal protein,accession number Y12431,Smith-Waterman Score=315.
cgcttccgcaaagctcagtgtaccattgtggagcgcctcactaactccatgatgatgcacggccgcaacaacggcaagaagctcatgactgtgcgcatcgtcaagcatgccttcgagatcatacacctgctcacaggcgagaaccctctgcaggtcctggtgaacgccatcatcaacatgtgtcccccctgcgccgtgtgaaccatgccatctggctgctgtgcacaggcgctcgtgaggctgccttccggaacattaagaccattgctgagtgcctggcagatgagctcatcaatgctgccaagggctcctcgaactcctatgccattaagaacaaggacgagctggagcgtgtggccaagtccaaccgatgattttcccagctgctgc

SEQ ID NO: 15615 - DNA, 892 bp, Homo sapiens
  SIMILAR (784)..(933): 761254mologous to Homo sapiens calbindin D28K,accession number S46006,Smith-Waterman Score=195.
acaggctttccttcccataactccagaccagctgagcaattataaggtgtttgcaaagaagacagctctatggcaaaatgacgatgttcattcccagcacaaaggagagtacaggaatgcagcaggtgagcccaaatataggaactctgtcactactcactcagaagggaaatggcagtcagagaaaggaaaagatctgggggtagggtactggtccatggcctgttacaaactgggccacatagcagggaatgagcagcagaaacatatttgtggaggtatagccaaaaagtggaaacaacccaaatgtccaccaactggcaaatggccagctgtggtcaaaccagcaacagaaagtgagggtgggggagcaaagaaggaagagaaagcacatcttccaagagtagttgagaaagagctgcacgagtcaagccgacacataaggcatagcatcgaaagtgttttattacaggcatttacacagaaggattacactgcagtgaaggagaagtatgccaagtacctgcctcacagtgcagagcggtatgccgccaaacgcttccgcaaagctcagtgccccatcgtggagtgcctcacttactccatgatgacgcacggccgcaacaaccgcaagaagctcatgatcatgcgcatcgtcaagcacgccttcgagatcatccagctgctcacaggcgacaaccctctgcaggtcctggtgaacgccatcatcaacagtggtccccgggaggactccacactcactgggcgagccaggatcgtgagacgacaggctgtggccgtgtccccattaagccgtgtgaatcaggccatctggccgcagtgcacaggagctcttgagcgctgccttccggaacatcaagaccattgctga

SEQ ID NO: 15616 - DNA, 563 bp, Homo sapiens
  SIMILAR (1)..(534): 1001254mologous to Mus musculus 5S ribosomal protein,accession number Y12431,Smith-Waterman Score=900.
gatgtgcagatcaatgacatttccctgcaggattacattgcagtgaaggagaagtatgccaagtacctgcctcacagtgcagggcggtatgccgccaaacgcttccgcaaagctcagtgtcccattgtggagcgcctcactaactccatgatgatgcacggccgcaacaacggcaagaagctcatgactgtgcgcatcgtcaagcatgccttcgagatcatacacctgctcacaggcgagaaccctctgcaggtcctggtgaacgccatcatcaacagtggtccccgggaggactccacacgcattgggcgcgccgggactgtgagacgacaggctgtggatgtgtcccccctgcgccgtgtgaaccaggccatctggctgctgtgcacaggcgctcgtgaggctgccttccggaacattaagaccattgctgagtgcctggcagatgagctcatcaatgctgccaagggctcctcgaactcctatgccattaagaagaaggacgagctggagcgtgtggccaagtccaaccgctgattttcccagctgctgcccaatatacg

SEQ ID NO: 15617 - DNA, 437 bp, Homo sapiens
  SIMILAR (35)..(436): 471254mologous to Mus musculus NG28,accession number AF110520,Smith-Waterman Score=227.
caagtgactccaaggagcatctgtagaaaagaagatggcccaggtcctgcacgtgcctgctcccttcacagggacccctggcccagcctccccacctgccttccctgccaaggaccccgatccaccctactccgtggagaccccctatggctaccgcctggacctggacttcctcaagtacgtggatgacatcgagaagggccacacgctgcgacgcgtggcagtgcagcgccgcccccgcctgagctcgctgccccgtggccctggctcctggtggacgtccactgagtcgctgtgctccaatgccagtggggacagccgccactcagcctattcctactgcggccgtggcttctaccctcagtatggtgctctggagacccgcggtggcttcaatccgcgggtggagcgcacgctgctggatgcccgtcgccgtc

SEQ ID NO: 15618 - DNA, 1058 bp, Homo sapiens
  SIMILAR (2)..(889): 1001254mologous to Homo sapiens potassium channel homolog; KvEBN2,accession number AF033347,Smith-Waterman Score=1565.
tgttccagggcgacccacgcgtgcgaacaaggagacgtcgctcagggagttgtttcctggtggatttaagaagccaaagccaggcacctagttccgtgaaagtccatacctgtgattaagaggtggtcctgtacccatcccatgtggggtgtaagggtcagtggtacaagtcaaattggttatatcctagctgtcccacagggaggtggtcacccagaatgcagtcgtgtaagaaatatatgtgagttgaccacatggaggaaatgggaggaggtggagaactagaaactctgttgagtttgaataaagttttcttccgttatgagaaagttaaatccttaaagaaaatgcatgctaaggaccccgatccaccctactccgtggagaccccctatggctaccgcctggacctggacttcctcaagtacgtggatgacatcgagaagggccacacgctgcgacgcgtggcagtgcagcgccgcccccgcctgagctcgctgccccgtggccctggctcctggtggacgtccactgagtcgctgtgctccaatgccaggacctgcgagcagcagctcgacttacaggcgcacaccacggaccgcctggcaacgggcgtcttcccagacgctggcgtcactgtagaccaggagcccctggtggcctgtccaggcataacagaaggctacacttgtcttctggtcacacctcactatgtcccctcagctcctatctctctgacagacacccacagacgtgtctgtagcatcctctgtcacactgggacccgtactggcagcaagagccgtagggaggactgggacacctggaagccaggaattgacaaacttgtgtcatggactctagaggatctccgagtagcgagtcaagtgtatcagctgggtagtgaccaaatcacaaaggacgcaagaaatcggcgattatgccgatcccaaggaagtcagcaaatacaggaccgggagagcgccgagaacctcattacgatattgaagagctacgccctcaccataaaagcagacgcggaaacatctttaatgtga

SEQ ID NO: 15619 - DNA, 1818 bp, Homo sapiens
  SIMILAR (705)..(839): 431254mologous to Murine leukemia virus gag p10 protein,accession number X14576,Smith-Waterman Score=97.
ctagtctttttccggcgttttggggattgtttggtggctcatggcacttttttcccttgtcccatgcgctggtgtgtacgtgttccgttccccctgtattggtcccgtggtttttgtcccttgttggaaccggttggatgggcttgtcgtcctttttccaaacctgtcgcagttatgcctccagttcctgatataaagggctgtaaacagacgcttgatataaggggcttgtaaaaggcgcttgatataaggggcttgctgcacataccacacccctccatgacacttggttgtgggggacgagtcgccgggcgcggtgtcgacgtgcggtggtgcgctggctggatcgatgcgtacgctgcgtgggtggcgcgccatggccgttgttcgatgcccggtgggtcgcgtgtgctgatatacgtaacacggccggtaatggtcattccactggcacgctttttgtttagtattacccttatttgcgtggtgttttgttgttttacatttttgtggtactccttttactttgtgcccgcgtttaccgtcgtcattactgttccgaacattgctatgactgccgtcgtcgaacacacgcaatgtcccgttaactgcccttatccctgccaagggcagcaaggcctgcagttgctccacacctccctcctcgggaaccggggccagctctgcctctgcctccacctcagcctccccgtcccccttccctgcctggttcagctcagggttgcaatagttgacgtactggtacagcggccgcaggcgctgggcctttcgctccagcctcaatgtctctaagggtgcagacaccatgctggccacagcgtggagcacgggagcccccaggctcttgcgcttcttggcttttttgtgctgtttggcagatggtgagggctcactctggctgtcctctggctcctcctcctgcagcggcagcttgggtggcagctcagcttcagccttaagatgggcacgaaggcccgggaggctgagagacttgtaagttttgcggttgcgtccgacccccacgccaccattgccgacatggtgctgcacagtgcgaccacgacgaccggtgctaccgttttgcttaataatgcgacggcgtacggcaggaccgccctgtgcacctattgcggctgcgcctactacaccgtcgagtttgcgaagaggtaaagtgccaacagggagaccgccggtgctttgagggtgagccgcggtaatgctaacaatggcagttacaattacacgtacagttacaactagttgtaatgcagcggcggtaatgccccctaagacggggacggcacatagggcgcccttaactccgggcacggtttgacgagacttgtgtttagttaaacctacggcccaaatgccaccaagtgcacccccttggaccgcgccaccgcgtgtagcggtagccccggtaattgttttgccggcgattagcaacctgggggcgtttgcgtagatgcctgttgcttgggggggtgggcggggttgggggcgctgggtacccagagtgcgccgcccatggcgacatcgacacatacatagtcgaaaacgccggcggttccgccgcccatactcgatgccgccaggtctcttgtgcttggtgacggctaggagatgcggagatacggtgtagggcaggcagccgactatgggagggacaaacggaagatgcggaccacttaagcttttgatacgtgaaaaaatttgtttgaatggggatataaccgatttgaggtgcccgatgtccgtattgcgcaatccgcgctggtgcccgtgcgcgttcat

SEQ ID NO: 15620 - DNA, 551 bp, Homo sapiens
  SIMILAR (576)..(632): 681254mologous to Homo sapiens Human secreted protein, SEQ ID NO: 5639,accession number G01558,Smith-Waterman Score=78.
tttttgaaaaagaaaaatatttattttcagcaagaccaaagtcccaagtgggggcaggtgccaaatttgcccccgccaccagagggcctaggcccacaggaagcctgaagccaaattcaggcgtggaaggaggggagccaccagtggggcgggacaagtcacctggttctgagggagagagcggggggacaaaggtggagcagtgcagacacttcaggatcttgtgaatgtccacctggggttgacttatccacctcggccttgtggtcactcacccccaagctgggcaagcccccaggctcctctccagcctcctctccgaggggagccagggcatgggtgggggtcactagtggactgggacagggcaaaagcgaaggcctgggcccagctcacctgccaagggcagcaaggcctgcagttgctccacacctccctcctcgggaaccggggccagctctgcctctgcctccacctcagcctccccgtcccccttccctgcctggttcagctcagggttgcaatagttgacgtactggtacagcggccgc

SEQ ID NO: 15621 - DNA, 227 bp, Homo sapiens
  SIMILAR (1)..(78): 651254mologous to Homo sapiens envelope protein,accession number AF072507,Smith-Waterman Score=84.
atgcagtccatgactaagatgtactgtggacccctggaccagcctgctagcccatgctccaatgttgatgacatcgaagtaaaactggaaataatgttattaacagaaagggatgatgggaaagaggtgttggatgttggagaggagagaagatatgaaatagaagaatatgacagcaaatggactagaaaatataattgcctagctgtcttaagggtccattcagg

SEQ ID NO: 15622 - DNA, 501 bp, Homo sapiens
  SIMILAR (262)..(498): 791254mologous to Homo sapiens envelope protein precursor,accession number AF072506,Smith-Waterman Score=298.
gaatgggggaccccacgagggccatagtttcctcccctcagaatggccagccaccgaagaaggaaaaatacttatgcctgcagctaaccaatggaaattacttaaaacccttcaccatatctttctcttaggcattaatagcacccatcagatggtcaaattattatttactagaccaggccttttcaaaactatcaagcagatagtcaaggcctgtgaagtgtgccaaagaaataatcccctgcactgcagcccatacatttcaatccctttatctttaacctccttgttaagtttgtctcttccagaatcaaagctgtaaaactacaaatagttcttcaaatggagccccagatgcagtccatgactaagatctaccatggacccctggaccggcctgctagcccatgctccgatgttgatgacatcgaaggcacccctcccgaggaaatctcaactgcacaacccctactacgccccaattcagcaggaagcagttag

SEQ ID NO: 15623 - DNA, 1017 bp, Homo sapiens
  SIMILAR (8)..(820): 871254mologous to Mus musculus MNCb-1930 protein,accession number AB046738,Smith-Waterman Score=1278.
atgcctggccaagacaacatttttcaggaagttctggttgatggggcacccgttcaagagctgcagagaacaagtttgccaagtgcctcagacctgtctcaaatgctgcttctggtgcctggagaagttcatcaaattcttaataggaatgcctacatcatggaatcctggctttcttcttcttcacccaccgtatcacgatcgtgcagatacagcaccagccctcaattattactggggtcctatactggtatggactctggggagagatgggggttcgggaagcacgaggtgtcggacttgctggtgcagtatctgcttgtgagagttgccgcccaagttcttgatgaatttttgctttgtgaggtgtgccccccagcatcgggtgtcgtcaatcagcaggatagtagccggttcctgattactcatgggtatctcttggacgtctgtgaaagttttttcgggaataaaggtgaccaccacttcgtgccacctgattcacgacggcggacgcggcaatcgcctcgtaaactttcgcacgatcgcgcattattatcatgccgtagtgattgctgcggatggcatttcaggcacgccgcagccgttatcctggacggtcagtttgacctgatttcgttttgcgccaccgtcaccacgacttcactcgcttgcgaatgtttgaggcgttacttaatgcctcacgggcaatttgcaacaagtggattgcctgagcgaaggcaccaggcgaggcggcaattgataatccagcttcaccgggaaccaaatttggcgctgtactcttcgcaactcgcctccagcgccggacgtatccaggctcgtgcacccgcagagaatcggaacaaggtgttttcacgggaggagcccaccattgctatgccgccacaaagtaacgtggtgtcgccatggaatggtagcatagaagccgaatggagtattatagttatgccgatcgtcgattcatggcagcgtgatgtactgtatgaaggaggaatttga

SEQ ID NO: 15624 - DNA, 967 bp, Homo sapiens
  SIMILAR (830)..(1270): 611254mologous to Mus musculus MNCb-1930 protein,accession number AB046738,Smith-Waterman Score=384.
ttacgccagaccaataaagaacccggcaatagtcgcactcatcaggttggaaagcgttgctgctgccagcgcccgtaaaccaagctgggcgatttccggcgcgcgttttggcgaaatagccgaaaatgcgccaacgacaacaccgatagaaccaaagttagcaaaaccacaaagcgcaaaggagataatcgcaatggttttcacttccagcgtgccgcccgtttgcaggtatggggagaaactcaggtaagcgacgaattcgttattcgccagtttctgcccaatcaggctacccgcaagattggcatcactccagtccacacccatgatccacgccagcggtgccagcacatagccaaaaatactttccagagaggcattggcgaaaccaaaccagccgccaattccgccgataatgccgttgatcagcgcaataattgcgacaaacgccattaccaccgtcgccacaccagcggcgatttttagcccggtcatcgcaccgctcgccgccgcttcgataaagctttttggcggcgtttcgctggaacgacagattttcaaatgtgacctgcgaaggctcggttgccgggctaagaatacgtgcaaacaaaatcccgcccagggatcgccatcagcgatgccgctaacaggtagtcaattggtacgcccattccggcataaccaattcatcatcgaaccagcaatggacgccatcccggtaccaaattgcggtaaacaactcgttgcgattcatgcgatcgataaacggtttaacgatcgccgggatctcattttgcccgaggaaaatagtagtaaccgcaacaaaagattcgattttgctgatgttgagggctttctggaaaatgctgccaaggatgcgaatcagcagccccatcacgccaatgtagtacagcagactgatgagcgcagtaacgaaaataatcgccggaagtggggatcctctaga

SEQ ID NO: 15625 - DNA, 843 bp, Homo sapiens
  SIMILAR (124)..(192): 561254mologous to Homo sapiens Human secreted protein, SEQ ID NO: 4884,accession number G00803,Smith-Waterman Score=73.
ctgctgtcttcctgtccacttccaacgaagcggtctataagatctttgatgacagcccctgcccatttactgcgaaaacctgcaacccagagaccttcccctcctccaatgagtcccgccaatgccccaatgcccgttgccagttcgccttctacggtggtgagtcgggctaccaccgggccctgctgggcctgcagatcttcaatgccttcatgttcttctggttggccaacttcgtgctggcgctgggccaggtcacgctggccggggcctttgcctcctactactgggccctgcgcaagccggacgacctgccggccttcccgctcttctctgcctttggccgggcgctcaggtaccacacaggctccctggcctttggagcgctcatcctggccattgtgcagatcatccgtgtgatactcgagtacctggatcagcggctgaaagctgcagagaacaagttttcttatgtgcctcatgacctgtctcaaatgctgcttctggtgcctggagaagttcatcaaattccttaataggaatgcctacatcatgattgccatctacggcaccaatttctgcacctcggccaggaaatgcctgcttcctgctcatgagaaacatcatcagagtggatgtcctggataaaattactgacttcctcttcctgtagggcaaacttctgatcgttggtattgtggggatcctggctttcttcttcttcacccaccggatcaggatcgtgcaggatacatcaccacccctcaattattactgggttcctatactgacggtgatcgttggctcctacttgattgcccacgggttttttcagcgctattg

SEQ ID NO: 15626 - DNA, 1792 bp, Homo sapiens
  SIMILAR (771)..(1481): 821254mologous to Homo sapiens COP9 complex subunit 3,accession number AF098109,Smith-Waterman Score=955.
tttcgtgggatgggggacgagcggccccactactacgggaaacacggaacgccacagaagtatgatcccactttcaaaggacccatttacaataggggctgcacggatatcatatgctgtgtgttcctgctcctggccattgtgggctacgtggctgtaggcatcatagcctggactcatggagaccctcgaaaggtgatctaccccactgatagccggggcgagttctgcgggcagaagggcacaaaaaacgagaacaaaccctatctgttttatttcaacattgtgaaatgtgccagccccctggttcttgctggaattccaatgtcccactccccagatctgcgtggaaaaatgccccgaccgctacctcacgtacctgaatgctcgcagctcccgggactttgagtactataagcagttctgtgttcctggggttcaagaacaataaagaaagccaatggagtcctagaggcgggcaactcgccatgcgcatatttgaagattacaccgtctcttggtactgattatcatggctgtgggatacgtcatgtgctccttgctcacccactggtcaccttcttcttgctgtgcctctgcatcgcctactgggcagcactgctgtgtatctgcccccagacactgatctctgaccccagggatgctaaagaccaactttgcctagaagtgacctgcagcttagggatagggcggaaactgaccttcccctcctccaatgagcccgccaatgccccaatgcccgttgccagttcgccttctacggtggtgatcgggctaccaccgggccctgctgggcctgcagatcttcaatgccttcagttcttctggttggccaacttcgtgctggcgctgggccagtgcagagaacaagtttgccaagtgcctcatgacctgtctcaaatgctgctctggtgcctggagaagttcatcaaattccttaataggaatgcctacatatgggatcctggctttcttctcttcacccaccgtatcaggatcgtgcaggatacagcaccacccctcaatattactgggttcctatactgccggtaccatgggcctgcccgctggatgcccccagctgggcccagggtgcccctgagctggagcaggaacgccggcaccggcaattgtgtcctggttcgccgaccacccccgggccccctttggcctacaccgctggtggagcttgggcagagctcaggcaagaaggcaggtgagggctgctgcagggatccgggagttgctgggtacccgcaggcactcaggccttccctcctgcccccggaaagccgtggagagctgctccgacgtcacccgcctggtggtgtacgttctcaggactgcacaggtagagaaactgaggccaagagggagactggcctgaagtcacacagggaggaggacagaggagttggagcttgaactggatgtgggccctctagatccacacatatggcggctttggtgggaagcgaaacgccgccaaaagctttatcgaagcggcggcgagcggtgcgatgaccgggctaaaaatcgcgctggtgtggcgacggtggtaatggcgtttgtcgcaattattgcgctgacaacggcattatcggcggaattggcggctggtttggtttcgccaatgccctctgcaaagtatttttggctatgtgctggcaccgctggcgtggatcatggtgtggactggagtgatgccaatcttgcgggtagcctgattgggcagaactggcgattaacgacatgcaggcatccaagataa

SEQ ID NO: 15627 - DNA, 1668 bp, Homo sapiens; identical to SEQ ID NO: 9402
  SIMILAR (763)..(1635): 661254mologous to Homo sapiens cytokeratin 8,accession number M34225,Smith-Waterman Score=866.

SEQ ID NO: 15628 - DNA, 3910 bp, Homo sapiens
  SIMILAR (1450)..(3099): 981254mologous to Homo sapiens KIAA0433,accession number AB007893,Smith-Waterman Score=2842.
ggtcgacgcagcagaagacggctcgaagcaacatggacaacatgttcgagagctacatcaacaaccttaggcggcacgtggagactctgggccaggagaagctgaagctggaggcggagcttgcgcaacatgcaggggctggtggaggacttcaagaacaagtatgaggatgagatcaataagcgtacagagatggagaacgaatttgtcctcatcaagaaggattgtggatgaagcttacattaacaaggtagagctggagtctcgcctggaagggctgactgatgagatcaacttcctcaggcagctgtatgaagaggagatccgggagctgcagtcctggatctcagacacatctgtggtgctgtccatggacaacagccgctccctggacatgaacagcgtcatcgctgaggtcaaggcacagtacgaggagatcgccaaccgcagccaggccgaggctgagagcatgtaccagatcaaggatgaggagctgcagagtctggctgggaagcatggggataacctgcggtgcacaaagacttgagatctcttgagatgaacccggaacatcagccggctccaggctgagattgagggcctcaaaggccagagggctttcctggaggccgccattgcagatgccgagcagtgtggagagctggccattaaggatgctaacgccaagttgtcgagctggaggccgccctgcagcgggccaagcaggacatggcgtggcagctgcgagctgatgaacgtcaggctggccctggacatcgagatcgccacctacaagaagctgctggagggcgaggagagccggctggagtctgggatgcagaacatgagtattcatacgaagaccaccagcggctatgcaagtggtctgagctcggcctgtgggggcctcacaagccccggcctcagctacggcctgggcgccagctccttcagccgcaccagctactccagggccgtggttgtgaagatcgagacacgtgatgggaagctggtgtccgagtcctctgacgtcctgcccaaggacattgtggctgtgctgaatgaagagggaggctaccatcagattggaccagcagaatactgtactgactcctttattatgtcagtgaccatagcatttgctacccagttggaacagattcacctctgctgtggagaccagtcacttggaagtacagaaatacctttaactggattacttaaaaagggcagtacagaaatcaaccagcacccagtcacagtcgaaggtgcttttacccttgaccctccaaacagagccaaacagaagcttgcacctattcctgtggagctagccccaacttctttaattgaattaaagacccagaatgaacatgagccagagcattcaaagaagaaagttttaacccccataaaggagaagacacttactgggccaaaatcaccaacagtgtcccctgttccatctcacaaccagtcacctccaacaaaagatgatgcaacagaaagtgaagtggaaagtttacagtatgataaggacaccaaaccaaatccaaaagccagttcttctgtacctgcttcactggcccagctagtgactacatccaatgcttcagaagtagcttcaggacagaagattgctgtaccagcaacatcacatcatttttgcttttcaatagacttaaggagtatacatgccttggagattggttttccaatcaactgtatattaaggtactcatatccattctttggaagtgcagctcctattatgactaatcctcctgtagaagttcggaaaaacatggaagtttttcttccccagtcttactgtgcatttgattttgcaactatgcctcatcagctgcaagacaccttcttaaggattccattactggttgaactatggcacaaggataaaatgagtaaagatttacttctgggaattgcgagaatccagctttctaacatcttgtcttcagaaaaaactcgttttttaggttctaatggtgaacagtgttggcgtcaaacttacagtgaaagtgtgcctgttatagcagcacagggaagtattgactgctttaatgaaagcattattcaaggggatgaaaagcttaatgatgctgaaaataagtataagattttggaaaaagagttccaacagttcaaggaccagcaaaacaacaaaccagaaatccgtctacagtctgaaataaatcttctcaccttggaaaaggttgaacttgaaagaaagttggaatctgcaactaagtctaaactgcattacaagcagcagtggggacgagctttgaaagaacttgccagacttaaacagggtgtatctgccgtacagcaaaagccgtcttctcttcctccagcaccttgtccttcagagatccagacagagcctcgtgaaacgttagaatacaaagcagcacttgagctagaaatgtggaaggagatgcaagaagatatatttgaaaatcagctgaagcagaaagaactggctcatatgcaggctcttgcagaggaatggaagaaaagggaccgagaaagagaatcactagtaaagaaaaagcttcaaagagaaaaaaaggaactgcaatcagaacgtcagcggaacctgcaagaactgcaggactctatccgtagggccaaagaggactgtattcaccaagtagaactagaaaggttaaaaatcaaacagctcgaagaggataaacaccgccttcagcaacagccgttacatgttggacttcctccaagctcaggacttactttctgcaaaaacaatcttattcgtgatttcatgcccatgatttcagagacagtctacatctgggactttcacatgcaggctctgattggattcgtctggagcagtttcgcgtgctcaaaaggccacagacgaaaccgaacacagaaaaagaccgaggtctcggtcctcaacgggcctcgaagagcctcgaacaagttcaatatgttatctacggagtacgagttcctggttgcggcggcggttgactggctatcgcaggattcaaagtggctgcaggattcgcacatagtacctgacgtaaaactgtgtgtcgtagccagtgcctaccggcaatcgtatcagtctctgggtaacgatatttcgctaggctatcgggcgaggaggctggagccatatgaccctgcatcacctgtggcctgtgttaggcgagttcagggtgaggggcaagctagttccgttacttccgaaagtacttgcagagctctaaatggcttaaaggcggagaagtatctgcgggattattacaatcgagtttataaaaccgctactgcctgcgctgtttataaacctgctttaactaacagcttacggcaagctattcgcagtcctcgaactattgctcaagaagggcgtattacgaatcccttacagctgcctacagcactactacctgcacgccttcctgttctcgtattactcaaacggattgagctgctgcaaatcgtcggcgtcaccctacggcttaaacatagtctcctgtatcacaacgtccgttcgccggagacagaagtcctgactgatgttttgttgggtagtgtactacctgagcgaccactgattgctgcaccaggactcgaactaatccagtcctatcccgtgtggacaacacttctcatactccccggtgctcaacttgtgatttcaactctacccgtcctctatctggctttgattaggctaatccgcgtgcctaatcaccatcgcgcgcttaattcgttacctcctacggggctgcaggagacgtattcgttgatacaacttccggaagtgataagtgcgatagacagggttattctggcgctcgcaactaatacattacaccctgcgaggaattactgtcgtacgttttaa

SEQ ID NO: 15629 - DNA, 804 bp, Homo sapiens
  SIMILAR (532)..(2): 881254mologous to Escherichia coli K12 putative collagenase,accession number AE000240,Smith-Waterman Score=752.
atgaagccacggaccctcgtggtgagtgttacagttcttaaagatggtgtgtccagagtttgttccttcagatgttcagatgtgtccagaatttcttccttccagtgggttcgtggtctcgctgacttcaggaatgaagccacagaccctcatggtctcctggatgacattttgacactcagacaagataagggcagttttatgatatgctggttaaagggtaaagctccccctggtgatcccgcacccccaagaatcactcctacagtcaggttctccacaatggatctcagtgctgcaagtcaccgcataccctctaagtgatggaaacagcattcccatcatcggacttggtacctactcagaacctaaatcgctatgggctacaaatcatgtcccagagatggtccgcccaaccctggagaggacactcagggtcctccagctagattatgtggatctttacatcattgaagtacccatggcctttaagccaggagatgaaatataccctagagatgagaatggcaaatggttatatcacaagtcaaatctgtgtgccacttggggaggcgatgggaagcttgcaaaggacgctggcttggtgaaatccctgggagtgtccaattttaaccgcaggcagctggagctcatcctgaacaagccaggactcaaacacaagccagtcagcaaccaggttgagtgccatccgtatttcacccagccaaaactcttgaaattttgccaacaacatgacattgtcattactgcatatagccctttgtggaccagtacgaatccaat

SEQ ID NO: 15630 - DNA, 906 bp, Homo sapiens
  SIMILAR (582)..(902): 751254mologous to Homo sapiens delta 4-3-oxosteroid 5 beta- reductase,accession number Z28339,Smith-Waterman Score=425.
gcccatctgctcacatttctatcactgcagctcacagacttcggttgtctttcacaccccaggtaagatcaactgctaaaaccaacaatgccttgacatccttctacatgaatccacataaggagaccagaaggcaggaggggccagccacagctgccacctttgcctctcctcttctcagggtccgtatgccattaccaggagcgatcaggtgggccgaggacatttgcttgcttcaccttccctgtttctttagattgaaattcagcctgccccacttctcaggaagatgccacgaggctgatccccctgagcagtttgtcctgtcctcttttcactggttttcttcctcattacctgggccaatccaacataaaattgataaattggacttcatcacaattaaaagtttttgtgcatcaaaggacactatgaagaaagtgagtcctgcaaatcaccgcatacctctaagtgatggaaacagcattcccatcatcagacttggtacctactcacttcggaagcttgtaaagatgctggcttggtgaaatccctcggagtatccagttttaacagcaggccagctggagctcatccagaacaacccaggactcaaacccaagccagtcagcaacgaggttgagtgccacccatattacacccaaccaaaacttttgaaatttcgccaacaacatgacattgtcatgattgcatatagccctttggggaccactaggaatccaacctggacaaatatgtcttctctgccttcgttaaaggatgcacttctaaaaaggtgcaataagatcacagctcaagttattttgcgtttcaacatccagcaaggggtggttgtcattcctaaaagctttaatcctgaaaagatcaaggaaaaccttcaggcct

SEQ ID NO: 15631 - DNA, 401 bp, Homo sapiens
  SIMILAR (376)..(98): 361254mologous to Homo sapiens choline acetyltransferase,accession number M96015,Smith-Waterman Score=80.
cggcacgagcgtggctcaaacgaccgccgctaagaacaaaacgttggctttggcttcgttgcaaagcagccgctcggtggccgtacaacgcttcatctctccgagcctcggtttcctcatctccagccctaaaatgacgacacgccccacaggtcttgggaggattaagtgaggggacatgaggtggtcatcggtgtcctgctcgtggtcattggtgaggagcccagcctgcagtcagaccttcttgccttcggcacccgtgggctgggcagaaaggccccacgtgtcccctggggccaccctgcattggcacaggcagctttgcaaccacacgctgacctgcagtgagccctccgctaacagaagcccaaagaccaacttccaccccgcgagggcaggcg

SEQ ID NO: 15632 - DNA, 1293 bp, Homo sapiens
  SIMILAR (3637)..(5520): 991254mologous to Homo sapiens transmembrane chloride conductor protein,accession number AC000111,Smith-Waterman Score= 3195.
tttttatttttttttttttttggatttgaagaaacctttatagatatagattccattttacaagaagggaaaattgaggcctggagcagaaggaagcagtggggtagagtcagaaccagcatccttaagccgggcagacttggccttagacagacatgccttacttaggtccagcagatgctaccaggaaggtatggctggcagtacctgcgtctgagctcaggacttcagaccaagatggaagtcccttagaccaataacataaaaatcactttttaaactcaggtgctgtgggtagggagcaagggcagctatactgtcctttcagaagctctcctggggctgtggaaagtgcccacgagcctggcagatcacggaggaaggaggcagaagttccaggcccagaacctgggtcccaggctgcattcagagaggattccttgaggccctggcagccaaggaaccctggtttatgtgccccgaaggctgtaatgaaaacattgagtgaccacagtgaagaagaccaagatggtggctgcgttggtgagctggttgagtcgcccactgcttttctacctcattcaggtttcagccgtgcaatgaccacgagcaggacaccgatgaccacctgcaggagcagagagaggctgatgagggtgaccagggtggtgtagtagtgagaggatggtccctgctccagcaccgccttcagccgcatggcgttggacatgaacagggccacgtccagcatgctctccgccacgctcttcttggtggcgtaatggttcaggttgatgggctggctcctggggtcggagcttccaggctcatgtcccctcacttaatcctcccaagacctgtggggcgtgtcgtcattttagggctggagatgaggaaaccgaggctcggagagatgaagcgttgtacggccaccgagcggctgctttgcaacgaagccaaagccaacgttttgtttttagcggcggtcgtttgagccacgcctcaccgcaacgagtctgccatcagccaagaggtcacatcttttttggaactcgctcccccctcacatcatgggagcagtcagtctactcttccagtagaaactgttttgccacttttggggggaatcttgagctaccagctcatcgctcaggtcttagatgacactttccttgaccccaccgggtgctccagcgcctctgcttccggttttcatagcccttataatatcacctattgcaattgcccatttccttgtctgtctccctctgcagatggagtgaaggtacctga

SEQ ID NO: 15633 - DNA, 3090 bp, Homo sapiens
  SIMILAR (664)..(3087): 961254mologous to Homo sapiens putative p150,accession number U93565,Smith-Waterman Score=3982.
atggggaaaaaacataacagaaaaactggaaactctaaaaatcagagcgcctctcctcctccaaaggaacacagctcctcaccaccaacggaacaaagctggacggagaatgactttggcaagctgagagaaggcttcagacgatcaaattactctgagctacaggaggacattcaaaccaaaggcaaagaagttgaaaactttgaaaaaaatttagaagaatgtaaaaatagaataaccaatacagagaagtgcttaaaggagctgatggagctgaaaaccaaggctcgagaactacaaagggtatcagcaatggaagatgaaatgaatgaaatgaagcgagaaggaaagtttagagaaaaaagaataaaaagaagtgagcaaagcctccaagaaatatgggactatgtgaaaagaccaaatctacgtctgattggtgtacctgaaagtgatggggagaatggaaccaagttggaaaacactctgcaggatagtatccaggagaatttccccaatctagcaaggcaggccaacgttcagattcaggaaatacagagaacgccacaaagatactcctcgagaagagcaactccaagacacatgattgtcagattcaccaaagttgaaatgaaggaaaaaatgttaagggcagccagagagaaagactttaaaacaacaaagatcaaaagagacaaagaaggccattacataaaggtaaagggatcaattcaacaagaagagctcactatcctaaatacatatgcatccaatacaggagcacccagattcataaagcaagtcctgagtgacctacaaagagacttagactcccacacattaataatgggagactttaacaccccactgtcaacattagacagatcgacgagacagaaagacaacaaggatacccaggaattgaactcagctctgcaccaagtggacctaatagacatctacagaactctccacctcaaatcaacagaatatacatttttttcagcaccacaccacacctattccaaaattaaccacatacttggaagtaaagctctcctcagcaaatgtaaaagaacagaaattataacaaactatctctcagaccacagtgcaatcaaactagaactcaggattaagaatctcactcaaaactgctcaactacatggaaactgaacaacctgctcctgaataactactggatacataacgaaatgaaggcagagataaagatgttctttgaaaccaacgagaacaaagacacaacataccagaatctctgggacgcattcaaagcagtgtgtagagggaaatttatagcactaaatgcccacaagagaaagcaggaaagatccaaaattgacaccctaacatcacaattaaaagaactagaaaagcaagagcaaacacattcaaaagctagcagaaggcaagaaataactaaaatcagagcagaactgaaggaaatagagacacaaaaaacccttcaaaaaattaatgaatccaggagctggttttttgaaaggatcaacaaaattgatagaccactagcaagactaataaagaaaaaaagagagaagaatcaaatagacgcaataaaaaatgataaaggggatatcaccactgatcccacagaaatacaaactaccatcagagaatactacaaacacctctatgcaaataaactagaaaatctagaagaaatggataaattccttgacacatacactctcccaagactaaaccaggaagaagttgaatctctgaatagaccaataacaggatctgaaattgtggcaataatcaatagctttccaaccaaaaagagtccaggaccagatggattcacagccgaattctaccagaggtacaaggaggaactggtaccattccttctgaaactattccaatcaatagaaaaagagggaatcctccctaactcattttatgaggccagcatcattctgataccaaagcctggcagagacacaaccaaaaaagagaattttagaccaatatccttgatgaacattgatgcaaaaatcctcaataaaatactggcaaatggaatccagcagcacatcaaaaagcttatccaccatgatcaagtgggcttcatccctgggatgcaaggctggtttaatatacgcaaatcaataaatgtaatccagcatataaacagagccaaagacaaaaaccacatgaatatctcaatagatgcagaaaatgcctttgacaaaattcaacaacccttcatgctaaaaactctcaataagttaggtattgatgggacatatttcaaaataataagagctatctatgacaaacccacagccaatatcatactgaatgggcaaaaactggaagcattccctttgaaaactggcacaagacaggaatgccctctctcaccactcctattcaacatagtgttggaagttctggccagggcaattaggcaggagaaggaaataaagggtagtcaattaggaaaagaggaagtcaaattgtccctgcttgcagatgacatgattgtatatctagaaaaccccattgtctcagcccaaaatctccttaagctgataagcaacttcagcaaagtctcaggatacaaaatcaatgtgcaaaaatcacaagcattcctatacaccaacaacagacaaacggagagccaaatcatgaatgaactcccattcacaattgcttcaaagagaagaaaatacctaggaatccaacttacaagggatgtgaaggacctcttcaaggagaactacaaaccactgctcaaggaaataaaagaggatacaaacaaatggaagaacattccatgctcatgggtaggaagaatcaatatcgtgaaaatggccatactgcccaaggtaatttacagattcaatgccatccccatcaagttaccaatgcctttcttcacagaattggaaaaaactactttaaagttcatatggaaccaaaaaaaagtccgcatcaccaagtcaatcctaagccaaaagaacaaagctggaggcatcacactacctgacttcaaactatactacaaggctacagtaaccaaaacagcatggtactggtaa

SEQ ID NO: 15634 - DNA, 2235 bp, Homo sapiens
  SIMILAR (601)..(1446): 951254mologous to Homo sapiens putative p150,accession number U93563,Smith-Waterman Score=1381.
atggggaaaaaacagaacagaaaaactggaaactctaaaaagcagagcgcctctcctcctccaaaggaacgcagttcctcaccagcaacggaacaaagctggatggagaatgactttgacgagctgagagaagaaggcttcagacgatcaaattactccgagctacgggaggacattcaaaccaaaggcaaagaagttgaaaactttgaaaaaaatttagaagaatgtataactagaataaccaatacagagaagtgcttaaaggagctgatggagctgaaaaccaaggctcgagaactacatgaagaatgcagaagcctcaggagccgatgcgatcaactggaagaaagggtatcagcgatggaagatgaaataaatgaaatgaaaccaaatctacgtctgattggtgtacctgaaagtgatggggagaatggaaccaagttggaaaacactctgcaggatattatccaggagaactttctcaatctagcaaggcaggccaacgttcagattcaggaaatacagagaacgccacaaagatactccttgagaagagcaactccaatacacataattgtcagattcaccaaagttgaaatgaaggaaaaaatgttaagggcagccagagagaaacgtcgggttaccctcaaagggaagcccatcagactaacagtggatctcttggcagaaaccctacaagccagaagagagtgggggtcaatattcaacattcttaaagaaaagaattttcaacccagaatttcatatccagccaaactaagcttcgaaacccatctcacgtgcagagacacacatcggctcaaaataaaaggatggaggaagatctgccaagccaatggaaaacaaaaaaaggcaggggttgcaatcctagtctctgataaaacagactttaaaccaacaaagatcaaaagagacaaagaaggccattacataatggtaaagggatcaattcaacaagaagagctaactatcctaaatgtatatgcacccaatacaggagcacccagattcataaagcaagtcctgagtgacctacaaagagacttagactcccacacattaataatgggagactttaacaccccactgtcaacattagacagatcaatgagacagaaagtcaacaaggatacccaggaattgaactcagctctgcaccaagcggacctaatagacatctacagaactctccaccccaaatcaacagcatatacatttttttcagcaccacaccacacctattccaaaattgaccacatactgggaagtaaagctctcctcagcaaatgtaaaagaacagaaattataacaaactgtctctcagaccacagtgcaatcaaactagaactcaggattaagaatctcactcaaaaccgctcaactacatggaaactgaacaacctgctcctgaatgactactgggtacataacgaaatgaaggcagaaataaagatgttctttgaaaccaatgagaacaaagacacaacataccagaatctctgggacgcattcaaagcagtgtgtagagggaaatttatagcactaaatgcccacaagagaaagcaggaaagatccaaaattgacaccctaacatcacaattaaaagaactagaaaagcaagagatcaacaaaattgatagaccgctagcaagactaataaagaaaaaagagaagaatcaaatcgatgcaataaaaaatgataaaggggatatcaccaccgatcccacagaaataaaaactaccatcagagaatactacaaacacctctacgcaaataaactggaaaatctagaagaaatggataaattcctggacaaatatactctcccaagactaaaccaggaagaagttgaatctctgaatagaccaataacaggagctgaaattgtggcaataatcaatagcttaccaaccaaaaagagtccaggaccagatggattcacagccgaattctaccagaggtacaaggaggaactgctggtttgtccaacattcctgtttgaaaaacatccagtgaactatgactttgaacaagaaacattacacttcagtcccatcagtctaagaagtagtgaagaattaaatctttccacctacaggctttatggttggtctgaggagcagtctctttgggtaattcgtacctgggccagggtgcagaagttcagggctgctgtgcccctcgtgaatgaacctcacacgactgaagcttaa

SEQ ID NO: 15635 - DNA, 2088 bp, Homo sapiens
  SIMILAR (4)..(1074): 961254mologous to Escherichia coli p-aminobenzoate synthetase,accession number K02673,Smith-Waterman Score=1783.
atgccctctctcaccactcctattcaacatagtgttggaagttctgccagggcaatcaggcagaagaaagaaataaagcgtattcaattaggaaaagaagaagtcaaattgtccctgtttgcagatgacattaccgtacatgtaaaaaaccccatcacctcagcccaaaatctccttaagctgataagcaacttcagcaaagtctcaggatacaaaatcaatgtggaaaaatcacaagcattcttatacacaaataacagacaaacagagagtcaaataatgagtgaactcccattcagaattgcttcaaagagaataaaatacctaggaatccaacttacaagggaagtgaaggacctcttcaaggacaactacaaaccactgctcaatgaaataaaagaagacacaaacaaatggaagaacattccatgctcatggataggaagaatcaatatcatgaaaatggccatactgccagaattggaaaaaactactttaaagttcacctggaaccaaaaaagagcctgcattgccaagacaatcctaagccaaaagaacaaagctggaggcatcacgctacctgacttcaaactatactacaaggctacagtaatcaaaacagcatggtactggtaccaaaacagagatacagataaatggaacagaacagagtctgcagaaataataccacacatctacaaccatctgatctttgacaaacgtgacaaaaacaagaaatggggaaaggattccctatttaataaatggtgctgggaaaactggctagccatatgtagaaagctgaaactggatcccttccttacaccttatacaaaaatcaattcaagatggattaaagacttaaatgttagacctaaaaccataaaaaccctagaagaaaacctaggcaataccattcaggacatatgcatgcgcaaggacttcatgtctaaaacactaaaagcaatggcaacaaaagccaaaattgacaaatgggatctaattaaactgaagagcttctgcacagcaaaagaaactaccatcaaaatgaacagtaaacggaactcagttcctcaccagcaacagaacaaaaaaactggaaactctaaaaagcagagtgcctctcctcctccaagggaacgcagttcctcaccagcaacagaacaaagctggatggagaatgactttgacgagctgagtgaagaaggcttcagacgatcaaattactctgagctacgggaggacattcaaaccaaaggcaaagaagttgaaaactttgaaaaaaatttagaagaatgtataactagaataaccaatacagagaagtgcttaaaggagctgatggagctgaaaaccaaggctcgagaactacatgaagaatgcagaagcctcaggagccgatgcgatcaactggaagaaagggtatcagcaatggaagatgaaatgaatgaaatgaagcgagaagagaagtttagagaaaaaagaataaaaagaaatgagcaaggcctccaagaaatatgggactatgtgaaaagaccaaatctacatctgattggtgtacctgaaagtgatggggagaatggaaccaagttggaaaacactctgcaggatattatccaggagaacttccccaatctagcaaggcaggccaacgttcagattcaggaaatacaaagaatgccacaaagatactcctcgagaagagcaactccaagacacataattgtcagattcactaaagttgaaatgaaggaaaaaatgttaagggcagccagagagaaaggtcggattaccctcaaagggaagcccatcagactaacagcggatctctcagcagaaaccctacaagccagaagagagtgggggccaatattcaacattcttaaagaaaagaattttcaacccagaatttcatatcccgccaaactaagcttcataagtgaaggagaaataaaatactttacagacaagcaaatgctgagagattttgtcaccagcaggcctgccctaaaagagctcctgaaggaagcgctaaacttggaaaggaacaactggtaccagccgctgcaaaatcatgccaaaatgtaa

SEQ ID NO: 15636 - DNA, 1515 bp, Homo sapiens; identical to SEQ ID NO: 6520
  SIMILAR (334)..(1212): 981254mologous to Escherichia coli K12 molybdate metabolism regulator, third fragment,accession number AE000300,Smith-Waterman Score=1510.

SEQ ID NO: 15637 - DNA, 1263 bp, Homo sapiens; identical to SEQ ID NO: 15137
  SIMILAR (307)..(1260): 941254mologous to Homo sapiens p40,accession number U93569,Smith-Waterman Score=1536.

SEQ ID NO: 15638 - DNA, 2145 bp, Homo sapiens; identical to SEQ ID NO: 15138
  SIMILAR (1048)..(1728): 991254mologous to Escherichia coli rfaD protein,accession number M33577,Smith-Waterman Score=1193.

SEQ ID NO: 15639 - DNA, 1356 bp, Homo sapiens; identical to SEQ ID NO: 2089
  SIMILAR (1462)..(2238): 991254mologous to Escherichia coli K12 putative regulator,accession number AE000300,Smith-Waterman Score=1346.

SEQ ID NO: 15640 - DNA, 1759 bp, Homo sapiens
  SIMILAR (772)..(1740): 911254mologous to Homo sapiens p40,accession number U93564,Smith-Waterman Score=1547.
atgatcatctcaatagatgcagaaaaagcatttgacaaaatccagcatccctatattattaaaactctcagcaaaatcaacatacaagggacataccttaatgtaataaaggccatctatgacaaacccacagccaacataatactgaatggtgaaaagttgaaagcattctctctgagaactggagcaagacaaggatgctcactctcaccactcctcttcaacacagtactggaagccctagccagagcaatcagacaagagaaagaaacaaagggcatccaaattggtaaagaggaagtcaaactgtcactgtttgctgacgatatgattgtttaccttgaaaaccctaaggactcctccagaaagcttctagaactgataaaagaatgcagcaaagtttctggatacaagattaatgtaccacaaatcagtagctcttctacacaccaacagcgaacaagcagagaatcaaatcaagaactcaacccctgttacaatagctgcaaaaataaaaataaaaataaaaataaaatacttaggaatatacctaacaaaagagtcaaaaggcctctacaaggaaaactacaaaacactgctgaaagaaatcacagacgacacaaacaaatagaatcacatcccttgctcatggacctgcagctgagggtcctgtctgttagaaggaaaactaacaacagaaaggacatccacaccaaaaacccatctgtacatcaccatcatcaaagaccaaaagtagataaaaccacaaagatggggaaaaaacagaacagaaaaactggaaactctaaaaagcagagcgcctctcctcctccaaaggaacgcagttcctcaccagcaacggaacaaagctggatggagaatgactttgacgagctgagagaagaaggcttcagacgatcaaattactccgacctacgggaggacactcgaaccaaaggcaaagaagttgaaaactttgaaaaaaatttagcagaatgtataactagaacaaccaatacagagaagtgcttaaaggagctgatggagctgaaaaccaaggctcgagaactacaaagggtatcagcgatggaagatgaaatgaatgaaatgaagcgagaagggaagtttagagaaaaaagaataaaaagaaatgagcaaagcctccaagaaatatgggactacgtgaaaagaccaaatctacgtctgattggtgtacctgaaagtgatggggagaatggaaccaagctggaaaacactctgcaggatattatccaggagaacttccccaatctagcaaggcaggccaacgttcagattcaggaaatacagagaacgccacaaacatactcctcgagaagagcaactccaagacacataattgtcagattcaccaaagttgaaatgaaggaaaaaatgttaaaggcagccagagagaaaggtcgggttaccctcaaagggaagcccatcagactaacagcggatctctcggcagaaaccctacaagccagaagagagtgggggccaatattcaacattcttaaagaaaagaattttcaacccagaatttcatatccagccaaactaagcttcataagtgaaggagaaataaaataccttacagacaagcaaatgctgagagattttgtcaccaccaggcctgccctaaaagaggtcctgaaggaagcgctaaacatggaaaggaacaaccggtacgagccgctgcaaaatcatgccaaaatgtaaagaccatcaagactag

SEQ ID NO: 15641 - DNA, 1998 bp, Homo sapiens
  SIMILAR (2185)..(3546): 991254mologous to Escherichia coli SfcA protein (fragment),accession number D90788,Smith-Waterman Score=2338.
atgggagactttaacaccccactgtcaacattagacagatcaacgacacagaaagtcaacaaggatacccaggaattgaactcagctctgcaacaagcagacctaatagacatctacaaaactctccaccccaaatcaacagaatatacattcttctcagcacctcatcacacttattctaaaattgaccacataattggaagtaaagcactcctcagcaaatgtaaaagaacagaaatcacaacaaactatctctcagatcaccgtgcaatcgaattagaaatcaggattaagaaacttactcaaaaccacacaactacatggaaactgaacaacctgctccggaatgactactgggtaaataatgaaatgaaggcagaaataaagatgttctttgaaaccaacgagaacaaagacacaacgtaccagaatctctgggacacatttaaagcagtgtgtagagggaaatgtacagcactaaatgcccacaagagaaagcaggaaagatctaaaatcaacaccctaacatcacaattaaaagaactagagaagcaagaggaaacaaattcaaaagctagcagaaggcaagaaataactaagatcagagcagaactgaaggagataaagacacaaaaaacccttcaaaaaatcagtgaatccgggaggaggagccaagatggccgaataggaacagctccggtctacagctcccagcgtgagcgacgcagaagacaggtgatttctgcatttccatctgagggcacagacaaacaaaaagacagcagtaacctctgcagacttacgtgtccctgtctgacagctttgaagagagcagtggttctcccagcacgcagctggagatctgagaacgggcagactgcctcctcaaaaggaaaactaacaaccagaaaggacatctacaccgaaaacccatctgtacatcaccatcatcaaagaacaaaagtagataaaaccacaaagatggggaaaaaacagaacagaaaaactggaaactctaaaacgcagagcacctctcctcctccaaaggaacgcagttcctcaccagcaacagaacaaagctggatggagaatgattttgacgagctgaaagaagaaggcttcagacgatcaaattactctgagctacgggaggacattcaaaccaaaggcaaagaagttgaaaactttgaaaaaaatttagaagaatgtataactagaatagccaatacagagaagtgcttaaaggagctgatggagctgaaaaccaaggctcgagaactacgtgaagaatgcagaagcctcaggagccgatgcgatcaactggaagaaagagtatcagcaatggaagatgaaatgaatgaaatgaagcgagaagggaagtttagagaaaaaagaataaaaagaaatgagcaaagcctccaagaaatatgggactatgtgaaaagaccaaatctacgtctgattggtatacctgaaagtgatgtggagaatggaaccaagttggaaaacactctgcaggatattatccaggagaacttccccaatctagcaaggcaggccaacgttcagattcaggaaatacagagaatgccacaaagatactcctcgagaagagcaactccaagacacataattgtcagattcaccaaagttgaaatgaaggaaaaaatgttaagggcagccagagagaaaggtcgggttaccctcaaaggaaagcccatcagactaacagcggatctctcggcagaaaccctacaagccagaagagagtgggggccaatattcaacattcttaaagaaaagaattttcaacccagaatttcatatccagccaaactaagcttcataagtgaaggagaaataaaatactttatagacaagcaaatgctgagagattttgtcaccaccatgcctgccctaaaagagctcctgaaggaagcgctaaacatggaaaggaacaaccggtaccagctgctgcaaaatcatgccaaaatgtaa

SEQ ID NO: 15642 - DNA, 3464 bp, Homo sapiens
  SIMILAR (1356)..(613): 991254mologous to Escherichia coli K12 6-phospho-beta- glucosidase A; cryptic,accession number AE000373,Smith-Waterman Score=1350.
atgtacagaaggagtagcagaccttcagcaaggtctcaggatgaaaaatcaatgtgcaaaaatcacaagcactcctatacaccaataacaaacagagagccaaaacatgagcgaactcccatttgcaattgctacaaagagaataaaatacctaagaatacagcttacaagggatgtgaaggacctcttcaaggagaactacaaaccactgctcaaggaaataagagaggacacaaacaaatggaaaaacattccatgctcatggataggaagaatcaatatcgtgaaaatggccatactgcccaaaaaataaaaactaccataagagaatactataaacacttctacacaaataaactagaaaatctagaagaaattgataaattcctggaaacatacaccctcctaagtctaaaccaggaggaagtcgaatctctgaatagaccaataacaagtagtgaaattgaggaagtaattaatagcttaccaaccaaaaaagtccaggaccagacaaagtcacaaccagattctatcagagaaggaaaactaacaaacagaaaggacatccacaccaaaaacccatctgtacatcaccatcatcaaagaccaaaagtagataaaaccacaaagatggggaaaaaacagaacagaaaaactggaaactctaaaacgcagagcgcctcttctcctcctccaaaggaacgcagttcctcaccagcaacggaacaaagctggatggagaatgactttgacgagctgagagaagaaggcttcagacgatcaaattactctgagctacgggaggacattcaaaccaaaggcaaagaagttgaaaactttgaaaaaaatttagaagaatgtataactagaataaccaatacagagaagtacttaaaggagctgatggagctgaaaaccaaggctcgagaactacgtgaagaatgcagaagcctcaggagccgatgcgatcaactggaagaaagggtatcagtaatggaagatgaaacgaaatgaatgaaatgaagcgagaagggaagtttagggaaaaaagaataaaaagaaatgagcaaagcctccaagaaatatgggactatgtgaaaagaccaaatctacgtctgattggtgtacctgaaagtgatggggagaatggaaacaaattggaaaacactctgcaggatattatccaggagaacttcccccatctagcaaggcaggccaacgttaagattcaggaaatacagagaacgccacaaagatactcctcgagaagagcaactccaagacacataattgtcagattcaccaaagttgaaatgaaggaaaaaatgttaagggcagccagagagaaagtgttggaagttctggccagggcaattaggcaggagaaggaaataaagggtattcaattaggaaaagaggaagtcaaattgtccctgtttgcagatgacatgattgtatatctagaaaaccccattgtctcagctgaaaatctccttaagctgataagcaacttcagcaaagtctcaggatacaaaatcaatgtacaaaaatcacaagcattcttttacaccaataacaggcaaacagaaagccaaatcattagtgaactcccattcataagtgcttcaaagagaataaaatacctaggaatccaacttacaagggatgtgaaggacctcttcaaggagaactacaaaccactgctcaatgaaataaaagaggatacaaacaaatggaagaacattccatgcttgtgggtaggaagaatcaatatcatgaaaatggccatactgcccaaggtaatttatagattcaatgccatccccatcaagctaccaatgactttcttcacagaattggaaaaaactactttaaagttcatatggaaccaaaaaagagcccgcatcgccaagtcaatcctaagccaaatgaacaaagctggaggcatcactctacctgacttcaaactatactacaaggctacagtaaccaaaacagcatggtactggtaccaaaacagagatatagatcaatggaacagaacacagccctcagaaataacgccatgtatctacaactacctggtctttgacaaacctgagaaaaacaagcaatggggaaaggattccctacttaataaatggtgctgggaaaactggccagccatatgtagaaagctgaaactggatcccttccttacaccttatacaaaaatcaattcaagatggattaaagacttaaacgttagacctaaaaccataaaaaccctagaagaaaacctaggcaataccattcaggacatatgcatgcgcaaggacttcatgtctaaaacactaaaagcaatggcaacaaaagccaaaattgacaaatgggatctaattaaactgaagagcttctgcacagcaaaagaaactaccatcaaaatgaacagtaaacggaactcagttcctcaccagcaacagaacaaaaaaactggaaactctaaaaagcagagtgcctctcctcctccaagggaacgcagttcctcaccagcaacagaacaaagctggatggagaatgactttgacgagctgagtgaagaaggcttcagacgatcaaattactctgagctacgggaggacattcaaaccaaaggcaaagaagttgaaaactttgaaaaaaatttagaagaatgtataactagaataaccaatacagagaagtgcttaaaggagctgatggagctgaaaaccaaggctcgagaactacatgaagaatgcagaagcctcaggagccgatgcgatcaactggaagaaagggtatcagcaatggaagatgaaatgaatgaaatgaagcgagaagagaagtttagagaaaaaagaataaaaagaaatgagcaaggcctccaagaaatatgggactatgtgaaaagaccaaatctacatctgattggtgtacctgaaagtgatggggagaatggaaccaagttggaaaacactctgcaggatattatccaggagaacttccccaatctagcaaggcaggccaacgttcagattcaggaaatacaaagaatgccacaaagatactcctcgagaagagcaactccaagacacataattgtcagattcactaaagttgaaatgaaggaaaaaatgttaagggcagccagagagaaaggtcggattaccctcaaagggaagcccatcagactaacagcggatctctcagcagaaaccctacaagccagaagagagtgggggccaatattcaacattcttaaagaaaagaattttcaacccagaatttcatatcccgccaaactaagcttcataagtgaaggagaaataaaatactttacagacaagcaaatgctgagagattttgtcaccagcaggcctgccctaaaagagctcctgaaggaagcgctaaacttggaaaggaacaactggtaccagccgctgcaaaatcatgccaaaatgtaa

SEQ ID NO: 15643 - DNA, 369 bp, Homo sapiens; identical to SEQ ID NO: 3742
  SIMILAR (368)..(6): 911254mologous to Homo sapiens p40,accession number U93569,Smith-Waterman Score=577.

SEQ ID NO: 15644 - DNA, 1247 bp, Homo sapiens
  SIMILAR (969)..(1205): 551254mologous to Escherichia coli K12 molybdate metabolism regulator, third fragment,accession number AE000300,Smith-Waterman Score=173.
gagaactacgtgatgaatgcacaagcttcagtagccgatttgatcaactggaagaaagggtatcagtgactgaagatcaaatgaatgaaatgaagcgagaagagaagtttagagaaaaaagaataaaaagaaacgaacaaagcctccaagaaatgtgggactatgtgaaaagaccaaatctacgtctcattgatgtacctgaaagtgacagggagaatggaaccaagttggaaaacactctgcaggacattatcctggagaacttccccaatctagcaaggcaggccaacattcaaattcaggaaatacagagaatgccacaaagatactcctcaagaagagcaactacaagaaacctaattgtcagattcaccaaagttgaaatgaaggaaaaaatgttaagggcagccagagagaaaggtcgggttacccacaaagggaagcccatcagactaacagcagatctcttggcagaaactctgcaagccagaagagagtgggggccaatattcaacattcttaaagaaaagaattttcaacccagaatttcatatccagcaaaactaagcttcataagtgaaggagaaataaaatactttacagagaagcaaatgctgagagattttgtcaccactagccctgccctagaagagctcctgaaggaagcactaaacatggaaaggaacaaccgaacaacaagacagaaagttaacaaggatatccaggaattgaattcagctctgcaccaagcagacctaatagacatctccagaactctccaccccaaatcaacagaatatacattcttctcagcaccacatcacacttattccaaaattgaccacatagttggaagtaaagcactcctcagcaaatgtaaaagaacagaaattataacaaagtgtctctcagaccacagtgcaatcaaactagaactcaggattaagaaactcactcaaaactgcacaactacatggaaactgaacaacctgctcctgaatgactactgggtacaaaatgaaatgaaggcagaaataaagatgttctttgaaaacaatgagaacaaagatacaacataccagaatctctgggacacatttaaagcagtgtgtagagggaaatttatagcactaaatgcccacaagagaaagcagaaaagatctaaaactgacaccctaacatcacaattaaaagaactagagaaggaagagaaacacattcaaaagctagcagaaggcaagaaataa

SEQ ID NO: 15645 - DNA, 1698 bp, Homo sapiens; identical to SEQ ID NO: 3745
  SIMILAR (241)..(86): 591254mologous to Escherichia coli Anaerobic dimethyl sulfoxide reductase chain A precursor (EC 1.-.-.-) (DMSO reductase),accession number D90799,Smith-Waterman Score=139.

SEQ ID NO: 15646 - DNA, 1539 bp, Homo sapiens; identical to SEQ ID NO: 3746
  SIMILAR (985)..(1755): 781254mologous to Escherichia coli OUTER MEMBRANE USHER PROTEIN PAPC PRECURSOR,accession number D90864,Smith-Waterman Score =1006.

SEQ ID NO: 15647 - DNA, 1911 bp, Homo sapiens; identical to SEQ ID NO: 3748
  SIMILAR (1671)..(1183): 1001254mologous to Cloning vector pSacBII SacB,accession number U09128,Smith-Waterman Score=874.

SEQ ID NO: 15648 - DNA, 1059 bp, Homo sapiens; identical to SEQ ID NO: 12156
  SIMILAR (190)..(990): 791254mologous to Homo sapiens p40,accession number U93569,Smith-Waterman Score=1083.

SEQ ID NO: 15649 - DNA, 1104 bp, Homo sapiens
  SIMILAR (400)..(1101): 851254mologous to Homo sapiens p40,accession number U93569,Smith-Waterman Score=1011.
cagcagaaaactctgcagacctaaatgtccctgtctgacagcttggaagacagtagtggttctcccagcacacagctggagatctgagaatggacagactgcctcctcaagtggtccctgacccccaagtagcctaactggaaggcacccccaagtaggggcagactgacacctcacacggccgagtactcctctgagacaaaacttccagaggaatgatcaggcagcagcatctgcggttcaccaatatctgctgtgctgcagccaccactgctgatacccaggcaaacagggtctggagtggacctccagcaaactccaacagacctgcagctgagggtcctgactgttagaaggaaaactaagaaacagaaaggacatccacaccaaaaccccacctgtacgtcaccatcatcaaagaccaaagtgggagaaagggtatcagtgattgaagatcaaatgaaggaaatgaagcgagaaaagaagtttagagaaaaaagagtaaaaagaaatgaacaaagcctccaagaaatatgggactatgtgaaaagaccaaacctacgtctgattggtgtacccgaaagtgatggggagaatggaaccaagttggaaaacactcttcaggatattatgcgggagaacttccccaatcgagcaaggcaggccaacattcaaattcaggaaatacagagaatgccacaaagatactcctcgagaagagcaaccccaagacacataattatcagattcaccaaagttgaaatgaaggagaaaatgttaagggcagccagagagaaaggttgggttacccacaaagggaagcccatcagactaacagcggatctcttggcagaaactctacaagccagaagagagtgggagccaatattcaacattcttaaaggaaagaattttcaacccagaatttcatatccagccaaactaaacttcataagtgaaggagaaataaaatcctttacagacaaacaaatgctaagagattttgtcatcaccaggcctgccttacaagagctcctgaaggaagcactaaacctggaaaggaacaactggtaccagccactgcaaaaacatgccaaattgtaa

SEQ ID NO: 15650 - DNA, 1534 bp, Homo sapiens
  SIMILAR (574)..(999): 791254mologous to Mus musculus YAP65 (Yes-associated protein of 65 kDa MW),accession number X80508,Smith-Waterman Score=602.
gttttcactgatatagaagcagcacaggccaagaagtggagaaccaagaggaaagtgaatactgtcaggttgaggactgaagttgagctattggcatatcttggtgctagtgagttaaaattagtcttcagtgtttgccaacgtaaagaagtcctgtccttggtcataattgctgaagatattgatagagaagctcgaagtacattcatttttaataggctaaaagttggtcttcagatcatagcagtcaaagctccagattttggtgacaacagaaagaaccaacgtgaagatacagctattgctactggtggtctggctcaaattgaaaaatatattcaagaaatcgttgagcagttagatgttacaactagtgaatatgaaaaggaaaaactgaatgtatgtctggcaaaactttcagatggagtagcagtgctgaaggctggtgggacaagtgatgtcaaagaatgcagctcctcaccagcaatgcaacaaagctggatggagagtgactttgacgagttgagagaagaaggcttcagacgatcaaacttctccaagctaaaggaggaagttcgaatgcatcgcaaagaagctaaaagccttgaaaaaaaattagatgaatggctaactagaataaccagtgtagagaagtccttaaatgacctcatggagctgaaaaccatggcacgagaactacataaccaatgcacaagcttcagtagccaattccatcaactggaagaaagggtatcagtgattgaagatcaaatgaatgaaatgaagcgagaagagaagtttagagaaaaaacagtaaaaagaaatgaacaaagcctccaagaaatatgggactatgtgaaaagaccaaatccatgtctgattggtatacctcaaagtgacggggagaatggaaccaagttggaaaacactctgcaggatattatgcaggagaacttccccaacctagcaaggcaggccaacattcaaattcaggaaatacagagaatgccacaaagatactcctcgagaagagcaactccaagacacataattgtcagattcaccaaagttgaaatgaaggaaaaaatgttaagggcagccagagagaaaggttgggttacctacaaagggaagcccatcagactaacagcggatctcttggcagaaactctacaagccagaagagagtgggggccaatattcaccattcttaaagaaaagaattttcaacccagaatttcgtgtccagccaaactaagcttcataagtgaaggagaaataaaatcctttacagacaagcaaatgctgagagattttgtcactaccaggcctggcctaaaagaactcctgaaggaagcactaaacatggaaaggaacagctgggcaaagtgttcccatgcagggttatgccacacgtttccattcgagcagatggcagaaaggtttgtctgcaatgtggaacttgttaagggggaaggccttcctgatagagatcaagaaggccgctttaatttacttagtggtgggatggttt

SEQ ID NO: 15651 - DNA, 3904 bp, Homo sapiens
  SIMILAR (799)..(1992): 901254mologous to Homo sapiens putative p150,accession number U93563,Smith-Waterman Score=1908.
tacgactgcggttttcccgggtcgacgatttcgttgggtattctccttcaatgaaaagaatacttatacataaggtatttcactccatttgccttccctcttacagaaaaggtcaggctgcaggatagtactgtagtttatacttccctcaggtggccatttttccccatcagagagagaaattggggccaggctgtagtatagaaaaaaatgagccacctctttttcagggtttgtgggtcaaattggtcccagtggcttaggatgcatttcaagggtgagcctgttgatgcctgagtgtttcccatctgaaagacaaaaccgcccgtggttttggtttattttgtttctccccctgcccaagaatccacaacggtccctggaccctgctgatcggaatagttgtgctcaccaacgcagcagcagaaacaacccctgcccaagaacccacaacggtccctggaccctgctgatcggaatagctgcactcacctacgcagcagcagaaacattagttttcctcccagaccacatggaggaccgaggaagggtcaaccaacatgttgttgggaccccagagctgcatggctttcctctctgtcaaccctcggctcagcccagaagtaaaggaaaagaggaagctgtttctaggcaaatcaacggtcccaactccaaagagttgggggttgttagagagccctttcctggaaagcctgacacccatgtctttagtccagcggccgcgctagtcgctttccactggccgacaggtcatcacatcctcattcatggacggaaggaaaggaggaataaagggaactgttcatccatacctgacagctttcaacaggaaagccaaaatttcccggaaatgcctataacagacttctccctacatcttattgatcagaatgatgtcagatgcctccccaaccgcgacgccagggcgctaaccccggactcccttcgtccctctccgcgggcgcggcgcggcgtcgaaaaaaacgcacacctcgccgacccggggcggagagcctcgcagacgctcgccaggctcgtccggcgtagagtcgagcctaaccttcgggcacttccgccaatccctcgttccgccgactcgctcaacgccgatagcggggcgccaaagctctttaccaccaccgcgcgggagctcaagctctcccgcaggctatctatgatccgtcccacgaactcgggcgtcttcgcgccggtcgtacacacacccaggacagccagtctcctccgccgaaccgactttcccattaccacgcaacggttcctcccgctctccccgactcccgccggcccaaagctcgccccactagagatcaggaccgtaattttcgttcccccccgccccttacccgtccggcagactccttcttactttcccaccccgagttcacgcgcgctctcctgggaaattcgctgcgttagtcgtaccaacgaactggttaatgtgtggggagaggtggcccgtgcaccgggtgttagggcggccccctcccctattagcgagatgggtaatagtcgaccgtttcctattgttcggtttcgagagagccgtaaaggaaaactaacaaacataaaggacatctacaccaaaaccccatctgtatgtcaccatcatcaaagaccaaagttagataaaaccacaaagatggagagaaaccagagcagaaatgctgaaaattctgaaaatcagagtgcctcttctcctccaaaggaacacaactcctcaccagcaacagaacaaagctggacagagaatgacttcgacgagctgagagaagaaggcttcagacgatcagtaataacaaacttctccaagctaaaggaggatgttcgaacccatcgcaaagaagctaaaaaccttgaaaaaagattagacgaatggctaactagaataaacagtgtagagaagaccttaaatgacctgatggagctgaaaaccatggcacaagaactacgtgacacatacacaagcttcagtagccgatttgatcaagtggaagaaagggtatcagtgattgaagatcaaatgaatgaaataaagcgcagaggcgtctccgtgtgtccacaaccatcagaagacaccccgaggagtactgccagggtcccaaaggggatggtccccttccggccccgggtccccttggtcactccacccagagagaaaaaagaagctccttggcttgcatgccttcgcactagggctctaaggatcctcatagaccctccgagccaggtgtgggatatagtctcgtgtgatgcggagaatgaaaccaagttggaaaacactctgcaggatattatccaggagaacttccccaatctagcaaggcaggccaacattcaaattcggggaaattacagagaacgcccacaaaggttgcctcctcgagaacagcaactccaagcacacctaattgtcagattcaccaaagttgaaatgaagggaaaaaatattaagggcagcccagagagaaaggtcggggttacccacaaaggggaagcccttcagactaacagcagcggatctctcggcagaaacttctacaagccagaagacagagtgggggccaatattcaacattctggaaggaaaagaattttccaacccagaaatttcatatcttagccaaacttaagctttcataagtggaagggaggaattaaattccttttaccggacaagccaaatgctgagagatttttgtcaccgccagcctcccgcctgccctaaaagagcaccaggcctgccctaaaagagctgctgaaggaagaagcactaaacatggaaaggaataacagctcaaatctccttaagctgataagcaacttcagcaaagtctcaggatacaaaatcaatgtgcaaaaatcacaagcattcttatacaccaacaacagacaaacagagagccaaatcatgagtgaactcccattcacaattgcttcaaagagtataaaatacctaggaatccaacttacaagggatgtgaaggacctcttcaaggagaactacaaaccactgctcaacgaaacaaaaggacacaaaaaaaggaagaaccttccatgctcatgggtaggaagaatcaatattgtgaaaacggccatactgcccaaggtaatttatagattcaatgccatccccatcaagctaccaatgattttcttcacagaattggaaaaaactactttaaagttcatgtggaaccaaaaaagagcctgcattgccaagacaatcctaagccaaaagaacaaagctggagggatcacgctacctgacttcaaactatactacaagtctacagtaaccaaaacagcatggtactggtaccaaaacagagatatagacccatggaacagaacagagccctcagaaataataccacacatctacaaccatctgatctttgacaaacctgagaaaaacaagcaatggggaaaggattccctatttaataaatggtgctgggaaaactggctaggcatatatagaaagctgaaactggatctcttccttatgccttatacaaaaattaattcaagatggattaaagacttaaatgttagacctaaaaccataaaaaccctagaagaaaacctaggcaataccattcaggacataggcattggcaaggacttcatgactaaaacaccaaaagcaatggcaacaaaagccaaaattgacaaatgggatctaattaaactgaagagcttctgcacagcaaaagaaactaccatcagagtgaacagacaacctacagaatggcagaaaatttttacaatctacctatctgacaaagggctaatatccagaatctacaaagaacttaaacaaatttacaagaaaaaatcaaccccatcaaaaagtgggtga

SEQ ID NO: 15652 - DNA, 807 bp, Homo sapiens
  SIMILAR (497)..(796): 521254mologous to Homo sapiens Human secreted protein fragment encoded from gene 42,accession number Y07785,Smith- Waterman Score=168.
tcaggacccactctcccaggcccagagcctctgctgtggcctcaatcttgctccctgccacatcccaggagcctgtgagaacccagccaaagacacagccaagacttgcagggctggtcccaggagcatcaggtttgtttgcacagggttggctggggccactgtgccacctgcatcttgcccgctgccactgcaagccacgaaggacctgaagcatggaggccaggctgctggtcccgcagactgcagtgggaatttgtagtgctttttctgggctgcccacgtccactcatgaaccaactggcatgcacttccttccctctgaggcccatgaaaagccccggactcagccagaccagaagagaggacgggatgatctgccttgcacaccctccacttgtctgcatacctcactcttcctggacacaggacaagaattcgggacctgccgaatggcggggctaaaagagcatgttgcaggcgacaatagggaaagaagacaataaggagagaagagctgtggccctttggggaacccagacctaggagctcaatgagccagggttgtgacaccctctttagggatctgtggttcctggcatctctaagcttccaggagccatcacgttccccagtgtcagccgtggaagctggctgcttatggtatgccaggcttccatcaccatggcaacaggggctgatgtcataccaagccaaaagatcaggctctgcctctcccattgcagccagtgtgcctggctgtgcacagtggctggacccttgcttacacacccctcgccaccccat

SEQ ID NO: 15653 - DNA, 448 bp, Homo sapiens
  SIMILAR (343)..(188): 731254mologous to Homo sapiens BCL-6 corepressor,accession number AF317391,Smith-Waterman Score=187.
tgaacttaaattttaatagtttccaattttatcaccatcaaggaagacttcccctctaagacagggaagttaggagtccagtaaaagaaaggctttacatccttgagaaaagcaggtaggtggggaatgttggggtgaggggaaatagcctctatataagcccaaggagaaaacaagtgccaagaggtatcttgccatcagcattctcaacgtagcacttccctgttagcaggaacccctgcctcaggtcctgagatatcaagtgcttggttttgcattgtctcttcccagatggcttctcactgttattggtgtatttctgcagcttgagtgagtcggcttttggctgcttgcattgttggataaaaccttattctttcggtggagggcctatataaacctgttgttgcttgtttttaggaaaagagtcctctggcaacttctctgc

SEQ ID NO: 15654 - DNA, 627 bp, Homo sapiens
  SIMILAR (352)..(624): 861254mologous to Homo sapiens putative p150,accession number U93563,Smith-Waterman Score=396.
atgaaggcagaaataaagatgttctttgaaaccaatgagaacaaagacacaacataccagaatctctggaacacatttaaagcagtgcgtagagggaaatttatagcactaaatgcccacaagagaaagcaggaaagatctaaaattgacaccctaacatcacaattaaaagaactagagaaacaagagcaaacacattcacaagctagcagaagactaaaccaggaagaagttgaatccctgaacagaccaataacaggctctgaaattgaggcaataattaatagcctaccaaccaaaaaaaggccaggaccggacggattcacagccgaattctaccagaggtacaaagaggagctgcccaaaatctccttaagcaacttcagcaaagtctcaggataccaaatcaatgtgcaaaaatcacaagcattcctaaacaccaatagcagacaaacagagagccaaatcatgagtgaactcccattcacaattgcttcaaagataataaaatacctaggaatccaacttacaagggacgtgaaggacctcttcaaggagaactacgaaccattgctcaacgaaataaaagaggacacaaacaaatggaagaacattccatgctcatga

SEQ ID NO: 15655 - DNA, 3831 bp, Homo sapiens
  SIMILAR (1146)..(517): 971254mologous to Homo sapiens RasGAP-related protein,accession number U51903,Smith-Waterman Score=1040.
atgcagcttcctgttcagactatagcagctgatggttatgttataaaactacaaaagcgtaccacggaggatggccatcagtccccggaacgccatcaattcccacacctatcctcatattcagaacaggaaacaaccagggtgccatttgccaaggcagttgctagtggctttccaggcgatacaactctcgtgttctgtgcctcccctcagccctcaccccaggtccaccttcccacccaggctgttgcagacatattctctgagttccatgagcattatgccaggatctctaccgctccttcagtgacactgtcaaaggcaaacatgatgggcagtgagttccccacagcgaggctctccaatagcaaatatcctgagaccctggaagtgggtgagagtgctcagccagtccccatgtacacctggaagacagtggctcaagacaggaaagatggtgtctcacctcctctgttagagaagcagagtattaccaaaagcatctcaaataagccagtagagttgtcttctaaagtggtggaggtagatgcttccaaagctgatcacatgaaaaagatggcttccatgggcctggttcacagcatggctggaagtggcttagtgctctccagaagtgagattctgaaagagatatcttctctaagaaatggctgtgctatctatagatctgaatttattagcactgatccatcatcctgggtagtacccaggccaagaactaatgaagagaacaatggtgaaagcatgttgaaaaacaaggtgatggactggatgataatacaacagcaaagttctttttacctttgcatgaatggcaaaggaactatgatccctaatgttttggggtcagtgtcctgtgcaggccaccccacctctatattaactctatattaccagtccccaaccccacatagggcagatggcactaggaccaacaggagctctgtggataccacatcatccatcattcagcaagtgggccaacctccaaccgtgcctgtcaagcaaagcagcagcactagcagcaaggttgccaaagccagcagcccagaactgagtttcaaagcaaataagaatggccttcaaccaagccccctatttctacctccaaatgaggctttcaggcccccatcaatttcccaccccagaagttactttccttacccagtacctaaggccactgctataagacccttctccttacatgacaaagggcctgtctaccctcatccagttttgttgcccaacaacagtctctttctggggtgtcttgcctcaaagcctagactgccttatgtggtgcccatgggccatccagagtttctgatctaccaagatgccctgggatttggcatggtgcaacccatgttgataacacacaggcccatagagatcaccaaaaaggagaaaccagagaggaggtcacattcccaagaaagagcctgccgcaaagacccaactctccagaatcagttttctgagatgctggaagctagcagtacagcgtttcatccagaagtccccaatgacagtctaaaactgaaccccagctggaatcaagactccaaccaacaaagagaaaaaagaggagaaaccagagaaagatcccattcccatgaaagagcctgccacaaagacccaactgtccagaatcaattttctgagatgttggaagctggcagtacagagtttcatccagaagtccacactgacaatctaaaactaaacctcagctggaaccaagggaagactgttagcagaaataaaaagattgtttacatagaccttctccaagaagaaccagatgccaaaactgaggcaaacatgtccaaaccatgctttacagtgaaaaatattggtcagaatgccaagcctgccaagcccccaattgtcaaggcatccctgcagcagcatggtgattttatcatgctaagagaggagttggggcacattggtgacttgcatgaagcttatgctctcaaacggactccagccaacaaagagaacatagggatgccagtttcaacatcattcctggagccaactctagtgagtgatggtcatgctgtaacttttggtaaaatccaagagtatcccaaaccatattgccttggcagtgccccactaagtatggacataatctctacttacaccaaagatggagccaatgaggccaaatcaagtgatggcaaacttctgaaaccaaagccatctaacctggtaaagagagtcaccacctcagcaggttgcatggctgaccgactcaagtgtgttactactgaactgtatgcagattctagtcagctcagttgggagcaacgggcattgcagaaaccaaggacgccaagccatacaaattcagcacagctgactcagagaggtggaaaggaaatcaggacaaaaagccaaaatgtcttctggaggaggatattgccagccagaataactgtgagagatgtaggcaagcatagtcctggaaacaaacagcacaattcctttaaagccctaaaggatgaagatcttcctgtagagaagtatttaatggaaaggcagcctgtaggtgagccagctgccgaccaggtagctatggatgtgatgcacagccccatcctccaactggaaaggaaacacaaagtctcaagtgacagcaaccagacagagactactgcagagaagttgccagaggactctttcctaaaaaacaagcaaaaacaggtttatatagaccacagtgcaattaaactagaactagaactcaggattaagaaactcaataaaaactgctcaactacacggaaactgaacaacctgctcctgaatgactactgggtacataatgaaatgaaggcagaaataaagatgttctttgaaaccaatgagaacaaagatacaacataccaaaatctctgggacacatttaaatcagtgggtagagggaaatttatagcactaaatgcccacaagacaaagcaagaaagatctaaaattgacacccttatgtcacagttaaaagaactagagaagcaagagcaaacacattcaaaagctagcagaagactaaaccaggaagaagttgaatccctgaatagaccaataacaggctctgaaattgaggcaataattaatagcttaccaaccaaaaaaatccaggaccagatggattcacagccaaattctaccagaggccctccaccgaagaataaggttttatccaacaatgcaagcagccaaaagccgactcactcaagctgcataccattgttgaggctgcctgataagcagcagaaagttaatgagagcattaagacagacatgctgtgcacagacaaggaagaggagtgccctgctgcctccctgctgcagaaatacaccaataacaaacaactattagaagagcctaccaggagggaccaagatgatcaaataagaacaggtgctggtctgcagctccaagtgagggcaacgcagaagtgcatcatcctgataccacaacctagcagagacacaacaaataaaaggaaatttcagcccaacatccctgatgaacatcgatggaaaatcctcaataaaatactggcaaatggaatccagcaacacatcaaaaagcttatccaccacaatcaagttggtttcatagctgcaatgaaagaacaaataaatacagaaattggcaccaagcaatggggcattgctgtaaagatacttgaaaatgtggaagtgattttggaactgggtaatgggcagaaactagaaaagtttggagagctcagaagaagacaggaagaaaaggaaaaatttggaacttcatag

SEQ ID NO: 15656 - DNA, 1639 bp, Homo sapiens
  SIMILAR (79)..(333): 1001254mologous to Homo sapiens A-type potassium channel modulatory protein 1,accession number AF199597,Smith-Waterman Score =449.
aactgtctctcagaccacagtgcaatcaaactagaactcaggattaagaaactcactcaaaactgctcaactacatggaaactgaacaacctgctcctgaatgactactgggtacataacgaaatgaaggcagaaataaagatattctttgaaaccaacgagaacaaagacacaacataccagaatctctgggacacattcaaagcagtgtgtagagggaaatttacagcactaaatgcccacaagagaaagcaggaaagatctaaaattgacaccctaacatcacaattaaaagaactagagaagcaagagcaaacacattcaaaagctagcagaaggcaagaaataactaagatcagagcagaactgaaggagatagagacacaaaaaacccttcaaaacatcaatgaatccaggagcttgttttttgaaaagatcaacaaaattgatagaccgctagcaagactaataaagaagaaaagagagaaggatcaaatagaagcaataaaaaatgataaaggggatatcaccaccgatcccacagaaatacaaactaccatcagagaatacctataaacaccctctacgcaaataaattagaatatcctagaagaaatgggataaattccctggacacatacactcttccaagactaaccccaggaagaagttgaatccctgaatagacctacaacaggctctgaaattgaggcaataatcaatagcttaccaacgaaaaaaaagtccaggaccagatggattcacagccgaattctaccagaggtacaaggaggagctggtaccattccttctgaaactattccaatcaatagaaaaagagggaatcctccctaactcattttatgaggccagcatcatcctgataccaaagcctggcagagacacaaccaaaaaagagaattttagaccaatatccttgatgaacattgatgcaaaaatcctcaataaaatactggcaaaccgaatccagcagcacatcaaaaagcttatccaccatgatcaagtgggcttcatccctgggatgcaaggctggttcaatatacgcaaatcaataaatgtaatccagcatataaacagagccaaagacaaaaaccacatgattatctcaatagatgcaggaaaagcctttgacaaaattcaacaatccttcatgctaaaagctctcaataaattagatattgatgggacggcaattaggcaggagaaggaaataaagggtattcaattaggaaaagaggaagtcaaattgtccctgtttgcagacgacatgattgtatatctagaaaaccccattgtctcagcccaaaatctccttaagctgataagcaacttcagcaaagtctcaggatacaaaatcaatgtgcaaaaatcacaagcattcttatacaccaacaacagacaaacagagagccaaatcatgagtgaactcccattcacaattgcttcaaagagaataaaatacttaggaatccaacttacaagggatgtgaaggacctcttcaaggagaactacaaaccactgctcaaggaaataaaagaggatataaacaaatggaagaacattccatgctcatgggtaggaagaatcaatatcgtgaaaatggccatactgcccaag

SEQ ID NO: 15657 - DNA, 1563 bp, Homo sapiens
  SIMILAR (811)..(1449): 951254mologous to Escherichia coli orotate phosphoribosyltransferase,accession number X00781,Smith-Waterman Score=1024.
atgactacttccatgctcaacgcaaaactactaccatctgcgccatccgccgcagtggtcgtcgtgcgtgtggtggtggtcgtcggcaatgcgcccacctcccggaaagtcggcccagaagaaaaggactggagcatggcaagttcgggcacaacatcgacgcgtaagcgctttaccggcgcagaatttatcgttcatttcctggaacagcagggcattaagattgtgacaggcattccgggcggttctatcctgcctgtttacgatgccttaagccaaagcacgcaaatccgccatattctggcccgtcatgaacagggcgcgggctttatcgctcagggaatggcgcgcaccgacggtaaaccggcggtctgtatggcctgtagcggaccgggtgcgactaacctggtgaccgccattgccgatgcgcggctggactccatcccgctgatttgcatcactggtcaggttcccgcctcgatgatcggcaccgacgccttccaggaagtggacacctacggcatctctatccccatcaccaaacacaactatctggtcagacatatcgaagaactcccgcaggtcatgagcgatgccttccgcattgcgcaatcaggccgcccaggcccggtgtggatagacattcctaaggatgtgcaaacggcagtttttgagattgaaacacaggccggtatggcagaaaaagccgccgcccccgcctttaccgaagaaagcattcgtgacgcagcggcgatgattaacgctgccaaacgcccggtgctttatctgggcggcggtgtgatcatgcgcccgcacggcagcttcagcgtttgcaccttgggtaaatacggctacgcgaacggaacggccagtaccgtgcggcagtacagttgcaccacgtacgttctggtcagatttacgagcgtcgatgccgaggttaacagctacgtccacgctttctacgaatttagcagtcgccagctctttcagcagtgcgatagcttcgttgatgtcgtactgtttggttgcatcaactttctcgcggataacacgcatgcgcttggtcagtttagccatttcttagtcctccactaccaggcccatggaacgtgcagtaccttcgatggagcgagtcatcgcttcaatgtcggcaccagtcatgtcggcagctttggtctgcgcgatttcctgcagctgagcgcgggaaattttacccactttgtctttgttcggcttaccggaaccagacttgataccagccgcttttttcagcagaactgctgccggcggggtcttggtaacgaaagtgaaagaacggtcagcgtaaacggtgattactaccggaatcggcagacctttttcgatggaatcagtttttgcgttgaacgctttgcagaattccatgatgtttacgccctgctgacccagagccggacctactggcggactcgggttagccataccagctgcaacctgcagcttgacataggcttgtactttcttagccattataaattcctcaagttgggtaataacgcctctgagaggctccccgtgatataa

SEQ ID NO: 15658 - DNA, 4335 bp, Homo sapiens
  SIMILAR (1)..(630): 971254mologous to Escherichia coli lipopolysaccharide core biosynthesis protein,accession number M80599,Smith-Waterman Score= 1095.
atggttgtcctgagtaacagaaaagatagaaaagggaaaggagaaaaagagaaaagcattgcttgcggcgagttggggaaggcaaggagctcagagtggccagagaaaggcccatccattacagcaacactgaatcaaaagttcaggcggctccttatcagttgtgaagggatcttttctagcagtcctattagcctgcaagtttccctttccgaggaaaaaaaagtcagatgtaataggcctctaactggatccaaaccagttaattatcagatccaatccgatcccggacccagtccagtttctgtcatgacttccaaacccagtttggatcagaaatttgctcaaactcagctccaaacacaaatctgtggagctttggaaccggagagagaacttaccatgatatccagctgctccaagagagaaacggcacaatgggtctggcagaaaatcttatttgtggatatttccatcaactttgttcataattgcctaactggaaagaatccaaatgtccttcaactggtaaacagcggcattcctgtggaaactgatgtctatgcacggtgcgaaagatacatctataccgtcattggtggcttatgcttttgcatgtatgctttcaaggtgaaatggcaagtagtcgagtgcaagtgcgggcagcagacccggaagtgcgcatgcagagacgtgaagcccgggccacgacgacgacccctcaggtaccgatgttttcagaaaccctcaaacagattgggtagcgcttccctgggggcaggtttctgggcaggccgcagagacgcgaagtccggccacgacgacgacccctcaggggccctgttttctgttacaatggatcgagatttagaacaggctctggatcgcgcagagaatatcattgaaattgcccaacagagacctcctagaaggagatactcacctagggcgggaaaaactctgcaggaaaaactttatgacatttatgttgaagaatgtggaaaagagcctgaggatcctcaggaattgagaagcaatgtaaacttgttagaaaagcttgttaggagagagtccttgccatgtttactggtcaatctatacccaggcaatcaggggtattctgtgatgctccagagagaagatgggtcctttgcagagaccattcggctgccttatgaagaaagggcattgctggactacttggatgcagaagaattaccccctgctttgggtgatgtcctggataaagcttcggttaacatttttcatagtgggtgtgtcatagtagaagttcgtgactacaggcagtccagtaatatgcaacctcctggttaccaaagcaggcatattcttctacgtccaacgatgcagactttagcccatgatgtgaagatgatgacaagagatggccagaaatggagccaggaagacaagcttcagcttgagagccagctgatcttagcgacagctgaaccactgtgtcttgatccttctgtagcagttgcctgcactgcaaacaggctgctgtacaacaagcaaaagatgaataccgacccgatgaaacggtgcctccagaggtattcgtggccctctgtaaagccacagcaggagcagtctgactgtccacctcctcctgagctgagagtgtcgacttctggccaaaaagaagaaagaaaagtaggtcagccttgtgagctgaacattgctaaagcaggaagttgtgtagacacgtggaaaggcagaccctgtgatttggccgtgccttcagaagtggatgtggagaaacttgctaaagggtatcagtccgtcacagctgctgacccacagctcccagtctggccagcccaggaggtagaagacccttttggatttgcgttggaagctggctgtcaggcctgggacaccaagccaagcatcatgcagtcgtttaatgatccgcttctctgtggtaaaatacggccacgtaaaaaagccaggcagaagagccagaagtctccctggcagcccttcccagatgaccattcagcttgtctcaggcctgggtcagagactgatgctgggagggcagtgagtcaggcccaggaatcggtgcagagcaaagtcaaaggtccaggcaagatgtcacacagctccagtggcccagccagtgtcagtcagctctcttcatggaaaacaccagaacagcctgatcctgtgtgggtccagtcttcagtatcggggaagggagagaaacatccacctccccgcacccaacttccctcaagctcaggaaagatttcctcaggtaacagttttcccccacaacaggcaggcagccctcttaagcgtccattttctgctgctgctgctattgctgctgctgctgctgctgctgctgctgctgctgctgctgctgctgctgctgctcctgctcctgctctagctgctgctgctgctcctgctctagctgctgctgctgctcctgctctagctgctgctgctgctcctgctcctgctcctgccgctgctcctgctgtagctgctgctcctgctgctgctgcttctgcggcaccaagtcattctcagaagccctctgtgcctctcattcaagctagcaggccctgtccagctgcccagccccccaccaaattcataaaaatagcgccagccattcagttgaggacaggctccactggcctaaaggccatcaatgtggagggcccagtccagggagcccaggctttggggagcagtttcaagcctgtgcaggcccctggctcgggtgcccccgctcctgcaggaatcagtggcagtgaccttcagtcctcaggaggtccactaccagatgcaaggcccggtgcagtgcaggcatcttctccagcaccccttcagtttttcctaaatactccggaaggtctcaggcctctgacactcctccaggttccgcagggctcggcggttctgaccggcccgcagcagcagtcccatcagctggtttccctgcagcagctccagcagcccacagctgctcatcctcctcagccagggccacagggttccgcactaggtttgagcacgcaagggcaggccttccctgctcagcaacttcttaaggtgaaccccactagagccagaagtggtctgcagccccagccccagcctgctgtgttgagtctgcttggctctgcccaggttcctcagcagggtgtccagctcccctctgtcttgaggcagcagcagccacagccacagccgccgaagctgcaactgcaaccgcagtggcagccaaagccacggcaggagcagccacagtcgcagcagcagcagccgcagcatatccagctccagactcagcagttgagagtcttgcagcagccgcagcatatccagctccagactcagcagttgagagtcctgcagcagccagtgtttttggcaacaggcgctgttcagatagtgcagccacatccagtgcttaatagccatgtatggctagtggctattgtgtgggtcagcgcagttctagagggacaggagcaaagcagattatggggacagagcatcaggcatgacctgggtttggggcacacaggtggagtgagatttatgatgctgattgcatgtagtgggctggagcttcttgagatcctcatggcctatggtcatctgggccaggacctgcaggatcaagtcgccccagccatggagcgaggagggtggaaaaggatctttgcaggagaggaggtcaaggagttgaaggcccaggctactggaaggattatctatgtggataccaaaatcatcaagaattcatactgctggcatagtgttgaagaggatgataatgagtcaggccctagaatcttcaagaatactcaggtaactgtaactgaagtcaaccaagtaggtctgggtgggtgggccctgagaattagcatttccaagtttccaggtgttgctgctgctgctgctggatcagggaccatccacattttgagaacctgtctggatgcaaatcacatggtggccctccaggatccagtctggagagtagctgcttctggtttggtccagacaatggaggacaccagtagatctgagataggaagagagaggcaggcgtacttattcctgcagcccactccctgccaggctatgctggtcagcagcttttttcctctgtgtgtccgtggaaatcgactttgggttaagagtagtctggttatccatccgtggtgtttgcggaggtttcacaaatgcatacacatcccttatcaaggacttgctggccagtcaaatagtagacctttgtgggggtcagactggcatctgacatcagatggcatcaccatctga

SEQ ID NO: 15659 - DNA, 2322 bp, Homo sapiens
  SIMILAR (1846)..(2925): 701254mologous to Escherichia coli RhsD protein,accession number X60999,Smith-Waterman Score=1250.
atgcgcatagacggggcccaggagctgaccctggccctcccgttcgcttccggtgtagcatgcagagacgtgaagcccgggccacgacgacgacccctcaggtaccgatgttttcagaaaccctcaaacagattgggtagcgcttccctgggggcaggtttctgggcaggccgcagagacgcgaagtccggccacgacgacgacccctcaggggccctgttttctgttacaatggatcgagatttagaacaggctctggatcgcgcagagaatatcattgaaattgcccaacagagacctcctagaaggagatactcacctagggcgggaaaaactctgcaggaaaaactttatgacatttatgttgaagaatgtggaaaagagcctgaggatcctcaggaattgagaagcaatgtaaacttgttagaaaagcttgttaggagagagtccttgccatgtttactggtcaatctatacccaggcaatcaggggtattctgtgatgctccagagagaagatgggtcctttgcagagaccattcggctgccttatgaagaaagggcattgctggactacttggatgcagaagaattaccccctgctttgggtgatgtcctggataaagcttcggttaacatttttcatagtgggtgtgtcatagtagaagttcgtgactacaggcagtccagtaatatgcaacctcctggttaccaaagcaggcatattcttctacgtccaaccatgcagactttagcccctgaggtgaagacgatgacaagagatggcgagaaatggagccaggaagacaaatttcctcttgagagtcaactgatcttagcgacagctgaaccactgtgtcttgatccttctgtagcagttgcctgcactgcaaacaggctgctgtacaacaagcaaaagatgaataccgacccgatggaacagtgcctccagaggtattcgtggccctctgtaaagccacagcaggagcagtctgactgtccacctcctcctgagctgagagtgtcgacttctggccaaaaagaagagaggaaagtaggtcagccttgtgagctgaacattactaaagcgggaagttgtgtagacacgtggaaaggcagaccctgtgatttggccgtgccttcagaagtggatgtggagaaacttgctaaagggtatcagtccgtcacagctgctgacccacagctcccagtctggccagcccaggaggtagaagaccctttcagacatgcatgggaagctggctgtcaggcctgggacaccaagccaaacatcatgcagtcgtttaatgatccgcttctctgtggtaaaatacggccacgtaaaaaagccaggcagaagagccagaagtctccctggcagcccttcccagatgaccattcagcttgtctcaggcctgggtcagagactgatgctgggagggcagtgagtcaggcccaggaatcggtgcagagcaaagtcaaaggtccaggcaagatgtcacacagctccagtggcccagccagtgtcagtcagctctcttcatggaaaacaccagaacagcctgatcctgtgtgggtccagtcttcagtatccgggaagggagagaaacatccacctccccgcacccaacttccctcaagctcaggaaagatttcctcaggtaacagttttcccccacaacaggcaggcagccctcttaagcgtccatttcctgctgctgctcctgctgtagctgctgctgctcctgctcctgctcctgctcctgctgctgctcctgctttagctgctgctgctgtggcggcggcggccggtggggcggcaccaagccattctcagaagccctctgtgcctcttattaaagctagcaggcgccgtccagctgccgggcgccccaccagattcgtaaaaatagccccagccattcaggtccggacaggctccactggcctaaaggccaccaacgtggagggcccagtccggggagcccaggaatcagtggcagtggccttcagtcctcaggaggtccactaccagatgcaaggcccggttcctcagcagggtgtccagctcccctttgtcttggggcagcagccacagccgctgctgctgctgcagccacaaccacagccacagcagatccagctccagacacagcctttgagagtcctgcagcagccagtgtttttggcaacaggcgctgttcagatagtgcagccacatccagaacccccggcgatgacgcagcctaaaaccactgctacgttcagccgcaaccagatcttcatctgtccctggtccctcatctgtgccctagatccatga

SEQ ID NO: 15660 - DNA, 1876 bp, Homo sapiens
  SIMILAR (1)..(852): 881254mologous to Homo sapiens p40,accession number U93570,Smith-Waterman Score=1274.
  misc_feature (1)...(1876): n = a,t,c or g
gtgtgtgagtgggtgcttcctatcagagggcccctcagatcagagctgcggggtaccgagctgaggtcgtaccaaaaggttgcagacgataaagctatcgtcggtggtatcgcccgtctcgatggtcgtccggtgatgatcattggtcatcaaaaaggtcgtgaaaccaaagaaaaaattcgccgtaactttggtatgccagcgccagaaggttaccgcaaagcatctctgcgttgggcgaagcgtagccgtgagcgttttgacagtctcggaaacaaaaatgcgctgtttggtatcatccagggcagcgtttacgaagatttacgtgatatttctgttaaaggtctggtagatatcggttttgatggctacgctgtcggcggtctggctgtggcgtcgtcgatgntgtacgactcatatatcgtcgtcatcgatgatgcggacattactagaggcgatgatgccgtacctcgtgatcatcattcatcgacatcgatggtggtgttcagacatatcagactcgacgtcatagtcgtcgacggagatgatcagcatcgtcgcatggttggacgacgatgtcgatccgcgtggttccgtcgaggctcgctggacgttgatcaggtgattggtgataccgccgcggggcgcctgaatgtgatgggcgatataacgcgcgatgccagacgcgacaaagtcaaaaatgagcgttacggcgtcgccccttctgtcgcttttggccttggtacagcgaatcgtttgtatcttaattatctgcatgtcacccagcacaacacgccagacggagggattccgaccatcggtttgccgggctattctgccccatctgcgggaacggcggccctgaatcattccggaaaagttgatactcataacttttacggcacggattccgattacgacgattcgaccaccgacaccgccaccatgcgttttgagcacgacatcaacgataacaccaccattcgcaatactacccgttggtcgcgccttgacctggtcacgcacggcgaataccaaagatgtgagtaataaaattctcaccaaccagaccaacctgacctcgacgttctataccggttctatcggtcatgatgtcagtaccggcgtggaatttacccgtgaaacgcagactaactacggcgttaatccggtgacgttacccgcggtaaatatttatcatcctgacagcagcattcatcccggcggcctgacgcgcaacggcgcaaacgccaatggtcagacggataccttcgcaatttacgcctttgatacgctgcaaatcacccgtgattttgagctgaacggcgggatccgtctggataattatcatactgaatatgacagtgccaccgcctgcggcggcagcggacgcggtgccatcacctgcccaactggtgtggcaaaaggttctccggtcaccaccgtcgacaccgccaagtcgggcaatctgatgaactggaaagccggggcgctgtatcacctgacggaaaacggcaatgtctatattaactatgccgtttcccagcagcctccgggcggcaacaacttcgcccttgcgcagtctggcagcggtaacagtgccaaccgcaccgattttaatccgcaaaaagccaacaccagcgagattggcaccaaatggcaggttcggggatcctctagagtcaacgtcatgcacgaagtcaacacaccacatcagtgcgttcggtttcgtccagcccggagtgcgcctgggtgctgtcaaagtccatgccaccgttctggcaagcatatgcaatacggtttgtcgaagtgccagcccggccagtacaacagtgtcaaaagtggcgaaagggtgaacggggttacgtttcagtga

SEQ ID NO: 15661 - DNA, 441 bp, Homo sapiens
  SIMILAR (1)..(1074): 651254mologous to Homo sapiens putative p150,accession number U93563,Smith-Waterman Score=995.
ccccgcgttgtgcggcgccacatccggtatgctttctccaagcaaccgctccgggttgaggcccatcttgacgattccaagaccacccccttgagcaagaatgccatcccctctgggtcccccatgcctgcccgtcatggacccagagaccacccttgaggagcctgagactgcccgcctccgcttccgagggttctgctaccaggaggtggcaggtccccgagaagccctggcccggctgcgtgagctgtgttgccagtggctgcagcctgaggcacactccaaggagcagatgctggagatgctggtgctggagcagttcctgggcacactgcctaccgagatacatgcctgggtgcgcggtcagcggccaggcagtcctgaggaggccgctgccctaatcgaaggactgcagcatgaccctgggcaactgttgggctg

SEQ ID NO: 15662 - DNA, 530 bp, Homo sapiens
  SIMILAR (82)..(690): 691254mologous to Homo sapiens putative p150,accession number U93563,Smith-Waterman Score=675.
cccgccttcgggggctccgcgcccagcgagcgcttggagctgcacgtggacggaccccctcccaggcctcaagctccgggcgacgtggagtggggcggtcctggcgggccgagatgccgatcgtgcgctgcgagggaccaatccccgacgtcaccttcgcagctgctgcgcgagggcgagacgaaggccgtgaagacggtccgcacccccggggccgcgggcgaacctcgagctgatcttcgtggggccccagcacgccgggcaactacaggtgccgctaccgctcctgggtgccccacaccttcaaatcggagctcaacgaccctgtggagctcctggtggcataaagctgatgcagccgcacggcccagggtgctgttggtgtcctcaaaagtgccggggattttggactggctccctcccctcctgttgcagcacaaggccggggtctttggggggctggagaagcctccctcattcctcccccccattaataaatgtgaagagaggctctgaaaaaaaaaaaaaaa

SEQ ID NO: 15663 - DNA, 2094 bp, Homo sapiens
  SIMILAR (142)..(474): 771254mologous to Homo sapiens NAG13,accession number AF194537,Smith-Waterman Score=429.
atgaagccggggctgaggcgcaggcgcgggcgcggcctggggtgtggcctggggcctcagctccgggcgacgtggagtggggcggtcctggcgggccgagatgccgtcctgcgctgcgagggacccatccccgacgtcaccttcgagctgctgcgcgagggcgagacgaaggccgtgaagacggtccgcacccccggggccggggcgaagctcgagctgatcttcgtggggccccagcacgccggcaactacaggtgccgctaccgctccttggttgcccacaccttcgaatcggagctcagcgaccctgtggagctcctggtggcagtcgcagctaccctcaacatccacctgcgacttgtgcacatgctgcacataccagcagctggcgagggctccttccgagagggcacccatttcctgaaaccatcccctgtgaaaatgccccttgttttcagagtaggaaggagaagagtgctgaatcaaggcccccaaggagtccccattccaatccccagaagctgtgaacatctcaattggcaaaagggactctgcggtgtgactaagtgtgcagcccctcttctcagaggtcccccttgtccagccgtacttcgaaaggaaatcccctttgtgtctctcaagccgggactgatgagttccaaggccagtgaggctgaacccctgggcccaagacttggcagccaccagtcaacagctgctgcactgggaccaaggtataatggctcagcagatgccatacgtcctcacactgcatgggctgtaattcaaaccacaatctcgcgatttacatggtctttgacccaagtcaacgttccgtctcggactgtttctttggccgtgaggcgggaccgttatatgacatcaaggaccacgaccaatccggaggaaggttgtagaggaaccttttgggctagacggaatgggtgcagcccaagcgcatgcgcagttgcagaagcggccctagaagcgtgcctggcggatgtccgctaccccgtagttgccctgtcttgtgggcgcctgcaaaagcgcagagatttccgtgagaccaacgcagccatgtctaataaagaaaaaagtctggccagcgctcgcttctttgtggaggtacaggtcactctaggtgccctgtgcacagtccaggccacggggcaaagcatgctggtgttcagcaccacccagatgtcctcgtactcagagaagttccttacttccaagcatgcctccttgagtcccaggctccagctggctgataggtggagagaccaaggcatgaagtggcagagcccacagtggggggagctcaggccagcagcctcccatacagcagagcaggaaccgggcctggctgcttcaaaggcctttcgtgacctgcagaacttgtccaactctgcatttttgtctttaaccagtttgagtgctggccatcaatgcatttctgccattgtggtcatgatgtccaagaaggaaataaccccccaggggcaactggcagcagcttcctttggagaactgcagccagtcgctctgaagtgtccttggctgaaaagtcaacatgtagagtcttggttaaatgcttctggctgcagccctgaggcacactccaaggagcagatgctggagatgctggtgctggagcagttcctgggcacactgcctcccgagatccaggcctgggtgcgcggtcagcggccaggcagtcctgaggaggccgctgccctagtcgaaggactgcagcatgaccctgggcaactgttgggctggatcacagcccatgtcctgaagcaggaggtgctccctgcagcccagaagacagaggaaccacttgggagcccccacccctcagggacagtggagtcccctggggaaggtccccaggacaccagaatagaggggtctgtccagctcagctgcagtgtgaaggaggagcccaatgtcgatggacaggaagtggcaccctccagccctccacttgcagcacagtcccctgaggggaaccatggacaccaagaaccagcctccacatccttccacccacccaggattcaggtgagcagccccaagtgggaagtatag

SEQ ID NO: 15664 - DNA, 208 bp, Homo sapiens
  SIMILAR (22)..(207): 511254mologous to Mus musculus Pro-Pol-dUTPase polyprotein,accession number Y12713,Smith-Waterman Score=130.
atgctgagactcaaatctgctaagattgcccagaatgaaaatcttatctcctgtaaagaaagagctgaaattgtggaaaaacagacacaagcttttatcatgcgagtggctgacctgcaactaaagaagacagatggatcttggaaaatgacagtggattatcataagcttaaccaagtggtgactacaattgcagctgctgtaccag

SEQ ID NO: 15665 - DNA, 373 bp, Homo sapiens
  SIMILAR (1318)..(1734): 1001254mologous to Homo sapiens orphan neurotransmitter transporter NTT5,accession number AF265578,Smith-Waterman Score= 714.
aggaagtggcacaaatgcccagggtctccacccctgccaccctgccttctctcccccagcctgcactgatggccccgtggacagttccctatgatcagttgatggaggaagagaaagctagggcacgatatgcaggcaccatccaaaagtggacagctgcagcactacagcccctttctaggacatccctgaaggacagtggtgaagggacttctaagtggggccgttctgtggacaccactcagcctctttccccagccatccctgtcatcttccaataggcccatgaacaaagtggccatagtggcatggatggaggttatgcatgggctctgcaacatggacttgcactcaccaacactgacctagccat

SEQ ID NO: 15666 - DNA, 266 bp, Homo sapiens; identical to SEQ ID NO: 3627
  SIMILAR (3)..(137): 861254mologous to Mus musculus Pro-Pol-dUTPase polyprotein,accession number Y12713,Smith-Waterman Score=211.

SEQ ID NO: 15667 - DNA, 1460 bp, Homo sapiens; identical to SEQ ID NO: 7718
  SIMILAR (491)..(769): 361254mologous to Homo sapiens cytoplasmic protein,accession number AF177377,Smith-Waterman Score=127.

SEQ ID NO: 15668 - DNA, 1569 bp, Homo sapiens; identical to SEQ ID NO: 5555
  SIMILAR (233)..(3073): 1001254mologous to Homo sapiens NIK, serine/threonine protein -kinase,accession number Y10256,Smith-Waterman Score=5052.

SEQ ID NO: 15669 - DNA, 981 bp, Homo sapiens
  SIMILAR (535)..(975): 411254mologous to Mus musculus Pro-Pol-dUTPase polyprotein,accession number Y12713,Smith-Waterman Score=234.
atggttgcaattgccaaggttcttattgcctataaagaagacagtgacagccacaaccaacctaacacgagaatgacggtttctaagggccccgtgtctgccgtggagggtgggagaaggggacaggacagtgatgattgcgtggaagaaaatgatgctgtgaggacctggccaccatcaaggatcctgagaactgagtctcaccccagcccacacacatgctcctggcgaagacacctgctgtcctcctgcccctacacagggatgagcttccccatccccagtagtggcaacatctcctcaacccatgctgtcatcagctttccacctttgtctgaggagatgaatcctatgctgcctaaggcaacagtgatgacctctcttgaggcagctgccaggcaaaacctaaagtcccggcaggcccctagatgtgaggttgagagtgtgactcacgaggaggtgtactacactcgaaaagaactgtttgagttctctaatttatatagaaagaaatctggagaacagatacgggaatggatattaaggaagacagatggatcttggagaataacagtggattatcgtaagcttaaccaaatggtgactccaattgcagctgctgtaccagatgtggggtttcattgcttgagcaaattaacacatctcctggtacctggtttgtgtcataatcttatttggagagaccttgattgctttttgcttccgcaaaatatcacactggtccattacactgatgacattatgcagattggatccagtgagcaagaagtagcaaacacactggacttattgcctgcactgatggcttcatggggaattccccatgatcaattgacagaggaagggaagactagagcctggttcacaaatggttctgcacgatatgcaggcaccacccaaaagtggacagctgcagcactacagcccctttctaggacatccccgaaggacagcagttaa

SEQ ID NO: 15670 - DNA, 1219 bp, Homo sapiens; identical to SEQ ID NO: 3629
  SIMILAR (158)..(319): 721254mologous to Mus musculus Pro-Pol-dUTPase polyprotein,accession number Y12713,Smith-Waterman Score=186.

SEQ ID NO: 15671 - DNA, 469 bp, Homo sapiens
  SIMILAR (1371)..(385): 751254mologous to Homo sapiens 03-JUL-1997 Human NF-kB- inducing kinase (NIK) polypeptide encoding cDNA,accession number V71603_cd1,Smith-Waterman Score=1230.
atgcaacctgaactgcctgtcatgaactgggtgctttctgacccatctagccataaagtgggtcatgcacagcagcattccatcacaaatggatgtagtatatacataatcgggttcgagcagttcctgaagacacaagtaagccagaattcaaggtcgaggaatcaaggagtggaagtagaagtggcaccactcaccgtcacccctagtgatccattagcaaacgttttgcttcctgttcctgcaacattaccttctgctggcctagagatcttagttccagaggaaggaaggctgccaccaggagacacaacaatgatgccattaaactggaacctgagattgccacatggacactttgggctcctcctacctttaaatcaacaggctaagaagggagttgcagtgttgggtggggtgattgccctggactgtcaagatgaaatcagtctactactctacaagggag

SEQ ID NO: 15672 - DNA, 2715 bp, Homo sapiens; identical to SEQ ID NO: 6685
  SIMILAR (10)..(516): 991254mologous to Homo sapiens 03-JUL-1997 Human NF-kB- inducing kinase (NIK) polypeptide encoding cDNA,accession number V71603_cd1,Smith-Waterman Score=867.

SEQ ID NO: 15673 - DNA, 578 bp, Homo sapiens
  SIMILAR (534)..(490): 661254mologous to Homo sapiens Human secreted protein encoded by gene 40 clone HFIUR10,accession number Y14450,Smith-Waterman Score=46.
acctaaagtcccggcaggcccctagatgtgaggttgagagtgtgactcacgaggaggtgtactacactcgaaaagaactgtttgagttctctaatttatatagaaagaaatctggagaacagatacgggaatggatattaaggaagacagatggatcttggagaataacagtggattatcgtaagcttaaccaaatggtgactccaattgcagctgctgtaccagatgtggggtttcattgcttgagcaaattaacacatctcctggtacctggtttgtgtcataatcttatttggagagaccttgattgctttttgcttccgcaaaatatcacactggtccattacactgatgacattatgcagattggatccagtgagcaagaagtagcaaacacactggacttattgcctgcactgatggcttcatggggaattccccatgatcaattgacagaggaagggaagactagagcctggttcacaaatggttctgcacgatatgcaggcaccacccaaaagtggacagctgcagcactacagcccctttctaggacatccccgaaggacagcagttaa

SEQ ID NO: 15674 - DNA, 461 bp, Homo sapiens; identical to SEQ ID NO: 14657
  SIMILAR (1)..(360): 461254mologous to Mus musculus Pro-Pol-dUTPase polyprotein,accession number Y12713,Smith-Waterman Score=240.

SEQ ID NO: 15675 - DNA, 1374 bp, Homo sapiens; identical to SEQ ID NO: 3631
  SIMILAR (298)..(354): 941254mologous to Homo sapiens Human secreted protein, SEQ ID NO: 4796,accession number G00715,Smith-Waterman Score=98.

SEQ ID NO: 15676 - DNA, 905 bp, Homo sapiens
  SIMILAR (495)..(662): 811254mologous to Mus musculus Pro-Pol-dUTPase polyprotein,accession number Y12713,Smith-Waterman Score=241.
tttgtggtgataactgtgtgtttgaaagctggattggagacatcatattggacatggacaatgagtttagtgactctatacataatacctttggccatatgtggagaaccaaggaacataatgaagctggttggttgctcctaagttcagtggacaaagtaatgaaagaaaatgatgaactcagggattctatctcctggcttcagaagcagatactgagtctcaaatctgctaagattgccctgagtgagagtcttatctcctgcagggaaagagctgaaattgtggaaaaacagacacaagctgttatcatgcgaatggctgacccgcaaggaaaggtgcatgcgcagcctcaacaggtgtctactgttaaagggaggacattgattggaaaagaatgggaccccgcaacttggaatggggacgtgtgggaggaccctgatgaagctggggacactgagtttgtaaactctgatgaaccttttttgccagaagtaacagcttccccatccccaagagacctctggccttttaccagggtaactttgcactggggaaagggaaatgatcagacattttggggactactggacactggctctgagctggtgatgattccaggggacccaaaatgtcattgtggtcctccagttaaagtagggggcttatggagctcagctgctgtagcagatgtggtttcattgcttgagcaaattaacacatctcctggtacctggtatgcagccattgacttggcaaatgcctttttctctattcctgtccataaagcccaccagaagcaatttgccttcagctgccataaagtgggtcgtgcacagcagcatccatcatcaaatggaagtggtatatatgtgatcaggcttgagcaggtcctgaaggcacaa

SEQ ID NO: 15677 - DNA, 1150 bp, Homo sapiens
  SIMILAR (569)..(1147): 731254mologous to Mus musculus Pro-Pol-dUTPase polyprotein,accession number Y12713,Smith-Waterman Score=735.
accacgtggtagaaataggaggagaaagacattccaagagagaagaatgacactgaatgaaagcccagagaaaataggcaaatggattgaatgctatgggcacccacctgcctctaagctggtggaaatttatattcatacagtctttgtggaagacaaattgtcaatatgtatcagaagctttaacaagaaggcagatggatcttggagaatgacagtggattattgtaagcttaaccaagtggtgactgcaattgcagctgctataccagatgtggtttcattgcttgagcaaattaatacatctcctgatacctggtatgcagccattgacttggcaaatgcccttttctccattcctgtccataaggggtatatcaactctctggctttgtgtcataatgttatttggagagaacttgattgcttttcacttccacgagataccacactggtccattacattgatgacattatgctgattggatccagtgtgcaagaagtagaaaacaaactggacttactgggaaagggcagagatttgtcctcactgaaagagacacttactcatgggtttacctatcctgcacacaatgcttctgccaagactaccatccatggatgcacagaatgccttacccaccctcatgttattccacacagcattgcctctgaacaagacactcactttacagctaaagaagtgtggcaatgggctcatggtaatggaattcactggtcttaccatgttccccatcatcctgaaatagctagattgatagaatggtggaatggccttttgaaatcacaagtacaatgccacctaggtgacaatactttgcagggctggggcaaagttctccagaaggccgtgtatgctctgaaccagtatccaatatatggtactgtttctcccatagccaggattcatgggtccaggaatcaaggggtagaagtggaagtggcaccactcaccatcacccctagtgatccactagcaaaatgtttgtttcctgttcccaagacattatgtgctgcttgcctagaggtcttacttccagggggaggaatgctgccaccaggagacacaacaacgattccattaaacaggaagttaagatttccactagaacactttgggctcctctaa

SEQ ID NO: 15678 - DNA, 2352 bp, Homo sapiens
  SIMILAR (974)..(2131): 801254mologous to Mus musculus Pro-Pol-dUTPase polyprotein,accession number Y12713,Smith-Waterman Score=1634.
atgcagaaacaggagggggctttagtgaggaaaaaggggagaaagaaagaaagaattactgcaagaggaagagtaagagcaaaaggagaaaattggaaaattttaaacatgtatagagtaaagttcatatggaaccaaaaaagagcccgcattgccaagtcaatcctaagccaaaagaacaaagctgcaggcatcaccctacctgacttcaaactatactacaaggctacagtaaccaaaatagcatggtactggtaccaaaacagagatatggaccaatggaacagaatagagccctcagaaataatgccacacatctacaactatctgatctttgacaatcctgacaaaagcaagaaatggggaaaggattccctatttaataaatggtgctgggaaaactggctagccatatggagaaagctgaaactggatcccttccttacaccttatacaaaaattaattcaagatggattaaagacttaaatgttagacctaaaaccataaaaaccctagaagaaaacctaggcaataccattcagaacataggcatgggccaggactacatgtctaaaacaccaaaagcaatggcaacaaaagccaaaattgacaaatgggatctaattaaactaaagagcttctgcacagcaaaagaaactaccatcagagtgaacaggcaacctacagaatgggagaaaatttttgcaatctactcatctgacaaagggctaatatccagaatttacaatgaaccccaacaaatttacaagaaaaaaacaagcaaccccatcaacaagtgggcgaaggatatgaacagacacttctcaaaagaagacatgtatgcagccaaaagacacgtgaaaaaatgctcatcatcactagccatcagagaaatgcaaatcaaaaccacaatgagataccatctcacaccagttagaatggcgatcattaaaaagtcaggaaacaacagggattgcggagatcagtgccactatcaaggacttgaaaggtgcaggggtggtgattcccaccacatccctgttcaactcttccgtttggcctgtgcagaagacagataaatcttggagaatgacagtggattattgtaagcttaaccaagtgttgactccaaatgcagctgctgtaccagatgtggttccattgcttgagcaaattaacacatctcctggtacctggtatgcagccattgatttggcaaatgccattttctccattcctgtccataaggcccaacagaagcaatttgccttcagctggcaaggccagcaatatacctttactgtcctacctcaggggtatatcagctctctggctttgtgtcataatcttattcgaagagaccttgatggctttttgcttctgcaaaatatcacactgctggtccattatgttgatgacattatgctgattggatccagtgagcaagaagtagcaaatgcactggacttattggtgagacatttgtgtgtcagaggatgggaaataagtccgactaaaattcagggaccttctaccttagtaaaatttctaggggtccagtggtgtggggcctgtagagatattctttctaaggtaaaggataagttgctgcatttggcccctcctacaaccaagaaagaggcacaacgcctagtgggtctatttggattttggaggcaacacattcctcatttgggtgggctactccagcccctttatctagtgattcaaaaggctgccatttttgagtggaatccagaaccggagaaggttctgcaaaaggtccaggctgctgtgcaagctgctcttccacttgggccatatgacccaacagatccaatcatgcttgaggtgttagtggcagatagagatgctgtttggagcctttggcaggccctcataggtgaatcacagcagaggcctgtaggattttggagcatggccctgccatcttctgcagataactactctccttttgagagacagctctttgcctgttcctgggccttggtggaaactgaatgtttgactatgggtcatcaagtcaccatgcaacctgaattgcctatcatgaactggatgctttctgacccatctagccataaagtggttcaggcacagcagcattcaggaagtggcacaaatgcccagggtctccacccctgccaccctgccttctctcccccagcctgcactgatggccccgtggacagttccctatgatcagttgatggaggaagagaaagctagggcacgatatgcaggcaccatccaaaagtggacagctgcagcactacagcccctttctaggacatccctgaaggacagtggtgaagggacttctaagtggg

SEQ ID NO: 15679 - DNA, 864 bp, Homo sapiens; identical to SEQ ID NO: 1393
  SIMILAR (913)..(2187): 991254mologous to Homo sapiens zinc finger protein (583 AA),accession number X51760,Smith-Waterman Score=2444.

SEQ ID NO: 15680 - DNA, 140 bp, Homo sapiens; identical to SEQ ID NO: 10183
  SIMILAR (12)..(68): 841254mologous to Homo sapiens Human secreted protein, SEQ ID NO: 5576,accession number G01495,Smith-Waterman Score=95.

SEQ ID NO: 15681 - DNA, 536 bp, Homo sapiens
  SIMILAR (71)..(127): 941254mologous to Homo sapiens Human secreted protein, SEQ ID NO: 5576,accession number G01495,Smith-Waterman Score=106.
atggtccaggaggcttctgaggtgatcgggcagcttcagtcttcagctgctaagctgagaagatctgggaaggagtcagtcagagagtcttgggccagagttccaggggctctgggagtggttgccagtcccaaccccaagcgttgctttcaatcttccttttctaccgacccatctgacctctcccttcatcccaagattgctcctcctcagttagcatttaggctctttttcgtcaaatatgaaaacccagcccagtgcatggctcatttggcaacaaccctgagacgctttacagccctagaccctaaaaggtcaaaaggccgtcttattctcaaaatacgttttattacccaatctgctcctgacatcaaataaaactccaaaaattaaattccggccctcaaaccccacaacaggatttaattagcctcaccttcaaggtgtacaataatagaaaacagttgcaattccttgcctccactgtgagacaaaccccagccacatctccagcacacaagaacttccaaacacct

SEQ ID NO: 15682 - DNA, 726 bp, Homo sapiens
  SIMILAR (919)..(1455): 651254mologous to Homo sapiens putative p150,accession number U93563,Smith-Waterman Score=591.
atgagcaccctcctcaataaaaccttgacagccctgcccaaggagcttaaccctcagttgcctgacccaagtcaagacggtactgcagggacaccagcaatatcaacgacgacaacgggggaaatccgcaaaagcagggttatgacaactgagatcacctctaaagtggaaaaaagcccaacgacagccactggcaatagctcatgtccttctactgagaccgaggaagaaaaggcaaaacggcttctttactgttcgctatgcaaggttgctgtcaactctgcctcgcagctggaggcgcacaacagtggtactaagcacaaaaccatgttagaagcccggaatggaagtggcactatcaaagcctttcctagggcaggagtgaaaggcaaaggacctgttaataaaggaaacacaggcctccaaaataaaacatttcactgtgaaatctgtgatgtgcacgtcaactcggaaacgcaacttaaacaggcttccgaggtgatcgggcagtgtcagtcttcagctgctaagctgagaagatctgggaaggagtcagtcagtgagcctcgggccagagttccaggagctctgggagtggctgccagtaatactgtgtctggaattggtgggttcttggtctcactgacttcaagaatgaagccacggaccctcgtggtgagtgtcacagttcttaaaggcggcgtgtccagagttcgttccttctga

SEQ ID NO: 15683 - DNA, 552 bp, Homo sapiens
  SIMILAR (289)..(345): 571254mologous to Drosophila melanogaster CG13885 gene product,accession number AE003468,Smith-Waterman Score=64.
caggcaaggggcagtgcaaaaatttaaaaataaaaaataacgtttttaagctattattatatgacatgtgttaattcatttaaatctcctaacaatcctatgatgtggtaaatactattattttcattcctgtttcattgatgaggaaagaccttgtctaggagaggtaaggcaatttgcctggggtcacagaaataagaaatgaaagagctggcattgaagctaagcagcctgactctagggctcatagtcagaaatgcgatctctctggaaatgatataattatagcactgcatttattcccaccaccaacaccatcattggtcatctccgctgccgtcaccaaccttgtctacagtttaggctagaggggcggctaggtccatgaagcacaccagtggtgatgagacaaagagacaaaaacttgactaagtaagactgacaggaataagggcttcaagggaagaagtcaccaaggaagctggtccccggaagagaataatgtgcagcggaatggatgaactaaatggaggcctgcaactgtgaacgtga

SEQ ID NO: 15684 - DNA, 1056 bp, Homo sapiens
  SIMILAR (22)..(993): 231254mologous to Saccharomyces cerevisiae mal5, sta1, len: 1367, CAI: 0.3, AMYH_YEAST P08640 GLUCOAMYLASE S1 (EC 3.2.1.3),accession number Z38061,Smith-Waterman Score=161.
atgctggctgctccttgtgctggctgccctgtgttggagaagctgcctgagctgccagtacctggtgtgggagaggctgcccacagtgcaggagtgtctgtgatggtccagaaggcttccaaggtgattgggcagcgtcagtcttcagctattaagctgagaagatctgggaaggagtcagtcagagagccttgggccagagttccaggggctctgggagtggctgccaggcaagttggacagtctgatttccagtggggtcccgtacagatagaacatggcttaggaggaatcccgggctgcaggcattccttggcccagtggccagatttccagcacttgaagcaagatcctggggcgggcagtcctggaggaacccctggctgctgcggttcaggcgttatgaagttcttgtgtgctggagatgtggctgaggtttctctcacagtggaggcaaggaattgcaactcagaaatacgttgctacttggctgcctctgttctattattgtacaccttgaaggacagtgaagaaagttacaaaacttacctaagagtaaaatgggtcaaaagcatggttggagaattcaggggaggagtacctagccgcccctctagcctaactgtagacaaggttggtgacggcagcggagatgacaatgatggtgttggtgatcaaaccagccacaacactcccttaagccaaagactaatccagagcaaggccctaactctcttcaatcctctgaaggctgagagagatgaaaaagctgcagaagaaaagtttgaagctaacagaggttggttcatgaggtttaaggaaagaagctgtctctataacataaaagtgcaagaggaagcagcaagtgctgatggagaagctacagcaagttatccagaagatctagataagactattgatgaaggcagctacactaaacaacatattttcaatgtggacaaaatagccttcagttggaggaaggtgctatctaggattttcacagctagagagaagtcaatgcctagcttcaaagagcttcaaaggacaggctga

SEQ ID NO: 15685 - DNA, 534 bp, Homo sapiens
  SIMILAR (444)..(184): 341254mologous to Reticuloendotheliosis virus C end of pol protein (reverse transcriptase),accession number X01455,Smith- Waterman Score=123.
ccaggagtaagaggagcccagggtggtccctctatccccaggcagtgtgaagagtctgctattggtcctaaatttgcttggatcatctcttcctttcactggaagcaaggcatgttcaacatggaggctccttcttcccttttctttgtcaacatgtgtgcagtaaagaagcagacaacctggggccggccagacagaggattcatctggcagccacttccagagcccctggaactctggcccaaggctctccgactgactccttcccagatcttctcggcttagcagctgaagactgacgctgcccgatcgcctcggaagcctgacacttatactttctgctcccccggctccttcagttgtacccactctttgttgagtcccacaattaccattgttctcggcccggacttcaatccggtctcccacattattccagataccacacctgaccctcatgactgcatctctctgatccacctgacgttcaccccatttccccacatttccttcttccctgtttctcaccctcat

SEQ ID NO: 15686 - DNA, 990 bp, Homo sapiens
  SIMILAR (412)..(1218): 581254mologous to Homo sapiens NADH dehydrogenase (ubiquinone),accession number L04490,Smith-Waterman Score=645.
ttttggacgctcgaaggcactgggaaggaactcccgggtttacgcacacgtccccggacgcgtgggcggacgcgtggggcaagatggcgggtgaaaaagttgagaagccagatactaaagagaagaaacccgaagccaagaagagttgatgctggtggcaaggtgaaaaagggtaacctcaaagctaaaaagcccaagaaggggaagcccccattgcagccgcaaccctgtccttctcagaggaattggcaggtattcccgatctgccatgtattccagaaaggccatgtacaaaaaggaagtactcagccgctaaatccaaggttgaaaagaaaaagaaggagaaggttctcgcaactgttacaaaaccagttggtggtgacaagaacggcggtacccgggtggttaaacttcgcaaaatgcctagatattatcctactgaagatgtgcctcgaaagctgttgagccacggcaaaaaaacccttcagtcagcacgtgagaaaactgcgagccagcattacccccgggaccattctgatcatcctcactggacgccacaggggcaagagggtggttttcctgaagcagctggctagtggcttattacttgtgactggacctctggtcctcaatcgaggttcctctacgaagaacacaccagaaatttgtcatttgccactttcaccaaaatcgatatcagcaattgtaaaaatcccaaaacatcttactgatgcttacttcaagaagaagaagctgcggaagcccagacaccaggaaggtgagatcttcgacacagaaaaagagaaatatgagattacggagcagcgcaagattgatcagaaagctgtggactcacaaattttaccaaaaatcaaagctattcctcagctccagggctacctgcgatctgtgtttgctctgacgaatggaatttatcctcacaaattggtgttctaaatgtcttaagaacctaattaaatagctgactac

SEQ ID NO: 15687 - DNA, 1403 bp, Homo sapiens
  SIMILAR (135)..(581): 591254mologous to Homo sapiens NADH-ubiquinone oxidoreductase 39kDa subunit,accession number AF050641,Smith-Waterman Score=352.
  misc_feature (1)...(1403): n = a,t,c or g
tgtttccaaataagtttatttctaaaagacattttaattacattgatttattagaagcatttgtagtccttcatggtttcagaaaatcaattgttcagacctttttgaacatatctgattgtgatattcatactgtgtaactctgaatttaaatcaagttcagtggaaattaagatatgatgtattattttttagtgtatgtttcgtatctgaatttttgatgcagttaaaaaagccttaagaaaacgacaaaaaagctagagtgcagacaacctaaaatctctattttaaaacatcattttcctgaggccatgcagactcatatctaagtttttttcatttaaatagacttaattctaacaaatacttactttcataatgaaaaacttttttaagggtgggacagacatactagttacgaaatgaaagttttcaatcacagatcaggaagtataatgagattacatcaaatgtgaatttgtgtgcctaaagaattctcttcacttaagtcttattacttgcctgtcgaagaggcaagggcagaagacatcagtaccttgttgaaaccccggccgtgtagaacaggcctggccctctgccagggtaatatgggagacagacgtcctcggtgagcttggttgtaaaggcatctgctgcagctcaggaagcaatgaagagccgagacccaaggcatcatccacttccagaagggctccctttatgggctcttggcgacctgtaacactgttttagcacagaaattttgaacagtggtaacaggtacaataggtaaaccaaagtatataagcttatttggtgaatcttcatccctcattacggttttctggacagccgcacacggattcggtatggcacattccttcgaatacagataactttagcaccttattcctttggcccagacagctttgttgagcctggtgtcaatgcgcacatctggagttcccatctccttcatggcaaatttccgaatctctttgagtgcccgaggtgcacgcttcttgaagcccactccatggatgctgcttgtgaatggttgagggtggaattctccgggttaacacttcggttgaatgcaaaacgggcccttttttcttctcgccacacattctttggcgggagccattctgcagcgtccaagttggaaagaaaaagaaggagaaggttctcgcaactgttacaaaaccagttggtggtgacaagaacggcggtacccgggtggttaaacttcgcaaaatgcctagatattatcctactgaagatgtgcctcgaaagctgttgagccacggcaaaaaacccttcagtcagcacgtgagaaaactgcganccagcattacccccggggaccattctgatcatcctcactgggacgccacaggggc

SEQ ID NO: 15688 - DNA, 388 bp, Homo sapiens
  SIMILAR (163)..(387): 901254mologous to Homo sapiens p40,accession number U93566,Smith-Waterman Score=338.
cctccgctggtgatacccaggcaaacagggtctggagtggacctccagcaaactccaacagacctgcagctgagggacctgactgtcagaaggaaaactaacaaacagaaaggaacagcatcaacatcaagaaaaaggacatccacaccaaaaccccattgtgtatctgaaagtgacggggagaatggaaccaagttggaaaacactctgcaggatattatccaggagaactcccccaacctagtaaggcaggccaacattgaaattcaggaaataaagagaacaccacaaagatactcctcaagaagagcaaccccaagacacataattgtcagattcaccaaggttcaaatgaaggaaaaaatgttaagggcagccagagagaaag

SEQ ID NO: 15689 - DNA, 456 bp, Homo sapiens; identical to SEQ ID NO: 991
  SIMILAR (91)..(420): 761254mologous to Homo sapiens putative p150,accession number U93563,Smith-Waterman Score=426.

SEQ ID NO: 15690 - DNA, 507 bp, Homo sapiens
  SIMILAR (367)..(816): 801254mologous to Homo sapiens Human secreted protein, SEQ ID NO: 5366,accession number G01285,Smith-Waterman Score=581.
atgcatttccagttccagagagaaattcacactggaaatataaatttaggaattttaaagttagtggtcacatttaaagctgcagaatacaaagagatcacctgtgtgagagaactgagtcctgaaacatacccgtgtttaaagatctgggagcctccgctggtagtacccaggcaaacagggtctggagtggacctccagcaaactccaacagacctgcagctgagggacctgactattagaagtaaaactaacaaacagaaaggaatagtatcaacatcaacagaaaggacatccacaccaaaactccaactaataaacagtgtagagaagagcttaaatgacctgctggagctgaaaaccatggcacgagaactacgtgacacatgcacaaacttcagtagccgattcgatcaagtggaagaaagagtatcagtgactgaagatcaaattaatgaaatgaagcaagaagagaagtttagagaaaaaagagtaaaaaagaaatga

SEQ ID NO: 15691 - DNA, 1839 bp, Homo sapiens
  SIMILAR (26)..(439): 941254mologous to Homo sapiens laminin-binding protein,accession number J03799,Smith-Waterman Score=703.
atgggccagcctctcaggcctcaggcaaattatagtcaaatacatcacccccctcaggcatctgtggcaaggcatccctctagagaacaactaattgattacttgatgctgaaagtggcccaccagcctccatatacacagccccattgttctcctagacaaggccatgaactggcaaaacaagagattcgagtgagggttgaaaaggatccagaacttggatttagcatatcaggtggtgtcgggggtagaggaaacccattcagacctgatgatgatggtatatttgtaacaagggtacaacctgaaggaccagcatcaaaattactgcagccaggtgataaaattattcagacctcagaaagtactactacagtaaaaagcaaagttgatgaaagagaaaaatatatgataggaaactctgtacagaagatcagtgaacctgaagctgagattagtcctgggagtttaccagtgactgcaaatatgaaagcctctgagaacttgaagcatattgttaaccatgatgatgtttttgagcctctgctggtgatacccagtcaaacagggtctggagtggacctccagcgaactccaacagacctgcagcagagggacctgactgttggaaggaaaactaacaaacacaaaggaatagcatcaacatcaacaaaaaggacatccacaccaaaaccccatcttttcccttttcataaggacaccagtcatattggatatgggaccaacctaactccagtctttagagcacaggacgatgaatctatggcgatcattctaactatgtcagttagtgatttcaattattcacggactagtctttcaaaaagaccaaatgcaagggttggttctgagcattctttattagatcctccaggaaaaagtaaagttcctcgtgactggagagaacaagtacttcgacatattgaagccaaaaagttagaaaagctggtgattgaaattactgccctggaacaagggagagggaataacccgcaacttcctcattacgctgggtggaaaattagcggcagggcccccgatcgtattgtccttaaaggtgtggaacgtttaggcggcggtgtctatcgcgttctgccggatcgtatcgaaaccggtactttcctggtggcggcggcgatttctcgcggcaaaattatctgccgtaacgcgcagccagatactctcgacgccgtgctggcgaaactgcgtgacgctggagcggacatcgaagtcggcgaagactggattagcctggatatgcatggcaaacgtccgaaggctgttaacgtacgtaccgcgccgcatccggcattcccgaccgatatgcaggcccagttcacgctgttgaacctggtggcagaagggaccgggtttatcaccgaaacggtctttgaaaaccgctttatgcatgtgccagagctgagccgtatgggcgcgcacgccgaaatcgaaagcaataccgttatttgtcacggtgttgaaaaactttctggcgcacaggttatggcaaccgatctgcgtgcatcagcaagcctggtgctggctggctgtattgcggaagggacgacggtggttgatcgtatttatcacatcgatcgtggctacgaacgcattgaagacaaactgcgcgctttaggtgcaaatattgagcgtgtgaaaggcgcatattctagagcgcttctcaagcgcatccaaaatatccgtaaggcccggcagttcgacgtctacgtcaatgaccagaaagttggatcgtttaaccctgatgttcggaatgcacaaaaggtcctgccaacattagcggactgcactaacgactga

SEQ ID NO: 15692 - DNA, 1951 bp, Homo sapiens
  SIMILAR (163)..(624): 981254mologous to Homo sapiens Human secreted protein sequence clone mh703_1,accession number Y22499,Smith-Waterman Score =813.
gctattctgtacctcatttccgatttttgtcagtttcctttttttttatctataaatttgttccgaccacgaggcatccctggtgtctctctaaatctgctgtgattctgggggctgccggattcggcaaattgtttgttgctcaatcaaaactcctttaaatttaattcaactgaagtttcttttaacaagtacaagatcatcattattttttgccaacccttataattgatccctctatctttagtccttttatttattttcttactcaattactgaaataaagaggagaaatgaactctagaggcagaaataatctcagcatcataaataaaaccgatttcccttttatagcactaaatgcccacaagagaaagcacgaaagatctaaaattgacaccctaacatcacaattaaaagaactagagaagcaagagcaaacaaattcaaaagctagcagaagtcatgaaataactaagatcagagcagaactaaaggagatagagacacacaacaaacccttcaaaaaaatcagtgaatccagggagctggttttttattttttatttttgaaaggatcaacaaaattgatagaccgctagccagactaataaagaaaaaaagagagaagaatcaaatagacacaataaaaaatgataaaggggatatcaccaccgatcccacagaaatacaaactaccatcagagaatactataaacacctctacgcaaataaactagaaaatctagaagaaatggataaattcctggacacatacaccctcccaagactaaatcaggaagaagttgaatctctgaatagaccaataacaggctctgaaattgaggcaataattaatagcttaccaaccaaaagaagtccaggaccagatggattcacagccgaattctaccagaggctaaaacagtgccgaaaagcacatctagacccagtgtctctcacacaccggagcggccccggagcgcgggaggaccggctgagtgacagcggagacgcgtcccgaggttgttggaacctgtcacagcacgccgccgtcacgtcgcccgagtctgaggagcggcgcatcaggaccctcagctgcaggtctgttggagtttgccggaggtccactccagaccctgtttgcctgggtatcagcagtggaggctgcagaacagtgaatattggtgaacagcaaatgttgctgcccgatcgttcctctggaagttttgtctcagaggggtaccgtccgtgtgaggtgtctgcccctactggggggtgccctccagttaggtgtctgatgatcaacactgtgtccttaataggtgtcaagtttactgaagtgtttgattcaataaacatatctgaacatctagagcttgcatgcctgcaggatcacaactccttgctagcaagggaacaaaactggacagaggatgagtttgacgaattaacagaagtaggcttcagaaggtgggtaataacaaactcctctgagctaaaggaggaagttcaaacccattgcaaagaagttaaaaaccttgaaacaagattagacgaatggctaactagaataaccaatgcagagaagtccttaaaggacctgatggagctgaaaaccatggcaggagaactacgtgatgcgtgcacaagattcagtagccgattcaatcaactggaagaaagggtaacagagattgaagatcaaatgaatgaaatgaagcaagaagagaagtttagagaaaaaagaataaaaagaaatgaacaaagcctccaagaaatatgggactatgtgaaaagaccaaatctacattggcttggtgtacctgaaagtgacagggagaatggaaccaagttggaaaacactctgcaggatattatccaggagaacttccccaacctagcaaggcagaccaacattcaaattcaggaaatgcagagaatgccataa

SEQ ID NO: 15693 - DNA, 1414 bp, Homo sapiens
  SIMILAR (222)..(581): 861254mologous to Homo sapiens YTM1,accession number AF242546,Smith-Waterman Score=518.
aatcaggactacaggccctactgctcaatggatccttacctaaagatgaacaggagaggcccttggccctctgtgaaccaggtgtcaatcccgaggaacaactgattataatccaaagtcgtctggatcagagtatggaggagaatcaggacttaaagaaggaactgctgaaatgtaaacaagaagccagaaacttacaggggataaaggatgccttgcagcagagattgactcagcaggacacatgctgttcttcagctcaaacaagagctactgagggcaaatatggacaaagatgagctgcacaaccagaatgtggatctgcagaggaagctagatgaaaggaaccggctcttgggagaaatataaaaaagagctggggcgagaaggatcgccttcttcagcagcaccaggccaagttagaagaagcactccggaaactctctgatgtcagttaccaccaggtggatctagagcgagagctagaacacaaagatgtcctcttggctcactgtatgaaaagagaggcagatgaggcgaccaactacaacagtcacaactctcaaagcaatggttttctccttccaacgggcagggaaaaggagctactttcagttcaggcaacagagggaccagcgacctgcagcttgttcgagatgctctccgcagcctgcgcaacagcttcagtggccacgatcctcagcaccacactattgacagcttggagcagggcatttctagcctcatggagcgcctgcatgttatggagacgcagaagaaacaagaaagaaagcctccactggtgatacccaggcaaacagggtctggagtggacctccagcaaactccaacagacctgcagctgagggacctgactgttagaaggaaaactaacgaacagaaaggaatagcatcagcatccacaaaaaggacatctacaccaaaaccccatcgtaggtcaccaacatcaaagaccaaagcaccacattgcacttattctaaaatttaccacataattggaagtaaaacactcttcagcaaatgtaaaagaaaagaaatcacaacaaacagcctctcagaccacggggcaatcaaattagaactcaggattaagaaactcactcaaaatggcacaactacctggaaactggacaacctgctcctgaatgactgctggttaaataacgaaatgaaggcagaaataaagatgttctttgaaaccaatgagatcaaagacacaatgtacaagaatccctgggacacatttaaagcagtgtgtacaggggaatttatatcactaaatgcccacaagagaaagcaagaaagatctaaaattgacatccgaacatcacaattaaaagaactagagaagcaagagcaaacaaattcaaaactagtagaaggcaagaaataa

SEQ ID NO: 15694 - DNA, 3289 bp, Homo sapiens
  SIMILAR (151)..(11): 811254mologous to Plasmodium lophurae histidine-rich protein,accession number X01469,Smith-Waterman Score=302.
  misc_feature (1)...(3289): n = a,t,c or g
atggcctgtgaccgactgagccaatcagaagaccacagctacccacctccagttgaccacggctatcatagattgcaaaaatggccagaaagtcttcccatccctgaatacataccctttttgcaatgtgcctttgcaactccttatatcaagagactccacctctgggggaagggcatagctgaacaaaagacagcagagagcttctgcagatttaaaacatcactgtctgacagctctgaaaagagcagtggttctctcagcaaggcatttgaaaaaaaaggggnncccnctttgnaagaaatggacagactgcctcctcaagcgggtccctgacccctgtgtagcctaactgggagacaccttcccagtaggggccaacagacaccctcatataggcagggtgcccctctgggatgaagcttccagaggaaggatcaggcagcaacatctgctgttttgctgttctacagtatttgctgtgctgcagcatttgctgtgctgcagcctccgctggtgataaccaggcaaacagggtctggagtggacctccagcaaactccaacagacctgcagctgagcgaacctgactgttacaaggaaaactaacaaacagaaaggaatagcatcaacatcaacagaaatggacatcaacaccaaaaccccatctgtaggtcaccatcatcaaagaccaaaggtagtataaaaccacaaagatcggggagaaaccagagcagaaaagctgaaaattctaaagaccagaggacctcttctcctacaaaggattgcagctcctcaccagcaacagaacaacgctggatggagaatgactttgatgagctgacagaagtaggcttcagaagcctggcagagacacaacaacaacaaaaagagaaatttagaccaatatccctgatgaacatcgatgtgaaaatcctcaataaaatactggcaaaccgaatccagcagcacatcaaaaagcttatccaccatgatcaagttggcttcatctctgggatgcaaggctggttcaacatatgcaaatcaataaacgtaatccatcacataaacagaaccaatgacaaaaaccacatgattatctcaatagatgcagaaaaggcctttgacaaaattcaacagcccttcatgctaaaaactctcaaaaaactaggtattgatgggacgtatctcaaaataataagagctatttatgacaaatccacagccagtatcatactgaatgggcaaaaactggaagcattccctttaaaagacaggacaagacaaggatgtcctctctcaccactcctattcaacatagcattggaagttctggccagggcaatcaggcaagagaaagacataaagtgtattcaattaggaaaagagaaagtcagattgtccctgtttgcagaggacatgattgtatatttagaaaaccccatcgtctcagccccaaatctctttaagctgataagcaacttcagcaaagtctcaggatacaaaatcaatgtgcaaaaatcacaagtattcctatacatcaataacagacaaagagagagccaaatcatgaatgaattcccattcacaattgccagaaggagaataaaatacctaggaatccaacttacaagggatgtgaaggacctcttcaaggagaactacaaaccactgctcaaggaaataaaagaggatacaaacaaatggaagaatatgccatgctcatggataggaagaatcaatatcatgaaaatggccatactggccaaggtaatttatagattcaatgccatccccatcaagctaccaatgactttcttcacagaattggaaaaaaactactttaaagtgtatatagaaccaaaaaagagcccatattgcaaagccaatcctaagccaaaagaacaaagctggaggcatcacactacctgacttcaaactacactacaaggctgcagtaaccaaaacagcatggtactggtaccaaaacagagatatagaccaacggaacagaacagagcccacagaaataatgctgcatatctacaaccatctgatctttgacaaacctgacaaaaacaagaaatggggaaatgattccctatttaataaatggtgctgggaaaactggctagccatatgtagaaagctgaaacgggatcccttccttacaccttatacaaaaattaattcaagatggattgaagacttaaatattagacctgaaaccataaaaaccctagaagaaaacctaggcaataccattcaggacatagccatgggcaaggacttcatgtctaaaacaccaaaagcaatggcaacaaaagccaaaattgacaaatgggatctaattaaactaaagaacttctgcacagcaaaagaaactaccatcagagtgaacaggcaacctacagaatgggagaaaatttttgcaatctactcatctgacaaagggataatatccagaatctacaatgaactcaaacaaatttacaagaaaaaaaaacaaccctatcaaaaagtgggcaaaggatataaacagacacttctcaaaagaagacatacaagcagccagcaagcacgtgaaaaaacattcaacatcgcgaatcttcatgcaaattaaaaccacactggggtaccatctcacaccagtcagaatggctactattaaaaagtcaaaaaacaacagatgttggtgtggatgtggagaaaagggaacgcttatacattgttggaggtcaggcccctctgctgcaggtctggtggagtttgctggaggtccactccagaccctgtctgcctgggtatcaccagcagaggctgcagaacagcaaagattgctgcctgttccttcccctggaagggaagcttcatcccagaggggtacctgccagatgccagccagagctctgctgtatgaggtgtctgttgacccctgctgggaggtgtctccaaatcaggaggcatgggggtcagggaccaacttgaggaggcagtctgtgtcttagcagagctagagcgctgtgctgggatatctgctgctctcttcagagccggcagacaggaatgtttaagtttgctgaagctgcgcccatagccaccccttcccccagttgctccatcctagggtgatgggggttttatctatggaacaggtatgcactctgggcctgagatgagaaggtgtgttgtgccctggggaaatggtgtcttgaacaagctaaacagtaacatatcatagggtgaactgatgtagtactccatgtctcagggaaatagaaaagtggtg

SEQ ID NO: 15695 - DNA, 909 bp, Homo sapiens
  SIMILAR (1)..(330): 741254mologous to Mus musculus Pro-Pol-dUTPase polyprotein,accession number Y12713,Smith-Waterman Score=423.
atggtaaatcaaaaacgatatcacatccctggagggactgcagagattagtggcaccatcaagaagttgaaaaatgcaggggtggtgattcccactacatccccactcaactctcccatttggcctgtgcagaagacagatggatcttggagaatgaccatggattatcataagcttaaccaagtggtgactccaattgcagttgctgtaccatatgtggttgcattgcttgagcaaattaacacattttcttgtacctggtatgcagccatcgacttggcaaatacctttttctccttttctgttcataaggcccaaagaagtaatttgccttcagcaggcaaggccagcaatatacctttactgtccacccttagtgataactactctccttttgagagacagctcttggcctgttactgggcttcggtggaaactgaacatttgactatgggttatcaagtcaccatacaacttgaactgcctatcatgaactgggtgctttctgacccatctagccataaactgggtcatgcaaagcagcattccatcatcaaatggaagtggtatatacgtgatcgggctcgagcaggtcctgaaggcacagccaggattcacaggtccaggaatcaaggggtggaagtggaagtggcaccactcaccatcaccccaagtgatccactagcaagatttttgcttcccgttcccacaatattacattctgccggcctagaggtcttagttccagaaggaggaacactgccactgggagacacaacaacaattccatttaactggaagctaagattgccacctggacactttaggctcctcctacctttaaatcaacaggctaagaagggtgttacggtgtttgctggggtgattgaggctattaagatgaaataa

SEQ ID NO: 15696 - DNA, 912 bp, Homo sapiens
  SIMILAR (915)..(2000): 981254mologous to Homo sapiens bA145L22.2 (novel KRAB box containing C2H2 type zinc finger protein),accession number AL050328,Smith-Waterman Score=1983.
atggtgcttgaggtgtcagtgtcagatagggatgctgtttggcgcctttggcgggcacccataggtgaatcacaacagagatctctaggattttggagcaaggttctgccatattctgcagataactactttccttttgagagacagctcttggcctgttactgggctttgttggaaactgaccgtttgactgtgggtcatcaagtcaccttgcaacctgaactgcctatcatgaactgggtactttctgacccatctagccataaagtgggtcatgtacaccagcattccatcatcaaatggaagtggtatatacgtgatcagactcgagcaggtcctgaaggcacaaccacccctgtcatcacccaatggatgcccatgaacaaagtggccttagtggcagggatggagaaagggcagaggtttgtactcactggagtagatacttactctggatattggtttgcctatcctgcacacaatgcttctgccaagactagcatctatggattcacagaatgccttatccattgtcatggtattccacacagcattgcctctgaccaaggcactctctttacggctaaagaagtgtggcagtgggctcatgctcatggaattcactggtcttaccatattccccatcatcctatagcagctggattgatagaatggtggaatggccttttgaagtcacaattacaatgccaactaggtgacaatactttgcagggctggggcaaagatctccagaaggccatgtattctctgaatcagcgtctgatatatagtactgtttctcccatatccaggattcatgggtccaggaatcaaagggtggaagtggaagtggcaccactcaccatcacccttagtgatccactagcaaaatttttcttcctgttgccatga

SEQ ID NO: 15697 - DNA, 754 bp, Homo sapiens
  SIMILAR (113)..(1048): 891254mologous to Rattus norvegicus Citron-K kinase,accession number AF070065,Smith-Waterman Score=1463.
atgcaaaataatgttgattcttttcaggagccacccccaacacccctgttttcttctagacctatagctagactaaagtccaagcaggcccctagaggtgaggctgagagtgtgacccatgaggagttagaatctataaggttacgagcaaaaacttctgacaaaataagctcactcacattcaggaggggctggggcaaagttctccagaaggccatgtatgctctgaatcagcatccgatatatggtactgtttttcccatacccaggattgatgggtccaggaatcaaggggtggaagtgaaagtggcaccactcaccatcacccttagtgatccactagcaaaatttttgcttcctgttctctcagcattacattctgctggcctagaggtcttagttccagagggaggaatactgccaccaggagcaggagacatgagaatgattcaattaaactggaagttaagcttgccacctggatactttgggctcctcctacctttaagtcaacagactaagaagggagttacagatttgggtggggtgattgacctggactatcaagatgaaatcagtctactattccatatcagaggtcaatgggaaactacaacagcccaatccagacaggactacaagtggtccagacccctcaggaatgaaggtttgggtcactccaccaggaaaaaaccacaacctgctgaggggcttgctgaaggcaaagggaatacagaatgggtagtagaagaag

SEQ ID NO: 15698 - DNA, 1509 bp, Homo sapiens
  SIMILAR (287)..(403): 1001254mologous to Homo sapiens lanthionine synthetase C-like protein 1,accession number Y11395,Smith-Waterman Score=205.
atgacagctgacactggcggtaagctggaagatcaactggaccgtcaacaggaacatctacctgatgctttccagtatggcaatctcagagtaactgaaattccaacaagaaagtttgccgacctctggtataaacaagtggaggaagaaaacagccagaaaatctcaaaaagtaagccaaccggccagagaaaagaaaatcagacaaatgatgtgctctcatttattcttcactttaatcctaaaatgttggtgcccacagcagaagtcacctgcagtacatctggtacagctgcagccttgcatggagttggcacctgtgccagcacctggagctgcctgtccatcacagctggcatgcctggctgtgcacagtggccaggccccacgcttacctgctcacacacccctcactgcttcatgcctagctcacacttggcagatggcctattgtgggaccttgtgatcatcggcaaggagtttggtgagtctatgcataatacctttgaccatatgtggaaaaagaaggaacatgaggaagctggttggttgctcctaagttcagtggacaaagtgatgaaagaaaatgatgaactcaggggttctacccacttgcttcagaagcagatactgagcctcaacatagagctgcatcagggtttatttattgatttgggccagctaagtagaaactgtgcatttaatgttgcagatcggggagttcaaaaagacagatgtatcttgaagacagtggattatcataagcttaaccaagtggtgactccaactgcagctgctgtaccagatgtggtttcattacttgagcaaattaatacctatcctggtacctggtatgcagtcattgacttggaaaatgcctttttctccgtgcctgtccataacgcccaccagaagggatttgccttcagctggcaaggccagcaatatacctttactgtcctacctcaggggtatatcaactctccaactctttgtcataatcttattcggagagaccctggtcacttttcatatccacaagatatcacattggtccattacattgatgacattatgctaattggatccagtgagaaagaagtagcaaacacattggacttattgcccatttatcaagtgaccctaaaggctgccaattatgagtggggtccagaacaggagaaggctgtgcaacaggtccaggctgctgtgcaagctgctctgccacttggacaacataacccagcagatccaacggtgcttgaggtgtcggtggcagatagggatgctatttggaacctttggcaggctcccatagccaggattcatgggtccaggaatcaaggggtagaagtggaagtggcaccactcaccatcacccctagtgatccactagcaaaatttttgcctcctgttcctgcaacattctgttctgctggcctagaggtcttagttccagaaggaggaatgctgccaccaggagagatagaaacaattccattaaagtga

SEQ ID NO: 15699 - DNA, 554 bp, Homo sapiens
  SIMILAR (117)..(7): 971254mologous to Arabidopsis thaliana putative protein,accession number AL162506,Smith-Waterman Score=181.
tttttatactcctctcttcaagaggcggagcttaatgtctttcctcttgtgtgtgagctgaacttagtgattcacttctaatgaataaggcagtgacagtgggggacttcatggactaggtcataagaagacactgggactttccattttggccacactctctcaagatcactccactttggaggaggcccagatgccacactgtgaacaggccccatggagaaaccccatagtgaggaactgagggctcctacagcagctaagtaagtgggcttggaggtggattctccactttcagtcaagtcccagctgacataccacttgcaacttcatgagagaccctgagtcagaaccatccagctaaactgcttggcaaaattcctacagaagctatgacataataaatgtgcgttgttgttaagtaaatcaatttggggtaattttttgtgcagcaataattaactaatatgagtgtctaaagcagtcttttaaaacacaaacagattatttcccttctccgcttaatacatctcagtgacctctcatttcatctg

SEQ ID NO: 15700 - DNA, 618 bp, Homo sapiens
  SIMILAR (235)..(357): 531254mologous to Homo sapiens dJ543J19.6 (ATP synthase, H+ transporting, mitochondrial F1 complex, epsilon subunit),accession number AL109840,Smith-Waterman Score=92.
  misc_feature (1)...(618): n = a,t,c or g
atgccacactgtgaacaggcccatggagaaacccatagtgaggaactgagggctcctacagcagctaaatttaaaaaagccggcgccgtttccctgaagcgggcgcaaagccaggccctcggggcggccgtgcccgcgccgcctcgcgtcctcgcttcccgaaagcacgcggctcagtggtccttagcgagcggggacaccccggccttcttgcccccgtcgtccccgccgggctacatccgatactccccagatctggtgcaaaacgcagtgagagatacactgaaagacagaattcaaagcaaatgctgccagaagacttctggcagcaacgtaaaaattgtggaaagtaaagaagggaataatctaccctgactaaaagcttggaaatgcttacatttcccaaggtgaaagatgttgttgggcacattgttatgggcagatttgaaaaggatctcacttccatgggaaaaaaaaaaaaatcctgttcttgttcataaaattgacaatgtcaataaatttgaaatatggttcnnnnnnnnnnnnnnggggcgccctttttaaagagtaccttgggggcccaacttttcagcgttgattgggaggtgatattctttt

SEQ ID NO: 15701 - DNA, 753 bp, Homo sapiens
  SIMILAR (300)..(25): 451254mologous to Plasmodium falciparum glutamic acid-rich protein,accession number J03998,Smith-Waterman Score=165.
atgacattggctgcaaacccgacagtggattggaacctcaacccccgattaatccctcggaacgggaactctgcgtgttttgcttggaaccgcggaggcgcagatgctgcaattctctcatctttacgccgattatggcggcaaaccggcactggaagatatcaacctgacgctggaaagcggcgagctactggtggtgctggggcgtccggctgcggtaaaaccaccctgctgaatctgattgccggttttgtgccttatcagcatggcagcattcaactggcgggtaagcgtattgagggaccgggagcagagcgtggcgtagtttttcagaatgaagggctactaccgtggcgcaatgtacaggacaccgtggcgttcggcctgcaattggcaggtataaagaaaatgcagcgtctgaaattcgcgcaccagatgctgaaaaaagtggggctggaaggcgcagataaacggtacatctggcagctttccggtggtcaacgtcagcgggtggggattgctcgtgcgctggcggcgaatccccagctgttattactcgacgaaccgtttggtgcgctggacgccttcacccgcgaccagatgcaaaccctgctgctgaatctctggcaggagacgggcaagcaggtgctgttgattacccacgatatagaagaagcggtgtttatggcgactgaactggttctgctttcatccgccccccggccgtgtgctggagcggctgccgcatatatt

SEQ ID NO: 15702 - DNA, 2760 bp, Homo sapiens
  SIMILAR (1509)..(649): 961254mologous to Escherichia coli ftsH,accession number M83138,Smith-Waterman Score=1415.
atgtgggcgcagttgcccgacgacgtaatgcgctacggcatatccaaccagaatcttcaggcggtgccgccacccggttctatctcttatatcacccatgctacgtcgagtattcatccgattgtggcgaaagtagagatacgcaaagagggcaaaacaggacgcgtttactaccctgccccgtttatgactaacgagaatctggcgctgtatcaggacgcttacgaaattggcgcagaaaagatcatcgacacctacgcggaagcgactcgccatgtcgatcaggggctgtcgctgacgctttttttccccgataccgccaccactcgcgatatcaacaaagcgcagatttacgcctggcgcaagggtatcaaaacgctctattacatccgcctgcgtcagatggcgctggaaggcactgaaattgaaggctgcttcttcccaaatggtcaaagggttgcaatgcccaaaacaaatggccgggttaaaaagatgacacagtttgccaagggattccgatacggtcagacgcagcacgtgggctacacgttcgtgccagcgcagccggcgcagtgcatgcaagccaatcggacaggaaggggtcgcgtcgatgtcgttcaaactgctagcgctgtgccgatgagggttgttcataggggtaccgagctaagcaccggagaaaccaggagtaccacgggcaatgattgccgcgtcgatatcgggtgccaatggtacgcgacgcatgtgaactttcaggatctgctcacgaccgcgaacatctggcaagccgaccacaacctgacggtcgaaacggccaggacgcagcagggccgggtcgagaacgtccggacggttagtcgcggcgataacgatgataccttcgttaccttcgaagccatccatctcaaccagcatctggttcagagtctgttcacgttcatcgtgaccaccgcccagaccagcgccacgctggcggcctacggcgtcgatttcatcgataaagatgatgcacggtgccgctttcttcgcctgttcgaacatgtcacgaacacgggatgcacccacaccgccgaacatttctacgaagtcagaaccggagatagtaaagaacggaactttcgcttcgcctgcaatcgctttcgccagcagcgttttaccggtacccggaggaccgaccatcaagacgcctttcgggatcttaccgccgagtttctggaagcggctcggctcgcgcagatactcaaccagttcagcaacttcttcttttgcttcgtcgcagcccgcaacgtcagcaaaggtcgttttgatctgatcttccgtcagcatgcgcgctttgctcttaccaaacgacatggcacctttgccaccgccgccctgcatttgacgcatgaagaagatccagactccaatcagcaacagcatcgggaaccaggagatgaagatagaagccagcaggcttggttcttcaggcggttcaccgacaaccttgacgttcttggaattatcaagtcggatggtctcaattgtggggtcgatgcgggtgatgcaaacacgggtaatgtgtggggcggaaacttgtcggaacaagcattatcagccgctttttattacggcacacaggccccgctgattgactctttgctcaatgaaattggcgtttcaggcggttcactggcggcattgatttcacccttaacctcaacaactcccgtcgaagaaaaagcagagttgaaaaaaaatcagcgtcaagaaggtttcattaacacatatccctggcccaaaaagccggggattttttatatctgcgttccgctaaaaggtgcaaatgctcaggacgttgcagcgtttagcgtgctcaacggggaaggcaaaattgctctgaagttgagtaaagaagaagcgcgtattgactggtcactttcggcagcacagctcgaacgctgcattcgcgctttcaatccatggccaatgagctggctggaaattgaaggacagccggttaaagtctggacagcatcggtcattgatacggcaaccaacgctgcaccaggaacgatccttgaagccaacaaacaaggcattcaggttgcgactggtgatggcattctgaacctgctttgttacaacctgggcatgccggcccaggccgttacacaagtcgtcgagcaagggcaatcattaagcaacattctgcctccgctccagcaaaaagtttccgataaagacaaagcacttcttcaagagttgtgctttggcgtactgcgtacgctttcgcagttagactggctgattaataagttaatggcccgtccgatgaccggcaaacagcggaccgtgcattacctgattatggttggtttgtatcaactgctttatacccgcattcctcctcatgctgcgctggttgccacggttgaagccgctatcgcaattaagcgtcccaacatacagactgccgtcggtgccgtttttaaaaccaaccggcatggaaagcccggaggccatttcacgagtatcagggaaggggatcctctagagggactcagacgcatacagcgtttcactctcttatcattatcctcatcgtcatccatcatcgatcatcgtcgaccatcgatcgtccatcgatccgtgaccgatcgtcgatcactcgtcatccatcgcgaagaggtctgggactttccctttgggttactgggaggtttttgtgcaactgacttttggacagcagaggcaagcatctggtattttacagtataa

SEQ ID NO: 15703 - DNA, 1821 bp, Homo sapiens
  SIMILAR (718)..(1173): 341254mologous to Mus musculus fibrillin 2,accession number L39790,Smith-Waterman Score=178.
tcatccgggattggagacgacagatttactttctcctttgcctgcggcactagagccccagggccaggggagacccagcatccaaggtgcaccacgggggagcttcacccggatagaagccggcactccccacgtcccggcgccctgtccggcagcgcaacggaaccagggatggggcttggttggggcctggttgggtttcatggccccctgagagcagagcgtggcctcctcatggaagtagcccctcatgaagtcacagtactcccgggaggtgatctcacacctgcccttggtgccaatgcagcagggccgtcctgtgatgacacagtccatgtggggatggttggtgtggttcccagcgctgtttttggtgcagatcggccacttggtgatgtcttctggccactcatgagggtcttcggaggagggctcatcacacaccctgggatcctggtggcagacagagccaaactgtctcttgtggcccgcaagctctggggcgctgggatggatgggccactttacccacactgccagcgtggactgggccccgctgcgcgcgggcatccggcggctcgggccggggcttcgtgggactcggaccccggcgcggagcccagcagccgccgaccacggaagcacccctaggaccggggcggagcggcgcctgggggtggggcgagccccgcactgtgccccggcgcccttcacaatgagctgtccgcccccgcatgcgccttggtcgcctggcggccccagagcccactccaccagccggtggtcagaccaccgagaggacgggcccgtcgtgaacttgagtggatcctcgaggggcccgggcggagtggtcgtggatgggtaacaattgaattgcggcgctctcatgaggattggggaacagatcatataatcggggaaaaaaagcgtcagcgacagcccctgatcgacatggcgagtcgcttccgcgtaggtgtcgatgatctgttctgcgccaatttcgtaagcgtcctgatacagcgccagattctcgttagtcataaacggggcagggtagtaaacgcgtcctgttttgccctctttgcgtatctctactttcgccacaatcggatgaatactcgacgtagcatggttgatataagagatagaaccggttggcggcaccgcctgaagattctggttgtatatgccgtagcgcatcacgtcgtcgcgcagctgcgcccacatctcacgggtaggtaacgtaataccgctacgggtaaacagttcgccaactttcgccgttttcggctgccagttcccttgcagatattggctaaaatattcaccactggcatagcgtgactgtttgaacccggcgaaggtttcaccgcgttcgcgtgccagcaacatcgaggtacgcagtgcatgccaggtgatggcatagaaatagagattggtgaaatccagtgcttccggcgaaccataagcgatgccttctcgcgccagatagccgtgtaaattcatctgccccagtccgatggcgtgcgaggcggcatttccggcttcgatggacggcacgctgcggatatgactcatatctgatactgccgttaaaccgcgcacggcagtctctaccgtgcgggcaaaatcgggggaatccatggtgtgcgcaatattcaacgaacctaaattgcaggaaatatcatggcctgtgcgggtatagtcgagattctcgtcatactctgaggcgctgttaacctgcaaaatttctgagcagagattactcatatttatgcgcccggcgatagggttagcacggtttaccgtgtcttcatacat

SEQ ID NO: 15704 - DNA, 885 bp, Homo sapiens
  SIMILAR (513)..(884): 961254mologous to Escherichia coli RIBONUCLEOSIDE-DIPHOSPHATE REDUCTASE 2 BETA CHAIN (EC 1.17.4.1) (RIBONUCLEOTIDE REDUCTASE 2) (FRAGMENT),accession number D90891,Smith-Waterman Score=617.
atggacaagcggtattacgttactacccgtgagatgtgggcgcagctgcgcgacgacgtgatgcgctacggctatacaaccagaatcttcaggcggtgccgccaaccggttctatctcttaatcaaccatgctacgtcgagtattcatccgattgtggcgaaagtagagaacgcaaagagggcaaaacaggacgcgacgcttacgaaattggcgcagaaagatcatcgacacctacgcggaagcgactccccatgtcgatcaggggcttcgctgacgctttttttccccgataccgccaccactcgcgatatcaacaagcgcagatttacgcctggcgcaagggtatcaaaacgctctattacatcgcctgcgtcagatggcgctggaaggcactgaaattgaaggctgcgtctctgtgcactttaaggaatatctatgaaactctcacgtatcagcgccatcactggaacaagatatctgacgataaagatctggaggtgtggaatcgcctaccagcaatttctggctaccagaaaaggtgccgctgtcgaacgatattggggcctggcagacattaactgtcgtagaacaacaactgacgatgcgcgtttttactggcctgacgctggtcgacacgctgcaaaatgttatcggcgcgccttctctgatgcccgatgcactcacgcctcatgaagaagcgggattatcgaatatcagctttatggaagcgggtcatgcccgctcttacagttcgattttctcgacgctatgccagaccaaagatgtcgatgccgcctacgcctggagtgaagaaaacgcaccgttgcagcgaaaagctcagattattcagcaacattatcgcggggatgatccgctgaaaaaga

SEQ ID NO: 15705 - DNA, 1128 bp, Homo sapiens
  SIMILAR (457)..(1011): 951254mologous to Escherichia coli Hypothetical protein MJ0456,accession number D90719,Smith-Waterman Score=889.
atgatgctttgggcatgcttcttcttagatgagggagtgtttgcagggggtgaccaaacctcagtggaccccatggtcctggagcagtatgtggtggtagccaactaccagaagcaggagagttcggagatcagcctcagcgtggggcaggtggtggacatcatcgagaagaatgagtcagaatcgctagtgattttaacttggagaaacaaagagacctgcaggcatgcacgggaaatgggtagcccgtcagtgacaggccgccgtctgaatttcgcaccgacgtgcctaaattctaagcggctgcaaccatgggctgatgaattgatccccggcgtggcgtgtggtaacggcagaaggagagaactggcgcagaaagcgcgagcgacatcagatagtcgaaaatttcttgttggtgttggcgtcagtccggaaatcgcccaaacacggtgccaaatgagcctgccttttttacgcacgctgcaaggcgatcgttcttttcagttattaattcttgttggtatcggattaagctttttcgtgccctttgcaccgaaatcctggcctgctgctatcgactggcacaccatcatcaccttaagcggcctgatgctgctgaccaaaggtgtggagttaagcggttattttgatgtgctggggcgcaaaatggtgcgccgctttgctacggagcgtcggctggcgatgtttatggtgctggcggcggcgctgctttctacctttctgaccaacgatgtcgcgctgtttattgttgttccgctgactatcacgctaaaaagactgtgtgagatcccggttaatcggctgattatttttgaggcgctggcagtcaacgctggttcgctactgacgccaattggcaacccgcaaaatattcttatctggggacgttctggtctttcgtttgccggatttattgcccaaatggcaccgctgtggcgcaatgatgtgacgctcctgctcctgtgctggtgttgtttccctggacctgcaggcatgctggctatctatctatacatgttcacactggagtacgaatatgaatatatgaacatggctcactcgggcactgaatactacgcagatgtgaaaaagtatcagaggagctag

SEQ ID NO: 15706 - DNA, 1723 bp, Homo sapiens
  SIMILAR (2464)..(4068): 981254mologous to Homo sapiens putative p150,accession number U93564,Smith-Waterman Score=2763.
ttagatgcgctctaaagatttaccttcggcatctttctcgacgcgttctgccttaatcacataagcattacgcagacgcacttctttacccagcaccagacgtttgtactgcttgttagcttcttcgcggaaatcggcgcgatcaatccaaatctcaccgctaaacggcacctgacggctgcccatttccggtttgttcggatggttcggcatggtaaccatttcgccttcgccctgatagttttcgataaccagtttcaccggatcgataaccgccattgcgcgcggcgcattttcgttgagatcttcacggatgcaggattccagcgacgccatctcaatggtgttgtcctgcttggtcacgccgatgcgtttgcagaactcacgaatagaagccgcagtgtaaccacgacgacgcagaccggaaatggtcggcatacgcgggtcatcccagccttcaacgtgcttgtcggtcaccagcaggttcaacttacgcttggacatcacggtgtattccagattcaggcgcgagaactcatactggcgcgggtgaacaggaatcgtgatgttgtccagtacccagtcgtacagacgacggttgtcctggaactcaagcgtacacagagagtgcgtaataccttccagggcatcgctgatgcagtgggtgaagtcgtacatcgggtagatgcaccacttgttgccagtctggtgggtgttcagcaaatttaatacggtacagcacccggatcgcgcatcacgattaacggtgaagccatgtcgattttcgcacgcggcccttagatgtcctctatgcacattcgcacctttaccaccagcactaaagaaagcgttcagtgtgttgatgaaatcattgatgggtgccaacacgcgcccatagggatgttcaatattcagttgctgagcaaattgctgatgaatgaatggcgatttgctgtgggccgtcagggcatcgcggatttctgaaggatttaaacgcccccccgtttcaccaggcacaaccgggaacgccgcgccaaattgtgcgcgaacttcgtctactgttcgacaaggtggcaatccactcaagttggcactggtagaaaccagcggtttaccataagcctggcacaaagcaaccaccaacggatggtcggtgactcgtacagcaagcgaatcaaagcggcccgtcaaccagcgcggtgttgtcgcaggcgcgggaaagacaaaggtgacaggacctggccagcgggaaaaaatggtttcacgctgcacgtcagtcaacatggtgtcatcaatatagggtttaagctgctcgtaatttgctgcgattaaaatcagccccttatcaaccggacgctgttttaactccaacagtcgcatcactgctgtttcgctatcaggatcgcacccaacaccgaaaacggcttccgttggataggcgatgacacgttcttcattgagaacatctatcgcagccccagccgtctggcgctggggacgctgctgttgatcggttttgttggcggcatcgtcttctggggtggctttaacaccgggatggaaaaagccaataccgaagagttctgcattagctgccacgaaatgcgcaacacggtgtatcaggaatacatggattccgtgcactacaacaaccgtagcggcgtccgtgcgacctgtccggattgtcacgttccgcacgagtttgtgccgaagatgatacgca

SEQ ID NO: 15707 - DNA, 430 bp, Homo sapiens
  SIMILAR (39)..(428): 771254mologous to Mus musculus Fish protein,accession number AJ007012,Smith-Waterman Score=569.
ctgcgggcggaggagcggccatgccgccgcggcgcatcatcgtggaggtgaaggtgctagacgtgcagaagcggcgggtgcccaacaagcattatgtctacatcatccgggtcacgtggtccagcggctccaccgaggccatttaccggcgctacagcaagttttttgacctccagatgcagatgttggacaaatttcccatggaaggaggacagaaggaccccaagcagcggatcatcccctttctgccaggtaagattctcttcagacgaagccacatccgggacgtggctgtcaaacgcctgataccaattgatgaatactgtaaggccctcatccagctgcccccctacatctctcagtgtgatgaggtgctgcagttctttgagacaagacctgaggacctgaatccccccaaagaggagcacat

SEQ ID NO: 15708 - DNA, 1338 bp, Homo sapiens
  SIMILAR (421)..(669): 631254mologous to Mus musculus Fish protein,accession number AJ007012,Smith-Waterman Score=293.
atggaggtgttctacatcttgctgtccaatccagtggccactagcctcctggtagctattgagcagttcaacccccttactactgttggccctctcttctgccccactacctcctcactggtacacgaacatgtgcctattcccactacactggaagcttatggtaaaccgctggtttctaccagtgccaacttgagtggattgccaccttgtcgaacagtagtcgaagttcgcggacctgcaggcatgcaaggcttttcacattccagccattactccacaaggcttgggactttctccctcaccatctgctttgattccttgacccgtgtactaaacaggatgcagatgttggacaaatttcccatggaaggaggacagaaggaccccaagcagcggatcatcccctttctgccagggggtgaccaaacctcagtggaccccatggtcctggagcagtatgtggtggtagccaactaccagaagcaggagagttcggagatcagcctcagcgtggggcaggtggtggacatcatcgagaagaatgagtcaggttggtggttcgtcagcactgccgaggagcaaggctgggtccctgcaacgtgcctcgaaggccaggatggggtgcaggatgagttttctctgcagcctgaagaagtctcatggaggtattggtctctgccccggccggtggccgccgccggactctgggtgacttgtatgccgtcagaccatgcagttctttctgtcaagctgaggcacagggaaacacacttacctggtccagctcacctgagggcccagacagaagggaaactgcaatcctggggttttgagccctcgggcaggctgtatcctggggtagatgctggattggattcagagaagagtgagtctagtgaccaggacacagaccatgactccatgagcgtgaaccaggactattctgctcaccttgtgtctgcacacagtaggtgcttaacaaacacctggggtatcttcaagtccattccctcatctgaccctcacagcagccctctgaggaaggcagcctgcacactggaggagacaggtctgcactcagccattctgaagacggtaaaagtgagagtctctgggaagaagctgggcttggaaagagattccctccgtgactgctgtctgattggctggcattgcggggtggtcataactaatgtggccacgctttctaatgctcagtggcccggcacacgtggtcctgagaaacagaccacaggctataagaaagcaggccttatggcaaaattccagatcaaaaaaggggtggccttcaagacaactgctcgtagaaagtag

SEQ ID NO: 15709 - DNA, 1043 bp, Homo sapiens
  SIMILAR (1)..(3156): 961254mologous to Homo sapiens putative p150,accession number U93565,Smith-Waterman Score=5371.
tcattggggcgtggctggcctgttggtgttgcgtgttggtgggtgttgtgtgggtcggttggtgcttttgcttggtgtcgtgtgccggtttgtggcgtcgtttggttgcggtccgtctgtggggctgttcgctggtggtttctggtgcactgggttggtggtcggtggggtcacgcggccgttgtggtgccgtcggagttccgtgccgggtggtgcccttgttttgtatgggtggcccgcttggtggtggcgctgtcggtgtgcgctagggctggtcggttgtttcaggatgggtgtgcttttggtgcttggcttgccatggtggcttctcttgcgtgctcctggattattaccggacttgtgcacttgcgatgggtgatggacacgctggagagcctcggcagcagataacctggcgcacggacgctggggcgagcagaagctggtggtcacgactggcgcatcaggagcgcccgacaggcaggcagcacgctgtggctgcatctggcggaaaatcagctggtacagatccaagggttccaaacacccgcttaccccaaaggaggtcgaaaaaacaggctgggggctgaaaattcgcggcatgggcaagcagcaaattgcccgagcgcgttaaagaagcggcgcgcattctggagctggacggtctgctcaaacgtcgcccgcgcgagctttccggcggtcagcgccagcgtgtggcgatggcccgcgcgattgtgcgcgatccggcggtgttcctgtttgatgagccgctctctaacctcgatgccaagctgcgcgtgcagatgcgtcttgaactgcaacagttgcaccgtcgcgatcaggttgaagcgatgacgctcgcccagcgagtaatggtgatgaacggcggtgttgccgaacagattggcacaccagttgaagtcgatggtgatgacacgctggagatcctcggcgcagataacctggcgcacgacgctgggcgagcagaagctggtggcgactggcgcatcaggagcgcccgacgcagcagcacctgtgcgcat

SEQ ID NO: 15710 - DNA, 900 bp, Homo sapiens
  SIMILAR (125)..(493): 771254mologous to Homo sapiens FLJ00061 protein,accession number AK024468,Smith-Waterman Score=508.
atggcagcaatcgcatttcttatcacctggtttctttctcacgataagaaacgcatccgtattcttaagcgcctttctggtgggggcaacatggccgatgagtttcccggtggcgctgttgttttcactgttttaaatcttactcactggcttgaggactggggtctccccgtgcactggcgatcgtcatgtatgcctagtggccttgagtatcttatcgtcctgatctttaagggggttatcgtggctgttcatttgcttattgtcgatgcactgaatcttattcgtcgcattcatgccgttcagggtcgccctgtgtcgaaacctgccagcatgcgctcgatcagctcattatgcacagccagccaacccacgcggtcgccgtttttgatgatgaaaaccgcagtagcggctggcgtcatcagggtttaccagattacaaagcgggtcgaccgccaatgccggaagagttgcacgacgagatgcctgcattacgcgccgcctttgagccaacgcggcgtcccgtgctggtcaaccagcggcaacgaagccgatgacttagccgccacgctggcggtcaaagtgacacaggccgggcatcaggcaacgattgtttcgacagataaaggctactgtcagttactttcaccgacattacgtattcgtgattacttccagaaacgttggctggatgcgccatttatcgataaagaatttggcgttcaaccgcagcagttgcccgattactggggacttgcggggatcagcagttcaaaggtaccgggtgttgcgggaatcggaccaaaaagcgccacgcagctgctggtcgagtttcagagtctggacgggatatatgagaatctgggattgcggttgccgaaaagtggcgccacaaattag

SEQ ID NO: 15711 - DNA, 1353 bp, Homo sapiens
  SIMILAR (1)..(438): 971254mologous to Escherichia coli f470,accession number L10328,Smith-Waterman Score=713.
atggtgtacatcgtttttgtgaacccgcaaatcctcggcgcggcacaaatggacccgaaagtggtgtttgttaccacctgtttgattgccggtatcggcagtattgcgatggggatatttgctaacttacccgtggcgctggctccggcaatggggctgaacgccttctttgccttcgtggtcgtggggccgatgggcatctcctggcagaccgggatgggcgcaatattctggggcgcagttggactatttttgctcacgctgtttcgtatccggtactggatgatctccaacattcccttaagtttacgtattggtatcaccagcggaattggattattcatcgccttaatgggattaacaaatactggcgttattgtcgccaataaagacacgctggtgatgattggcgatttaagttctcacggcgtgttgttagacggcgtctattccattccgcctgatattagcggcgtcattggtgaagtagatttgagcgagggtacggatgcggcattccacggtttctggctgtggccgtgcacgatgctgaacgtcaccccgatcaaagggatgatgacggtcatttatgaattcccggtggattctgaaactaccctgcaaaactacgatatttacttcaccaatgaagagttaaccgacgagcaaaaatcgctgattgagtggtatcgcgatgtgttccgtccggaagatttacgtctggttgaaagcgtacagaaagggctgaaatcgcgtggctatcgtggtcaggggcgcatcatggccgacagtagcggtagtggcatttccgaacatggtatcgcccatttccataatctgctggcgcaggtgaaacgcttcacgctggtggcaaccgatggcaaaccattacctgcgtttaccggaggaagtcacgtcattgtgcagatgagcgatggtgataaccagtacagcaatgcgtattcactactgagttcgccgcatgacacctcttgttatcagattgccgttcggctggaggaaaactcgcgcggcggttcccgctttttgcatcagcaggcgtggcagcagattgccgctgaaattggcatcagcattgatgcgcagtttaacgaatccctaaaagggatcagccgcgatgagtctctgcggcgcattctgcaacacgggggcaaagagggcgactttaactcgcaggagagggcgcaactggcgtatcccccaaaatctgctctatgtccactcactacgcgagttgacggtcaacgctgttctacccggcattcgctctttgctaattatcggttcacccggattcagggaagacctcggcggaaaatgttgctgtgctaa

SEQ ID NO: 15712 - DNA, 2316 bp, Homo sapiens
  SIMILAR (16)..(2706): 761254mologous to Homo sapiens putative p150,accession number U93563,Smith-Waterman Score=3365.
tcagctgattgcggtctgatgctggatatcttccgcagtccacgagtcacccccgggtaaatgcctggtcccgtttttagttgggaacatcgcgccagaaggtgaaaaactctgcgcagctccagcgccgctaaaatccgtcggcgcattcagggagacagaagccagcccaaccgagatctgctgtgcacggagatctgccagcaaagagcgaatgccgggtagaacagcgttgaccgtcaactcgcgtagtgagtggacatagagcagatttttgcgatacgccagttgcgccctctcctgcgagttaaagtcgccctctttgcccccgtgttgcagaatgcgccgcagagactcatcgcggctgatcccttttagggattcgttaaactgcgcatcaatgctgatgccaatttcagcggcaatctgctgccacgcctggaaatgcagatgcgcggtatcggtgattacaccatccagatcgaaattaccccttgcagtttcattcatcctccgcttcaaaccgcaggtgacaacgggcgaacatctgcggcctgaaagtttaagtgtggtacataactgcgcatcactggcgtttttctgtaaacgcccacgcagcgccggtaatgccagttcactggtttgtaacagacgcaataagcaacctaacgacgttaatagcggacgatgagcgaaagcaaaaccggccagttcaagccagtcgtcgtcagaaaggacggcatcgtttagtggatcaacaggaagcgtttcgccattccactgcgcgagagcttgcgcatcgcgacgtaaacggtaatgctcacgttcagccagctgtttacccgcatcactcatcggtaacagcgccatcgccgtatagcaaccgctgctggcttcccgatgattacccatccgcaccagcacaaaaccgcagcgttgccagaaacgccataactccccggtgtaaccaaaactcaccgaaagatagtcgaggtcttgcgtatattgcaaagcaccagcaataagttgccgccctgtgccttcccgctgacgagccggatgaactgctatccggctgacccgccgtccacgcaatgtcgccgccagtggattgttgccgtgcgccgccagcgactgggccaccagattaccccgcgggcgacgaaaacctgcccataccgcctgactgagttgttgagataatccaccctcatccaccagccacagcgccccggcaatctcgttttcgccagccgcctgtaaaaaatgttgccctggtgcatccatcatccggcgtaaatccagcggcgaagtccgatagtgcgcaccagacaagagctgataaacctttaacggcgtttctggatcgctttgccataacgtctgttcaaatgcggaaatgacaatattgccttgtggtgtatgggtgaagttttcatcgtcaaaaaccagtgcctcgctgaccattttttccagcgggcatccctgcgcccagcggatcggctgttgcagttcaaaacggtgtaaatgcggaaagcgagcgcaaaatttcagcaaaaaaccacgtccggtgccttcgtagcccatctcaacacagtgctgcagaacccaatctagaatgaaaaccatcgcactttcctggcattgacagacaatccaggcatatccattcttctgccacggaatctcaacatgatcaatggtgcgattgtcccagttattcacaaacagggagttagcaaaacgcagcgccaacaggttcagcaccgtttctttaccaagatagtggtcgatacggtaaacctggcactcctcgaagtattcgccaacctgatcattgatttcctgcgaggtcgccagcgacgtccccagcggtttctccatgactacgcgtgccggtttagcattcagttttgcctcgccaagccctttgcaaattgcgccaaaagtgctgggcggcatggcaaagtagttaatggtgatacgatttttttgatccagcatcgcgccgagacggctgaatgcagcagtgtcattgacatcgagattacaaaaatccagacgtgcactcagggtgtcccataaaccttcatcaatggtttctttcatgaaagtttcgagcgcctcgcggacaactttggtatatgccgctttatcccagtcagcacgccctacgccgataatccgggtgtccgggttgagctgaccggctttttccagttgatacagggaaggcagcaatttacgacgcgcaaggtcgcctttcgcgccgaaaatgaccaggtcacaggcctgggctgtttgcgttaccgccat

SEQ ID NO: 15713 - DNA, 978 bp, Homo sapiens
  SIMILAR (977)..(525): 941254mologous to Escherichia coli Phosphoglycolate phosphatase (EC 3.1.3.18),accession number D90769,Smith-Waterman Score=705.
atgatcaatctgattggtagcgatgtgaattatgactggctgaaactgccgctggtgcatctgcactggtacgacaaagaagtccgtccggggcgtaaagtggggcatctgaatttgaccgacagcgacacatcgcgtctgactgcgacgctggaagccttaatcccgctgctgccgccggaatatgccagcggcgtgatttgggcgcagagcctgataagatgcgtcaagcatcgcatcaggcattgtgcaccaattgccggatgcggcaccggttgtaggcctgataagacgcgtcaagcgtcgcatcaggcacaaatgtctaatgcctacgactacagcgaaatacagggcataggcaaacaaaaggcagcaaacagagtagccgaaccgcgaacgtatcattcgtttgcgtcgatcacagatcgccgcgctgatctcctcaagcccggcaatcatgcgcaggatggtcgacttaccgcagcccgacgggccgacaaacacgatgaactctttatcggcaatttccagaaggccgataaccgcggccaggtgagtgattccgttgaaggcaacagtaattgcgccccggttaagcccgcgccgatccccaccgagcgcataccgctggcgttaatggcgtcaatgcccgcctgcgcatcttcaatgccgatacatgcctgcggcggcacgcccagccctgcacaggcggcgagaaagatttccgggtccggtttcgagtttttaagttgggaagcatccgcgcagaaggtgaaaaactcgcgcagctccagcgccgctaaaatcgtcggcgcattcagggagacagaagccagcccaaccgagatctgctgtgcacggagatctgccagcaaagagcgaatgccgggtagaacagcgttgaccgtcaactcgcgtagtgagtggacctatagccgatttttgcaatacgccagtgtgcctctctgtgaattatag

SEQ ID NO: 15714 - DNA, 1657 bp, Homo sapiens
  SIMILAR (1)..(2136): 931254mologous to Homo sapiens putative p150,accession number U93563,Smith-Waterman Score=3401.
atgaggggccacaattggattgacatggaccaagcccgtcaacaatccacgccacacacagacaggaaaatatgccacaagaacgacagaccgcggacaacacccctgagaaaaatagacgcacatccccacactttaataattttacccgcggagagcacattatcaaccacgaaatacaaattacgagctcttctggtcgagaacacaaataaggacaaaagcgccgtcagtgttgtcttcagaggctctgtcttgcatcagcaggctgcaaattttcctaacttgatgctctgcttccaattaaagaacggtgttaacgcctgcaatgacttcataatgctctttgtcgacgacaatgcggctggcagcattgaacgggctgcctccccatgtatcaacgagaaacagcacgcctttagtgaaagcgttccggccattgctgcggtacgcggcctggggtcgatgattgcggtagagtttaacgatccgcaaacgggcgagccgtcagcggcgattgcacagaaaatccagcaacgcgcgctggcgcaggggctgctcctgctgacctgtggcgcatacggcaacgcctgcaaacgacgtattgattatgtatgccgaataaagcattcacgccgcatccggcaagttgtattgctcaacttcgctaaatctggtgctttttcaacaacgcgcggaactgatgataagttaaccccagtaattcagccgcgcgcttctggcgagtacaacgaagaattctctctgctgccggttgttaactacctgaaagacaaactgtctaacccggttcgtctggttaaagattacctcgacggcgttgacgttgctgaaggtgaactggttgttctggaaaacgttcgcttcaacaaaggcgagaagaaagacgacgaaaccctgtccaaaaaatacgctgcactgtgtgacgtgttcgtaatggacgcattcggtactgctcacctgcgcgcaggctttctacttaccggtatcgtgtaaattgcgctgctcgttgcgctgcgcaggcccgctgctggcagctgaactggacgcgctgggtaaagcactgaaagaacctgctcgcccgatggtggctatcgttggtggttctaaagtatctaccaaactgaccgttctggactccctgtctaaaatcgctgaccagctgattgttggtggtggtatcgctaacacctttatcgcggcacaaggccacgatgtgggtaaatccctgtacgaagctgacctggttgacgaagctaaacgtctgctgaccacctgcaacatcccggttccgtctgatgttcgcgtagcaaccgagttctctgaaactgcaccggctaacctgaaatctgttaacgatgtgaaagctgacgagcagatcctggatatcgtcagagatctggatgcagcgaatgtcgttattaatgctgtattcagttacgtcaccaatgtatggggatgggcatttgaatggtatatggtggtgatgcttttcggttggttctggctggtgtttggcccgtatgccaaaaagcgtttaggtaacgaaccgccagaatttagcaccgccagttggatctttatgatgttcgccctcctgtacgtctgctgccgtactgttctggggatcgattga

SEQ ID NO: 15715 - DNA, 1362 bp, Homo sapiens
  SIMILAR (754)..(1359): 1001254mologous to Escherichia coli XANTHOSINE PHOSPHORYLASE (EC 2.4.2.-),accession number D90869,Smith-Waterman Score=1034.
atggcttttcaggtaaaaattcatcaaattcgggcttttgttgaagtggctcgtcagggcagcattcgcggagcgagccgaatgttgaatatgtcgcaaccggcactgagtaaatctattcaggagctagaagaagggttagcggcgcaactcttttttcgccgtagtaaaggcgtgacgttaactgatgccggtgaaagtttttatcagcacgccagtctaattcttgaagagctgcgcgcagcccaagaggatattcgccaacgacaagggcaactggcagggcagattaatatcggcatgggggccagtatttcccgcagtctgatgccagctgtcatatctcgttttcatcagcagcatccgcaggtaaaagtacgcattatggaagggcaactggtgtcgatgattaatgaattgcgtcagggagaattggatttcaccatcaatacctattatcagggaccgtacgaccacgaatttacttttgagaaattactggaaaagcaattcgcgatcttttgccgcccgggacaccccgccattggtgcccgttcgatcaaacagttactggattacagctggacaatgccgacgccacacggcagctactacaaacagttgagtgaattgcttgacgatcaggcgcaaacgccacagaggatccccattttaggttccgggctcggcgcgctggccgatcagattgagaacgctgtcgcaatttcctacgaaaagctgccgggcttcccgggcgtaccggtggtatgtatgaaaggtcgcggacatttctacgaaggtcgtggaatgaccattatgactgacgcaattcgtacctttaagctgctgggctgcgagctactgttctgcaccaatgcggcaggctcgctgcgtccggaagtgggggcaggcagcctggtcgcattgaaagatcatatcaacaccatgcccggtacgccgatggtgggtcttaacgatgatcgttttggagagcgcttcttctcactggcaaatgcctacgatgcggaataccgcgcactgttacaaaaagtggcgaaagaagagggtttccctctgacggagggcgtgttcgtctcgtatccggggccgaatttcgagactgcggcggaaattcgcatgatgcaaattattggtggggatgttgttggtatgtctgtggtgcctgaggttatttcagctcgccattgcgaccttaaagtcgttgcggtctctgcgattaccaatatggcggaaggtttaagcgatgtgaaattgtcacatgcgcaaacgctggcggctgcggagctctctaagcagaacttcatcaaccttatttgtggctttctgcgcaaaattgcctga

SEQ ID NO: 15716 - DNA, 2742 bp, Homo sapiens
  SIMILAR (712)..(3510): 981254mologous to Homo sapiens putative p150,accession number U93563,Smith-Waterman Score=4809.
ctagtctccacacactatcgcatcatcgtcgagcagcccgatggcaagcaccatcccgaacatcgttagtgtgttgatggagtaaccaaaagcggcgaggatggcaaacgtccctaacaacaccacgggtaccgcaatggtggggatcagcgttgctcgcatattctgcaagaacagatacatcaccaggaacaccagcataatggcttcgaacagcgtttttaccacttcgtgaatagaaagctggacgaatggcgtggtgtcataagggtagagaaccttcattccctgcgggaagaatggctgtaattccgccagttttgccttaatggctttcgcggtatcgagagcattcgcgccggttgccagcttaatccccaggcccgccgccggttttccgttgatacgagcgataacgttatagttttcaccgccaagttcaacccgtgcgacatctttcaggcgtaccaccgagccgtcactgtttacgcgcagggtcactttgccgaattcttccggatttttaaaccgcgtctgagcaataatcgaggcgttcaattgttgccctggtaacgctggcgttccgcccaactgtccggcagcgatctgatcgttctgtaccttcaactggttaatcacatcaaccggtgtcagtttatatttgtttagcagatcggcatccagccagatacgcatcgcatactgtgcgccgaaaagctgtacgtcaccgacgccattcagacggctaagcgtatctttaacgttagaggccacatagtccgagatatcgtcctgcacttgcgcgatatcaggatcggtcccggactggaaggtaagggtaattgtcacgcggaagtgagcaaattcccggtatccgaactggcggaagatcagctgaacgatgaatcccgcgagctgggcttctatctgcaaaaagggctgttcgaagagtacgcatggtttggtcgcggtcacggtcacgatctggcaccgttcgatgactaccactaagcgcgcggtctgcgctggccggtggtgaacggtaaagaaacgcagtggcgttacagcgaaggtaacgacccgtacgtgaaagcgggcgaaggctataagttctacggtaaaccggatggcaaagcggtgatcttcgcactgccattcgaaccggcggcggaagcaccggatgaagagtacgacctgtggctctctaccggacgcgttctggagcactggcacaccggcagtatgactcgccgtgtaccagaactgcaccgcgccttcccggaagcggtcctgtttattcacccgctggatgcgaaagcgcgcgatctgcgccgtggcgacaaagtgaaagtggtttctcgccgtggcgaagtgatctcgattgttgaaacgcgcggtcgtaaccgtccgccacagggcctggtgtacatgccgttcttcgacgccgcacagttggttaacaaactgacgctggatgcgaccgatccgctctcgaaagagacggagtttcaggtactcacgcaggccgagaatttgcgccgcccagttcacccgctcatcaatcacctctttggcgattttttgcatcttcagaccaaacgccatgttgtcgtaaaccgtcatatgcggatacaacgcgtagttctggaacaccatcgctatattgcgtgctttggctggaacgtcattcattcgtttgccgtcgatcaacagatcgccgccgctgatctcctcaagcccggcaatcatgcgcagggtggtcgacttaccgcagcccgacgggccgacaaacacgatgaactctttatcggcaatttccaggttgaagtccttcaccacatgcacgttttgccagaaggccgataaccgcggccaggtgagtgattccgttgaaggcaacagtaattgcgccccggttaagcccgcgccgatccccaccgagcgcataccgctggcgttaatggcgtcaatgcccgcctgcgcatcttcaatgccgatacatgcctgcggcggcacgcccagccctgcacaggcggcgagaaagatttccgggtccggtttcgagtttttaagttgggaagcatccgcgcagaaggtgaaaaactcgcgcagctccagcgccgctaaaatcgtcggcgcattcagggagacagaagccagcccaaccgagatctgctgtgcacggagatctgccagcaaagagcgaatgccgggtagaacagcgttgaccgtcaactcgcgtagtgagtggacatagagcagatttttgcgatacgccagttgcgccctctcctgcgagttaaagtcgccctctttgcccccgtgttgcagaatgcgccgcagagactcatcgcggctgatcccttttagggattcgttaaactgcgcatcaatgctgatgccaatttcagcggcaatctgctgccacgcggctgcgaataaatcacctgcttcaaagtggttgctggcaccaacgccagtgccgccaaacagccactccgcaccgattttcggctggttccaccacgcgcgtttgccgtcaaaaatgatgtgatcggtcatagcgtgagtacgaatggtcaggttaggacgcgatttggcctgatcgagatagccacgcgcggtgctggcgcgacggccctgcggcgtgacggtgcgatccatcggaccaaaaccttcctgctgataaccgttgagatcgtccgtgcgcgggtagcccgcctgcacgcccgcttcaatcat

SEQ ID NO: 15717 - DNA, 1365 bp, Homo sapiens
  SIMILAR (835)..(1032): 531254mologous to Escherichia coli phosphoglycerate kinase (AA 1-387),accession number X14436,Smith-Waterman Score=130.
ctatgtccactcactacgcgagttgacggtcaacgctgttctacccggattcgctctttgctggcagatctccgtgcacagcagatctcggttgggcggcttctgtctccctgaatgcgccgacgattttagcggcgctggagctggcgagtttttcaccttcaattcattaatcatcgacaccagttgcccttccataatgcgtacttttcctgcggatgctgctgatgaaaacgagatatgacagctggcatcagactcgggaaatactggcccccatgccgatattaatctgccctgccagttgccttgtcgttggcgaatatcctcttgggctgcgcgcagctcttcaagaattgactggcgtgctgataaaaacgaggcgactatcgcggctaccataggatacatcagtacgccagttataagcgccgcacgcgagtgcagggaataaggtacaaagccacgggatattgaccatatcctaggaacgttcataacacccggtatgcccaagggcggtaagctagacgtatatgcagctccggaattaccgctgaagctcctgggtcgtcctaccgaaggcgagtacaacgaagaattctcttgctgccggttgttaactacctgaaagacaaactgtctaacccggttcgctcgacggcgttgacgttgctgaaggtgaactggtgttctggaaaacgttcgcttcaacaaaggcgagaagaaagacgacgaacccgcgcgcaggcttctactcacggtatcggtaaatcgctgacgttgcgtgcgcaggcccgctgctggcagcgttctggactccctgtctaaaacgctgaccagctgattgttggtggtggtatcgctaacacctttatcgcgcacaaggccacgatgtgggtaaatccctgtacgaagctgacctggttgagaagctaaacgtctgctgaccacctgcaacatcccggttccgtctgatgtcgcgtagcaaccgagttctctgaaactgcaccggctaccctgaaatctgttcggcattctgacaaaatctcctacatctccactggcggcggcgcattcctcgaattgtggaaggtaaagtatctgcctgcagtagcgatgctcgaagagcgcgggtgatgtcgttgaccttgcagttgtgttgaatgtgatgtggtgatctgattgatgcgagagatgatgattgtgcttgatgtggaatgtgatgatgatcatgatggaaccatggtagggttgtgttgtgctgcatgtgagtgacttgatttgatttaaacagtgtgcagaaacgattggccagatgttgtatatcctactttctgtatctgtgcttgtgaaaggctccat

SEQ ID NO: 15718 - DNA, 888 bp, Homo sapiens
  SIMILAR (1)..(1080): 961254mologous to Homo sapiens putative p150,accession number U93563,Smith-Waterman Score=1780.
atgaacgatcgtggcgatacctccattcgtcgtcatccgttcgaaggcgtgctgcataatatggagcgccgctataaagagacggaatccagcgcgcgtcccagcgatcgtgttgaaattcgcctgctggttaataccggttcgctcgccgaaagtacacaacagagcggttacagtcacgccatccctagtattgcgctaacgcaaagcggtggccttgacgcagcacaggcgcgttcattgtggcagcaggggatcgaccctaaacgcccgatgccgccggtaattgtctcttatgacaccacgctgtttaatctgagtttgcccaataaccgtaacgatttgctgaaagaagcgctctcttatctggcaaatgccactggcaaattgaccatcacaccagaaaccatcaaccacgcgctgcaaagtcaggacatggtggcaacctggcctgccgatactaaagagggctggtggcgctatcgtctgaaaggcgttgccgacttcgacggcgaaaccatcctgaaagtggaaccagaagccctgaccctgctggcgcagcaagcctttcacgacgcttcttttatgctccgcccggcacaccagaaacaggttgcggctattcttcacgatccagaagccagcgaaaacgacaagtacgtggcgctgcaattcttaagaaactccgaaatcgccgccaaaggcgtgctgccgacctgccaggataccggcaccgcgatcatcgtcggtaaaaaaggccagcgcgtgtggaccggcggcggtgatgaagaaacgctgtcgaaaggcgtctataacacctatatcgaagataacctgcgctattcacagaatgcggcgctggacatgtacaaagagggcagcgtttaa

SEQ ID NO: 15719 - DNA, 717 bp, Homo sapiens
  SIMILAR (1)..(393): 921254mologous to Homo sapiens meiosis-specific MutS homolog,accession number AF104243,Smith-Waterman Score=604.
atgtcaaatactgcttgtgctgtggggaattccaccaagttgttcactctgatcacagaaaatttcaagaatgttaatttcactactatccaaaggaaatacttcaatgaaacaaaaggattagagtacattgaacagttatgcatagcagaattcagcactgtcctaatggaggttcagtccaagtattactgccttgcagctgttgcagctttgttaaaatatgttgaatttattcaaaattcagtttatgcaccaaaatcactgaagatttgtttccagggtagtgaacagacagccatgatagattcatcatcagcccaaaaccttgaattgttaattaataatcaagactatagcctgagcgcgaacgtgcataaagtggtgttgtacggttctggcaaagaaaacattgaattcaaatacatgaacgatcgtggcgatacctccattggtggtcatccgttcgaaggcgtgctgcataatatggagcgccgctataaagagacggaatccagcgcggtacgcgaagaattagccaagtttatcagtaatcgtccgtgcgccagctgcgaagggacgcgtctgcgtcgggaagcgcgccacgtgtatgtcgagaatacgccgctgcctgctatctccgacatgagcattggtcatgcgatgcagtatccccaactccaaggatgctcaagtcctttgtataaaacaggatag

SEQ ID NO: 15720 - DNA, 4350 bp, Homo sapiens
  SIMILAR (1159)..(2838): 941254mologous to Homo sapiens putative p150,accession number U93564,Smith-Waterman Score=2767.
atggagaagccacggcctctggaggcaccatcagcatggccacaggacgatgtacagtgtggggtgactgtgggaatggacggggcagctgtgagggcaaaccgaactccctggcctcaagacctggaacaaaccaaatggattgaaatcaaaaagagtgcttttacctggagttcccaactgtctctaaatcgtggcttcctcacctgtaaagatgagaataataatgcagggctgctgagggtatcctcatacagctctcgtgaggatcaactcaaaaacatcgcctcggactccctcttcatgctccccggaggcctctgccagtctcctactggtacctcccattgctccaaccaaatggaaacccaagggcaagggagcccgggtggagcagtccgtggagataaggccctggggcctgagaaggctagacaaggatgtggaatgaatgggagtgggaagtactgcaagtttcgtgtcctggcaatccaaggcaaaccagaatgtttggccaccctaatgcagcctgatcttggagacagccctgggctgcgagagatgaacgtggtagagcacctccgggccagcttcccagtggagcaatggtattggagaggtggacaacgtggggaggctgagggagctagatcttcgaaggcagagaacaacacgtcgctcatctgcaacttccgtctggattacgcccctattgagaaacagtgggatttgcacttcgctgattactttgcggaagatctcaagctgctcgccccgttagcaaaagatgggctggtggatgtggatgagaagggaatacaggtgacggcgaaaggtcgcttgctgatctgcaacatttgcatgtgctttgatacctatctgcgccagaaagcgcggatgcagcagttctctcgggatttgctggggacaccccttgtctctacgattcctgtggactttactactgaaataaactctttttctggggctgataatactggaagtttccatgttgcatgtacagttagtacctgcactgagacgtcgattggcagcgcaggactgctgtggcgcaggctgacaaatcagcgcgtgcgtgccacttccactacgccggatatcatcatcatgagcattttgctgatccagtgtctgttggggctaagtaccataccgttttcagcacagtatcctgatggtagcgaaatgatgaagctggtgggttgggcgcaaagcattgtcactttccgtggtggatcgtcagagatgctcaacggcgtagcgttcgtcttccgcctgcatctggtgttgggaatgaccatcttcctgctcttcccgttcacccgactggtgcatgtgtggagcgcgccgtttgagtactttactcgtcgatatcaaattgtgtaccacgtcgatgcttttacctcacaaccgtttcgcggcaattctgccggtgttgttttccccgccgataatcttagcgaagcgcaaatgcagcttatcgcccgcgagttaggccattcggaaactgcttttctgctgcacagcgacgacagcgatgtgcgcatccgctactttacgccaacggttgaagtgccgatttgcgcggtcatggcggaagtcaaacgcaaatggggcgaccgctttgttgccgtcacgcaaaaaaataccggtaaaggtggtgcgctgatgaatggcctcaattacgccacctgcgaccaggtttttttaagtgatgccgacacctatgttccgcccgatcaagacggaatgggctatatgctggcagaaattgagcgcggtgccgatgccgtaggcggcattccctctactgcgttgaaaggcgcgggtctgttaccgcacatccgcgcgaccgtaaagttgccgatgattgttatgaagcgcacgctacagcagctcctgggtggcgcaccgtttattatcagcggtgcctgcgggatgttccgtactgatgtattgcgtaagttcggtttctcggatcgtactaaagtcgaagaccttgatctcacctggacattggtggcaaacggctaccgtattcggcaggcgaatcgctgcatcgtatacccacaggaatgcaacagcccgcgtgaggagtggcgtcgctggcggcgttggattgtgggatacgcgcccgggggacggagcgagactctgctagaggatcccccggacggcagcgtcacgcagagtcagtttgacgccgtgggcaggctcagggcacagacggatgccgcaggtatcaacagagtacagcccggatgtggtgacgggcctcatcacgcgcataaccacgccggatgcagggcatcggcgttttactataaccaccacaaccagttaacgtcagccaccgggcctgacgggctggaattgcgccgggaatatgatgaattgggccgtctgattcaggaaactgcccctgacggcgatatcacccgctaccgttatgataatccacacagtgacttaccctgcgcaacggaagatgccaccggcagccggaaaaccatgacgtggagccgttacggtcagttgctgagcttcaccgactgttccggttatgtaacccgttatgaccatgaccgcttcgggcagatgacggcggtgcaccgcgaggaagggctgagtcagtaccgcgcatacgacagccgtggacagttaattgccgtgaaagacacgcagggccatgaaacgcggtatgaatacaacgccgccggtgacctgaccaccgtcattgccccggacggcagcagaaacgggacacagtacgatgcgtggggaaaagccatctgtaccacgcagggcggtctgacgcgcagtatggaatacgatgctgccggacgggtcatccgcctgaccagtgaaaacggcagccacaccaccttccgttacgatgtactcgaccggctgatacaggaaaccggctttgacggccgcacacagcgttatcaccacgacctgaccggcaaacttatccgcagcgaggatgaggggctggtcacccactggcactatgacgaagcagaccgcctcacgcaccgcaccgtgaatggcgaaaccgcagagcggtggcagtatgacgaacgcggctggctgacagacatcagccatatcagcgaaaggcaccgggtgacggtgcactatggttatgacagtaaaggccgcctcgccagtgaacacctgacggtgcatcatccgcagacgaatgaactgctctggcagcatgagaccagacttgcgtacaaacgcacaggactggcgaaccgctgtataccggacacctgcccgcctgtgaatgcttacctaggcacggcttgctgtcagcatgaaatctgtgacacaccgtggttgagttaccgcgaccctttcaccgggaaatcttggctttccggccgttatgaattacacaagcgtatttacggcatcaccgctaaagagcgtaaagatgttgatgtctggcatccggatgtacgtttcttcgaactgtatgacgaaaataacgaactgcgcggtagcttctacctcgatctgtatgcccgtgaaaacaagcgcggcggggcgtggatggatgactgcgtaggccagatgcgtaaagctgatggttctttgcaaaaaccggtcgcgtatttgacttgtaacttcaaccgcccggtaaatggtaaaccggcgctgttcactcacgacgaagtgatcaccctcttccacgagttcggtcacggcctgcaccatatgctgacccgcatcgaaaccgctggtgtttccggtatcagcggtgtgccgtgggatgcggtcgaactgccgagtcagtttatggaaaactggtgctgggagccggaggcgctggcgtttatctctggtcactatgaaaccggcgaaccgctgccgaaagagttgctggataaaatgctggcggcgaagaactaccaggcggcgctgtttattctgcgtcagctggagttcggcctgtttgatttccgccttcatgccgagttccgcccggatcagggggcaaaaatcctcgaaactctggcagaaatcaagaaactggttgccgtggtgccatctccgtcctggggccgtttcccgcacgctttcagccatattttcgccggtggttatgccgcaggttactacagctacctgtgggctgacgtactggcggcagatgctttctcgcgctttgaggaagagggcattttcaaccgtgaaaccgggcagtcgttcctcgacaacattctgagccgtggcggttcagaagagccgatggatctgttcaaacgcttccgtggtcgtgaaccgcagctggatgtgtccaaaataccttga

SEQ ID NO: 15721 - DNA, 2862 bp, Homo sapiens
  SIMILAR (67)..(819): 961254mologous to Escherichia coli K12 membrane-bound lytic murein transglycosylase C,accession number AE000379,Smith-Waterman Score=1250.
atgatccagaagattgggtacccgagactcgagtgtcgtatcccatatactacccaccgcaccggaatgagtaaaatatctcgcgctggcttgattgcgccgctgctcatctcctgttcgacgaccaaaaaagccgatacctataacgaagcctgggtcaaagataccaacggttttgatattctgatggggcaatttgcccacaatattgagaacatctggggcttcaaagaggtggtgatcgctggtcctaaggactacgtgaaatacaccgatcaatatcagacccgcagccacatcaacttcgatgacggtacgattactatcgaaaccatcgccgggacagaacctgccgcgcatttgcgccgggcaattatcaaaacgttattgatgggtgacgatccgagttcggtcgatctctattccgacgttgatgatattacgatttcgaaagaacctttcctttacggtcaggtggtggacaacaccgggcagccgattcgctgggaaggtcgcgcaagcaacttcgcggattatctgctgaaaaaccgtctgaagagccgcagcaacgggctgcgtatcatctacagcgtcaccattaacatggtgccgaaccaccttgataaacgtgcgcacaaatatctcggcatggtccgccaggcgtcacggaaatatggcgttgatgagtcgctgattctggcaattatgcagaccgaatcttcctttaacccgtatgcggtcagccgttccgatgcgctgggattaatgcaggtggtacaacatactgccgggaaagatgtgttccgctcgtcaggggaaatccggcacgccgagccgcattggggtcccgcagctggccgcggaagtcggcacacgcaggcgaacccggctgaaccggttggtgaaaagggacacgcggacagcagcttcacgcagagtcagttgaaccccgtgggcagctcaagggcacagacggatcccgcagccaggacaacagagtacagcccggatgtgttaacgtcagccaccgggcctgacgggctggaattgcgccgggaatatgatgaattgggccgtctgattcaggaaactgcccctgacggcgatatcacccgctaccgttatgataatccacacagtgacttaccctgcgcaacggaagatgccaccggcagccggaaaaccatgacgtggagccgttacggtcagttgctgagcttcaccgactgttccggttatgtaacccgttatgaccatgaccgcttcgggcagatgacggcggtgcaccgcgaggaagggctgagtcagtaccgcgcatacgacagccgtggacagttaattgccgtgaaagacacgcagggccatgaaacgcggtatgaatacaacatcgccggtgacctgaccgccgtcattgccccggacggcagcagaaacgggacacagtacgatgcgtggggaaaggccgtccgtaccacgcagggcgggctgacgcgcagtatggaatacgatgctgccggacgggtcatccgcctgaccagtgaaaacggcagccacaccaccttccgttacgatgtacttgaccggctgatacaggaaaccggctttgacgccgcacacagcgttatccgtgtttttatcatcggttcatggccgaaagttaaattgggccggcgggtatctctgaacacaccggcacagctctctttgccactttatcttcctgacgacgaaacctttgcaagtttctggccgggggataactcctctttactggccgcgctgcaaaacgtgctgcgtcaggaacatagcggttacatctatctctgggcacgcgaaggcgcggggcgcagccatctgctgcacgcggcttgcgcggaattgtcgcagcgtggcgatgcggtgggctatgtcccgctggataaacgcacctggtttgttccggaagtgctcgacggtatggagcatttgtcgctggtctgtatcgacaacattgagtgtattgcaggcgatgagttgtgggagatggcgattttcgatctctacaatcgaattctggaatcgggcaaaacacggttgttgatcaccggcgatcgtccaccgcggcagttgaatctgggattaccggatctcgcgtcgcgactcgactgggggcagatctacaaattgcagccactttctgatgaagataagttgcaggcgctacagttacgcgcgcgtttgcgtggttttgaactgccggaagatgtggggcgtttcttgctgaagcggctcgacagagaaatgcgggacgacttcggtgcgctgtgtgcattgccgcaaaaatatcgtgaacccgtgctgatttctggccccgacggcgtaggtaccaagctgcgtctggcaatggacttacaacgtcacgacaccattggtattgatctggtcgccatgtgcgttaatgacctgctgagccgctgtttttgcctcgactattacgcaaccggacaactggatgttgataccgcttcagcggtgatcagcggcattgcggaaggttgtctgcaatcaggctgttcactggtgggtggcgaaacggcagaaatgccggggatgtatcacggtgaggattacgatgtcgcgggtttctgcgttggcgtggtagaaaaatcagaaatcatcgacggctctaaagtcagcgacggcgatgtgctgattgcactcggttccagcggtccacactcgaacggctattcgctggtgcgcaaaattcttgaagtcagcggttgtgatccgcaaaccaccgaacttgatggtaagccattagccgatcatctgctggcaccgacccgcatttacgtgaagtcagtgctggagcttgattga

SEQ ID NO: 15722 - DNA, 1472 bp, Homo sapiens
  SIMILAR (801)..(1451): 991254mologous to Escherichia coli K12 rhsB protein in rhs element,accession number AE000424,Smith-Waterman Score=1162.
atgctgcattctcgcggtttcctcgcggaagttttcggcatcctcgcgcggcataatatttcggtagacttaatcaccacgtcagaagtgagcgtggcattaacccttgataccaccggttcaacctccactggcgatacgttgctgacgcaatctctgctgatggagctttccgcactgtgtcgggtggaggtggaagaaggtctggcgctggtcgcgttgattggcaatgacctgtcaaaagcctgcggcgttggcaaagaggtattcggcgtactggaaccgttcaacattcgcatgatttgttatggcgcatccagccataacctgtgcttcctggtgcccggcgaagatgccgagcaggatggcactggcaccagcgggataggtgcccagaagaaaaaaatgtacgccaataacggcgctatagaccgaaagctgctttttgaagcgacgttcgtcacgattgaaaaatgttgtgataccaatcagaaaggcgatgacacccacgccctgggccagccaatacgcggtcatgataaatccttagcagggtctttctgctatgcctgcaggtccgaggaagggctgagtcagtaccgcgcatacgacagccgtggacagttaattgccgtgaaagacacgcagggccatgaaacgcggtatgaatacaacatcgccggtgacctgaccgccgtcattgccccggacggcagcagaaacgggacacagtacgatgcgtggggaaaggccgtccgtaccacgcagggcggccctgacgcgcagtatggaatacgactgctgccggacgggtcatccgcctgaccagtgaaaacggcagccacaccaccttccgttacgatgtacttgaccggctgatacaggaaaccggctttgacggccgcacacagcgttatcaccacgacctgaccggcaaacttatccgcagcgaggatgagggtctggtcacccactggcactatgacgaagcagaccgcctcacgcaccgcaccgtgaagggtgaaaccgcagagcggtggcagtatgacgaacgtggctggctgacagacatcagccatatcagcgaagggcaccgggtggcggtgcattacaggtatgatgagaaaggccggctgaccggtgagcgtcagacggtgcatcacccgcagacggaagcactgctctggcagcatgagaccagacatgcgtacaacgcgcaggggctggcgaaccgctgtataccggacagcctgcccgccgtggaatggctgacctacggcagcggttacctggcaggcatgaaactcggcgacacaccgctggtggagtacacccgcgaccgcctgcaccgggaaacgctgcgcagcttcggccgttatgaactcaccaccgcttatacccctgccgggcagttacagagccagcacctgaacagcctgctgacctacaggcatgcaaacttcgcactgtaa

SEQ ID NO: 15723 - DNA, 2112 bp, Homo sapiens
  SIMILAR (1)..(1680): 991254mologous to Homo sapiens CAGH32,accession number U80743,Smith-Waterman Score=2846.
atgagtaaacttttggaacgctttcgctacttcaaacaaaagggcgaaacctttgccgatggtcacggacaggtgatgcatagcaaccgcgactgggaggacagctatcgccagcgttggcagttcgacaaaatcgtgcgttccacccacggtgttaactgtacaggctcctgtagctggaaaatctacgttaaaaatggtctggtgacctgggaaatccaacagaccgactacccgcgcactcgccctgacctgcccaatcatgaacctcgcggctgcccgcgtggcgcaagttactcctggtatctttacagcgctaaccgcctgaaatacccgctcattcgtaaacgactgattgaactgtggcgcgaagccctcaagcaacacagcgatccggccgctgacaatgacttgatcgccagatttcagtccttcactaatcaaccatttatcgccaatcgcctgactggcaacgacagggcgcgcttcaacctgacttttatcgttaacaatcagcacgctacggccatcaccactaccggaaccttcctgcccgaatggtccaccactttcattattaccctgatattgcaaagcaaagttcaagccatcgacctaaccaaagaagccattgttacggtaggttgcaacaccattagcacgaccgttcatgaagttgtcagcgccagcataggtatcgccaccaaattctggcagcatatcggtccatgcttctacgtcatatacgacaccgtagttacgaccatagtcgaaagcaggacaacagaatacagtccggatgtggtgacgggcctcatcacgcgcatcaccacgccggatggcagggcatcggcgttttacaataaccaccacagccagttaacgtcagccaccgggcctgacgggctggaaatacgccgggaatatgatgaatggggccgtctgattcaggaaactgcccctgacggcgatatcacccgctaccgttatgataatccacacagtgacttaccctgcgcaacggaagatgccaccggcagccggaaaaccatgacgtggagccgttacggtcagttgctgagcttcactgactgttccggttatgtaacccgctatgaccatgaccgttttggtcaggtgacggcggtgcaccgcgaggaagggctgagtcagtaccgcgcatacgacagccgtggacagttaattgccgtgaaagacacgcagggccatgaaacgcggtatgaatacaacgccgccgcgacatacgacagtgcgaaagtgatctgcaaagccccagctgcagccaatatcgcgcaattgacggtgaatcgttatcagaaactgctcggtactcagtacatcagtaagcaagagtacgatcaggctctggctgatgcgcaacaggcgaatgctgcggtaactgctgcgaaagctgccgttgaaactgcgcagatcaatctgcttacaccaaaggcacctctccgattagcggtcgcattgtcgaacgtgacggaaggcgcattggtacagaacggtcaggcgactgcgctggcaaccgtgcagcaacttgatccgatctacgttgatgtgacccagtccagcaacgacttcctgcgcctgaaacaggaactggcgaatggcacgctgaaacaagagaactgcaaagccaaagtgtcactgatcaccagtgacggcattaagttcccgcaggacggtacgctggaattctctgacgttaccgttgatcagaccactgggtctatcaccctacgcgctatcttcccgaacccggatcacactctgctgccgggcaatatcgacgaatggaataagctcgcgggctttgagactttcaatcaccgcatcccactgatcattagtgagatcggcacccgttgggtgttgcaaacatggatgcagcaacacaatactgcgggcagacgcctgattccgggaagtagcgtttcaggaaatccgcgcccactttcaatgccccggagccgccaagggtttgaatggttctacgcgctgttgtttcagtaccggatggtccgcaccaaacagcagcggcgcaatggcatggcgatagcagttaagcccttccatcggtaa

SEQ ID NO: 15724 - DNA, 1797 bp, Homo sapiens
  SIMILAR (460)..(1575): 831254mologous to Escherichia coli RhsB core protein with unique extension,accession number U00039,Smith-Waterman Score=1583.
atgactgatgcgctggcggcgctttctgcggcggttgccgcacagctgccttgccgtgacgcgctgatgcaggagtacgacgacaagtggcatcagaacggtctggtgatggataaatggtttatcctgcaagccaccagcccggcggcgaatgtgctggagacggtgcgcggcctgttgcagcatcgctcatttaccatgagcaacccgaaccgtattcgttcgttgattggcgcgtttgcgggcagcaatccggcagcgttccatgccgaagatggcagcggttacctgttcctggtggaaatgcttaccgacctcaacagccgtaacccgcaggtggcttcacgtctgattgaaccgctgattcgcctgaaacgttacgatgccaaacgtcaggagaaaatgcgcgcggcgctggaacagttgaaagggctggaaaatctctctggcgatctctccgctaatcgcaccgaccctaatcgacgcggacgggggatatccactgtcaaatccagaccaatttttccctcttcaattaacagcacccgggtcagcatcgctaacgggtcgggcacggcaattattaaccagagtcttataacgcacgacccggaatacccggagaatttacctgccgcgccgctggtgcgctatggctggacgccccgcggcgaactggcggtggtgtatgaccgtagtggcaaacaggtgcgcagctttacttacgatgataaataccggggccggatggtggcgcaccgtcacacgggccggccggaaatccgttaccgttacgacagcgacgggcgggtgacagaacagctaaacccggcaggcttaagctacacgtatcagtatgagaaagaccgcatcaccatcaccgacagcctggaccgccgtgaagtgctgcacacgcagggcgaagccgggctgaagcgggtggtgaaaaaggaacacgcggacggcagcgtcacgcagagtcagtttgacgccgtgggcaggctcagggcacagacggatgccgcaggcaggacaacagagtacagcccggatgtggtgacgggcctcatcacgcgcataaccacgccggatggcagggcatcggcgttttactataaccaccacaaccagttaacgtcagccaccgggcctgacgggctggaattgcgccgggaatatgatgaattgggccgtctgattcaggaaactgcccctgacggcgatatcacccgctaccgttatgataatccacacagtgacttaccctgcgcaacggaagatgccaccggcagccggaaaaccatgacgtggagccgttacggtcagttgctgagcttcaccgactgttccggttatgtaacccgttatgaccatgaccgcttcgggcagatgacggcggtgcaccgcgaggaaaggctgagtcagtaccgcgcattcgacaggcgtgggacagttattgccgtgaaagaaacgcaggggcttgaaacggggtttgaataccacttcccggtacctgacggcgttattgccccgaaaggaaccgaaacgggaacagtcaatccgtgggaaagcgccgctccacagaggatatacgaggataaacacgctggcgcggatacacagcagatcggagggccgctaaaacacacgcgagagtggagtgacaccttcgggctaggccgcgagtttgtgctctctttttcccaaaacaatgcgaacgacacgataactagatacgacaaaacagagaacaacagcgtacgacagagtcaatatagcacactatgtagcacatga

SEQ ID NO: 15725 - DNA, 3231 bp, Homo sapiens
  SIMILAR (2078)..(2860): 991254mologous to Escherichia coli RhsB core protein with unique extension,accession number U00039,Smith-Waterman Score=1389.
atgagaaagaacacggtcgcccgcctgatgaccaaagcggtcattaatcgctttaaaatggtcaagatcgacctgaatgacagaaaaaggatgttgctcattgtcgtgaccgggctttcgggttctggcaaatcctcgctcgctttcgacaccttatatgccgaagggcagcgccgttacgttgaatccctttccgcctacgcgcggcagtttctgtcacataatggaaaagccggacgtcgatcatattgaggggctttctcctgccatctcaattgagcagaaatcgacgtctcataacccgcgttctacggtggggacaatcaccgaaatccacgactatttgcgtttgttattcgcccgcgttggcgagccgcgctgtccggaccacgacgtcccgctggcggcgcaaaccgtcagccagatggtggataacgggctgtcgcagccggaaggcaagcgtctgatgctactcgcgccaatcattaaagagcgcaaaggcgaacacaccaaaacgctggagaacctggcaagccagggctacatccgtgctcgtattgatggcgaagtctgcgatctttccgatccgccaaaactggaactgcaaaagaaacataccattgaagtggtggttgatcgcttcaaggtgcgtgacgatcttacccaacgtcttgccgagtcatttgaaaccgcgctggagctttccggtggtaccgcggtagtggcggatatggacgacccgaaagcggaagagctgctgttctccgccaacttcgcctgcccaatttgcggctacagtatgcgtgaactggagccgcgactgttttcgtttaacaacccggcggggggcctgcccgacctgcgacggccttggcgtacagcaatatttcgatcctgatcgagtgatccagaatccggaactgtcgctggcttggtggtccgatccgtggctgggatcgccgcaacttctattatttccagatgctgaaatcgctggcagatcactataagttcgacctcgaagcgccgtggggcagcctgagcgcgaacgtgcataaagtggtgttgtacggttctggcaaagaaaacattgaattcaaatacatgaacgatcgtggcgatacctccattcgtcgtcatccgttcgaaggcgtgctgcataatatggagcgccgctataaagagacggaatccagcgcggtgtgcctgactatcgacaatccgcagatcgctaaaccccatcgttttcattgcccgcgccgctgccccaatattttctgctctggcgggtgcgaccagaataatcgttatacgcatattgccactcttcttgatcaaataaccgcgaaccgggtgatcactgtcaacgtattacgcggtgcgaatttacaaattcttaacgtattaagtaccgttgtaaaagaagccaaacaagaacgcattaaagtattagcttacgaccgtatgattaacgatgcggatatcgatttttatatttctttcgataacgaaaaagtcggtgaactgcaggcaaaagccctggtcgatattgttccgcaaggtaattacttcctgatgggcggctcgccggtaagataacaacgccaagctgttccgcgccggacaaatgaaagtgttaaaaccttacgttgattccggaaaaattaaagtcgttggtgaccaatgggttgatggctggttaccggaaaacgcattgaaaattatggaaaacgcgctaaccgccaataataacaaaattgatgctgtagttgcctcaaacgatgccaccgcaggtggggcaattcaggcattaagcgcgcaaggtttatcagggaaagtagcaatctccggccaggatgcggatctcgcaggtattaaacgtattgctgccggtacgcaaactatgacggtgtataaacctattacgttgttggcaaatactgccgcagaaattgccgttgagttgggcaatggtcaggaaccaaaagcagataccacactgaataatggcctgaaagatgtcccctcccgcctcctgacaccgatcgatgtgaataaaaacaacatcaaagatacgaatttacctgccgcgccgctggtgcgctatggctggacgccacgcggcgaactggcggtggtgtatgaccgtagtggcaaacaggtgcgcacgtttacttacgatgataaataccggggccggatggtggcgcaccgtcacacgggccggccggaaatccgttaccgttacgacagcgacgggcgggtgacagaacagctaaacccggcaggcttaagctacacgtatcagtatgagaaagaccgcatcaccatcaccgacagcctggaccgccgtgaagtgctgcacacgcagggcgaagccgggctgaagcgggtggtgaaaaaggaacacgcggacggcagcgtcacgcagagtcagtttgacgccgtgggcaggctcagggcacagacggatgccgcaggcaggacaacagagtacagcccggatgtggtgacgggcctcatcacgcgcataaccacgccggatggcagggcatcggcgttttactataaccaccacaaccagttaacgtcagccaccgggcctgacgggctggaattgcgccgggaatatgatgaattgggccgtctgattcaggaaactgcccctgacggcgatatcacccgctaccgttatgataatccacacagtgacttaccctgcgcaacggaagatgccaccggcagccggaaaaccatgacgtggagccgttacggtcagttgctgagcttcaccgactgttccggttatgtaacccgttatgaccatgaccgcttcgggcagatgacggcggtgcaccgacgaggaagggctagagtcagtaccgcgcatacgacagccgtggacagttaattgccgtgaaagacacgcagggccatgaaacgcggtatgaatacaacatcgccggtgacctgaccgccgtcattgccccggacggcagcagaaacgggacacagtacgatgcgtggggaaaggccgtccgtaccacgcagggcgggctgacgcgcagtatggaatacgatgctgccggacgggtcatccgcctgaccagtgaaaacggcagccacaccaccttccgttacgatgtacttgaacaatactgcgggcaggtcattaaagcgcacgccgttagtcgcttcgtcatttgcatcggttctgccaacccttcctga

SEQ ID NO: 15726 - DNA, 630 bp, Homo sapiens
  SIMILAR (274)..(597): 461254mologous to Escherichia coli Transposase,accession number AB024946,Smith-Waterman Score=178.
atgtctaccgagattgcacgtctcaaacgccagctggcagaacggatgaagagctggctatcctccaaaaggccgcgacatacttcgcgaagcgctgaaatgaagtatgtctttattgaaaaacatcaggctgagttcagcataaagcaatgtgccgcgtgctccgggtggcccgcagcggctggtatacgtgtgtcagcggcggacaaggataagcacgcgtcagcagttccgccaacacgcgacagcgttgtcctcgcggcttttacccgcctgcgccgtcagggactgagggcaaaggcccccggaagttcagcccggtcagctaccgcgcacacggcctgcctgtgtcgaaaatctgttggagcaggatttttacgccagtggcccgaaccagaagtggcaggagacatcacgtacttacgtacagatgaaggctggctgtatctgcaatggtcattgacctgtggtcacgtgccgttattggctggtcaatgtcccacgcatgacggcgcaactggcctgcgatgccctgcagatggcgctgtgcggcgtaagacgcccccgaacgttatcgttcacacggaccggggaggcagtactgttcagcaaattattaggcgcaactga

SEQ ID NO: 15727 - DNA, 1584 bp, Homo sapiens; identical to SEQ ID NO: 8877
  SIMILAR (1042)..(1569): 991254mologous to Escherichia coli Transposase,accession number AB024946,Smith-Waterman Score=924.

SEQ ID NO: 15728 - DNA, 1758 bp, Homo sapiens
  SIMILAR (945)..(262): 721254mologous to Haemophilus influenzae Rd transcription accessory protein (tex),accession number U32738,Smith-Waterman Score=830.
  misc_feature (1)...(1758): n = a,t,c or g
ttataaatcccgttgggtaatcgtaatcgtggtggtatcgccgccatcgccgcattctatccacacgccaccctggcgcacaaactggcgctgtaactggttttgcagacgaatgcccagcacggaaggcggcagcgttggcaaaagcatcagtgaacaaggtagtttttcattcaaccaacgccacagtttgtcatcggccagaccgaagcaggcgggcatcaggatcatttcgcaggtattggcgacaggaataagcgcatcaagtaacagcggccagttttcttcattatcaaggaaagacgctttcaggttacgcagttcgctgctgttacccatcagatctttcagtgcctgctgtgttgctgccagaatgcgttccaccaccggataggcttccgggtgaacggtagacgcgtccagcgggttatcaccgtggttaatgcgcaagaagcccgcgcactgctcgaaggctttcggccccagacggctcacttttaacagttgctgacggttctggaactgaccgttctcatcgcgccaggcaacgatgttttgcgccatcatgcgcgtcaggcccgccacgcgggttaacagcggaacagaagcagtgttgagatcgacgccaacggcgtttacgcagtcttctactactgcgtccagtttgcgggccagttgcgtctggctgacgtcatgctgatactgacctacgccgatagatttcggatcgattttcaccagctccgccagcggatcctgcaaacggcgggcgatagacaccgcgccacgcagcgaaacgtcgagatccgggaactcctgtgcagccagctcggaagccgagtaaaccgacgcgcctgcttcgctgacgattactttctgcgcggtcactttcgggaactgcttctgcacatcgagatagaaacgctcagtttcgcgggaagctgtaatatgccgcttcagtgcccgaaattgctgaacagactggcctccacggtccgtgtgaacgataacgttccggggcctcttacgccgccacagcgccatctgcagggcatcgcaggccagttgcgccgtcatgcgtggcgacattgaccagcccaataacggcaacgntgaccacaggtcaatgaccactgccagatacagccagccttcatctgtacgtaagtacgtgatgtctcctgcccacttctggttcgggccactggcgtaaaaatcctgctccaacagattttctgacacaggcaggccgtgtgcgcggtagctgaccgggctgaacttccgggaggcctttgccctcagtccctgacggcgcaggcttgccgccacggtttttacgttaaaggggtaaccctgagcacgcagttcatccgtcaggcgtggggcaccgtaacgctgttccagtggctgattggcatcgatatcaaccagttgtgcaccaccaaaggttaactgtggcgttatggcaatcttcctcgccagcgattcccgtttatggtcgggtttacgtgcacaggcaacttcaaggtcaacattgagtttgatgaccagatcaggcttatggctcgccatccagtgaaacgctttacgttcctggcttgccagccatgagacaaaacgaccaccttcaacgttaggtgggaacaccgtaccatcgtaagcgctacgacttgggatcctagcgtcatcgagaatcttgctctgagtagtgataacgggcgcattcgcgtcagtgattgccggacatatgttaatcat

SEQ ID NO: 15729 - DNA, 1116 bp, Homo sapiens; identical to SEQ ID NO: 4181
  SIMILAR (433)..(1113): 991254mologous to Escherichia coli Transposase,accession number AB024946,Smith-Waterman Score=1203.

SEQ ID NO: 15730 - DNA, 1521 bp, Homo sapiens
  SIMILAR (352)..(9732): 1001254mologous to Homo sapiens Huntington's Disease protein,accession number L12392,Smith-Waterman Score=16001.
atgaaagcagcggcgaaaacgcagaaaccaaaacgtcaggaagaacatgccaactttatcagttggcgttttgcgttgttatgcggctgtattctcctggcgctggcttttctgctcggacgcgtagcgtggttacaagttatctccccggatatgctggtgaaagagggcgacatgcgttctcttcgcgttcagcaagtttccacctcccgcggcatgattactgaccgttctggtcgcccgttagcggtgagcgtgccggtaaaagcgatttgggctgacccgaaagaagtgcatgacgctggcggtatcagcgtcggtgaccgctggaaggcgctggctaacgcgctcaatattccgctggatcagctttcagcccgcattaacgccaacccgaaagggcgctttatttatctggcgcgtcaggtgaaccctgacatggcggactacatcaaaaaactgaaactgccggggattcatctgcgtgaagaatctcgccgttattatccatccggcgaagtgactgctcacctcattggctttactaacgtcgatagtcaagggattgagggcgttgagaagagtttcgataaatggcttaccgggcagccgggtgagcgcattgtgcgtaaagaccgctatggtcgcgtaattgaagatatttcttctactgacagccaggctgcgcacaacctggcgctgagtattgatgaacgcctgcaggcgctggtttatcgcgaactgaacaatgcggtggcctttaacaaggctgaatctggtagcgccgtgctggtggatgtcaacaccggtgaagtgctggcgatggctaacagcccgtcatacaaccctaacaatctgagcggcacgccgaaagaggcgatgcgtaaccgtaccatcaccgacgtgtttgaacctggctcaacggttaaaccgatggtggtgatgaccgcgttgcaaccacggcagcacacgcatcggatcacgagcagcaaacggaattgcaccttccgaaatgaagcacagtcccaataccagagcggctttgccaccttcctgctgcgctttgtcgaatttgcgacgcgccaccattgttgccagacccattgccagcggtggcaccatacctgccgccataatcgccgccatcgggccataggtttgagtactcagcagacccacaccgaatgcgtacgctgctttgtttaccggaccgcccatgtcagtacacatcatgccaccgaggatcgcccccagcagaaccgcattcgcagtccccatggtctgcagccagtgagtcagcccttcgagaatgccagcaactggtttaccgatcaggaagtaactcgtgatgaagaggcagccagtggacacgaggaatcggaatttcaccggcgacactttgagaaaccagttttagccttcaatgccgaaccccttaagtggtttctccgagatatcttggaatcagacgcattacggacttgctggacctgcgataattcgcagtttgcggatgtctga

SEQ ID NO: 15731 - DNA, 2847 bp, Homo sapiens; identical to SEQ ID NO: 8885
  SIMILAR (743)..(940): 611254mologous to Homo sapiens HDCMB45P,accession number AF068294,Smith-Waterman Score=187.
  misc_feature (1)...(2847): n = a,t,c or g

SEQ ID NO: 15732 - DNA, 1407 bp, Homo sapiens
  SIMILAR (643)..(569): 721254mologous to Escherichia coli rep helicase,accession number X04794,Smith-Waterman Score=92.
  misc_feature (1)...(1407): n = a,t,c or g
atgcgtgccagttnaaacgcggctgcangactttgntcagcggcatgggccgtattatcccagcgccagcgagaactgctaccgtacccggtgtgccggaagccagatgcgaagccgcgacatactcgcgaagcgcctgaaatgaagtatgtctttattgaaaaacatcaggctagttcagcatcaaagcaatgtgccgcgtgctccgggtggcccgcagcggtggtatacgtggtgtcagcggcggacaaggataagcacgcgtcagcagtccgccaacactgcgacagcgttgtcctcgcggcttttacccgggtccatgcaggcagtttagcgagtaaggcactggctattgatcgttttaccgtcattgaccagatccgatttaccgctgattccatgccttccagcagtgccagttctttgccttccactgaaatggtcatttttccagtgacagtttttgatttcctacacgctcaccaaaacttgccgcgtgctggaaccgtcggttttcagattattaaagataaacagttggttgagttcttcatgcgcatttcggcggctttcgggctgggcgatgtttcgtacgccaggattcataatccatgccatggatcagatcacgcaccgcggcaatggctcccgctccgccagacgctggatttctgccaaccaaaatgcgctgtcatcgtccgggttagtcagcacgcgcagataaccagcaagtccttgatttcaggacgagagaaaaacgacgtaccaccagaattttaccgcgcggttaaaatgtcggtgaagaccgcggtaaagagaaagtcggcgtgctggatattccgggcttctatgtgggttgacagacgatgtcaaagtgcaactgcagaaactggaaaaacagaatgtagcagcgtcatcatcgacctgcgtagcaatggcgtccgcgataacaacggcaaggttcgtgaagatagcgataccgacggacagttttctataaaggcccgctggtggtgctggttgaccgcttcagtgcttggcttcagaaatctttgccgcggcaatgcaggattacggtcgtgcgctgttgtgggtgaaccgacgtttgctggttttgagctgctggacggtggcaaaagcggaactcgcggtagcaggacgctgccagcgaactcgcagtttgcaagtgacggtattaaccgaaaagtgactgagcgtacatgtatacgaagattattggtactgcagctatctgcccgaacaagtgcggacaaacgccgatttggaaaaaatgtggacacctctgacgagtggattgtcactcgtaccggtatccgcgaacgcacattgccgcgccaaacgaaaccgtttcaaccatgggctttgaagcgggacacgcgcaattga

SEQ ID NO: 15733 - DNA, 3255 bp, Homo sapiens
  SIMILAR (1891)..(2805): 811254mologous to Homo sapiens melanoma-associated chondroitin sulfate proteoglycan (MCSP),accession number X96753,Smith-Waterman Score=1249.
atgtgcaaccaggtaatcccccaagttcacaagggcgcaaacgccggttccgttgaaatttgcaccgaagaaacagtctcaaacaccaaaccggttacattgcacactacaaacctggggcaaggtataaacaagctttcccctgttcctcaaaacccaactagagttacgcgacgagtcctgatcccccccttcacaagcaacaacgagttcaacacatacgcggccaggggggcaaccacagcaacaaggtcttctggccagagctcctgttctcggtgggtgacgcagttctatgggaacccctacaacaattcgacgaactcaatggaggacgagtcctactacggcggacaacattctgcgggcgatgagagggcgccacaagctgcggttcctgcggcaataaccaatcttgatgtctggctgcggacgcgcttcaccttcgatgtcttatcaatgcccgccataatgcgcagcaggaggatgcgcttgtggaaaaagccaaacaagtacctggcggctgttggctgccggtgtctgtctgctgacggtcagcagcgggcgcgagccgactcactggatgagcagcgtagtcgttacgcgcaaatcagcaggcctgggataatcgacaaatggatgtggctttattcacgccatgccgacaaacaccgccagaccaacggcgtccagcaccggcaacatccatttggtaagcgtcttggctggcgcaccagcacgatggtcagcatgctgggaccattgcaacgaccagatcgcgccatgtcgcgaattgtcccgccgcctactgcggttacacgcccagtaccagaacaccaaaagggtccatacgcaattttccggctacaaaacgccggagatggcaaataccgctgtgccgactatatccagccaaagacgagcattgttcaatccccactgagcccctggaaagtacggcacggattgatcggcaacaccggctgcggaccagctgcccatcacgtcagtttactgtccgccagtggcccaaccaccgcaatggtggccgattttttagcggtaacgtttcgagacggtttttcagcaacaccaagctttcgcgcgcacttcacgcgcttctttacggtgcaggcggctttcggcattggtatccccggcgaaggtaacggcgaatgggtggtgaccatccgctggcgaagctgcgggaaaatcaggtgcgtctgtttgccggagcggggattggcctgcgtcgtcaccgttggaacattcctccattcgcgtggtgcactgctcaacgacagcggtgagcataacttgcaggatgcgattaaccatcggctgaggattttactgccacgccatcacctgctgatgaagtggcctattccagctttccggtggcaccaccggcacaccgaaactgatcccgcgcaccataacgactactactacagcgtgcgtcgtagcgtcgagatttgtcagtcacacaacagacacgctacctgtgcgcgatcccggcggctcataactacccatgagttcgccaggatcgctgggcgtctttcttgccggaggaacggtgttctggcggccgatcccagcgccacgctctgtttcccattgattgaaaacatcagtcagcctgtggttgcggcgctgatcgaagggaaagccgggcccgacatagccccactgttcgtccatttccgcgcagacgatgacgtcatgcccggctgccaatggcctgctgggctttctctttggttgagatatcgggatctggatttcatgggtgatgcctttggtcgccagcaggcgcgccgtttggtgcgtgcatccgccgctttatccatcgccgtaccgagcatccgaaaccttcttccgcttccgtcgcgcctgcatccagcgctgctttcgcttcgaagtgagctgaaccagttgatcttcaaccttgattttcaggtcggttatcgactggtacgtcccgggaacacttttgcagggcgccttgttccggtgctgaacgtgctggaaggcgaagatgctgaaaccaacgcgctggcgcaaaacgtcgttgcccgaaatgcggcacggcgatggacagctatctatcgatccgaaaccacgccaaggccgttgatcatggtggtgtgcgagcagtaccaacgagtgtatccggataagcaatccattcaccgtcctgcaatcactccacactgctttgccgagatattcgaggttaacctgatggcaaagcctgtgcctggcggcacgacgctaaaccgactgaacgcttgctttcccatttcaggaacacataacgttcgtggttgcgctccatttccaggcgtacttttcttcaaatgcctcatcatcaccaaaacgatcgacggtcaccgagtgtcaatgaccaggtcgaccgatcaacaacggcggtacgccggtaaagtcctgcatcagcacccttgccgggcgggttgcgaagccctgattctcttcagggtgaatattaaagataacaaaacatcgcgtaacgatttgataacaacccaaattgataaaagaggagaaccttgtggcaaagcaaatgacaaccccgccgcagcggggtcaaggatcgcatttggtgccattgaagaatcactcttatggtcagcagaacaacggcggcttcgctggcggcgacgctggcttgtcgacctgatgagggaccggttggatcttcggctatggatcgttgatgtggaatccggcactggagtttacgaatcgtgcaccgtcttattccgaatatcgcagccggactacatgaccagcggttgtaatgattatgccgatgcattttgccacgacgctagcggcgcggtttcgccgattactgcggtggtggtcgttacgtcaggaattgcggcgtttcgccttttgcggtgcgtaatgccggtcgaccaccgcgtggtggctgcggaggttcatcgtcagatgagtgtcatcatcgtgatctggcttgtcgccatcaataaccgacatacggtttcgttgtctgccgatgcctcttcatcattcatgatgctggtatttcatcgtaggcagcttcaggctcaaacatcgtgcctgcgccattttcagggcgtagatagccagcacggcagccagcggcacagaaacctgacgcggatgccaccaaagcgcgcgttaaagcgcacctcatcattcgccagttccaattgccgacagcacgcggcgcaatgttga

SEQ ID NO: 15734 - DNA, 2412 bp, Homo sapiens
  SIMILAR (622)..(1059): 651254mologous to Homo sapiens reverse transcriptase homolog= pol {retroviral element},accession number S61070,Smith-Waterman Score=441.
atggtgaatacgtgccagcagcgtttcaacaggcaccggacgcgggcggtcggtgccgtcaatggcgataatgtccgcgcccgcctgcgccagcgcatcaacatcttcaatataggccgtgatgcgtaccggagaatcctccagatcgcgtgctgcatgctccgtcaagggattgagggcgttgagaagagtttcgataaatggcttaccgggcagccgggtgagcgcattgtgcgtaaagaccgctatggtcgcgtaattgaagatatttcttctactgacagccaggctgcgcacaacctggcgctgagtattgatgaacgcctgcaggcgctggtttatcgcgaactgaacaatgcggtggcctttaacaaggctgaatctggtagcgccgtgctggtggatgtcaacaccggtgaagtgctggcgatggctaacagcccgtcatacaaccctaacaatctgagcggcacgccgaaagaggcgatgcgtaaccgtaccatcaccgacgtgtttgaacctggctcaacggttaaaccgatggtggtgatgaccgcgttgcaacgtggcgtggtgcgggaaaactcggtactcaataccattccttatcgaattaacggccacgaaatcaaagacgtggcacgctacagcgaattaaccctgaccggggtattacagaagtcgacgtgggaaacagtaagcactctgacggatagtattatcgataaacgccggatgacacatcacctccagcgaacgatcaccccgatggcctgcgtcatccagcacttgcaggaacagcgactcactgatctcttcaccgtagaatgcactgctgaatccctgggtagtgcgcaggttgaccggcaaatcaaacgccatctgacgatccgcccgcaacgcaatgccctgctctgccgcaaacctggcaacaatcgggaaaatctgcgggaacatatgcacatgatgatggctatcaagatgcgtagtatgcgtccgaatataacttttactcttggcgccggtttattgtcgaagaaaaacacttcggcctgtcgcacgatgtcgaacgttccgttaccttacgatttccactcagcagcgctgcgcagcaaagcggaaattgacgccggttttgcccgtatctggcaagtgatgcatgacggtattgaacgtgggatgaacactgaaggcgtgctgcctggtccgctcaatgtgccgcgccgtgccgtagcgctgcgtcgtcagctggtttccagcgataacatctctaacgatccgatgaatgtcatcgactggatcaacatgtacgcgctggcggttagtgaagaaaacgcagctggcgggcgcgtggtaacggcaccgactaacggtgcgtgcggcattattccggcagtactggcttattacgataagttccgtcgtccggtaaacgagcggtcaattgcccgctattttctggccgcgggggctattggcgcgctgtataaaatgaacgcctccatctctggcgcggaagtcggctgtcagggggagattggcgtggcctgttcaatggcggcggcagggttaactgaactactgggcggcagtccggcgcagaacatggaaggcaagattgatcgcccggaagagtatgccgatattgccactaagtgtgtgaccaacttccgtgagaagaatcgcgatcgttgcctggtgattttgtcgcgtaatgatgaagcgcttaacagccagcggacatctgaagagttgcatcattattacgagattgtctgggacgaagagcagacgcacaaattcaagaatatctccccgcatttacagcgcattaaagcgttcaaaaccctcggtggaccacatggaaacatcaccgttgatatggttattagcgcacaggaattgttgcaggaagacatggcaacattcgacggacatatcgttgaagcgttgatgaaaatgccagaagttaacgccatgtatccggagcttaagttgcacgccattgggtgggttaagcataaatgtattcctggtgctaaatggcccgaaattcaggcagagatgcgcatctggaaaaaacgtcgcgaaggtgaacgcaaggaaaccggaaaatacacgtctgttgttgatctcgcccgcgccagagccaatcaacagtacactgaaaattcaacaggaaaaatcagcccggtcattgctgccattcatcgcgaatacaagcagacatggaaaacactggatgacgaactggcctatgggcgctgcttcgcagacaggcagaacttgatggtatgcctgcgatcaatgccaaacgtgtttaccggatcatgcgccagaatgcgctgttgcttgagcgaaaacctgctgtaccgccatcgaaacgggcacatacaggcagagtggccgtga

SEQ ID NO: 15735 - DNA, 2802 bp, Homo sapiens
  SIMILAR (607)..(1695): 921254mologous to Homo sapiens putative p150,accession number U93563,Smith-Waterman Score=1804.
atgcggtcgcgttttttacgtgtcgcgttttaccactattcagtcacttcccttcccgcactccccgcgcttcggtactaccgccttgggtctggggtcaatgtaagccataataccggctttctccgcagtcccaaacgttgcggccaggccctcacatgcccggtaacattattcggccaaagttctcagctggttcaccggcgagcagaaacagcgcgcgttcaggcgctgacccgcgttggcatggtgcattttgcccatcagcgcgtttcaccctctccggcggccagcagcaacgtgtggcgattgcccgtgcgctgtgcagcaggcgaaaaatcagcgcgcatcgtgatggacaccctgcgcgacatcaaccagacgacggcatcaccgtggtcgtcacgctgcatcaggtggattacgccctggctactgcgaacgcatcgtcgccctgcgccaggggcacgtcttctacgaggcagcagccaacagtttgataacgaacgttttgaccatctctaccgcacattaaccgcatatggagaagaagctgagcgtgagtcacgccttcttgtccccggactacgcgggtaccgagctgagttaggcatgaatacttttttcgctgagttcgcttcatgtttgacggaattcagacgcgtttacgcgaaagtctggctctgcgtcaaccaaatgaatcggggtcaggctgatgcagcagcaattgcagcagactgtgatgactcacggcggatttacaccgacgcccagctgttacgcgatgatattcaaacacttttacggcagaacgatattgaccaagaccggttcggtcggttaaacatagatcccccattagaattcgatgtaattttcagtgtagaccataattttctaactgaggttcatcgcggctttatggacttttctgaaagcgttgtgaagcgcaatcagatcacggtacaaccgtatggccatgcaattaagatgttcaccggaatcgctaccaatctgaataaaaagactgttcgaagctcattccggagaggaaaacttcaatacaatgttcacgacagaacagtaaacaaccatcgcgaaccacggcgctaccagattcaccttgttaaaggccaccgcattgttcagttcgcgataaaccagcgcctgaggcgttcatcaatactcagcgccaggttgtgcgcagcctggctgtcagagaagaaatatcttcaattacgcgaccatagcggtctttacgcacaatggctcacccggctgcccgccatttatcgaaactcttctcaacgcctcaatcccttgactatcgacgttagtaaagccaatgaggtgagcagtcagcgaaatcgaaagcgattcaccgccaccaatatccatgtgacctcgcacggtacggaatttaccctaaaaccccaaccggtagcgtcgatgttctgctgccgttgccggggcgtcaaatattgcgaatgcgctggcagccgctgcgctctccatgtccgtgggcgaacgcttgatgctatcaaagcggggctggcaaatctgaaagctgttccagccgtctgttccccatccaactggcagaaaaccagttgctgctcgacgatcctacaacgccaatgtcggttcaatgactgcagcagtccaggtactggtgaaatgccgggctaccgcgtgctggtggtgggcgatatggcggaactggcgctgaaagcgaagcctgccatgtacaggtggtgcgtaacgacggtcctgaatacacttcagcaagcgcggtacgccgaccatgggcgggattatgatcctgcggcgattgtgatctccgtactgctgtgggcttacccgtccatccgtactctggtgcgtgttggtggtgctgggtggcgccccgtggccggtcgttcaaataaatgttgccccccacccaacccaaccaacccgcccaatccaacccaacctccttatgcccatcacgcaacctttcgtagtcctgcacgccggcatttagctaatccccgaaaagaaaatgctcaacctggggatgaagtcggcaaagtgttcgattttttcgaggcgttagcggaagatgcggcgtggagttgcggtttgttggcgacaagtgtcaggtcgcgggcgaccgctgatgctgcgtcgggcgctaagcaacctgctttcgaacgccctgcttatacgccaaccggagagacaattgtagtgcgctgtcagacggtcgatacctggtgcaagttatcgtcgaaaaccccggtgacggaaatggacgtcaaaaggctcacttctgtttgcagatgcccattcgccgaattaaacaacgccagtccatatagaagcgaaggtgacggtaacgctcgagtgtcagcgttgcgggaagccgtttatcatcaggtctacacaacgtattgttttagtcctgtgcgttcagacgaaaggctgaagcactgccggaagcgtatgaaccgattgaggttaacgaattcaaccgtcggacgcaagttagtggcaacggctggagttccgcagtggccctttcggtacacataccgttcactcttgggcgctgtcttcgttcgttatttctccgtgcatacagggcgcacacagcttttagttttgcttgttcggcatgccggtgctacctttcctcctgtatccctcacggtgcttattaggggcccttgctgtaatgctggtagcagtcgtttctgtaacaaaagggtaccccttaaggccccgtatgcacgtaaactacgcgttaaagctatctaa

SEQ ID NO: 15736 - DNA, 1824 bp, Homo sapiens
  SIMILAR (1020)..(832): 531254mologous to Escherichia coli ATP synthase alpha subunit (atp-6),accession number J01594,Smith-Waterman Score=114.
atgaacgtgaactgggtgtctgcgcgtcgatatcggtggtggtacaatggatatcgccgtttataccggtgggcattgcgccacactaaggatatcgcttacgcctttggcacgccgccaagcgacgccgaagcgattaagttcgccacggttgtgcgctgggttccatcgttggaaaagatgagagctggaagtgccgagcgtaggtggtcgtccgccacggagtctgcaacgtcaacactggcagaggtgatcgagccgcgctataccgagctagcaaaatcagcagacgcttctgaacgtgaactggagatgtctaccgagattgcacgtctcaaacgcagctggcagaacgggatgaagagctggctatcctccaaaaggccgcgaatacttcgcgaagcgcctgaaatgaagtatgtctttattgaaaaacatcggctgagttcagcatcaaagcaatgtgccgcgtgctccgggtggcccgcgcggctggtatacgtggtgtcagcggcggacaaggataagcacgcgtcacagttccgccaacactgcgacagcgttgtcctcgcggcttttacccgaaaatctgttggagcaggatttttacgccagtgcccgaaccagaagtgggcaggagacatcacgtacttacgtacagatgaggctggctgtatctggcagtggtcattgacctgtggtcacgtgccgttatggctggtcaatgtcgccacgcatgacggcgcaactggcctgcgatgcctgcagatggcgctgtggcggcgtaagaggccccggaacgttatcgttcaacggaccgtggaggccattcacatccgcccggtaaccacgttctgctgcgaacagaaccagaactgctgcgcaacggacatcggcgcatactgtttctgtttcagcagttcgtcactttctgaccgtggtcaagctgcttacgtgttgcatcgtcaaggtggatgcaaactgagagaacgctgccagttcacgatactgtgccagagcgtacggataccaccggacagttttttcatgatcttggcttcaacgtattcggcgttaacacgtgcagcacgctccagcagacgaagtggaggtagaaaacgtcgcccgggaatgcttcacgtcctggcggacgcggagcagcagggagatctgacgagaagccgtcgtgatccagcggacctttaccgtcgattggtgcaccagagtgttaaccacacggcccagcaggccacggccaaccggaacttccggatacggccagtacacttaactttcatgccttcggcaaggactggcctgacattagccactgaattgataaacctcgcctatgagcggcacagcagcatctgtttatttataccaaaaccgaatacgaggcgctgttccgccaggcggtttttccacgctgaccagcgtacccggcgtgatgtacaaccaggaatgcgctactggctggaaacgccgactatctccgcaccgcccatcgaacggttgaaattgagcggctgcgttaccaggagatgccgatatccgcttccgggtacgtcaactgctggcgaaaaacgatctcacggctatcgcgccgctgtccctgcagtcacgctgcattatttgcagaacctgcttgagcactcccccaggacgcggcagctcgtcaaaagacccccgcatgagaaacaggcacccttgagtctggggattgatgatacgcatcgccccactcgatacgcaggatatcgacctgcaaataatagcagcgttgagaaacagttggcggtaccagctgatttgtttgtgtga

SEQ ID NO: 15737 - DNA, 720 bp, Homo sapiens
  SIMILAR (208)..(528): 521254mologous to Plasmid F 98 pct identical to sp:P05822,accession number AP001918,Smith-Waterman Score=248.
atgtacggaggctggcgggaacaggacgctggtgaaagacgtcagtcatacagcatgtaccagagctgctgggcataccgggacacgtattcacacagtcagcagacaagggaacctgtcagacctacaccgacaatccgcctgtaccctggtgtcaaacagtgcgccttttactccgaagaaggtgctgtctgcatgaatatgccacgtactcctggttacccctttaacgtaaaaaccgtggacggcaacctgcgctgtcagggactgagggcaaaggcctcccggaagttcagcccaaaatctgttggagcagatttttacgccagtggcccgaaccagaagtgggcaggagacatcacgtcttacgtacagatgaaggctggctgtatctggcagtggtcattgacctgggtcacgtgccgttattggctggtcaatgtcgccacgcatgacggcgcactggcctgcgatgccctgcagatggcgctgtggcggcgtgcgaacttatgctcccgaaccaaccggctgaaggcgctggttgcaaaactgcagcgcatgcagttcgtaatagctcagaaaaacttcgcgcaaaaatcgaacgacttgacgcacacctgcaaggtcttcctcggcccctcctctgatgctgaaacagcccttcacacgtcagtggccgctcaacaccccatggaaaccaccaaggctttcaccctctga

SEQ ID NO: 15738 - DNA, 1398 bp, Homo sapiens
  SIMILAR (798)..(256): 961254mologous to Escherichia coli Transposase,accession number AB024946,Smith-Waterman Score=915.
  misc_feature (1)...(1398): n = a,t,c or g
ctagttgtgggaacctgcatatttctcaggcatgcagcatctggggctgaactgcccgtctgcgtctgtggcggctctatttttttttaaatccactttcttcatactttgcattttagtcaggaaatcactgctgcccacatactcctcgggatcctcagagtcgagccacaccgcgggaacaaagcctcggggaagcacccccgcggaagagggtgccaggccacaagcgggccccgggaaagagggcgttccccaaagcggcttanggcagcccgcagccagttgcgccgtcatgcgtggcgacattgaccagccaataacggcacgtgaccacaggtcaatgaccactgccagatacagccagccttcatctgtacgtaagtacgtgatgtctcctgcccacttctggttcgggccactggcgtaaaaatcctgctccaacagattttctgacacaggcaggccgtgtgcgcggtagctgaccgggctgaacttccgggaggcctttgccctcagtccctgacggcgcaggcttgccgccacggtttttacgttaaaggggtaaccctgagcacgcagttcatccgtcaggcgtggggcaccgtaacgctgttttgaccgggtaaaagccgcgaggacaacgctgtcgcagtgttggcggaactgctgacgcgtgcttatccttgtccgccgctgacaccacgtataccagccgctgcgggccacccggagcacgcggcacattgctttgatgctgaactcagcctgatgtttttcaataaagacatacttcatttcaggcgcttcgcgaagtatgtcgcggcgtgcaatctcggtagacatctccagttcacgttcagaagacgtctgctgattttgctgtttactgcgccagttgtagagttgtgattcatacaggctgagttcacgggctgcggcagtaacaccgatgcgttcagcaagcttcagggcttcagggtttttactggtgatactatttgtatgtagggtgtctgtggtcgggtgccgggtcttggcgtggtcgggggggtcggtgttccgcaggggggtgccgttagcctggactgtattgcgctgggttcgccgccggtgtgggtgcggcgtgggccggtgtcgcggtctttccgctgttgtgtatccgtctggcatcatcacggtggacagtgcgcgcagctggcggattatgggccgcagtggcagtccgctggcgcacggttggattggcgggttgctggtcgcagccacgcctttgaacggacgcttcatgttttcgatagcgtcgatgatgtcgtggtgaaccagctgttcgttctggatacctacacaacgaccgccgtaacctgccagcagcagatcgatagcgtaagcgcccat

SEQ ID NO: 15739 - DNA, 3208 bp, Homo sapiens
  SIMILAR (313)..(1149): 751254mologous to Binary vector pCAMBIA-1201 GUSA, hexaHis tagged,accession number AF234293,Smith-Waterman Score=1062.
atggcggaagggatgcgtaccataggtcgcgccatgcttaaaaataagcatatgacgatcacggaatttgttgcccagcggatgcgtgatgcccagcaaaaaggcgagataagcccagacatcaacacggcaatgacttcacgtttactgctggatctgacctacggtgtactggccgatatcgaagcggaagacctggcgcgtaagcgtcgtttgctcaggattacgcgcgatgattggcggtatcttaaccgcatcctgattctctctctttttcggcgggctggtgataactgtgcccgcgtttcatatcaaaccccaacccgtgaaatcaaaaaactcgacggcctgtgggcattcagtctggatcgcgaaaactgtggaattgatcagcgttggtgggaaagcgcgttacaagaaagccgggcaattgctgtgccaggcagttttaacgatcagttcgccgatgcagatattcgtaattatgcgggcaacgtctggtatcagcgcgaagtctttataccgaaaggttgggcaggccagcgtatcgtgctgcgtttcgatgcggtcactcattacggcaaagtgtgggtcaataatcaggaagtgatggagcatcagggcggctatacgccatttgaagccgatgtcacgccgtatgttattgccgggaaaagtgtacgtatcaccgtttgtgtgaacaacgaactgaactggcagactatcccgccgggaatggtgattaccgacgaaaacggcaagaaaaagcagtcttacttccatgatttctttaactatgccgggatccatcgcagcgtaatgctctacaccacgccgaacacctgggtggacgatatcaccgtggtgacgcatgtcgcgccagactgtgaacacgccaacaacattgtctacagagctgttatccagttcagtaccgttgtctacgtcgccgttaccgttgatagtcaggtgaccatcagagttcatagcaacaataccgtaaccgtagttagacttggaagtatcccaggtacggtcgttcaccagatcagcgttcagaacgtaatcgctgctatggatatcgaacacaccagatactacgttaccgttatggtcagcgatgttgccgctggtcagttccagtttgtcagtacggaaagcttcagtatcgaactgatcaacgttcacatccaatacaccgccgttagttacggtgatagtattggcgtacagcattcgcctgaatttcgcagtgaagccctgaagcttgctgaacgcatcggtgttactgccgcagcccgtgaactcagcctgtatgaatcacaactctacaactggcgcagtaaacagcaaaatcagcagacgtcttctgaacgtgaactggagatgtctaccgagattgcacgccgcgacatacttcgcgaagcgcctgaaatgaagtatgtctttattgaaaaacatcaggctgagttcagcatcaaagcaatgtgccgcgtgctccgggtggcccgcagcggctggtatacgtggtgtcagcggcggacaaggataagcacgcgtcagcagttccgccaacactgcgacagcgttgtcctcgcggcttttacccggtcaaaacagcgttacggtgccccacgcctgacggatgaactgcgtgctcaggctgtaccctttaacgtaaaaacccgggcggcaagctgcgccgtcagggctgagggcaaggccccccgaattcagcccgtagttacgcgcaaagcctgctggtcgaaactgtgggcagaatttagcaggcaaaaatcagccagccagctgcatgcctgttttgtcagaatctcagcaggcatccccctcatggcagggattatggggccaagaaccaagtacccaacacaattgaacaaccaccgggaccataataattcccacaaagatttccagcggagcaacacaagcacaattgagatccaggtggtccccccagtgcagtgggcacaatttaaacagttggcacaacttaccgatgagccaccaacagcagcccgaccgcgcgcgcgccgcagcctgggcgtaagggccgccggagccgatagcaataagatcgttttctggctgcaccacgtcaccgttaccggtgatgataagcgatgcagtttcatccgcgactgccagcagtgcttcaagtttgcgcagcatgcgatcggtacgccagtcttttgccagctcaacggcggctttgaccagatggccctgatgcatttccagtttacgttcaaacagttcgaacagcgtaaaagcatccgcagtaccgcccgcaaagcccgcgatgactttgtcgttgtacagacggcggacctttttcacgttgcctttcattacggtattgcccaacgtggcctgaccatcaccagcgatgaccacatggccgttacggcgtacgcttactatagttgtcacgagctgaccccttggttacgaatacagagtacaaaccccgtacaaaaccttgaacgaacggatggaccatccaaggggtcggatattctccgacgtcggtttgggcgtaagggacgacatgggcaattgctgataaatggcattgttcgagttcgaatcggaagatgtaaaaccgtgtatgatggtgtttttgaggtgctccagtggcttctgtttctatcagctgtccctcctgttcagctactgacggggtggtgcgtaacggcaaaagcactgccggacatcagcgctatctctgctctcactgccgtaaaacatggcaactgcagttcacttacaccgcttctcaacccgaaaatctgttggagcaggatttttacgccagtggcccgaccagaagtgggcaggagacatcacgtacttacgtacagatgaaggctggtgtatctggcagtggtcattgacctgtggtcacgtgccgttattggctgtcaatgtcgccacgcatgacggcgcaactggcctgcgatgccctgcagaggcgctgtggcggcgtaagaggccccggaacgttatcgttcacacggacgtggcgacttatgcttccgaaaccaaccggctgaaggcgctgttgcaaaactgcagcgcatgcagttcggtaaaagctcagaaaaacttccgcaaaaatcgaacggtaaatacaggaagcacaggagcgaatcagcgcattcaggaggaaatggcagaaacactg

SEQ ID NO: 15740 - DNA, 3749 bp, Homo sapiens
  SIMILAR (412)..(50): 341254mologous to Homo sapiens alpha-1 type III collagen,accession number M59227,Smith-Waterman Score=118.
atggaaaatactacggtaactgctgataataacgtggagaaaaatgtcgcgtcgtttgccgcaaatgccgggacatttttaagcagtcagccagatagcgatgcgacacgtaactttattaccggaatggccacagctaaagctaaccaggaaatacaggagtggctcgggaaatatggtactgcgcgcgtcaaactgaatgtcgataaagatttctcgctgaaggattcttcgctggaaatgctttatccgatttatgatacgccgacaaatatgttgttcactcagggggcaatacatcgtacagacgatcgtactcagtcaaatattggttttggctggcgtcatttttcaggaaatgactggatggcgggggtgaatacttttatcgatcatgatttatcccgtagtcatacccgcattggtgttggtgcggaatactggcgcgattatctgaaactgagcgccaatggttatattcgggcttctggctggaaaaaatcgccggatattgaggattatcaggaacgcccggcgaatggctgggatattcgtgctgagggctatttacccgcctggccgcagcttggcgcaagcctgatgtatgaacagtattatggcgatgaagtcgggctgtttggtaaagataagcgccagaaagacccgcatgctatttctgccgagcattcgcctgaatttcgcagtgaagccctgaagcttgctgaacgcatcggtgttactgccgcagcccgtgaactcagcctgtatgaatcacaactctacaactggcgcagtaaacagcaaaatcagcagacgtcttctgaacgtgaactggagatgtctaccgagattgcacgccgcgacatacttcgcgaagcgcctgaaatgaagtatgtctttattgaaaaacatcaggctgagttcagcatcaaagcaatgtgccgcgtgctccgggtggcccgcagcggctggtatacgtggtgtcagcggcggacaaggataagcacgcgtcagcagttccgccaacactgcgacagcgttgtcctcgcggcttttacccggtcaaaacagcgttacggtgccccacgcctgacggatgaactgcgtgctcagggttacccctttaacgtaaaaaccgtggcggcaagcctgcgccgtcagggactgagggcaaaggcctcccggaagttcagcccggtcagctaccgcgcacacggcctgcctgtgtcagaaaatctgttggagcaggatttttacgccagtggcccgaaccagaagtgggcaggagacatcacgtacttacgtacagatgaaggctggctgtatctggcagtggccccttctttggaaaagtttgaaagctcctgggatttagcacgggccttccagccaacaggcaaaagccacccgtataccgggaacccccgggaaggcccgacaaaggccaggaaggttacaaaaggttgggaagaccgacactttctgttatttttccgcgctgatatcaatggtaatcggatctttgtcgccgccttgttgaatggtgagtttactgtcgctggtggcgatcgccgttttcgtatcgtctctggtggtgcgcgtggtcagggtttgcgcctgcgccagatgggtgacgctgatggtgtatttcccggcgatggcgttacccgcagtggtggcactgaactgcgcgcgaaggatgacgcagcgggtcagtcgattgctaaccgtttcacctctaacattaaaggcctgactcaggcggcccgtaacgccaacgacggtatctccgttgcgcagaccaccgaaggcgcgctgtccgaaatcaacaacaacttacagcgtgtgcgtgaactgacggtacaggccactaccggtactaactctgagtctgatctgtctgctatccaggacgaaattaaatcccgtctggatgaaattgaccgcgtatctggtcagacccagttcaacggcgtgaacgtgctggcaaaaaatggctccatgaaaatccaggttggcgcaaatgataaccagactatcactatcgatctgaagcagattgatgctaaaactcttggccttgatggttttagcgttaaaactaacgatacagttaccactagtgctccagtaactgcttttggtgctaccaccacaaacaatattaaacttactggaattaccctttctacggaagcagccactgatactggcggaactaacccagcttcaattgagggtgtttatactgataatggtaatgattactatgcgaaaatcaccggtggtgataacgatgggaagtattacgcagtaacagttgctaatgatggtacagtgacaatggcgactggagcaacggcaaatgcaactgtaactgatgcaaatactactaaagctacaactatcacttcaggcggtacacctgttcagattgataatactgcaggttccgcaactgccaaccttggtgctgttagcttagtaaaactgcaggattccaagggtaatgataccgatacatatgcgcttaaagatacaaggcgcttcgcgaagtatgtcgcggccttttggaggatagccagctcttcatcccgttctgccagctggcgtttgagacgtgcaatctcggtagacatctccagttcacgttcagaagacgtctgctgattttgctgtttactgcgccagttgtagagttgtgattcatacaggctgagttcacgggctgcggcagtaacaccgatgcgttcagcaagcttcagggcttcagccagccccaggcagtccatgctgatcccttcgaacgccgcattttgccaggcatcctgaatcagttgttgcagtaatgaaaccatattagcgtgctgatcgatggtcacatggtccgctttagtggcagcaaacaatagcttatcgataaccggcgaaaacaaacgccggaacagggtacgctgcccgtagtgaaaactttgcatcagctgcgtcagtgccagacgcatatcattaaatgcctgtggcccactgttgagaggttgcaggcaatccaccagcacaatctggcggtcaaagcgcagaaaatgattcttatagaaccccttcaccaccttctcgcagtaataattaaagcgctcgcgcagcattccggcattggtatgcttatcggcctgcgccagtttggactcgccccaggtatcgacatccggccacgggaagaattgcagcgcgggcgcacctgccatatctcccggcaagacaaagcgcccaggctgaataaagtgcagcccctgctctttacagtggtggagataatcggtccacgcggcggcaatgtccgccagccggttttcgtcggcaggcgctagcgggtccagcccttcgctcatcattcgccatttcgccgaccattctccgcgctgaccattgagtaagcccgtcatctggcgcgaccagcttaaatagtcctgcgccagcatcggcaggtcgagcaaccattcgccgggataatccacaatttccagatacagcgtggaggtatccttaaagtggcgtagcagcgaatcattcgatttaaaacgtagcgccaggcggatttcactgacgccgcgcgttggcgttggccaggcgggtggatcgccatataactgcgccagcccttcgtcataggtgaagcgcggaatgccaaagtcacgcgcacttaacaacggcatacgtgctccggcgtgaatattaagcaactgattaaccat

SEQ ID NO: 15741 - DNA, 2011 bp, Homo sapiens
  SIMILAR (541)..(1371): 801254mologous to Escherichia coli penicillin-binding protein 3,accession number K00137,Smith-Waterman Score=1087.
atgtctaccgagattgcacgtctcaaacgccagctggcagacgggatgaagagctggctatcctccaaaaggccgcgacatacttcgcgagcgcctgaaatgaagtatgtctttattgaaaaacatcaggctgagttcgcatcaaagcaatgtgccgcgtgctccgggtggcccgcaacggctggtaacgtggtgtcagcggcggacaaggataagcacgcgtcagcagttccgccacactgcgacagcgttgtcctcgcggcttttacccggtcaaaacagcggttaccccttaacgtaaaaaccgtggcggcaagcctgcgccgtcagggactgagggcaaggcctcccggaagttcagcccggtcagctaccgcgcacacggcctgccttgtcagaaaatctgttggagcaggatttttacgccagtggcccgaaccaaagtgggcaggagacatcacgtacttacgtacagatgaaggctggctgtatctggcagtggtcattgacctgtggtcacgtgccgttattggctggtcaatgtcgccacgcatgacggcgcaactggcctgcgatgccctgcagatggcgctgtggcggcgtaagaagccccggaacgttatcgttcacacggaccgtggaggccagttcggtgaccgctggaagggctggctaacgcgctcaatattccgctggatcagctttcagcccgcattagcgccaacccgaaaggcggctttatgttatctggcgcgtgaggtgaaccctgacatggcggactacatcaaaaaactgaaactgccggggattcatgtgcgtgaagaatctcgccgttattatccatccggcgaagtgactgctcacctcattggctttactaacgtcgatagtcaagggattgagggcgttgagaagagtttcgataaatggcttaccgggcagccgggtgagcgcattgtgcgtaaagaccgctatggtcgcgtaattgaagatatttcttctactgacagccaggctgcgcacaacctggcgctgagtattgatgaacgcctgcaggcgctggtttatcgcgaactgaacaatgcggtggcctttaacaaggctgaatctggtagcgccgtgctggtggatgtcaacaccggtgaagtgctggcgatggctaacagcccgtcatacaaccctaacaatctgagcggcacgccgaaagaggcgatgcgtaaccgtaccatcaccgacgtgtttgaacctggctcaacggttaaaccgatggtggtgatgaccgcgttgcaacgtggcgtggtgcgggaaaactcggtactcaataccattccttatcgaattaacggccacgaaatcaaagacgtggcacgcatcacgaccgaggaagactttaatcatgcgagtgcagctcgattcgtatgcgctgccgccgaaagagcgttgcaaaaccaccattaacctggtgccggaaaacgaagtgctgaacgtgctggaaggcgaaaatgctgaaaccaacgcgctgcgcgcaaaacgtagttgcccgaaatgcggcacggcgatggacagatatctcatcgatccgaaacgtatgttgcgtggatgaggcaataacccaacctgcgacggttaccagatcgaacagggcgaattccgcattaaaggttatgacggcccgatcgttgagtgtgaaaaatgtggctctgaaatgcacctgaaaatggggcgtttcggtaaatacatggcctgcaccaacgaagagtgtaaaaacacacgtaagattttacgtaacggcgaagtggcaccaccgaaagaagatccggtgccattacctgagctgccgtgcgaaaaatcagatgcttatttcgtgctgcgtgacggtgctgccgctcttttgcggccacccagctacccagcagcagagggcactgaaaggcagtgcaggttcactgtgccttttacctccgtcatccagagagacccagcaggctttgacaacagcctccagagctag

SEQ ID NO: 15742 - DNA, 929 bp, Homo sapiens
  SIMILAR (416)..(901): 931254mologous to Cloning vector pZC320 SopB,accession number U26464,Smith-Waterman Score=744.
tgtgcaatctaaaaacttgtcacacttcacatggatctgtcatgcggaaacagcggttatcaatcacaagaaacgtaagaatagcccgcgaatcgtccagtcaaacgacctcactgaggcggcatatagtctctcccgggatcaaaaacgtatgctgtatctgttcgttgaccagatcagaaaatctgatggcaccctacaggaacatgacggtatctgcgagatccatgttgctaaatatgctgaaatattcggattgacctctgcggaagccagtaaggatatacggcaggcattgaagagtttcgcggggaaggaagtggttttttatcgccctgaagaggatgccggcgatgaaaaaggctatgaatcttttccttggtttatcaaacattgggtaacgatatcgccccaaacaagtgcttatgaacgtggtcagcgttatgcaagccgatgcaagaatgaatttgctggaaatatttctgcgctggctgatgcggaaaatatttcacgtaagattattacccgctgtatcaacaccgccaaattgcctaaatcagttgttgctcttttttctcaccccggtgaactatctgcccggtcaggtgatgcacttcaaaaagcctttacagataaagaggaattacttaagcagcaggcatctaaccttcatgagcagaaaaaagctggggtgatatttgaagctgaagaagttatcactcttttaacttctgtgcttaaaacgtcatctgcatcaagaactagtttaagctcacgacatcagtttgctcctggagcgacagtattgtataagggcgataaaatggtgcttaacctggacaggtctcgtgttccaactgagtgtaagagaaaattgaggccattcttaaggaacttgaaaagccaggggggtcctttagagtccacag

SEQ ID NO: 15743 - DNA, 472 bp, Homo sapiens
  SIMILAR (43)..(279): 981254mologous to unidentified cloning vector 29kD protein essential for the replication of mini F plasmid,accession number AB015619,Smith-Waterman Score=395.
tgtgacaatctaaaaacttgtcacacttcacatggatctgtcatggcggaaacagcggttatcaatcacaagaaacgtaaaaatagcccgcgaatcgtccagtcaaacgacctcactgaggcggcatatagtctctcccgggatcaaaaacgtatgctgtatctgttcgttgaccagatcagaaaatctgatggcaccctacaggaacatgacggtatctgcgagatccatgttgctaaatatgctgaaatattcggattgacctctgcggaagccactgctgtacttaccgaaagtgattatcgtgttctggttggcgagctggatgatgagcagatggctgcattatccagattgggtaacgattatcgcccaacaagtgcttatgaacgtggtcagcgttatgcaagccgattgcagaatgaatttgctggaaatatttctgcgctggctgatgcggaaaatatttcac

SEQ ID NO: 15744 - DNA, 516 bp, Homo sapiens
  SIMILAR (133)..(456): 1001254mologous to unidentified cloning vector 29kD protein essential for the replication of mini F plasmid,accession number AB015619,Smith-Waterman Score=547.
atgctctcagtcaaaatgcctgtgtcatcatactcctttcatccgtcgcttggccagagtggggatcctctagagtcgacctgcaggcattgtgacaatctaaaaacttgtcacacttcacatggatctgtcatggcggaaacagcggttatcaatcacaagaaacgtaaaaatagcccgcgaatcgtccagtcaaacgacctcactgaggcggcatatagtctctcccgggatcaaaaacgtatgctgtatctgttcgttgaccagatcagaaaatctgatggcaccctacaggaacatgacggtatctgcgagatccatgttgctaaatatgctgaaatattcggattgacctctgcggaagccagtaaggatatacggcaggcattgaagagtttcgcggggaaggaagtggttttttatcgccctgaagaagatgccggcgatgaaaaaggaacctccagacacgaccagatatttcatgcagctgctgctattgaagcatgttatctataa

SEQ ID NO: 15745 - DNA, 300 bp, Homo sapiens
  SIMILAR (43)..(156): 941254mologous to unidentified cloning vector 29kD protein essential for the replication of mini F plasmid,accession number AB015619,Smith-Waterman Score=177.
tgtgacaatctaaaaacttgtcacacttcacatggatctgtcatggcggaaacagcggttatcaatcacaagaaacgtaaaaatagcccgcgaatcgtccagtcaaacgacctcactggagcggcatatagtctctcccgggatcaaaaacgcgtccccgttacgaaccggtttcgcagtttcggcttagtgaaacacagaaacaccaatccgtatgccatgcgtttatacgaatccctgtgtcagtatcgtaagccggatggctcaggcatcgtctctctgaaaacgactggatcatag

SEQ ID NO: 15746 - DNA, 1932 bp, Homo sapiens; identical to SEQ ID NO: 5205
  SIMILAR (1163)..(2176): 971254mologous to Homo sapiens axonemal dynein heavy chain,accession number AJ404468,Smith-Waterman Score=1714.
  misc_feature (1)...(1932): n = a,t,c or g

SEQ ID NO: 15747 - DNA, 1734 bp, Homo sapiens; identical to SEQ ID NO: 5207
  SIMILAR (685)..(1242): 571254mologous to Homo sapiens testis-specific RING Finger protein,accession number AB037682,Smith-Waterman Score=554.

SEQ ID NO: 15748 - DNA, 971 bp, Homo sapiens
  SIMILAR (322)..(750): 511254mologous to Homo sapiens testis-specific RING Finger protein,accession number AB037682,Smith-Waterman Score=393.
aacgttcagcagtttatcgatgaaggcaattatacatccggcgacaaccatacgctgagagaccctcactacgttgaagacaaaggccataaataccttgtattcgaagccaacacgggaacagaaaacggataccaaggcgaagaatctttatttaacaaagcgtactacggcggcggcacgaacttcttccgtaaagaaagccagaagcttcagcagagcgctaaaaaacgcgatgctgagttagcgaacggcgccctcggtatcatagagttaaataatgattacacattgaaaaaagtaatgaagccgctgatcacttcaaacacgtgtgacaatctaaaaacttgtcacacttcacatggatctgtcatggcggaaacagcggttatcaatcacaagaaacgtaaaaatagcccgcgaatcgtccagtcaaacgacctcactgaggcggcatatagtctctcccgggatcaaaaacgtatgctgtatctgttcgttgaccagatcagaaaatctgatggcaccctacaggaacatgacggtatctgcgagatccatgttgctaaatatgctgaaatattcggattgacctctgcggaagccagtaaggatatacggcaggcattgaagagtttcgcggggaaggaagtggttttttatcgccctgaagaggatgccggcgatgaaaaaggctatgaatcttttccttggtttatcaaacgtgcgcacagtccatccagagggctttacagtgtacatatcaacccatatctcattcccttctttatcgggttacagaaccggtttacgcagtttcggcttagtgaaacaaaagaaatcaccaatccgtatgccatgcgtttatacgaatccctgtgtcagtatcaaggaggaggagaagaagaggaagaagaagaagaagaaggaggaggaggagaaagaggaggagaaggaggaggagaaaaaaa

SEQ ID NO: 15749 - DNA, 1146 bp, Homo sapiens
  SIMILAR (625)..(1137): 981254mologous to unidentified cloning vector 29kD protein essential for the replication of mini F plasmid,accession number AB015619,Smith-Waterman Score=874.
gattctgagtatgtctttgtggtggttgatttcctaattggagtgttaatttttgctaccatcgttggtaacataggttctatgatttccaacatgaatgcagccagagcagaatttcaagcaagaattgatgctatcaagcaatatgtgcgtggtcgaaatcaagatttgatgctatcaagcaatatatgcacttttcgaaatgtaagcaaagatatggaaaagagggttattaaatggtttgactacctgtggaccaacaaaaaaacagttgatgagaaagaagtcttaaagtatctacctgataaactaagagcagaaattgccatcaacgttcacttagacacagtggggaaagtctacagtcctggagattatatttgcaagaaaggggatatcggacgagagatgtacattatcaaggaaggcaaactcgctgtggtggcagatgatggagtcactcagtttgtggtattgagcgatggcagctacttcggtgagatcagcattcttaacattaaagggagcaaagctggcaatcgaagaacggccaatattaaaagtattggctactcagacctgtgtgacaatctaaaaacttgtcacacttcacatggatctgtcatggcggaaacagcggttatcaatcacaagaaacgtaaaaatagcccgcgaatcgtccagtcaaacgacctcactgaggcggcatatagtctctcccgggatcaaaaacgtatgctgtatctgttcgttgaccagatcagaaaatctgatggcaccctacaggaacatgacggtatctgcgagatccatgttgctaaatatgctgaaatattcggattgacctctgcggaagccagtaaggatatacggcaggcattgaagagtttcgcggggaaggaagtggttttttatcgccctgaagaggatgccggcgatgaaaaaggctatgaatcttttccttggtttatcaaacgtgcgcacagtccatccagagggctttacagtgtacatatcaacccatatctcattcccttctttatcgggttacagaaccggtttacgcagtttccgcttagtgaaacaaaagaaatcaccaattcctatgccatgcgtttatacgaatccctgtgtcaagaatcgtaa

SEQ ID NO: 15750 - DNA, 556 bp, Homo sapiens
  SIMILAR (43)..(396): 961254mologous to unidentified cloning vector 29kD protein essential for the replication of mini F plasmid,accession number AB015619,Smith-Waterman Score=583.
tgtgacaatctaaaaacttgtcacacttcacatggatctgtcttggcggaaacagcggttatcaatcacaagaaacgtaaaaatagcccgcgaatcgtccagtcaaacgacctcactgaggcggcatatagtctctcccgggatcaaaaacgtatgctgtatctgttcgttgaccagatcagaaaatctgatggcaccctacaggaacatgacggtatctgcgagatccatgttgctaaatatgctgaaatattcggattgacctctgcggaagccagtaaggatatacggcaggcattgaagagtttcgcggggaaagaagtggttttttatcgccctgaagaggatgcccgcgatgaaaaaagctatgaatcttttccttgggttatcaaacgaacaagtaaatggaccgcttgtcgacgagtcagaggcgggttatttttgccgattttaacccatcgaaacgaccgtggtcggtggcttcagatgactctaacaacagctggaatccggcatacaattgctttggggtaccgagctcgaattcgtaatcatg

SEQ ID NO: 15751 - DNA, 1000 bp, Homo sapiens
  SIMILAR (667)..(2424): 371254mologous to Drosophila melanogaster CG16718 gene product,accession number AE003727,Smith-Waterman Score=934.
  misc_feature (1)...(1000): n = a,t,c or g
ccacctgatgctccgactggccattgaaactgttgctcatgactatgatgtcatagttattgacagcgcgcctaacctgggtatcggcacgattaatgtcttatgtgctgctgatgtgctgattgtgggcacgcctgctgagttgtttgactacacctccgcactgcagtttttcgatatgcttcgtgatctgctcaagaacgttgatcttaaagggttcgagcctgatgtacgtattttgcttaccaaatacagcaatagtaatggctctcagtccccgtggatggaggagcaaattccggatgcctggggaagcatgggtctaaaaaatgttgtacgtgaaaccgatgaagttggtaaaggtcagatccggatgagaactggttttgaacaggccattgatcaacgcttttcaactgnagcccggctttaccggcataaccaagcctatgcctccagcatccagggtgacggtgccgaggatgaggatgagcgcattgttagatttcatacacgntgtgacaatctaaaaacttgtcacacttcacatggatctgtcatggcggaaacagcggttatcaatcacaagaaacgtaaaaatagcccgcgaatcgtccagtcaaacaacctcactgaggcggcatatagtctctcccgggatcaaaaacctatgctgtatctgttcgttgaccagatcaaaaaatctgatggcaccctacaggaacatgacaggatctgcgagatccatgttgctaaatatgctgaaatattcggattgacccttttcgaaaccaataaagatatacggccagcattgaaaaagtttcccggggaaggaagagttttgcaaagcctgatgggacataagttcatcagttcaacggaagtttacacgaaagtttttgcgctggatttgggtgccccgcacccggtggcaattttggattcccggagtctgatgccggttgccatagctgaaacaattatacctgaagaataa

SEQ ID NO: 15752 - DNA, 1169 bp, Homo sapiens
  SIMILAR (43)..(219): 331254mologous to Homo sapiens Human breast tumour-associated protein 64,accession number Y48603,Smith-Waterman Score=66.
atgttaactttgattttgctggacttgcaattcatggctcagcttgctgggtaccagatgagctttaacagcaccaagtcaaagcagacaaagaataactttgcagtgggctacaggactggggacttccagctgcacactaatgtcaatgatggggcagaatttggaggatcagtttatcaaaaagtttgtgaagaacttgatgctttaataaacctggcttggacatcaagtaccagctgcactcgttttggccttgcagctaaatttcaattgaaacccattgctttcatttctaccaaagtcaaccactggttgactggggtcagctacactccaccccttgaggctggtgtgaagctcaacctgtctgctctgtgtgacaatctaaaaacttgtcacacttcacatggatctgtcatggcggaaacagcggttatcaatcacaagaaacgtaaaaatagcccgcgaatcgtccagtcaaacgacctcactgaggcggcatatagtctctcccgggatcaaaaacgtatgctgtatctgttcgttgaccagatcagaaaatctgatggcaccctacaggaacatgacggtatctgcgagatccatgttgctaaatatgctgaaatattcggattgacctctgcggaagccagtaaggatatacggcaggcattgaagagtttcgcggggaaggaagtggttttttatcgccctgaagaggatgccggcgatgaaaaaggctatgaatcttttccttggtttatcaaacgtgcgcacagtccatccagagggctttacagtgtacatatcaacccatatctcattcccttctttatcgggttacagaaccggtttacgcagtttcggcttagtgaaacaaaagaaatcaccaatccgtatgccatgcgtttatacgaatccctgtgtcagtatcgtaagcccggatggctcaggcatcgtctctctgaaaatcgactggatcatagagcgttaccagctgcctcaaaataccaacggatgcctgactttcgccggcggtttctgcaggaagaatttgaatctctgaatagacaaataacaggctctgaaattgtggcaatgatcaatagcttatcaaccaaaaagagtccaggaccagatggattcacagccgaattctaccaaag

SEQ ID NO: 15753 - DNA, 1512 bp, Homo sapiens
  SIMILAR (355)..(873): 921254mologous to Homo sapiens putative p150,accession number U93563,Smith-Waterman Score=820.
atgaacatgaacatcaaaaaaattgtgaaacaagccacagttctgacttttacgactgcacttctggcaggaggagcgactcaagccttcgcgaaagaaaataaccaaaaagcatacaaagaaacgtacggcgtctctcatattacacgccatgatatgctgcagatccctaaacagcagcaaaacgaaaaataccaagtgcctcaattcgatcaatcaacgattaaaaatattgagtctgcaaaaggacttgatgtgtgggacagctggccgctgcaaaacgctgacggaacagtagctgaatacaacggctatcacgttgtgtttgctcttgcgggaagcccgaaagacgctgatgacacatcaatctacatgttttatcaaaaggtcggcgacaactcaatcgacagctggaaaaacgcgggccgtgtctttaaagacagcgataagttcgacgccaacgatccgatcctgaaagatcagacgcaagaatggtccggttctgcaacctttacatctgacggaaaaatccgtttattctacactgactattccgaaatagccagtacggggacaaagatggctaccacagctatggccatctggagcccctgtgacaatctaaaaacttgtcacacttcacatggatctgtcatggcggaaacagcggttatcaatcacaagaaacgtaaaaatagcccgcgaatcgtccagtcaaacgacctcactgaggcggcatatagtctctcccgggatcaaaaacgtatgctggatctgttccgtgaccagatcagaaaaactgatggcaccctacaggaacatgactgtatctgcgagatccatgttgctaaatatgctgaaatattcggattgacctctgcggaagccagtaaggatatacggcaggcattgaagagtttcgcggggaaagaagtggttttttatcgccctgaagaagatgccggcgatgaaaaaagctatgaacaacccagtaaggatatacggcaggcattgaagagtttcgcggggaaggaagtggttttttatcgccctgaagaggatgccggcgatgaaaaaggctatgaatcttttccttggtttatcaaacgtgcgcacagtccatccagagggctttacagtgtacatatcaacccatatctcattcccttctttatcgggttacagaaccggtttacgcagtttcggcttagtgaaacaaaagaaatcaccaatccgtatgccatgcgtttatacgaatccctgtgtcagtatcgtaagccggatggctcaggcatcgtctctctgaaaatcgactggatcatagagcgttaccagctgcctcaaagttaccagcgtatgcctgacttccgccgccgcttcctgcaggtctgtgttaatgagatcaacagcagaactccaatgcgcctctcatacattgagaaaaagaaaggccgccagacgactcatatcgtattttccttccgcgatatcacttccatgacgacaggatag

SEQ ID NO: 15754 - DNA, 561 bp, Homo sapiens
  SIMILAR (184)..(417): 1001254mologous to unidentified cloning vector 29kD protein essential for the replication of mini F plasmid,accession number AB015619,Smith-Waterman Score=394.
agagcgccaatgaaggctcccgctggagtcctcttggtggccagaacggtcccctctagctactttaacagtgactgtgctttctgcagccccctcaccttcccccgagccccggacccctcctttctctcccttctgtggtgtgacaatctaaaaacttgtcacacttcacatggatctgtcatggcggaaacagcggttatcaatcacaagaaacgtaaaaatagcccgcgaatcgtccagtcaaacgacctcactgaggcggcatatagtctctcccgggatcaaaaacgtatgctgtatctgttcgttgaccagatcagaaaatctgatggcaccctacaggaacatgacggtatctgcgagatccatgttgctaaatatgctgaaatattcggattgacctctgcggaagccaagtgtttgttcaaaatacagacatctgccacctccttgccgcccgatggcagtaagatagtcgtagaaggacaacagcagctttctggtgttatttacatatctgggcaacacctggctggaggaggtgaaagttttggatag

SEQ ID NO: 15755 - DNA, 1776 bp, Homo sapiens
  SIMILAR (7)..(1464): 371254mologous to Baboon endogenous virus strain M7 gag-pol precursor polyprotein,accession number D10032,Smith-Waterman Score= 731.
gatctggctctgaaggggctacgtgttttgctcgtggaaggtaacgacccccagggaacagcctcaatgtatcacggatgggtaccagatcttcatattcatgcagaagacactctcctgcctttctatcttggggaaaaggacgatgtcacttatgcaataaagcccacttgctggccggggcttgacattattccttcctgtctggctctgcaccgtattgaaactgagttaatgggcaaatttgatgaaggtaaactgcccaccgatccacacctgatgctccgactggccattgaaactgttgctcatgactatgatgtcatagttattgacagcgcgcctaacctgggtatcggcacgattaatgtcgtatgtgctgctgatgtgctgattgttcccacgcctgctgagttgtttgactacacctccgcactgcagtttttcgatatgcttcgtgatctgctcaagaacgttgatcttaaagggttcgagcctgatgtacgtattttgcttaccaaatacagcaatagtaatggctctcagtccccgtggaggaggaggggggttcttctagagtcgcacgtatcagggcgtgtcaagctcacagtatttctttgggatttggccgatttcggaaccaccatcaaacaggattttcgcctgctggggcaaaccagcgtggaccgcttgctgcaactctctcagggccaggcggtgaagggcaatcagctgttgcccgtctcactgtgtgacaatctaaaaacttgtcacacttcacatggatctgtcatggcggaaacagcggttatcaatcacaagaaacgtaaaaatagcccgcgaatcgtccagtcaaacgacctcactgaggcggcatatagtctctcccgggatcaaaaacgtatgctgtatctgttcgttgaccagatcagaaaatctgatggcaccctacaggaacatgacggtattttgcccaccgatccacacatgatgctcagagtgaccattgaacttgatgctgatgactatgatgtcatagttattgtcagcgtgcataccatgtgtatcggcacgattaagctcgcatgggctgctgatgtgcccactgtgcccagtcatgatgagtggagcgactacacatctgcagtacagtgtgtcaatatgcttcgtgatctgctcaacaacgttgatctacaggaaaggggatcctctagagtcgaaatgcagggatgcaagccaagtatccggttagagcttaataatggccggatgccatcccattccttaaatgggaattccccggaaggagaattttggttggaaggcaattggccccactcagaacctctttggcctaaaattctacattccggagcagcccaagaagcccagctgctgcagtcagatgctcccaaggacagcagggattttgccgatttcggaaccaccatcaaacaggattttcgcctgctggggcaaaccagcgtggaccgcttgctgcaactctctcagggccaggcggtgaagggcaatcagctgttgcccgtctcactggtgaaaagaaaaaccaccctggcgcccaatacgcaaaccgcctctccccgcgcgttggccgattcattaatgcagctggcacgacaggtttcccgactggaaagcgggcagtcgccgccttcccgtcagtttaaatgggggtcccttaaggtccgattaggtctttacgcacctcgacccaaaaacttatttggtgatggtcacgaagtggccatcgcctga

SEQ ID NO: 15756 - DNA, 2259 bp, Homo sapiens; identical to SEQ ID NO: 10391
  SIMILAR (1270)..(1458): 901254mologous to Escherichia coli similar to rat mitochondrial glutaminase,accession number U82664,Smith-Waterman Score=288.

SEQ ID NO: 15757 - DNA, 1122 bp, Homo sapiens
  SIMILAR (406)..(747): 991254mologous to unidentified cloning vector 29kD protein essential for the replication of mini F plasmid,accession number AB015619,Smith-Waterman Score=580.
atggaggttctagcttcatgggccaccttcactttgggccaaactgagcagcatgtggactggatttctgctggagcagctccccagggacctattgtgaaacaactccctagcccagttcctcctacagagcaacttgagcaggaaaagcccgtgaccatcggctctgctccctcaacacctaacaagctcctacttagccattccaattgccaactccctaggccattaagatcaataacaaatatctctgcatgcttttctcttgaacttgctatagaccacaggggtttcccacacagccctggagctagatcactgtattcaaattctgtctttggtacttaccagctgtgtgacctttgtgacaatctaaaaacttgtcacacttcacatggatctgtcatggcggaaacagcggttatcaatcacaagaaacgtaaaaatagcccgctaatcgtccagtcaaacgacctcactgaggcggcatatagtctctcccgggatcaaaaacgtatgctgtatctgttcgttgaccagatcagaaaatctgatggcaccctacaggaacatgacggtatctgcgagatccatgttgctaaatatgctgaaatattcggattgacctctgcggaagccagtaaggatatacggcaggcattgaagagtttcgcggggaaggaagtggttttttatcgccctgaagaggatgccggcgatgaaaaaggctatgaatcttttccttggttatcaaacgcagtcctgagtaaagaagaggcaagtttcccttcacccagatgggacaggactgagggagatgatggggccagtcttctggggggagggcagggttgttggtggtctggagttgaaggcccatcttcagcagtgggtgagatgaaagggaagaaggtgaaacttctgaattgtgtccaggaacttggagtggaggtggattctgtggagaatgaagacagaactagctgcaaatgtgagctcctggcccctctgagcagccatattaaagatcaaagggacaaagcctgtgcattccagatggaatcaggcagcaaagcacagctacgaaagcattcttggctgtcataccctcgagtgccatga

SEQ ID NO: 15758 - DNA, 1776 bp, Homo sapiens
  SIMILAR (1561)..(1773): 971254mologous to Homo sapiens proline-rich protein G1,accession number X07881,Smith-Waterman Score=424.
atgggaaaaaaacagagcaggaaaactggaaactctaaaaatcagagtgcctctcctcctccaaaggaacgcagctcctcaccagcaatggaacaaagctggacggacaatgactttgacgagttgagagaagaaggcttcagacgatcaaactactgcgagctactaggaggaaattcgaacctaatggcaaacaagcttaaaagctttgaaaagaaattagatgatgatgaactacttgcatccccttcccgaaccccgatttctggcccaaatggggatccagctgggcccaagttcgtcaaggcagcagcgaccaccggaaaagcccgacagcgctttcaccccgccacaacaacgtttcacggtcggaccccagcaccaccgctcgctcatccagcgccgaccgtgtcaaccccagcgagtacccaacatccagcgaggagacatcaggtcgctcgtccagataggtcatcaacgccgttgcctgcgcggatagcgcttcgggtgttttgcccgacaccatccacggcaccaccggaacatccacgacagaacccgaacccggccccgcagactgactcggcactcccgggggctgatgacgtgcgcgttagtaccactgatcccgaacgacgacacccccacccgacgaacacgaccactcctgggccagggcgtgttctccgtaaggagttgaaccgtccccgccgaccaatccaccacaggcgacggcgattccacgtgcaacgtgcgtggcagctgcccgtgccgcatcgccatcaccatcttgatcacaccagccacacccgccgccgcttgcgtatgaccgatgttcgacttgaccgaccccaaccacaacggccgccccggatcacgatcacgaccgtaggtggcgatcagcgcctgcgcctcgatcggagctaccaacccgaaagcccgtgcgatggtgacctaaggcagcttcaaatggctgggcgagcgccttgtagccctttatccatgctggttctagagaagtgtgacaatctaaaaacttgtcacacttcacatggatctgtcatggcggaaacagcggttatcaatcacaagaaacgtaaaaatagcccgcgaatcgtccagtcaaacgacctcactgaggcggcatatagtctctcccgggatcaaaaacgtatgctgtatctgttcgttgaccagatcagaaaatctgatggcaccctacaggaacatgacggtatctgcgagatccatgttgctaaatatgctgaaatattcggattgacctctgcggaagccagtaaggatatacggcaggcattgaagagtttcgcggggaaggaagtggttttttatcgccctgaagaggatgccggcgatgaaaaacagaacgccaagaatgaacatggtactacctcctcattgccaacacaatttaagacagatcatatggaaagccagaaggaccacccccacaaggaggaaaccagtcccaaggtcccccacctcgtccaggaaagccagaaggaccaccttcacaaggaggcaacaaacctcaaggtcccccaccctcatccaggaaagccacaaggaccacccccacaagaaggtaacaaacctcaacgtccccctcctccaggaaggccacaaggaccacccccaccaggaggcaatccccagcagcctctgccacctcccgctggaaagccccagggaccacctccacctcctcaagggggcagaccacacagacctccccagggacagcctccccagtaa

SEQ ID NO: 15759 - DNA, 1755 bp, Homo sapiens
  SIMILAR (194)..(511): 381254mologous to Herpesvirus papio NTR,accession number AF200364,Smith-Waterman Score=138.
atgaaaaacggtgagctggtgatatgggatagtgttcacccttgttacaccgttttccatgagcaaactgaaacgttttcatcgctctggagtgaataccacgacgatttccggcagtttctacacatatattcgcaagatgtggcgtgttacggtgaaaacctggcctatttccctaaagggtttattgagaatatgtttttcgtctcagccaatccctgggtgagtttcaccagttttgatttaaacgtggccaatatggacaacttcttcgcccccgttttcaccatgggcaaatattatacgcaaggcgacaaggtgctgatgccgctggcgattcagtgtgacaatctaaaaacttgtcacacttcacatggatctgtcatggcggaaacagcggttatcaatcacaagaaacgtaaaaatagcccgcgaatcgtccagtcaaacgacctcactgaggcggcatatagtctctcccgggatcaaaaacgtatgctgtatctgttcgttgaccagatcagaaaatctgatggcaccctacaggaacatgacggtatctgcgagatccatgttgctaaatatgctgaaatattcggattgacctctgcggaagccagtaaggatatacggcaggcattgaagagtttcgcggggaaggaagtggttttttatcgccctgaagaggatgccggcgatgaaaaaagctatgaatcttttccttggtttatcaaacgcatcccgaatttgctcctccatccacggggactgagagccattactattgctgtatttggtaagcaaaatacgtacatcaggctcgaaccctttaagatcaacgttcttgagcagatcacgaagcatatcgaaaaactgcagtgcggaggtgtagtcaaacaactcagcaggcgtgggaacaatcagcacatcagcagcacatacgacattaatcgtgccgatacccaggttaggcgcgctgtcaataactatgacatcatagtcatgagcaacagtttcaatggcccagtcggagcatcaaaaatatcttcagagccaggagatgatgatgaacccacagaaggaagctttgagggacaccaagctgccgtaaatgcaattcagatatttgggaacttgctatatacctgttcagcagataaaactgttcgggtttataatctggtgaacaacaaacgacttgagatctttgaatgccatggccctcgggcagtcagctgtcttgctacagctcaggaaggtgcccgaaaactgctggtcgtggggtcttatgactgcacaattagtgtacgcgatgcccggaatggactgctcctcaaaactctggagggccatagcaaaaccattctttgcatgaaagcaaagggccagagcaaaccatgcagaagaatgccattcatcatggcaattgggagcacagagagctccacaacatctacggtttttatcatgctccatggttcctacgaagctctgaaaggtgggaacaccacagaggccatggaggacttcacaggaggggtggcagagttttttgagatcagggatgctcctagtgacatgtacaagatcatgaagaaagccatcgagagaggctccctcatgggctgctccattgatggtggggagctccaagtgtcaagaagccttttacccaatgaagggcagcatagagcttttgtgtgggacagagcgaatgttttgtttgaggaagcaggaactggctctcaactttga

SEQ ID NO: 15760 - DNA, 2908 bp, Homo sapiens
  SIMILAR (63)..(470): 991254mologous to Homo sapiens Similar to arginyl-tRNA synthetase,accession number BC000528,Smith-Waterman Score=698.
atgcctgcaagcggtaacgaaaacgatttgaatatgccttcaggaacaatagaaatcttcgtgcggtgttacgttgaagtggagcggattatgtcagcatggacagaacaacctaatgaacacagaaccatgatgtggtctgtccttttacagccatgtgacaatctaaaaacttgtcacacttcacatggatctgtcatggcggaaacagcggttatcaatcacaagaaacgtaaaaatagcccgcgaatcgtccagtcaaacgacctcactgaggcggcatatagtctctcccgggatcaaaaacgtatgctgtatctgttcgttgaccagatcagaaaatctgatggcaccctacaggaacatgacggtatctgcgagatccatgttgctaaatatgctgaaatattcggattgacctctgcggaagccagtaaggatatacggcaggcattgaagagtttcgcggggaaggaagtggttttttatcgccctgaagaggatgccggcgatgaaaaaggctatgaatcttttccttggtttatcaaacgtgcgcacagtccatccagagggcttacagtgtacatatcaacccatatctcattcccttctttatcgggttacagaaccggtttacgcagtttcggcttagtgaaacaaaagaaatcaccaatccgtatgccatgcgtttatacgaatccctgtgtcagtatcgtaagtcttgaatcaaattatgttaatgttaaattgaggaacatggcagttaatttgcattatttagatgatacagaatgtttgcatttaatgtttgtggtaagggtaatggcttatacagtccatgctccacaatcagatgaagttaggtccggttactgcacctttaccatggacggacaaattccgtttattctaccaggcatatttccggtaaccattccggcaaaccaaagcctgccaccggcgcaggtaattgtgtcaaattctgttgaccacctcaaaatcaccggggtggaagatcacaaaccgatttttgccggagccggaaaaccatatcagaaccttcgccagtttatcgatgaaggcaattatacatccggcgacaaccatacgctgagagaccctcactacgttgaagacaaagcccataaataccttgtattcgaagccaacacgggaacagaaaacggataccaaggcgaagaatctttatttaacaaagcgtactacggcggcggcacgaacttcttccggggatcctctagagtcgacctgcaggcatgctgaagaacacatcgacagcaccacaacaacgaatctatcatacactgacaaacacacagcacaaaacgattcacacccagggacagctaaaacacaaacgacaataacagatcaccacgaccacagccacaaacagtggctccaattgccgagccgagcaggactggccgcggaccaaagcggtcggacagtgctccgagaacgggtgcgcatagaaaattgcatacaaacgcactatagccgctcagcaagcaacgcccaagcgcccaggccagtacgcggcaatgaacccaagccatatgccatacaaacataccagggtgacggagcagaggaagacgatgagacttacagccccaatttagaccgcgtaaccaccaaaaagacacaccgtggttgccaagcaaagatggcgggagtatcccctgaattcaaccacagtgaccccttatgcctcatgccaccagaagttagcgtgagccttggtgttcccaatcagtatctctggacttctcaaaccacaaatccacctcgcactggggatgggagagcagaaggctccaaggcacacaaggaccttgatgaggagataagccttattcctacagttaatgtgaggaaaaacctgtttttcctggaaatgcctactttggccgacacaaatattttcccgccacgcggcggtccaatttccctacgacacactaaggggccgtgtgacaatctaaaaacttgtcacacttcacatggatctgtcatggcggaaacagcggttatcaatcacaagaaacgtaaaaatagcccgcgaatcgtccagtcaaacgacctcactgaggcggcatatagtctctcccgggatcaaaaacgtatgctgtatctgttcgttgaccagatcagaaaatctgatggcaccctacaggaacatgacggagtaatggctcgcgctaatgccattacttgccctgtatgtggtcgggatgtgaagtttactcgtgaagtgctccggggtgatagtgttgagaagagctctcgggtatggtcaggtaatgaacgtgaccaggagctgcttactgaggacgcactggatgatctcatcccttcttttctactgactggtcaacagacaccggcgttcggtcgaagagtatctggtgtcatagaaattgccgatgggagtcgccgtcgtaaagctgctgcacttaccgaaagtgattatcgtgttctggttggcgagctggatgatgagcagatggctgcattatccagattgggtaacgattatcgcccaacaagtgcttatgaacgtggtcagcgttatgcaagccgattgcagaatgaatttgctggaaatatttctgcgctggctgatgcggaaaatatttcacgtaagattattacccgctgtatcaacaccgccaaattgcctaaatcagttgttgctcttttttctcaccccggtgaactatctgcccggtcaggtgatgcacttcaaaaagcctttacagataaagaggaattacttaagcagcaggcatctaacgcggggatccttctacgagtcgacctggcaggcatgcaagagcccccaattaattttgtagagcctacacccctccaattgagatga

SEQ ID NO: 15761 - DNA, 743 bp, Homo sapiens
  SIMILAR (356)..(589): 1001254mologous to unidentified cloning vector 29kD protein essential for the replication of mini F plasmid,accession number AB015619,Smith-Waterman Score=394.
ggagctcagctgttgtgttctctttgctcctggaggtgctaaactggtaggatgtgccctggggctgtcaaggtcttccacatggagagaagctgaccaagaaggaagtcaacacagggatgagtacagtcgagaggtggggggaagatacccatcccgctggaaagtggctgaatccaagaggctgcgcagtgacagtctgcaggccccacttccacagcatctcataggagaagacccacgggcttggaaatccagccagcccctggtagccgccttgcgcctccctgaaatggagctccctgggggagggtgtgacaatctaaaaacttgtcacacttcacatggatctgtcatggcggaaacagcggttatcaatcacaagaaacgtaaaaatagcccgcgaatcgtccagtcaaacgacctcactgaggcggcatatagtctctcccgggatcaaaaacgtatgctgtatctgttcgttgaccagatcagaaaatctgatggcaccctacaggaacatgacggtatctgcgagatccatgttgctaaatatgctgaaatattcggattgacctctgcggaagccagatccccggcggagatcgccgaaggtctggttgagcgccatattccagtgctgatctccaatcacgatacgatgttaacgcgtgagtggtatcagcgcgcaaaattgcatgtcgtcaaagttcgacgcagtataagcagcaacggcggcacac

SEQ ID NO: 15762 - DNA, 2124 bp, Homo sapiens
  SIMILAR (1)..(1017): 1001254mologous to Leishmania major probable levansucrase precursor,accession number AL160371,Smith-Waterman Score=1789.
atgaacatgaacatcaaaaaaattgtaaaacaagccacagttctgacttttacgactgcacttctggcaggaggagcgactcaagccttcgcgaaagaaaataaccaaaaagcatacaaagaaacgtacggcgtctctcatattacacgccatgatatgctgcagatccctaaacagcagcaaaacgaaaaataccaagtgcctcaattcgatcaatcaacgattaaaaatattgagtctgcaaaaggacttgatgtgtgggacagctggccgctgcaaaacgctgacggaacagtagctgaatacaacggctatcacgttgtgtttgctcttgcgggaagcccgaaagacgctgatgacacatcaatctacatgttttatcaaaaggtcggcgacaactcaatcgacagctggaaaaacgcgggccgtgtctttaaagacagcgataagttcgacgccaacgatccgatcctgaaagatcagacgcaagaatggtccggttctgcaacctttacatctgacggaaaaatccgtttattctacactgactattccggtaaacattacggcaaacaaagcctgacaacagcgcaggtaaatgtgtcaaaatctgatgacacactcaaaatcaacggagtggaagatcacaaaacgatttttgacggagacggaaaaacatatcagaacgttcagcagtttatcgatgaaggcaattatacatccggcgacaaccatacgctgagagaccctcactacgttgaagacaaaggccataaataccttgtattcgaagccaacacgggaacagaaaacggataccaaggcgaagaatctttatttaacaaagcgtactacggcggcggcacgaacttcttccgtaaagaaagccagaagcttcagcagagcgctaaaaaacgcgatgctgagttagcgaacggcgccctcggtatcatagagttaaataatgattacacattgaaaaaagtaatgaagccgctgatcacttcaaacacggtatttattcgcgataagctcatggagcggcgtaaccgtcgcacaggaaggacagagaaagcgcggatctgggaagtgacggacagaacggtcaggacctggattggggaggcggttgccgccgctgctgctgacggtgtgacgttctctgttccggtcacaccacatacgttccgccattcctatgcgatgcacatgctgtatgccggtataccgctgaaagttctgcaaagcctgatgggacataagtccatcagttcaacggaagtctacacgaaggtttttgcgctggatgtggctgcccggcaccggtgtgacaatctaaaaacttgtcacacttcacatggatctgtcatggcggaaacagcggttatcaatcacaagaaacgtaaaaatagcccgcgaatcgtccagtcaaacgacctcactgaggcggcatatagtctctcccgggatcaaaaacgtatgctgtatctgttcgttgaccagatcagaaaatctgatggcaccctacaggaacatgacggtatctgcgagatccatgttgctaaatatgctgaaatattcggattgacctctgcggaagccagtaaggatatacggcaggcattgaagagtttcgcggggaaggaagtggttttttatcgccctgaagaggatgccggcgatgaaaaaggctatgaatcttttccttggtttatcaaacgtgcgcacagtccatccagagggctttacagtgtacatatcaacccatatctcattcccttctttatcgggttacagaaccggtttacgcagtttcggcttagtgaaacaaaagaaatcaccaatccgtatgccatgcgtttatacgaatccctgtgtcagtatcgtaagccggatggctcaggcatcgtctctctgaaaatcgactggatcatagagcgttaccagctgcctcaaagttaccagcgtatgcctgacttccgccgccgcttcctgcaggtctgtgttaatgagatcaacagcagaactccaatgcgcctctcatacattgagaaaaagaaaggccgccagacgactcatatcgtattttccttccgcgatatcacttccatgacgacaggatag

SEQ ID NO: 15763 - DNA, 2739 bp, Homo sapiens
  SIMILAR (2386)..(2736): 811254mologous to unidentified cloning vector 29kD protein essential for the replication of mini F plasmid,accession number AB015619,Smith-Waterman Score=504.
cttctgaagcatacttctatcaattcgtcaaattcattctccgtccggttttgttcccttgctgacgaggagttgtgaccctttggaggagaagcagcattctggtttttggaattttcagcctttttgtgctggtttttcctcatcttcgtggatttatctacctttggtctttgctgctggtgaccttcagatagagtttctgtgtggttgtcctttttgttgatgttgatgttgttgctttgtttgataaaccaaggaaaagattcatagcctttttcatcgccggcatcctcttcagggcgataaaaaaccacttccttccccgcgaaactcttcaatgcctgccgtatatccttactggcttccgcagaggtcaatccgaatatttcagcatatttagcaacatggatctcgcagataccgtcatgttcctgtagggtgccatcagattttctgatctggtcaacgaacagatacagcatacgtttttgatcccgggagagactatatgccgcctcagtgaggtcgtttgactggacgattcgcgggctatttttacgtttcttgtgattgataaccgctgtttccgccatgacagatccatgtgaagtgtgacaagtttttagattgtcacactccgcatcagccagcgcagagagtatttccagcaaattcattctgcaatcggcttgcataacgctgaccacgttcataagcacttgttgggcgataatcgttacccaatctggataatgcagccatctgctcatcatccagctcgccaaccagaacacgataatcactttcggtaagtgcagcagctttacgacggcgactcccatcggcaatttctatgacaccagatactcttcgaccgaacgccggtgtctgttgaccagtcagtagaaaagaagggatgagatcatccagtgcgtcctcagtaagcagcttctgggcacgttcattacctgaccctacccgaaaagtcttctcaacactatcaccccggagcactttcagagttaacttcacatcccgaccccataccggcaaagtatgggctttccgcgagccttttcttctccccccccatttacgaaagcccgatactgacacagggtatttgtataaacgcatggcatacggatcggtgatttcttttgtttcactaagccgaaactgcgtaaaccggttctgtaacccgataaagaagggaatgagatatgggttgatatgtacactgtaaagccctctggatggactgtgcgcacgtttgataaaccaaggaaaagattcatagcctttttcatcgccggcatcctcttcagggcgataaaaaaccacttccttccccgcgaaactcttcaatgcctgccgtatatccttactggcttccgcagaggtcaatccgaatatttcagcatatttagcaacatggatctcgcagataccgtcatgttcctgtagggtgccatcagattttctgatctggtcaacgaacagatacagcatacgtttttgatcccgggagagactatatgccgcctcagtgaggtcgtttgactggacgattcgcgggctatttttacgtttcttgtgattgataaccgctgtttccgccatgacagatccatgtgaagtgtgacaagtttttagattgtcacaagaacggtcaggacctggattggggaggcggttgccgccgctgctgctgacggtgtgacgttctctgttccggtcacaccacatacgttccgccattcctatgcgatgcacatgctgtatgccggtataccgctgaaagttctgcaaagcctgatgggacataagtccatcagttcaacggaagtctacacgaaggtttttgcgctggatgtggctgcccggcaccgggaactgagaatgcagaaaacatacaaagctaaagctacagcctacgatatggcacgttctcaaaataataactcagagaagcttttggtttatagaaaattattacaagtgttgacaggactttataaacggagtaacctcggtgtgcggttgtatgcctgctgtggattgctgctgtgtcctgcttatccacaacattttgcgcacggttatgtggacaaaatacctggttacccaggccgtgccggcacgttaaccgggctgcatccgatgcaatgtgacaatctaaaaacttgtcacacttcacatggatctgtcatggcggaaacagcggttatcaatcacaagaaacgtaaaaatagcccgcgaatcgtccagtcaaacgacctcactgaggcggcatatagtctctcccgggatcaaaaacgtatgctgtatctgttcgttgaccagatcagaaaatctgatggcaccctacaggaacatgacggtatctgcgagatccatgttgctaaatatgctgaaatattcggattgacctctgcggaagccaaaatcaccaatccgtatgccatgcgtttatacgaatccctgtgtcagtatcgtaagccggatggctcaggcatcgtctctctgaaaatcgactggatcatagagcgttaccagctgcctcaaagttaccagcgtatgcctgacttccgccgccgcttcctgcaggtctgtgttaatgagatcaacagcagaactccaatgcgcctctcatacattgagaaaaagaaaggccgccagacgactcatatcgtattttccttccgcgatatcacttccatgacgacaggatag

SEQ ID NO: 15764 - DNA, 5830 bp, Homo sapiens
  SIMILAR (387)..(6296): 1001254mologous to Homo sapiens RNA polymerase II largest subunit,accession number X63564,Smith-Waterman Score=10414.
atgcaggaacaacagcaagcctccagcctgatcaggagcggcaatgggcgcctccctggatcaggagcacagcggacaccctgccatatccggagggatggaagtcagcggcgggtctgcgatgactgcaaacagcagtggtggaaggcaaaatacaacataccatctggcttgcatgcttgcactgcgactctagaagaaacccatattttagactcgggggcacatgtgcaagttttttacaagggtcaactgcatgtcatgagagttccatgtacagattattttgacacccagaagaaccccaacttgtcacacttacatggatctgtcatggcggaaacagcggttatcaatcacaagaaacgtaaaaatagcccgcgaatcgtccagtcaaacgacctcactgaggcggcatatagtctctcccgggatcaaaaacgtatgctgtatctgttcgttgaccagatcagaaaatctgatggcaccctacaggaacatgacggtatctgcgagatccatgttgctaaatatgctgaaatattcggattgacctctgcggaagccagtaaggatatacggcaggcattgaagagtttcgcggggaaggaagtggttttttatcgccctgaagaggatgccggcgatgaaaaaggctatgaatcttttccttggtttatcaaacgtgcgcacagtccatccagagggctttacagtgtacatatcaacccatatctcattcccttctttatcgggttacagaaccggtttacgcagtttcggcttagtgaaacaaaagaaatcaccaatccgtatgccatgcgtttatacgaatccctgtgtcagtatcgtaagcccgatggctcaagcatcgtctctctgaaaatcgactgggacatagaaccgtaccccgctggcctaaaagagcagattaagtctgatgttttcttgttaagttcctgtgtggaagttctccccaatgctgaaattgggttcttaaaatgtctagctattattggattatgggctgtttctctcttcagctacaataattgctttatatgtacaccggcgttcggtcgaagagtatctggtgtcatagaaattgccgatgggagtcgccgtcgtaaagctgctgcacttaccgaaagtgattatcgtgttctggttggcgagctggatgatgagcagatggctgcattatccagattgggtaacgattatcgcccaacaagtgcttatgaacgtggtcagcgttatgcaagccgattgcagaatgaatttgctggaaatatttctgcgctggctgatgcggaaaatatttcacgtaagattattacccgctgtatcaacaccgccaaattgcctaaatcagttgttgctcttttttctcaccccggtgaactatctgcccggtcaggtgatgcacttcaaaaagcctttacagataaagaggaattacttaagcagcaggcatctaaccttcatgagcagaaaaaagctggggccataaacacacaactggttgaaaccctgctctctgactctagaagaatccccgacttcatgtctaaaacaccaaaagcaatggtaacaaaagctaaaattgacaaatgggatctaattaaactaaagagcttctgcacagcaaaagaaactaccatcagagtgaacaggcaacctacagaatgggagaaaattttcgcaacctactcgtctgacaaagggctaatatccagaatctacaaagaactcaaacaaagttacaggaaaaaaacaaccctgtcaacaagtggtggccatgagaagtggagacgaaatctgaaactcaatgttgctctgctgatatggttttgctgtgaccccacccaaatttcatttttaattgtagctgccaaaattcccatgtcatgtgagggatctggtgggagaagaaaccccatgataaccaggcaaacaggatctggagtggacctccagcaaactccagcagacctgcagaagagggactttactggtagaaggaaaactaacaaacagaaaggaatagcaccaacatcaacaaaaattacgtccacatggaaacctcatccaaaggattgcaactcctcaccagcaagggaacaaaactggatggagaatgagtttgacaaattgacagaagtaggcttcagaaggtggacaataacaaactcctccaagctaaaggagcgtgttctaacccaatgcaaggaagcaacgaaccttgcaaaaaggttagagaaattgctaactagaataaccagtttagaaaagaacaaaaatgacctgatggagctgaaaaacacagcacaagaacttcgtgaagcatacaccagtatcagcggccgaatcaatcaagcagaacaaaggacatcagagattgaagatcaacttaatgaaataaagcgcagaggcgtctccgtgtgtccacaaccatcagaagacaccccgaggagtactgccagggtcccaaaggggatggtccccttccggccccgggtccccttggtcactccacccagagagaaaaaagaagctccttggcttgcatgccttcgcactagggctctaaggatcctcatagaccctccgagccaggtgtgggatatagtctcgtgtgatgcggagaatgaaaccaagttggaaaacactctgcaggatattatccaggagaacttccccaatctagcaaggcaggccaacgttcagattcaggaaatacagagaacgccacaaagatactcctcaagaagagcaactccaagacacataattgtcagattcaccaaagttgaaatgaaggaaaaaatgttaagggcagccagagagaaaggtcgggttaccctcaaagggaagcccatcagactaacagcggatctctcggcagaaaccctacaagccagaagagagtgggggccaatattcaacacccttaaagaaaagaattttcaacccagaatttcatatccagccaaaataagcttcataagtgaaggagaaataaaatactttacagacaagcaaatgctgagagattttgtcaccagcaggcctgccctagaagacctcctgaaggaagcgctaaacatggaaaggaacaaccggttggttaaatccctcgcttgggcaagccagaacggcttccggtccccggccttgttgccactgtccctaatgctttgtgctcccctacaagaggcagatggaacaaatctgggatggctggctcactgtggcctgctgtgcactggtgaccaccctagtggccttggcaaacctggccggcacggcgctgaccgtcaccatccagagggactggatcgtgagctgacgggtgacaacagaggccagctggttggaggagcgactcaagccttcgcgaaagaaaataaccaaaaagcatacaaagaaacgtacggcgtctctcatattacacgccatgatatgctgcagatccctaaacagcagcaaaacgaaaaataccaagtgcctcaattcgatcaatcaacgattaaaaatattgagtctgcaaaaggacttgatgtgtgggacagctggccgctgcaaaacgctgacggaacagtagctgaatacaacggctatcacgttgtgtttgctcttgcgggaagcccgaaagacgctgatgacacatcaatctacatgttttatcaaaaggtcggcgacaactcaatcgacagctggaaaaacgcgggccgtgtctttaaagacagcgataagttcgacgccaacgatccgatcctgaaagatcagacgcaagaatggtccggttctgcaacctttacatctgacggaaaaatccgtttattctacactgactattccggtaaacattacggcaaacaaagcctgacaacagcgcaggtaaatgtgtcaaaatctgatgacacactcaaaatcaacggagtggaagatcacaaaacgatttttgacggagacggaaaaacatatcagaacgttcagcagtttatcgatgaaggcaattatacatccggcgacaaccatacgctgagagaccctcactacgttgaagacaaaggccataaataccttgtattcgaagccaacacgggaacagaaaacggataccaaggcgaagaatctttatttaacaaagcgtactacggcggcggcacgaacttcttccgtaaagaaagccagaagcttcagcagagcgctaaaaaacgcgatgctgagttagcgaacggcgccctcggtatcatagagttaaataatgattacacattgaaaaaagtaatgaagccgctgatcacttcaaacacggtaactgatgaaatcgagcgcgcgaatgttttcaaaatgaacggcaaatggtacttgttcactgattcacgcggttcaaaaatgacgatcgatggatgccagcctacgtgttctgaggctttgcagaactttcaacggtataccggcatacagcatgtgcatcgcataggaatggcggaacgtatgtggtgtgaccggaacagagaacgtcacaccgtcagcagcagcggcggcacccgcctccccaatccaggtcctgcccgttctgaacattttgaggcatttcagtcagttgctcaatgtacctataaccagaccgttcagctggatattacggcctttttaaagaccgtaaagaaaaataagcacaagttttatccggcctttattcacattcttgcccgcctgatgaatgctcatccggagttccgtatggcaatgaaagacggtgagctggtgatatgggatagtgttcacccttgttacaccgttttccatgagcaaactgaaacgttttcatcgctctggagtgaataccacgacgatttccggcagtttctacacatatattcgcaagatgtggcgtgttacggtgaaaacctggcctatttccctaaagggtttattgagaatatgtttttcgtctcagccaatccctggtcttccttagagctagcagtgatcatgggaccaattctggccaataagtgtgacaatctaaaaacttgtcacacttcacatggatctgtcatggcggaaacagcggttatcaatcacaagaaacgtaaaaatagcccgcgaatcgtccagtcaaacgacctcactgaggcggcatatagtctctcccgggatcaaaaacgtatgctgtatctgttcgttgaccagatcagaaaatctgatggcaccctacaggaacatgacggtatctgcgagatccatgttgctaaatatgctgaaatattcggattgacctctgcggaagccagtaaggatatacggcaggcattgaagagtttcgcggggaaggaagtggttttttatcgccctgaagaggatgccggcgatgaaaaaggctatgaatcttttccttggtttatcaaacgtgcgcacagtccatccagagggctttacagtgtacatatcaacccatatctcattcccttctttatcgggttacagaaccggtttacgcagtttcggcttagtgaaacaaaagaaatcaccaatccgtatggccatgcgttaatacgaatccctgtgtcagtatcgtaagccggatggctcaggcatcgtctctctgaaaatcgactggatcatagagcgttaccagctgcctcaaagttaccagcgtatgcctgacttccgccgccgcttcctgcaggtctgtgttaatgagatcaacagcagaactccaatgcgcctctcatacattgagaaaaagaaaggccgccagacgactcatatcgtattttccttccgcgatatcacttccatgacgacaggatag

SEQ ID NO: 15765 - DNA, 1478 bp, Homo sapiens
  SIMILAR (1)..(420): 911254mologous to Homo sapiens putative p150,accession number U93564,Smith-Waterman Score=676.
aaattaatagcctcaggacaaaaaatctcgtcggggttccttaaggggacggattatgtagccaaggcccgaccacctaatgaacccggaccctgatgtggtttgtccttttacagccagtagtgctccccgcatttgaaccgcaagggacaagccctttaatgagccaaggaagccccagggaacagcacttataaatttcgctttccacccgatgcctaaaaaaactttcccttgggggtaacccccttatccacggggatattttaataattattttttcaatagtttttagatcttcttttttagagcgccttgtaggcctttatccatgctggttctagagaaggtgttgtgacaaatttgccctttcagtgtgacaaatcaccctcaaaaagccggtcctgtttgttacaaattgcctttaaccctgtgacaaattgccctcagaagaagctgttttttcacaaagttatcccctgcttattgactcttttttatttagtgtgacaatctaaaaacttgtcacacttcacatggatctgtcatggcggaaacagcggttatcaatcacaagaaacgtaaaaatagcccgcgaatcgtccagtcaaacgacctcactgaggcggcgatatagtctctcccgggatcaaaaacgtatgctgtatctgttcgttgaccagatcagaaaatcggatggcaccctacaggaacatgacggtatctgcgagatccatgttgctaaatatgctgaaatattcggattgaccttttgcggaacgcagtaaggatatacggcaggcattgaagagtttcgcggggaaggaagtggttttttatcgccctgaagaggatgccggcgatgaaaaaggctatgaatcttttccttggtttatcaaacgtgcgcacagtccatccagagggcttttcagtggacatattccccccatatctcattcccttctttatcggggtaaagaaccggctaacacaaattctgcttatttgaaacaaaagaaatcaccaatcctgttggaagttctggccagggaaatcaggcaggagaagaaataaagggcattcaatttggaaaagaggaagtcaaattgtccctgtttgcagatgacatgattgtatatctagaaaaccccattgtctcagcccaaaatctccttaagctgataagcaacttcagcaaagtctcaggatacaaaatcaatgtgcaaaaatcacaagcattcttatacaccaataacagacaaacagagagccaaatcatgagtgaactcccattcacaattgcttcaaagagaataaaatacctaggaatccaacttacaagggatgtgaaggacctcttcaaggagaactacaaaccactgctcaatgagataaaagaggatacaaacaaatggaagaacattccatgctcatgggtaggaagaatcaatattgtgaaaatggccatactgcccaag

SEQ ID NO: 15766 - DNA, 411 bp, Homo sapiens
  SIMILAR (1)..(531): 981254mologous to Escherichia coli K12 putative oxidoreductase,accession number AE000459,Smith-Waterman Score=931.
atggttggcgctggcggggggaaacgagaaatgtcaccgacgttagaaatcaaccatcggccattagcaacaatgggcgtcgagaaccagacgctggcggtctcttttactacgctgtgcgtcgacgcccgcagtcagcatgactatattgcgctctcacgtctctttcatacggtcatgttgtttgatgtcccagttatgacgcggttgatggagagcgaagcgcggcgctttattgcgctggtggatgagttttacgagcgccatgtcaaattagtggtgagtgcagaagtgccgctgtatgaaatttatcagggcgatcggctgaagtttgagttccagcgttgcctgtcacgtctgcaagagatgcaaagcgaagagtatctgaagcgcgagcatttggcgggttaa

SEQ ID NO: 15767 - DNA, 1359 bp, Homo sapiens
  SIMILAR (574)..(1233): 911254mologous to Escherichia coli HYDA,accession number D14422,Smith-Waterman Score=1016.
atgagacagtctatggctaccaaactgcaggacgggaatacaccttgtctggcagctacaccttctgaaccacgtcccaccgtgctggtgtttgactccggcgtcggtgggttgtcggtctatgacgagatccggcatctcttaccggatctccattacatttatgctttcgataacgtcgctttcccgtatggcgaaaaaagcgaagcgtttattgttgagcgagtggtggcaattgtcaccgcggtgcaagaacgttatccccttgcgctggctgtggtcgcttgcaacactgccagtaccgtttcacttcctgcattacgcgaaaagttcgacttcccggttgttggtgtcgtgccggcgattaaacctgctgcacgtctgacggcaaatggcattgtcggattactggcaacccgcggaacagttaaacgttcttatactcatgagctgatcgcgcgtttcgctaatgaatgccagatagaaatgctgggctcgacagagggtactagcaggatgtctaaatccctctctatgaggcttatattttcaaatccaaatcaaagtaccggtgacccgctcgatcgtcgcttccacgcccagccggtggcctgcccggagtgtggcccgcatcttgaatgggtaagtcatggtgaacatgcggaacaagaggcggcattacaggcagctatcgcacagttaaaaatgggcaaaattgtcgccatcaaagggattggcggatttcatcttgcctgcgatgcacgtaacagtaacgcggtggcgacacttcgggcgcgcaaacatcgcccggcgaaaccgctggcggtcatgttgccagtggctgacggtttaccagacgctgcgcgccagttgcttaccacgcccgccgcgccgattgtgctggtggataaaaaatacgttcctgagctttgtgatgatatcgcccctgaccttaacgaagtcggggtaatgttgcctgcgaacccgctccagcatttgctgttacaggaactgcaatgcccgctggtgatgacctccggcaacctgagcggtaaaccaccagctatcagcaacgaacaggcgctggcggatttgcagggcattgccgacggattcttgatacataaccgcgacatcgtgcagcggatggggagatgtgtggttttcttcgatcagtcggaggccgccaatcccggagccaattgcggcaccaatgcgggttgcgttctcttccgttatttcaaggccagaatcttgcatggcctgaacgccagcgacaattccatattgaatgaaggcatccatcttgcgctgttctttgcgcgagataatgtcctcacagttaaaatcctttattaa

SEQ ID NO: 15768 - DNA, 1218 bp, Homo sapiens
  SIMILAR (4)..(621): 811254mologous to Escherichia coli CG Site No. 18232; alternate gene name hypF,accession number U29579,Smith-Waterman Score=820.
atgccttacgaccgcccgtttaccgtgatggcggcgtttccgctatgtccggcctgtgacaaagagtaccgtgacccgctcgatcgtcgcttccacgcccagccggtggcctgcccggagtgtggcccgcatcttgaatggttaaaaatgggcaaaattgtcgccatcaaagggattggcggatttcatcttgcctgcgatgcacgtaacagtaacgcggtggcgacacttcgggcgcgcaaacatcgcccggcgaaaccgctggcggtcatgttgccagtggctgacggtttaccagacgctgcgcgccagttgcttaccacgcccgccgcgccgattgtgctggtggataaaaaatacgttcctgagctttgtgatgatatcgcccctgaccttaacgaagtcggggtaatgttgcctgcgaacccgctccagcatttgctgttacaggaactgcaatgcccgctggtgatgacctccggcaacctgagcggtaaaccaccagctatcagcaacgaacaggcgctggcggatttgcagggcattgccgacggattcttgatacataaccgcgacatcgtgcagcggatggatgattcggtggtgcgcgaaagtgcgaaatgctgcgccgttcgcggggcggtgttgagtcagcatctgggcgatttaagtgacgatggcatccagatgcagtggcgcgaacgttacagcctgatgcaaaacatctacgattttaccccgcaatacgttgtgcatgacgcgcatccgggctatgtctccagccagtgggcgcgtgaaatgaatctgccgacgcaaacggtactgcatcatcatgcccatgcagcggcgtgtctggcagagcatcagtggccgctggatggcggtgatgtcattgctttgacgctcgacggtatcgctcaaccggatgagcgttcacgatcagaagatgttgatcgggcgcaccaaagaggccacgaaagagatcgacggcgacgacgttcgggaacctctcacctcacccgcgttgatctgaaagaagatggcaaagggctgaagattgttcgccagagcctgccgtacggcactgccagtggcactcacggtctgtacttctgcgcctactgcgcgcgtctgcataacattgagcagcaactgctgagcatgtttggcgataccgatggtaagcgtgatgcgatgttgcgttcaccaaaccggtaa

SEQ ID NO: 15769 - DNA, 2050 bp, Homo sapiens
  SIMILAR (466)..(2532): 951254mologous to Homo sapiens putative p150,accession number U93574,Smith-Waterman Score=3515.
ctgctcgctcgcgactagtgattttcccgggtcgacgatttcgtgcggcccgcgtttcaccattattcgcgccatgccttacgaccgcccgtttaccgtgatggcggcgtttccgctatgtccggcctgtgacaaagagtaccgtgacccgctcgatcgtcgcttccacgcccagccggtggcctgcccggagtgtggcccgcatcttgaatgggtaagtcatggtgaacatgcggaacaagaggcggcattacaggcagctatcgcacagttaaaaatgggcaaaattgtcgccatcaaagggattggcggatttcatcttgcctgcgatgcacgtaacagtaacgcggtggcgacacttcgggcgcgcaaacatcgcccggcgaaaccgctggcggtcatgttgccagtggctgacggtttaccagacgctgcgcgccagttgcttaccacgcccgccgcgccgattgtgctggtggataaaaaatacgttcctgagctttgtgatgatatcgcccctgaccttaacgaagtcggggtaatgttgcctgcgaacccgctccagcatttgctgttacaggaactgcaatgcccgctggtgatgacctccggcaacctgagcggtaaaccaccagctatcagcaacgaacaggcgctggcggatttgcagggcattgccgacggattcttgatacataaccgcgacatcgtgcagcggatggatgattcggtggtgcgcgaaagcggcgaaatgctgcgccgttcgcgggggtatgtgccggatgcgctggctttgcctccgggctttaaaaatgttccgcctgtgctgtgtctcggcgcggatctgaaaaataccttctgcctggtgcgcggtgaacaagcggtgttgagtcagcatctgggcgatttaagtgacgatggcatccagatgcagtggcgcgaagcgttacgcctgatgcaaaacatctacgattttaccccgcaatacgttgtgcatgacgcgcatccgggctatgtctccagccagtgggcgcgtgaaatgaatctgccgacgcaaacggtactgcatcatcatgcccatgcagcggcgtgtctggcagagcatcagtggccgctggatggcggtgatgtcattgctttgacgctcgacggtatcggtatgggggagaacggcgctttgtggggcggcgagtgcctgcgggtgaactatcgcgaatgtgagcacctggcggcttgcctgcagtggcgcttccggtgcgattgcagcgagcagccgtgggtccagcccgggtgcgcgctattaacagttaatagccgcgttctacaccaactccgtgacatccattacattattcgccatctgacggaaacgctggggacagacaacctcgcggaaagtcatttacaggtggcgaacgaactgttttaccgcaataaagccgcctggctggtaggcaaactgatcacaccttccggcacattgccatttttgctgccgatccaccagacggacgacggcgagttatttattgatacctgcctgacgacgaccgccgaagcgagcattgtttttggctttgcgcgttcttattttatggtttatgcgccgctgcccgcagcgctggtcgagtggctacgggaaattctgccaggtaaaaccaccgctgaattgtatatggctatcggctgccagaagcacgccaaaaccgaaagctaccgcgaatatctcgtttatctacagggctgtaatgagcagttcattgaagcgccgggtattcgtggaatggtgatgttggtgtttacgctgccgggctttgatcgggtattcaaagtcatcaaagacaggttcgcgccgcagaaagagatgtctgccgctcacgttcgtgcctgctatcaactggtgaacgagcacgatcgcgtgggccgaatggcggacaccaggagtttgaaaactttgttgctggagaagcggcatatttccccggcattaatggcattactgcttcaggaagcagcggcaaacatccacgatctcggcgaacaactgtga

SEQ ID NO: 15770 - DNA, 1013 bp, Homo sapiens
  SIMILAR (904)..(1137): 661254mologous to Xenopus laevis ribonucleoprotein,accession number U16800,Smith-Waterman Score=266.
  misc_feature (1)...(1013): n = a,t,c or g
gctccaggcccgcttccccctgtcttggcgcaacttccccatcaccttcgcctgctatgcgggcctcttctgcctctcggcctccatcatctaccccaccacctatgtccagtttctgtcccacgggcgttcgcgggaccacgccatcgccgccaccttcttgtcctgcatcgcgggtgtggcttacgccaccgaagaggcctggacccgggcccggtccggcgagagcactggctatatggccaccggacccgggctgttgaaggtgcaggagaccttcgttgcctgcatcatctttgcgttcatcagcgaccccaacctgtaccagcactcagccggccctggagtggtgcgtggcggtgtacgccatctgcttcatcctagcggccatcgccatcctgctgaacctgggggagtgcaccaacgtgctacccatccccttccccagcttcctgtcggcgctggccttgctgtctgtcctcctctatgccaccgcccttgttctctggcccctctaccagttcgatgagaagtatggcggccagcctcggcgctcgagagatgtaagctgcagccgcaggcatgcctactacgtgggtgcctgggaccgccgactggctgaggccatcctgacggccatcaacctactgacgtatgtggctgacctgatgcactctgcccacctggattttagcaaggtctaagactctcccaagaggctcccgttccctctccaacctctttgttcttcttgcccgagttttctttatggagtacttctttcctccgcctttcctctgttttcctcttcctgtctcccctccctcccacctttttctttccttcccaattccttgcactctaaccagttcttggatgcatcttcttccttccctttcctcttgctgtttccttcctgtgttgttttgttagaaacacatcctgttttcacccctgagctggnnctctttttcttttcnnnnnnnnnnnnnnnnaaaaacggatcccacctg

SEQ ID NO: 15771 - DNA, 2149 bp, Homo sapiens
  SIMILAR (901)..(1689): 931254mologous to Homo sapiens putative p150,accession number U93563,Smith-Waterman Score=1273.
atggctcagccgcttgcaaagcagtggacacctgtgtcccctagggcgttgttggtcagcatttctagtatgccgcctaggcctgccgcggatgtaacggtttgccgccaccgcaactgcacgcttcgtgaactcttgtacggatttgcttacgctgctgcacagcaattaaatcttcacggcgatgtctgtaatgacggcgatggcgagaagtccggctgcgggaagacccggaaacgtttcttgttcaattgtatagcactgcccgccgctggcgcagcacaggcggcaccatgaatacgcaaattgttcccgatgccgctacgtgccctgctagcctttcggaaatgaataccccaggcgaacggcgttatcgttatccgtttatcaactgtacccactacgggccgagtttccccattattcgcgccatgccttacgaccgcccgtttaccgtgatggcggcgtttccgctatgtccggcctgtacaaagagtaccgtgacccgctcgatcgtcgcttccacgcccagccggtgcctgcccggagtgtggcccgcatcttgaatggggattggcggatttcatcttgcctgcgagcacgtaacagtaacgcggtggcgacacttcgggcgcgcaaacatcgccggcgaaaccgctggcggtcatgttgccagtggctgacggtttaccagacctgcgcgccagttgcttaccacgcccgccggcgccggattgtggcttggtggaaacggttatccaagggctccggacaacgcaaattcaacggcaatgtcgtgtgcgagccacgcccattcatttgggggcggacacccacgtggccgataggcatacgcgcgaagctgactatggcggcacagcttgtagggccctctcaccgccaaggcttcggccttacttataaggctgcaagtccaaagaccggttgtcggattttggattcgacctgccgcaagagtcggatttcccatgctgatggcgaccacacgcagatgagagtggggccaatatcaacattcttaaagaaaaaattttcaacccaaaatttcatatccagacaaattaagcttcaaaaaaatcaaccatcggccattgcaacaatgggcgtcgagaaccagacgctggcggtctcttattactacgtgtgcgtcgacgcccgcagtcagcatgactatattgcgctctcacgtcttttcatacggttaaaggcaaattgccaagaggcccgctggtcgtgctataaatccgtgaacggtaccgagctgattatccctggccagcaagaaataaaagagaaacagctcagggtgaaaacaggattgggcaacaaaacaacacaggaaggaaacagcaagaggaaagggaaggagaagatgcatccaagaactgggccgctggtgctggtacaggttgggctcgctgatgaacgcgaagatgatgcagcaacgaaggtctccagcaccttcagcagcccggcgaatcagtacgagaacaacaaggactcggtggcacaagacaactcggtgcaaaacagaggcggccaccgaagagttccagtaggcgaacccacaggacacacccatggggggcaccgagggacgtccaatcgaagaatggacagagaagcaactggggcaatcccggaagccccaaccaagaaacaggctctggcaaacagacccaaaagagactcactcgttcctctcacagtactcagtccttacgagataaggaccaaagaaaatgtcctgtctggaatgcagggaaaccagacttcagaactccaatacttggcttggaacttgactacttctaacttcggcaacagaaacttcagccagctatggagaaaaggggccctcctctccccagctgcagcaaagcaggtgttattctgcatcataaaccatcctggccatgtttccgagaaaggaaacttcagaggttgtggctatgctctggaaaaaggatccccagtacgagcatgcatgcatgccatcgacgtgtattccctgcggcatgctcctggacagttccgtcgacacgtgagccgctacctcaatctaatggacctggtcgacgtgtattcacctgcggtgcatgcctcctgtacagttccgcacacgtga

SEQ ID NO: 15772 - DNA, 2688 bp, Homo sapiens
  SIMILAR (1)..(1734): 1001254mologous to Homo sapiens dJ568F9.1 (zinc finger protein 133 (clone pHZ-13)),accession number AL049646,Smith- Waterman Score=3189.
atgggagcaaccccaccacggaacccataccactcacaagaacaacacaagaacccgcaagcacccaccgagcgacagacgaaccacccatccctaacaccaccccaagtgaccaccatggcaccgcaaacaggacccatacctcgacacacaaccacaacgaccccgacccgcgaagagacccagaacctaacccaaccaccaccagaaaacgccaaaaacgaacctacacgacagaaggcacggcacatgaagaaaaccatcattttcgcatgtcatcacactgctttcatgtacaccccacctcactttcttctttatttgtgttcgatcaacttactcaatgcatccagctccccaggcactgcctcgcacatcatcaccaattccatcgacacatcccaccccgacacattccaccccacacgagtcaggcatggcctcatcatcccatcacgccaaatcttgcccaagaggcacatcattttgcccacagctattacagcaaatgggctcctagtgagcaacatcacgcacccagagcatacatcacagagcacacatcttcagagtccatactttggcatctatcatcgcacagttcaaaacaaatgtagacagggcactctagaggatcccctgcaatgtcatggcggtccggtgatcctcgacctgctgttaaaacgcattctgaccattcccggcctgcggattgctcgccctggtgagttttccgaacgcgcgtttcttaacgataaacttgacttagcccaggccgaggcgattgccgatcttatcgacgccagttcggaacaggcggcccgttcggcacttaactcgctgcaaggcgcattctccgcacgggttaatcatctggtagaagccctcacccacttgcgcatttacgtcgaagcggcaattgatttccccgatgaagagatcgatttcctctccgacggaaaaattgaagcccagctcaatgacgttattgccgatcttgatgcagtgcgtgctgaagcacgtcagggtagtttgttgcgcgaagggatgaaagtggtgattgccggacgtcctaacgccggtaaatcgagcctgttaaacgcgctggcggggcgtgaagcggcaatcgtaaccgatatcgccggaactacgcgtgacgtgctgcgtgagcatatccacattgacggaatgccgctgcatatcatcgataccgccgggctacgtgaagccagtgacgaagtagaacgtattggtatcgagcgcgcgtggcaggaaattgaacaggccgaccgcgtgctgtttatggtcgatggcaccacaacagacgccgtggatccggcagagatctggccggaatttattgcccgtctgccagcgaaactgccgatcaccgtggtgcgccataaagccgatatcaccggcgaaacgctgggaatgagtgacgtgaacggtcacgcgttaattcgtctctcggacaggactggtgacaggcgtggaacgtgctgcgtacccatctcaaacagagcatgggcttcgacaccaacatggaaggcggcttcctggcgcgtcgtcgccactacaggcgctggaacaggcagggaaaatctacaccaggccaacgcgcacagtgcgacccacccagacaacggcggaggacgactgcgacggcacagcaagtcagcgacaacggggcctaccccaaccacagagggacgataccaaaaccaaacggccaaacggcaacaaaccatggacgcaatcgccaagagtctacagagcatcacagcatcatcatcacacattcatcatcagcacagcacggtcacatcacatcgtcatcgcacacagcacacatcagcgatccacatctgcagcatcacgtcaggccacaatcatattctcaccagtcacaatcgcactcagatatcacattgcgcatctcacaggcattcatcacacgttccaatcagacgcacagataccaagatacacatacctcgcacacacagtcacagcaggagcaagcacaatagcaagagcatttatatccaacgccaggatctattgctatgtaactgtatcgctatgcacgtcttgacgcgcaatcaacccacgcagtatagcggcacaatccccgttgcacgatatagacaagatcacgcagtcgcacgacacaacaccgaggcaccaacctgcgcacagtatatcactagctcgcgaggcacgcgccagagccagcacacacaacacgtgccgacaaggtgcaagctacacacaactgtagctaacaccgcaacgacgcgtccgatcccgtggagatatgcggcacacaactcccaagttgagctggtcccagctccaacacttctagccaatgtggtcaacactcgcagcagcatccaatcaaccagcagtcagtccatccagctcatatggctccaaatcagctgcaactcaacgcaagtcaccccccatccagtctcgcacacactcacagcagtgccacagtgcacaagcacagcaacagccatcatccaacagttgccaacatcagcatcattattggcattttgcatcaacatccacacagtccagcatactccatatattccagtgcaccagtgcacatcacaacatcatatatatcagcagcaccacacagattgttgtgccgtatatcatatatag

SEQ ID NO: 15773 - DNA, 1581 bp, Homo sapiens
  SIMILAR (865)..(1155): 791254mologous to Homo sapiens p40,accession number U93564,Smith-Waterman Score=402.
atgaatgagttggtgcagatcctgaaaaatacccgtcagcatttaatgacgggcgtttcacacatgattcccttcgtggtatcgggcggtattttgctggcggtttccgtcatgttgtatgacaaaggggtaaatcagctgagactgcgtgtcacgttcgcgctggactgctgtgatcgtgaggcactgcactgggcggtcactaccggcggcttcaacagtgaaacagtacaggacgtcatgctgggagcggtggaacgccgcttcggcaacgatcttccgtcgtctccagtggagtggctgacggataatggttcatgctaccgggctaatgaaacacgccagttcgcccggatgttgggacttgaaccgaagaacacggcggtgcggagtccggagagtaacggaatagcagagagcttcgtgaaaacgataaagcgtgactacatcagtatcatgcccaaaccagacgggttaacggcagcaaagaaccttgcagaggcgttcgagcattataacgaatggcatccgcatagtgcgctgggttatcgctcgccacgggaatatctgcggcagcgggcttgtaatggtacgccgaatacctctttgccaacgccgcaggcttttgacaggtcatgcccaatcaacgcgaccagcgccaagaccttcttccaccgccaaccgacacagtgcggaaagctccatcaagcagagattgcgtcagcaacgtatcgccagtggaggttgaaccggtgtatcaaagggttaatgccacgctcacttctgacgtgtggattaagtctaccgaaatattatgccgcgcgaggatgccgaaaacttccgcgaggtaaccgcgagaatgcagcaatattcagcctgtgcaaaacaaaacacacaccaagaaaagaatcaacgataaaagtacacatgaaaacacaaaaacaaataacaaaaacacttagaccaatatccttgatgaacattgatgcaaaaatcctcaataaaatactggcaaaccgaatccagcagcacatcaaaaagcttatccaccatgatcaagtgggcttcatccctgggatgcaaggctgcttcaatatacgcaaatcaataaatgtaatccagcatataaacagaaccaaagacaaaaaccacatgattatctcaatagatgcagaaaaggcctttgacaaagttcaacaacccttcatgctaaaaactctcaataaattagagagaaaaccaatgctcaatgcagaacatccacgcctggaccggccaacctaccccccggcccccgcgggccatcaaagagccacatccaatacccgcggcccccacggccacagccagaccaacacaacacacgcaccggccgagcccccaaagaccccgagagccccccactgcccccccacgctgctgccgccccccaacacagcccgcacccccacggggacaccaaacccccgcgacccaccgccaaccgagcgaccgagcccccgcccacaccgacgccagcacgcacggatcccgcccccccccccacaggccccctcaaaccctggcggagaccccccctaa

SEQ ID NO: 15774 - DNA, 877 bp, Homo sapiens
  SIMILAR (799)..(1185): 741254mologous to Homo sapiens p40,accession number U93567,Smith-Waterman Score=498.
atgcaagctgctcataggttacgccctgcataccgtataaagactggcaaaccaccagctttggcagattatcatcctgcatatcaagaaatgctttcacgaaaacaggatcgtgtaatcgatcagatcgattttggcatcaaagacaccgtcgaaattctgcatatggggcagatccagagcatgggtcgcgagttcgcattgtctctcaggttttcaatccatggacacaatgtgcatggaaatgaaagcccagagatgggtcccgagcgtcgttcaggtttctatgatgaatggtcccctgagagaatcatacaatattataggcctgcccgggagcagcttatgaatgagttggtgcagatccttaaaaatacccgtcagcatttaatgacgggcgtttcacacatgattcccttcgtggtatcgggcggtattttgctggcggtttccgtcatgttgtatggcaaaggcgcagtgccggatgctgtagccgatccaaatctgaaaaaactgtttgatatccggcgttgcgggcttgacgctgatggtgcctttcctcgcagcgtacatcggttattccattgcagagcgttctgcgctggctccgtgcgctatcggtgcctgggttggtaacagctttggtgcgggcttctttggtgcgctgatcgacgcctttccacgtttgtctgaggagataaaccctgcactacctgaggcaaaagtgatggcctgccttgaggcagttgccaggcaagataatgttgattctcctcaggagctacccccaacacccctgtttgcttctagacctataactagactgaagtcctggtgggcccctggaggtgaagttgagagtgggacccacaagaag

SEQ ID NO: 15775 - DNA, 423 bp, Homo sapiens
  SIMILAR (616)..(942): 781254mologous to Homo sapiens p40,accession number U93564,Smith-Waterman Score=445.
gccgcaatttgcacgcgctggcgttaaatattttcaaagatgaaggccgcgaagcgtttctgaaattaatggaaaccaccgatatcttcatcgaagccagtaaaggtccggcctttgcccgtcgtggcattaccgatgaagtactgtggcagcacaacccgaaactggttatcgctcacctgtccggttttggtcagtacggcaccgaggagtacaccaatcttccggcctataacactatcgcccaggcctttagtggttacctgattcagaacggtgatgttgaccagccaatgcctgccttcccgtataccgccgattacttttctggcctgaccgccaccacggcggcgctggcagcactgcataaagtgcgtgaaaccgggaaaggcgaaagtatcgacatcgccatgtatgaagtga

SEQ ID NO: 15776 - DNA, 790 bp, Homo sapiens
  SIMILAR (101)..(286): 691254mologous to Escherichia coli O157:H7 uracil transport protein,accession number AP000422,Smith-Waterman Score=202.
atggcccaattgccgtcattaaccatgttcgccacaattttcggtctttcggcgaacgggcggccccctaagccgaaaaaaccgggtggtgccgggccccagtttattgacgtggtttttttccgctcctttatcgccttctgttggcttttacccgaaattggtgcgctggattcataccattccgccgacggttattggtggtgcatcaattgttgtgttcgggctgattgccgtcgcaggcgcaaggatatgggtacaaaaccgtgtcgatttaagccagaacgaagttgttcatcaggagccataaacagaaaaccgccggggttaccggcggtgcagattgttgacaacgtacgcattgttcatgccggatgcggcgtaaacgccttatccggcctacaaaacagtgcaaattcaatatattgcaatcttctgatgcgcgctgcgggtcattcgttgaaattacccccgctgtgctgtccaccttttttacctgcttctgatgctctttcgcggtcttctgcaaattgccggaaccgcctcgatggttgccatactgacctccgtctggaatctggaggaccgcatacatcctccaaagaaaccagagtggtgccccaagatggtgaaacaaccggagtcaccccgctctgtgtacgaataggccaccccgaacgcgattggtgttttatccgctactggcgcctaacgcctaactggcagcgcttcagaagggttgggcgtacggagcgggccacaacgcataatcgcctgcaggcgtttgggg

SEQ ID NO: 15777 - DNA, 4017 bp, Homo sapiens
  SIMILAR (2831)..(3895): 871254mologous to Homo sapiens putative p150,accession number U93565,Smith-Waterman Score=1651.
atgcgcttctgcctgtacgtttgcaccccgctggtgtggttcttcaacggcctggcgaacataatcttccgtattttcaaactgccaatggtacgtaaagatgacatcacttctgatgacatctacgcggtagtggaagccggtgcgctggcgggcgtgttacgtaaacaggaacacgagctgattgaaaacgtctttgagctggaatcccgtaccgttccgtcttcaatgacaccgcgtgaaaacgtgatttggtttgatctccacgaagatgagcaaagcctgaagaataaggtggcggaacatccgcactctaagttcctcgtctgtaatgaagatattgaccacatcatcggttatgtcgattctaaagacctgctgaaccgcgtgctggctaaccaaagcctggcactgaacagcggcgtacaaattcgcaacacgctgattgtgccggatacgttaaccctttcagaggcgttggaaagttttaaaaccgcaggtgaagacttcgcggtgatcatgaacgagtacgcgctggtggtggggatcatcaccctcaatgacgtgatgaccacgctgatgggcgatctggtcggtcaggggctggaagagcagattgtcgcccgtgatgagaactcatggctgattgacggcggcaccccaattgacgacgtcatgcgcgtgctggatattgacgagttcccgcagtcgggcaactacgaaaacatcggcggctttatgatgttcatgctgcgtaagatccgaaacgcccgattcggtgccagctatttcaatcagcaactggcgtatgcgcaattgcaaatagccgaagaaacgctgcgtaattatcagcagtcatatgcgtttgtcgaaaaacaactgttgacaggtagcagtaatgttctggcgctggaacaggctcgcggggtgatagaaagtacccgcagcgacatcgctaaacgtcagggggaactggcgcaggcgaataatgcattgcaactgttgctgggaagctacggcaagctgccgcaagcgcagacagtaaacagcgacagcctgcaaagcgttaaattaccggcgggattgtcgtcgcaaatcttattgcagcgcccggatattatggaagctgaacacgcgttaatggcggctaatgccaatattggcgctgcacgcgcggcattttttccgtctataagcctgaccagcggaatatcgaccgccagtagcgatctatcgtcattatttaacgccagcagcgggatgtggaattttatacccaaaattgagatccccatttttaatgccggacgcaaccaggccaatctggatatcgccgaaattcgccagcagcagtcggtggtgaattatgaacagaaaatccagaacgcctttaaagaagtggcagatgcgctggcattacgtcaaagcctgaacgatcaaattagcgcccagcagcgttatctggcatcgctgcaaattactttgcaacgggcgcgggcattatatcagcacggcgcagtaagtaatctggaagtgctggatgccgagcggtctttatttgcaacccgacaaacttatctggatcggaatatgtccggcaaggttaacgaagtttcatggcgatccgaactggtggaggttgcaagcatatactcgaccgtcctcaaaattgatattcactttttcattgttgatcaggtattccacatcgccatcgaaaggcacattcacttcgacctgaccatgccagtggctggtgggcatgatatgcggatgctggaagccgcacacaccagccgaacggccagttcatgtgaaatcccctacgccggaaactggctggccgggcttcatgcacccacggccatgccccgcacagccgcaatatccatgcgaacaaactcgcttcccgcactttggcgcccctacgaacatgtcccaccaacgctggccactcaggttgcggcgctggcggcgattgttccggtcgcgctggcgatcggcgttgatccggcatacatcgtggcttcagcaccggcttgctacggttattacatcctgccgacttatccgagcgatctggcagcgattcagtttgaccgttccggcaccacccacatcggtcgcttcgtcatcaaccacagctttattctgccggggttgattggtgtgagcgtatcgtgcgtcttcggctggatcttcgccgcgatcgttgccgacttcgacggcgaaaccatcctgaaagtggaaccagaagccctgaccctgctggcgcagcaagcctttcacgacgcttcttttatgctccgcccggcacaccagaaacaggttgcggctattcttcacgatccagaagccagcgaaaacgacaagtacgtggcgctgcaattcttaagaaactccgaaatcgccgccaaaggcgtgctgccgacctgccaggataccggcaccgcgatcatcgtcggtaacaaaggccgcgcgttgtggaccggcggggtgatgaagaaacgctgtcgaaggcgttatacacctatttcgagatacctgcgctattccagatgggggctggcatgtcacgcgcctgaccatgactatgccgagctgcaggacaaaatcggtgtcatgtcgaagattggctataacggcacaaaaattcttgagattgattccagagcgccctacagcgaagtgctggaacaggcacagaaggcggtttctctggttgccatcgtttctgaccgccgaaatggcgcgtttcgcaccattattcgcaatagcgcctggttaggctccagtaatgtcgtgagcgccttgctgggtctgttggcgctctcgtgtgccggtaaagggatgacgcccgccatgtttggcgtactggtgattgtgcaatcgtacgccaagtcgatcagcgattttattaggtttcagacatgtatcgatctggacattgccaaaggcaaatttgtcgctaaagcgcgttttcttgctgaagcaggctggcgcacgctgttaggcagcaaagagcgcgatgaagaaaacgacggcacgccactgcctgtggtggcgaaaggcgatgagttgctgtgtgaaaaaggtgaagtggtagagcggcaaacccagccgccgcgccattttaccgatgcaacactgctttcggcgatgaccgggatcgcgcgctttgtgcaggataaagatctgaaaaagatcctccgtgcgaccgatggtctggggacagaggcaacgcgtgccgggattattgaactgttgttcaagcgtggtttcctgaccaaaaaagggcgctatatccactccaccgacgccggaaaagcgctattccattcgctgccggagatggcgacgcgaccggacatgaccgcgcactgggaatcggtgctgacgcaaatcagcgaaaagcagtgtcgctatcaggactttatgcagccgctggtggggacgctatatcagcttattgatcaagccaaacgtacgccggtgcggcagtttcgcggcattgtggctccgggcagtggtggcagtgctgataagaaaaaggctgcaccgcgtaaacgggaggggcgttatcttcactcagatatcgacaccgtcgaacgtatggagattatccgcgacttgagtctgggtgagttcgacgtgctggtagggatcaacttactgcgcgaaggtctggatatgccggaactgtcgctggtggcgatcctcgacgctgacaaagaaggcttcctgcgttccgaacgttcgttgatccagaccattggtcgtgcggcacgtaacgttaacggtatagcgattctctacggcgataagatcaccccatcaatggcgcaagcgacttggacgaaagccgaacgtcgccgtgagaaacagcagaagtacaacgaggaacacggaattacgccgcaaggcttgaacaagaaagtggtcgatatcctggcgctggggcagaacattggccaaaaccaaagcgaagggcagaggaaaatcgcgcccgattgttga

SEQ ID NO: 15778 - DNA, 1146 bp, Homo sapiens
  SIMILAR (198)..(515): 621254mologous to Homo sapiens BCL-6 corepressor,accession number AF317391,Smith-Waterman Score=335.
tcaggtcacccattcataccgcttaaagatctcacacaaatagcaattggtgatgtcttcaacaataacctcatcttgtgggccaacagagaaatcattcacagcgttccttgaaggtattgacatgatgcaaatatccaatgttttgtagtcatctctagctttgttcgctctcaacagtgactgtattttcacaatttcattattcttcacaacagaatcagtattatcaatgaacgtttgccgcctgtgcatatactccttccgttgtttatatcctttccaaaaagccttgccctcgacaagttgtaaaactttatgatcaagagtgtgggccctggaggatttcaaatcatgtgggtttgaatctctgctccacttagtaactgtgttacccaggaaaaggtttatacctgttctgtgcctagtttcctcatctgtaaaatactgataataacctccactctcttggggttgcataatacagaatgagtggatgccctgagcttgttttcctacaactagacagtcccattttatcatgaggcttcggctatctatagcttcaccgtcctctatgtcatatttgcttgtcaagacaagagaaatctcggtctttgaaagctgacttagtgtatttgccttgttagggtcattggggtcaactgctccttccccaagaaaagattccacggttggcacctctcccagcgaccccagcaattcactcagtaagtcatttttctcaggggcaattgcatcctggtgttccaacaggagtgagtgtgtgctgatgatttcttcaattgaaatataaatgactggtttgctgactgtcaccaggtctgtgtatttgtccatattaaacttctcttctggctcagggacattacatgcttctttgaaatatttcctgaattcctgatacgtctctgataaataattgttcatagatgagagatgctcattttctccttcaaacagcttgttggaggctgcgtgctgaagaaccttggccactgatcctaagtttctcctttggtcagaatttatctgacctccagctgtcatgtcgatgatatcaaagccatctggagctacaatggctggattcatgtaccgatagtacaggaggtttccaacaat

SEQ ID NO: 15779 - DNA, 1908 bp, Homo sapiens
  SIMILAR (856)..(1224): 731254mologous to Escherichia coli L-carnitine dehydratase,accession number X67748,Smith-Waterman Score=449.
  misc_feature (1)...(1908): n = a,t,c or g
atggcgggcgtcatccctttaccggcacacgagagcgccaacagacccagcaaggcgctcacgacattactggagcctaaccaggcgctattgcgaataatgcctgaccttatcgttgatagtaaaaagtatcccgccagccttaagttaaacttcggcggtcagaaacgatggcaaccagagaaaccgccttctgtgcctgttccagcacttcgctgggaaggagcagttgaccccaatgaccctaacaaggcaaatacactaagtcagctttcaaagaccgagatttctcttgtcttgacaagcaaatatgacatagaggacggtgaagctatagatagccgaagcctcatgataaatatgtataactcggcgttcctggacgacctgaccaaagcaatgggcagaaaatcctttgacgaagatttaaaagcgctgccggaaaaaggcggttatttgtgcctgtttgacgtcgataaattcaaaaacattaacgacaccttcggtcatttgctgggcgatgaagtgttgactagggnaacgaaaatatggcagccgccatacgccgcgttaattctatgcaatatgatgtctatacccagacggaggtcagtaatggcaaaccatcgaggcggttccggcaattttgcagaagaccgcgaaagagcatcagaagcaggtaaaaaaggtggacagcacagcgggggtaatttcaagaatgacccgcagcgcgcatctgaagcaggcctacgggagcacgaatgtaggccggataaagcgtttacgccgcatccggcagtcatgcgctacataaatttttcaggagcacataatggatcatctacccatgccgaaattcgggccgttggccggattgcgcgttgtcttctccgaaatgggcgcgcggaagttatctggatcgagaacgtcgcctgggccgacaccattcgcgttcaaccgaactacccgcaactctcccgccgcaatttgcacgcgctgtcgttaaatattttcaaagatgaaggccgcgaagcgtttctgaaattaatggaaaccaccgatatcttcatcgaagccagtaaaggtccggcctttgcccgtcgtggcattaccgatgaagtactgtgggaggacaagccgaaactggttatcggtcacctgtccggtttcgcacatcaggtctcccaaatcagcacccatcaaggcagcagtaactgggtgtcaccagaccagctacaatgcaacacacaaacaaattcacccaagcagcttttttcaacacactgcatgcaatgccgacccaattccacaacaaattccaggcagttccaatcaaatcccgtcaatcatgcattaaatcatcaaagcaaaccccatcaccctttggtttatgcacagcacaaagccaaaagagcacacagggcaaaatccatcacagctagcaggaaacaagcaaccactttccaacaggttggtgcaccagcaggtggccacactcacacttcctccagtcatccacaaacaaccaaagcacttgaacaggtcaagcacctcacaactcgtcaagcaatcctcagcaaggcaaaacctcaggcaacatcacccattcctagggacactgggcccttgcgcggcaggcaattccatgcactcaatccctcaacaacagtaattggccaaccagcaaaccaaaggattggacaacatgggcaccctcaattcaaacccaaaacacccttctggccacagccaaaagaaaaagtacccaacaggcagtgcaccagcaagacctacagcaatggggagcaaaatattccacaaacatatgcaatccggacaaaaaacagatctacatatcccagaaatctcaaacagcaacctttaaatccaggcaaggcaaagacctaa

SEQ ID NO: 15780 - DNA, 361 bp, Homo sapiens
  SIMILAR (88)..(1581): 671254mologous to Homo sapiens BCL-6 corepressor,accession number AF317391,Smith-Waterman Score=1639.
caaaccacggggatttctttccagggtaggggaggggccgggcccggggtcccaactcgcactcaagtcttcgctgccatgggggccgtcatgggcaccttctcatctctgcaaaccaaacaaaggcgaccctcgaaagataagattgaagatgagctggagatgaccatggtttgccatcggcccgagggactggagcagctcgaggcccaaaccaacttcaccaagagggagctgcaggtcctttatcgaggcttcaaaaatgagtgccccagtggtgtggtcaacgaagacacattcaagcagatctatgctcagtttttccctcatggaggactttgtaaccgctctgtcgatttta

SEQ ID NO: 15781 - DNA, 450 bp, Homo sapiens; identical to SEQ ID NO: 9183
  SIMILAR (214)..(366): 1001254mologous to Escherichia coli RhsE protein,accession number X60998,Smith-Waterman Score=274.

SEQ ID NO: 15782 - DNA, 1452 bp, Homo sapiens
  SIMILAR (1)..(741): 841254mologous to Homo sapiens putative p150,accession number U93563,Smith-Waterman Score=998.
atgctgctggagcaattaagtcagcataaactggatatgatcatttctgactgtccgatagactctacgcagcaggaaggcctgttctccgtgagaattggcgaatgtggcgtgagtttctggtgtacaaatccaccaccagaaaaaccgttcccggcttgtctggaagaacggcgacttttgattcctgggcgacgttcaatgttagggcgcaaattgcttaactggtttaactcccagggattaaacgtagaaatcctcggcgagtttgatgatgccgctttgatgaaagcttttggtgcgatgcacaatgcaatcttcgttgccccaacgctttatgcatatgacttttatgccgataaaactgtcgtagaaattggtcgcgtcgagaatgtgatggaagagtaccatgctatttttgctgagcggatgattcagcacccggcggtacagcgaatctgcaatacggattattctgcgctttttagtccagcgaaacttcgccgcgccctttatcatccagcgtcaactgaacttcatccagcgtgcgggaaagattttcggcagctatatcgccgaattcaaaaccagattcagcgccatgcgctctggcataaaatcttcgacgtggaaatcccacatccgatactgattatcgcccgtgttagcgcgaatatgccacataccggttgccgcattgctatcgagtggccaggtaaagtggtagaggccattctccggctgactaacgacgctcctgagtacctgcccatcgggtttaatcacaaaagtaagatgaggagcgaaggcatgaacccatatcagcgccagtttatggaattggcgcttagcaaccaggtgttaaagtgtggcgagtttacgctgaatcgcgggcgcaaaagcccctatttcttcaacgccggtctgtttaataccgggcgcgatctggcactgttagcccgtttttacgctgaagcgttggtggattccggcattgagttcgatctgctgttggcccctgcttacaaagggatcccgattgccaccacaaccgctgtggcactggcggagcatcacgacctggacctgccgtactgctttaaccgcaaagaagcaaaagaccacggtgaaggcggcaatctggttggtagcgcgttacaaggacgcgtaatgctggtagatgatgtgatcaccgccggaacggcgattcgcgagtcgatggagattattcaggccaatggcgcgacgcttgctggcgtgttgatttcgctcgatcgtcaggaacgcgggcgcggcgagatttcggcgattcaggaagttgagcgtgattacaactgcaaagtgatctctatcatcaccctgaaagacctgattgcttacctggaagagaagccggaaatggcggaacatctggcggcggttaaggcctatcgcgaagagtttggcgtttaa

SEQ ID NO: 15783 - DNA, 1086 bp, Homo sapiens
  SIMILAR (136)..(813): 971254mologous to Escherichia coli acetohydroxy acid synthase (AHAS) I,accession number J01633,Smith-Waterman Score=1122.
atgatcgtggcgttttgtttatataaatattgtccatttgctgggcttcaacgtgactttatgcgcattgcatcaacagttgccgcacggggccaccatgttcgggtatatacacagtcgtgggaaggcgattgcccgaaagcatttgagcttattcaggtgccagttaagtcccataccaaccatggacgcaatgcagaatattatgcctgggtacaaaatcatctcaaagagcatcccgcagatcgcgttgttgggtttaataagatgcctggcctggatgtttattttgccgctgatgtttgttacgccgagaaagttgcgcaagaaaaaggttttttatatcgtttaacatcacgatatcgccattatgccgcatttgagcgagcgactttcgagcagggtaaatcgacgaaacttatgatgctgaccgataagcaaatcgccgatttccagaagcattatcaaactgaacctgaacgttttcaaattcttcctcccggtatttatccggacagaaaatacagtgagcaaatcccaaacagccgtgaaatttatcgccagaaaaatggcataaaagagcaacaaacttattactgccaggttggatcagattttggccgtaaaggctgttttgccgcgaaggtaccgctggtttccggcgcggcaattcgtatggaaggtcaaatcaccgtctttacttatcaggacggtgaaccgtgctatcgctgccttagccgtttgtttggtgaaaatgcattaacctgcgtggaagcaggcgtaatggcaccgttgatcggcgtaattggttcgttgcaggcaatggaagcgatcaaaatgctggcaggttatggcaaaccggccagcgggaaaatcgtcatgtacgatgcgatgacctgtcagtttcgcgaaatgaaactgatgcgtaatccggggtgtgagcaatttatgaggatgcagaacgtccggttaaatcgacgttctgccaaacgctccctgccagtcctgctcaaacttcgccacagcggcatcaaccgccggatagctaatcatctgttgtgccacatccagtggcagagtaattga

SEQ ID NO: 15784 - DNA, 1062 bp, Homo sapiens
  SIMILAR (972)..(208): 831254mologous to Escherichia coli lipopolysaccharide core biosynthesis protein,accession number M80599,Smith-Waterman Score= 1060.
ctattggtcacagcattttctgtccggataaataccgggaggaagaatttgaaaacgttcaggttcagtttgataatgcttctggaaatcggcgatttgcttatcggtcagcatcataagtttcgtcgatttaccctgctcgaaagtcgctcgctcaaatgcggcataatggcgatatcgtgatgttaaacgatataaaaaacctttttcttgcgcaactttctcggcgtaacaaacatcagcggcaaaataaacatccaggccaggcatcttattaaacccaacaacgcgatctgcgggatgctctttgagatgattttgtacccaggcataatattctgcattgcgtccatggttggtatgggacttaactggcacgtgatccgttgcaccaaatagactaatgactggcgttttcactgccgctgcaatatgtcccggcgcagaatccacaccaataaaaagcactgcatgatcaattaatgcacccagttcaggaaaacgtgttttacctgcaaggccagtaatgggttttgtttcgcaacctcgtgcaatctcatctacacaagcgagatcatctgccgagggcccacaggttagcacaacctgatagcctcgctgttgcagcgcatcgataaccttagaaaatttatcgttatcccaacacttaaatatctgacgcgctgtcggttggatgacaacataatgatcttttacgcccagggcatctaattcccggcgcatcttcttccagcaatcttcggcgtaactcattgttgtgtcggtgtagaaatcggtaatacctaatggctcaaggaccgataaattacgctcaacaatatgtgtaccgtgtattggcgctaagtgtgtgaagctttttttccaaataccatgctgccgatgaccataaagttgcgatattttcatccgtgcaggtaaacaacgtaccagcagcgccaccatccatgcctcccttggctgtgggttgggggctcctctgccccgtgtggctctcaggtgggccaccacaccacactgtgttccctcctcttcgtggatcat

SEQ ID NO: 15785 - DNA, 3066 bp, Homo sapiens
  SIMILAR (3066)..(1825): 951254mologous to Escherichia coli K12 putative thiosulfate sulfur transferase,accession number AE000270,Smith-Waterman Score= 2155.
  misc_feature (1)...(3066): n = a,t,c or g
tcacaccatcccgttcgacttgttgcggttgtacttggccagcagcagctggatcggcgtcgcatttatcaagccgtgcgattcgacgtcggtttccgccatcacaaacaggccgtagatatcacacagttcgtaaaaacgcggatcgttcgggtagtgagcggtacgcacggagttgatattgtgctgcttcatcaactggagatctttctcgacgcgatccattccaacggcgcggcctttgcgatgatcgttgtcgtgacggttgacgccgtgcagcatcacataacggttattgatccagaacagaccgtcgcgcactttgatatcacggaagccaacgcgttgtggcaccacttccagaacgttgccgttggcgtctttcagcgtcatgaccagatggtaaagataaggggattctgctgaccattgctgcggctgttcgacagtaaaagcaaagctggcgctggtcagtttttcaattgccaaatgatcaatggcgctgctgtgcaccacgcgttcgccatcaaacagggtatattccagcgtcgtgacgacaggggaggcggcgagattttccagcaccacttcgcaggaaagcgtggcatcgcaataggcttcgtcaaagtcggtacgcacagtgaaatcgttaatatgcgttaggtgttttccgaccagataaacatcgcggaagatccccgctgaccaccacatatcctggtcttccacgtaggtagagtccgcccagccgtcaaatttaatcagcgtctgtttaccctgccagccgtcgctgagggtgaaaatacgttgataggcaccggttgggttatcgctggggacaaacggcacatcgatggggaacggaaaaccttcgtcggtatattgcagtttgccgtgaccttccatttgccacatggcggggacggtaatatgcccccagtcagccattaactcagaggtgaaggcttctggtacttgcagcggatggtcaaaaaagtggaaattccactgaccgcngcnccngcccagatgttccgccatttccggcttctcttccaggtaagcaatcaggtctttcagggtgatgatagagatcactttgcagttgtaatcacgctcaacttcctgaatcgccgaaatctcgccgcgcccgcgttcctgacgatcgagcgaaatcaacacgccagcaagcgtcgcgccattggcctgaataatctccatcgactcgcgaatcgccgttccggcggtgatcacatcatctaccagcattacgcgtccttgtaacgcgctaccaaccagattgccgccttcaccgtggtcttttgcttctttgcggttaaagcagtacggcaggtccaggtcgtgatgctccgccagtgccacagcggttgtggtggcaatcgggatccctttgtaagcagggccaaacagcagatcgaactcaatgccggaatccaccaacgcttcagcgtaaaaacggcctaacagtgccagatcgcgcccggtattaaacagcccggcgttgaagaaataggggcttttgcgcccggatttcagcgtaaactcgccaaactttaacacctgcttgctaagcgcaaattcaataaactggcgctgatatggtttcatgccttcgctcctcatcttacttttctggttacgggtataagggccagattccaggtacgccgaggccctgctgtgccgctgacttaaccagccaacgcctgggccgaaatgtgggagtatagtgcctggcaaaggcgtatgtacagtatggggtgaacgtccaaggtcgttgttcacccaggtgcaacggaccgttggtgaaacacgaacggttgctaccggattttttggatcgctgctccattcgtaccagccgccgtcatacacggaaacattcttccaacccatggcgcgtgcgtacataaaggtttcggacgcgcgccagccggtgccgcagtagaatgaaacttgctgctctggtttgatattccacgctttccacatagcggtaatatcatcggcgctgcgcatggtgccatccgggttatgaaaatcttccatatgcgtcgagtcgctaccagcgtgtccccaacgtgcgccggctatttcaccttttggtttaatatagctgtaaccgctggtcgtaccgataaattctggccacgaacgaatgctcaccagcgatgcatcctggcgatgcagcagtccacgggcctgttccatatcgagcatcaactgcggttgtgccgggatcttcacgccgaaatccggttccgctttcactttcggtggcgttccgcgctcaacaggcagtcccgcgtcggaccaggtttgccagccgccatccagcaggcgcacatctttcacgccagcataaagcataatctgcgccacacgcgccttggtgtcatgccgaatcccttgttttgccagcatcgcttttagttgttcatcagaaactttgttccacaccggttcactttccacttcgttggtatcgatgtagtcagcgccgggaatatggctgataaggtaaagcttaggagcgccccaggccgcttcaatgactttccagtcaccggcaggtttcgccgtaacctctttaccttgttgcaggtcgtgcagccattgcggataaaccagctgctcaaaatgcggcagtttttgcagacgggaaggttcgcttagcgcgtcactcaggatggagatatgcgttaaacctgctttttgcagtcgcgttttgacggcgtcgacatctttgtcattaccgtacagcgccaccggagcatcggttttcaggttatgttgcttgatccacgcgttgagctgttcggtgctcattttgtcaagccagctggcagagaggtttaaggcggcaagttcatgaccagaagggccatttaaggtttgtggccagccgttataaaacgcgctggggcgagtatctatcgctttgccattttgttgttgaagctggtcaagtgtaagaggcttcgccagttcagcggcccacgaagaagcgcaagccagccctaaagccattgccagcgcggtcat

SEQ ID NO: 15786 - DNA, 765 bp, Homo sapiens; identical to SEQ ID NO: 12778
  SIMILAR (319)..(257): 801254mologous to Homo sapiens Human secreted protein sequence SEQ ID NO:103,accession number Y87064,Smith-Waterman Score =91.

SEQ ID NO: 15787 - DNA, 823 bp, Homo sapiens
  SIMILAR (304)..(615): 1001254mologous to Homo sapiens A-type potassium channel modulatory protein 1,accession number AF199597,Smith-Waterman Score =552.
ggcttcagggcaccgtcctcggccctgggcgagggaaccgccgggccgggtcctcgcgcggggaagcggttccgaaggctcgcggggagcggctagccctgagtccctgcatgtgcggggctgaagaaggaagccagaagcctcctagcctcgcctccacgcttgctgaataccaagctgcaggcgagctgccgggcgcttttctctcctccaattcagagtagacaaaccacggggatttctttccagggtaggggaggggccgggcccggggtcccaactcgcactcaagtcttcgctgccatgggggccgtcatgggcaccttctcatctctgcaaaccaaacaaaggcgaccctcgaaagataagattgaagatgagctggagatgaccatggtttgccatcggcccgagggactggagcagctcgaggcccagaccaacttcaccaagagggagctgcaggtcctttatcgaggcttcaaaaatgagtgccccagtggtgtggtcaacgaagacacattcaagcagatctatgctcagtttttccctcatggagatgccagcacgtatgcccattacctcttcaatgccttcgacaccactcagacagggctccgtgaagttcgaggactttgtaaccgctctgtcgattttattgagaggaactgtccacgagaaactaaggtggacatttaatttgtatgacatcaacaaggacggatacataaaccaagaggagatgatggacattgtcaaagccatctatgacatgatggggaaatacacatatcctgtgctcaaagaggacactccaaggcag

SEQ ID NO: 15788 - DNA, 3109 bp, Homo sapiens
  SIMILAR (856)..(2466): 591254mologous to Homo sapiens putative transcription factor,accession number AJ130894,Smith-Waterman Score=1542.
atggtgaaggatgcttcccagtcccaagcatctctgggccttgatgctttcctgcctgcctcaggagttcaatacacccatgagaggtccccagatagcccactgaagagccaggagtgccccagtggtgtggtcaacgaagacacattcaagcagatctatgctcagtttttccctcatggagggctgatgtcagagaatggcactggaaagaaagcctctgtgtttgggtccaccgggtcaggggcgcttcttctggaggaaggcgagagaaggcgagagcaacctcttattgaaatgcggaaacctccccacgtgctcatcaattaccaggccaaagtaggtggaaatagcatcccatcgccttccctctgcaaaccggcattcccaccccttccttcctgggctgtggacctggcatctgccagacaaaaggaagacgcaagcagaagtttacaaaacaaggaggaagacttctacacctcacagccaggattccctgctctggctctcggctgctgcctcagggtgaatctgttgctaggtcatcgtggcatctctgcagggagctcatacagacccatcacatccaccccctgccacctctgcaagcttggacaggaggtgtttgccaaacctttaaatcttcaggatcaatgtcagcaaaatctggtaatgcaggtcttgaaactggtccttaactgccttaactttgacttcattggcagttcagcagatgaatctgcagatgatctttgcacggtgcagattccaacaacttggagaacaatgggtctggtcggatgtgatggcgtgtgttgtcgaacccgctggtgtcagtgtctcgcgaccgcggtggtctctggtgttggcggtggcccctggttgcttccggcctgttcttctggaccgtcgatgatttccaagagaaagaaatttgtacacaaatgggctaaagacttggtggaacctagacacgggcttgaaaacgtatgggacctgcccagggccatggctggaagctacttgatgtacaagcaaagaaagtggaagataatggaatttgggaaatgggcacttcaacacaagatgacagtgaaagacatagaaaggctacagttgtataacaaagttaaggagcaaccagttcaagttgaaggctctgggagggctagcacgattttttgggtgttgaaaacgtttaaggggggaaaaagcccctgtggtgcccccggcgagtgtgtggcgtggacgcaatgcagaattttaggttgggtacaaattcatttcaaagagcatcccgcagatcgcgttgtgggtttaattaagatgcctggcctggatttttattttgccgctgatgtttgttacgccgagaaagttgcgcaagaaaaaggttttttatatcgtttaacatcacgatatcgccattatgccgcatttgagcgagcgactttcgagcagggtaaatcgacgaaacttatgatgctgaccgataagcaaatcgccgatttccagaagcattatcaaactgaacctgaacgttttcaaattcttcctcccggtatttatccggacagaaaatacagtgagcaaatcccaaacagccgtgaaatttatcgccagaaaaatggcataaaagagcaacaaaacttattactgcaggttggatcagattttggccgtaaaggtgtagatcgctcaattgaagctttggcatcgttaccggaatcattacgtcacaatacgcttttatttgttgttggtcaggataagccgcgaaaatttgaagcgctggcagaaaaactcggcagtgaacgtgcatccatggagttcaagcggtatgaatacaacgccgcaggcgacctgactgccgttatcaccccggacggcaaccggagcgagacacagtacgatgcgtggcggaaaggcggtcagcaccacgcagggcgggctgacgcgcagtatggagtacgatgctgccggacgtgtcatcagcctgaccaacgagaacggcagccacagcgtcttcagttacgatgcgctggaccggctgtgaggatgagggacttgtcatcctctgggtactacgatgaatcggaccgtatcactcaccgcacggtgaacggcgaaccggcagagcagtgccagtatgatggccacggctggctgacagacatcagccacctgagcgaaggccaccgtgttgccgtccacgatggctatgacgataaaggccgcctgaccggcgaatgccagacggtggagaacccggagacgggggaactgctgtggcagcatgagacgaaacacgcatacaacgagcaggggctggcaaaccgcgtcacgccggacagcctgccgccggtggagtggctgacgtatggcagcggttacctggcgggaatgaagctgggcggaacgccgctggtcgagtatacgcgggacaggctgcaccgtgagacggtgcgcagcttcggcagcatggcaggcagtaatgccgcatacgaactgaccagcacatacacccccgcaggccacgttacagagccagcacacttgaacagcctggtgtatgaccgtgactacgggtggaatgacaacggcgacctggtgcgcatcagcggcccgcgacagacgcgggaatacggctacagcgcctacgggcaggctggagagtgtgcgcaccctcgcaccagacctgtacatccgcatcccgtatgccacggacccggcgggcaaccggctgccggacaaggagctgcatcccggactagtacactcacagtgtggccggataaccgcatcgcggaggatgcgcactatgtctaccgccacgatgaatacggcaggctgacggagaagacggaccgcatcccggcgggtgtgatacggacggacgacgagcggacccaccactaccactagcagggatcctgaacgcgggcgcggcgagatttcggcgattcaggaagttgagcgtgattacaactgcaaagtgatctctatcatcaccctgaaagacctgattgcttacctggaagagaagccggaaatggcggaacatctggcggcggttaaggcctatcgcgaagagtttggcgtttaa

SEQ ID NO: 15789 - DNA, 1524 bp, Homo sapiens; identical to SEQ ID NO: 2166
  SIMILAR (232)..(1866): 581254mologous to Homo sapiens putative transcription factor,accession number AJ130894,Smith-Waterman Score=1527.

SEQ ID NO: 15790 - DNA, 1182 bp, Homo sapiens; identical to SEQ ID NO: 7048
  SIMILAR (950)..(1666): 921254mologous to Escherichia coli Fe(III)-pyochelin receptor fptA precursor,accession number D90717,Smith-Waterman Score=1163.

SEQ ID NO: 15791 - DNA, 693 bp, Homo sapiens
  SIMILAR (56)..(427): 591254mologous to Homo sapiens zinc finger protein 42,accession number AF055078,Smith-Waterman Score=342.
atggagaatgactttgacgagctgagagaagaaggcttcagacgatcaaattactctaagctacgggaggacattcaaaccaaaggcaaagaagttgaaaactttgaaaaaaatttagaagaatgtataactagaataaccaatacagagaagtgcttaaaggagctgatggagctgaaaaccaaggctcgagaactacgtgaagaatgcagaagcctcaggagccgatgcgatcaactggaagaaagggtatcagcgatggaagatgaaatgaatgaaatgaagcgagaagggaagagctggttttttgaaaagagcaacaaaattgatagaccactagcacgactaataaagaaaaaaagagagaagaatcaaatagacacaataaaaaatgataaaggggatatcaccaccaatcccacagaaatgcaaactaccatcagagaatactacaaacacctctacacaaataaactagaaaatctagaagaaatggataaattcctcgacacatacactctcccaagactaaaccaggaagaagttgaatctctgaatagaccagtaacaggatctgaaattgtggcaataatcaatagtttaccaaccaaaaagagtccaggaccagatggattcacagccgaattctaccagaggtacaaggaggaactggtaccattccttctgaaatga

SEQ ID NO: 15792 - DNA, 474 bp, Homo sapiens; identical to SEQ ID NO: 12494
  SIMILAR (217)..(5): 361254mologous to Zea mays arabinogalactan protein,accession number AF134579,Smith-Waterman Score=76.

SEQ ID NO: 15793 - DNA, 719 bp, Homo sapiens
  SIMILAR (1)..(579): 981254mologous to Homo sapiens putative p150,accession number U93563,Smith-Waterman Score=977.
atggataaattcctcgacacatacactctcccaagactaaaccaggaagaagttgaatctctgaatagaccaataacaggatctgaaattgtggcaataatcaatagcttaccaaccaaaaagagtccaggaccagatggattcacagctgaattctaccagaggtacaaggaggaactggtaccattccttctgaaactattccaatcaatagaaaaagagggaatcctccctaactcattttatgaggccagcatcattctgataccaaagccaggcagagacacaacaaaaaaagagcattttagaccaatatccttgatgaacattgatgcaaaaatcctcaataaaatactggcaaaacgaatccagcagcacatcaaaaagcttatccaccatgatcaagttggcttcatccctgggatgcaaggctggttcaatatacgcaaatcaataaatgtaatccagcatataaacagagccaaagacaaaaaccacatgattatctcaatagatgcagaaaaagcctttgacaaaattcaacaacccttcatgctaaaaactctcaataaattaggtccctggaaaccggaggcatggcatgctgtgcagggccacacggggaagcaccagggctgtcaggagacagacagagtgaaggggaaacatggacaagagccttcattgtggtttccacaggaagaaattagcaaggcagg

SEQ ID NO: 15794 - DNA, 3552 bp, Homo sapiens; identical to SEQ ID NO: 12501
  SIMILAR (382)..(1734): 941254mologous to Homo sapiens unknown,accession number AF148856,Smith-Waterman Score=2207.

SEQ ID NO: 15795 - DNA, 321 bp, Homo sapiens
  SIMILAR (1)..(183): 951254mologous to Homo sapiens NAG13,accession number AF194537,Smith-Waterman Score=301.
atggataaattcctcgacacatacactctcccaagactaaaccaggaagaagttgaatctctgaatagaccaataacaggagctgaaattgtggcaataatcaatagcttaccaaccaaaaagagtccagcaccagatggattcacagctgaattctaccagagatacaaggaggaactgattcgggttttcagaccacccaactactctggtaccattgctttggccctgttagtgtcgcttgttggaggtttgctttatttgagaaggaacaacttggagttcatctataacaagactggttgggccatggtgtctctg

SEQ ID NO: 15796 - DNA, 362 bp, Homo sapiens
  SIMILAR (1)..(186): 951254mologous to Homo sapiens NAG13,accession number AF194537,Smith-Waterman Score=302.
atggatacattcctggacacatacactctcccaagactaaaccaggaagaagttgaatctctgaatagaccaataacaggagctgaaattgtggcaataatcaatagcttaccaaccaaaaagagtccaggaccagatggatccatagctgaattctaccagaggtacaaggaggaactgtgcccagactccagtggcagccccactactgttcaggggcacgaggttctcaaggtggaggcagggccacaagaggggcagcagaaaggctctgccagtggctggcacaccattacttctgctcatgtttctgtgttcagtgacagtcccatggcaaaccctacagtcagcatagctgggag

SEQ ID NO: 15797 - DNA, 516 bp, Homo sapiens
  SIMILAR (532)..(2244): 941254mologous to Homo sapiens putative p150,accession number U93574,Smith-Waterman Score=2805.
atgtgggaaagtttggaacctcctagagacttgttgagtggctttgacaaaaatgttgatagtgatatgaacaataaggtccggtctggggtggtctcagatggagatgaggaacatgttgggaactggagcaaagaaatacaaactaccatcagagaatactataaacacctctacgcaaataaactagaaaatctagaagaaacggataaattcctcgacacatacactctcccaagactaaaccaggaagaagttgaatctctgaatagaccaataacaggagctgaaattgtggcaataatcaatagcttaccaaccaaaaagagtccaggaccagatggattcacagccgaattctaccagaggtacaaggaggaactgcatataaacagagccaaagacaaaaaccacatgattatctcaatagatgcagaaaaggcctttgacaaaattcaacaacgcttcatgctaaaaactctcaatgaggtattgatgggacgtatctcaaaataa

SEQ ID NO: 15798 - DNA, 1671 bp, Homo sapiens
  SIMILAR (1)..(774): 881254mologous to Homo sapiens putative p150,accession number U93574,Smith-Waterman Score=1177.
atgttaaagggatcaattcaacaagaagagctaactgtcctaaatatatatgcacccaatacaggagcacccagatgcataaagcaagtcctgagtgacgtacaaagagacttagactccaacacattaataatgggagactttaacaccccactgtcaacattagacagatcaacgagacagaaagtcaacaaggatacccaggaattgaactcagctctgcaccaggcggacctaatagacatctacagaactctccaccccaaatcaacagaatatacatttttttcagcaccacaccacacctattccaaaattgaccacatacttggaagtaaagctctcctcagcaaatgtaaaagaacagaaattataacaaactctctctcagaccacagtgcaatcaaactagaactcaggattaagaatctcactcaaaaccgctcaactacatggaaactgaacaacctgctcctgaatgactactgggtacataacgaaatgaaggcagaaataaagatgttctttgaaaccaaggagaacaaagacacaacataccagaatctctgggacgcattcaaagcagtgtgtagagggaaatttatagcactaaatgcctacaagagaaagcaggaaagatcaaaaattgacactctaacatcacaattaaaagaactagaaaagcaagagcaaacacattcaaaagaaatacaaactaccatcagagaatactacaaacacctctacacaaataaactagaaaatctagaagaaatggataaattcctcgacacatacactctcccaagactaaaccaggaagaagttgaatctctgaatagaccaataacaggatctgaaattgtggcaataatcaatagcttaccaaccaaaaagagtccaggaccagatggattcacagctgaattctaccagaggtacaaggaggaaatgcatataaacagagccaaagacaaaaaccacatgattatctcaatagatgcagaaaaggcctttgacaaaattcaacaacccttcatgctaaaaactctcaataaattaggtattgatgggacatatttcaaaataataagagctatctatgacaaacccacagtcaatatcatactgaatgggcaaaaactggaagcattccctttgaaaactggcacaagacagggatgccctctctcaccactcctattcaacatagtgttggaagttctggccagagcaataaggcaggagaaggaaataaagggtattcaattaggaaaagaggaagtcaaattgtccctgtttgcagatgacatgattgtatatctagaaaaccccattgtctcagcccaaaatctccttaagctgataagcaacttcagcaaagtctcaggatacaaaatcaatgtgcaaaaatcacaagcattcctatacaccaacaacagacaaacagagagccaaatcatgagtgaactcccattcacaattgcttcaaagagaataaaatacctaggtatccaatttacaagggatgtgaaggacctcttcaaggagaactacaaacctgctcaaggaaataaaagaggatacaaacaaatggaagaacattccatgctcatgggtaggaagaatcaatatcgtgaaaatggccatactgcccaaggtaatttatag

SEQ ID NO: 15799 - DNA, 1593 bp, Homo sapiens; identical to SEQ ID NO: 7846
  SIMILAR (1075)..(2628): 761254mologous to Homo sapiens putative p150,accession number U93563,Smith-Waterman Score=1976.

SEQ ID NO: 15800 - DNA, 1177 bp, Homo sapiens
  SIMILAR (1)..(786): 941254mologous to Homo sapiens unknown,accession number AF148856,Smith-Waterman Score=1254.
atggtaaagggatcaattcaacaagaagagctaactatcctaaatatatatgcactcaatacaggagcacccagattcataaagcaagtcctgagcgacctacagagagacttagactcccacacattaataatgggagactttaacaccccactgtcaacattagacagatcaatgagacagaaagtcaacaaggatacccaggaattgaactcagctctgcaccaagcggacctaatagacatctacggaactctccacccccaatcaacagaatatacatttttttcagcaccataccacacctattccaaaattgaccacatacttggaagtaaagctctcctcagcaaatgtaaaagaagagaaattataataaactatctctcagaccacagtgcaatcaaactagaactcaggattaagaatctcactcaaaacctctcaactacatggaaactgaacaacctgctcctgaatgactacttggtacataacgaaatgaaggcagaaataaagatgttctttgaaaccaacgagaacaaagacacaacataccagaatctctgggacacattcaaagcagtgtgtggagggaaatttatagcactaaatgcccacaagagaaagcaggaaagatccaaaattgacaccctaacatcacaattaaaagaactagaaaagcaagagcaaacacattcaaaagctagcagaaggcaagaaataactaaaatcagagcagaactgaaggaaatagagacacaaaaaacccttcaaaaaatgaatccaggagctgaaatacaaactaccatcagagaatactacaaacacctctacacaaataaactagaaaatctagaagaaatggataaattcctcgacacatacactctcccaagactaaaccaggaagaagttgaatctctgaatagaccaataacaggatctgaaattgtggcaataatcaatagcttaccaaccaaaaagagtccaggaccagatggattcacagccgaattctaccagaggtacaaggaggaactggcacagcaatctttacaagtcagagctgtgcatgaggacactcactgcagcagcagcagcaacttggattcactacctttgttaggttttgctcagtctgaaagcaagataagtggccttggctacagtcagg

SEQ ID NO: 15801 - DNA, 3666 bp, Homo sapiens; identical to SEQ ID NO: 2174
  SIMILAR (712)..(3510): 981254mologous to Homo sapiens putative p150,accession number U93563,Smith-Waterman Score=4809.

SEQ ID NO: 15802 - DNA, 1998 bp, Homo sapiens
  SIMILAR (170)..(2206): 931254mologous to Homo sapiens putative p150,accession number U93563,Smith-Waterman Score=3330.
atgaaggcagaaataaagatgttctttgaaaccaacgagaacaaagacacaacataccagaatctctgggacacattcaaagcagtgtgtagagggaaatttatagcactaaatgcccacaacagaaagcaggaaagatccaaaattgacaccctaacatcacaattaaaagaactagaaaagcaagagcaaacatattcaaaagctagcagaaggcaagaaataactaaaatcagagcagaactgaaggaaatagagacacaaaaaacccttcaaaaaattaatgaatccaggagctggttttttgaaaggatcaacaaaattgatagaccactagcaagactaataaagaaaaaaagacaaaagaatcaaatggacacaataaaaaatgataaaggggatatcaccaccgatcccacagaaatacaaactaccgtcagagaatactacaaacacctctatacaaataaactagaaaatctagaagaaatggataaattcctcgacacatacactctcccaagactaaaccaggaagaagttgaatctctgaatagaccaataacaggagctgaaattgtggcaataatcaatagcttaccaaccaaaaagagtccaggaccagatggattcacagccgaattctaccagaggtacaaggaggaactgcctggcagagacacaaccaaagaagagaattttagaccaatatccttgatgaacattgatgcaaaaatcctcaataaaatactggcaaaccaaatccagcagcacatcaaaaagattatccaccatgatcaagtgggcttcatccctgggatgcaaggctggttcaatatacgcaaatcaataaatgtaatccagcatataaacagagccaaagacaaaaaccacatgattatgtcaatagatgcagaaaaggcctttgacaaaattcaacaacccttcatgctaaaaactctcaataaattaggaataaaatacctaggaatccaacttacaagggatgtgaaggacctcttcaaggagaactacaaaccactgctcaaggaaataaaagaggatacaaacaaatggaataacattccatgctcatgggtaggaagaatcaatatcgtgaaaacggccatactgcccaaggtaatttatagattcaatgccatccccatcaagctaccaatgcctttcttcacagaattggaaaaaactactttaaagttcatatggaaccaaaaaagagcctgcatcaccaactcaatcctaagccaaaagaacaaagctggaggcatcacactacctgacttcaaactatactacaaggctacagtaaccaaaacagcatggtactggtaccaaaacagaaatatagatcaatggaacagaacagagccctcagaaataacgccgcatatctacaactatgtgatctttgacaaacctgacaaaaacaagaaatggggaaaggattccctatttaataaatggtgctgggaaaactggctagccatatgtagaaagctgaaactagatcccttccttacaccttatacaaaaatcaattcaagatggattaaagacttaaacgttagacctaaaaccataaaaaccctagaagaaaacccaggcagtaccattcaggacataggcatgggcaaggacttcatgtctaaaacaccaaaagcaatggcaacaaaagacaaaattgacaaatgggatctaattaaactaaagagcttctgtacagcaaaagaaactaccatcagagtgaacaggcaacctacagaatgggagaaaatttttgcaacctactcatctgacaaagggctaataatatccagaacctacaatgaactcaaacaaatttacaagaaagaaacaaacaactccatcaaaaagtgggtgaaggatatgaacagacacttctcaaaagaagacatttatgcagccaaaaaacacatgaaaaatttctcatcatcactggccatcagagaaatgtaa

SEQ ID NO: 15803 - DNA, 4194 bp, Homo sapiens
  SIMILAR (1039)..(2142): 961254mologous to Homo sapiens putative p150,accession number U93565,Smith-Waterman Score=1916.
atggtaaagggatcaattcaacaagaagagctaactatcctaaatacatatgcagcccatacaggagcaccaagactcataaagcaagtcctgagtgacctacaaagagacttagactcccacacaataataatgggagactttaacaccccactgtcaacattagacagatcaacgagacagaaagttaacaaggatacccaggaattgaagtcagctctgcaccaagcggacctaacagacatctacagaactctccaccacaaatcaacagaatatacatttttttcagcaccacaccacatctattccaaaattgaccacatactgggaagtaaagctctcctcagcaaatgtaaaagaacagaaattataacaaactatctctcagaccacagtgcaatcaaactagaactctggattaagaatctcactcaaaaccactcaactacatgggaactgaacaacctgctcctgaatgactactgggtacataacgaaatgaaggcagaaataaagatgttctttgaaaccaatgagaacaaagacacaacataccataatctctgggacacattcaaagcagtgtgtagagggaaatttataccactaaatgcccacaagagaaagcaggaaagatccaaaattgacaccctaacatcacaattaaaagaactagaaaagcaagagcaaacacattcaaaagctagcagaaggcaagaaataactaaaatcagagcagaactgaaggaaatagagacacaaaaaacccttcaaaaaattaatgaatccaggagctggttttttgaaaggatcaacaaaattgatagactgctagcaagactaataaagaaaaaaagagagaagaatcaaatagatgcaataaaaaatgataaaggagatatcaccaccgatcccacagaaatacaaactaccatcagagaatactgcaaacacctctatgcaaataaactagaaaatctagaagaaatggataaattcctggacacatacactctcccaagactaaaccaggaagaagttgaatctctgaatagaccaataacaggagctgaaattgtggcaataatcaatagcttaccaaccaaaaagagtccaggaccagatggattcacagccaaattctaccagaggtacaaggaggaactggtaccattccttctgaaactattccaatcaatagaaaaagagggaatcctccctaactcattttatgaggccagcatcattctgataccaaagccaggaagagacacaacaaaaaaagagaattttagaccaatatccttgatgaacattgatgcaaaaatcctcaataaaaaactggcaaaacgaatccagcaacacatcaaaaagcttatccaccatgatcaagtgggcttcatccctggaatgcaaggctggttcaatatacgcaaatcaataaatgtaatccagcatataaacagagccaaagacaaaaaccatatgattatctcaatagatgcagaaaaagcctttgacaaaattcaacaacccttcatgctaaaaactctcaataaattagagaataaaatacctaggaatccaccttacaagggatgtgaaggacctcttcaaggagaactacaaaccactgctcaaggaaataaaagaggatacaaacaaatggaagaacattccatgctcatgggtaggaagaatcaatatcgtgaaaatggccatactgcccaagaattggaaaaaactactttaaagttcatatggaaccaaaaaagagcccgcatcgccaagtcaatcctaagccaaaagaacaaagctggaggcatcacactacctgacttcaaactatactacaaggctacagtaaccaaaacagcatgccttatagactgctttttgttggactcggctcctctcaatgtttctatgtctcctactggagactttctggcaacttcccatgtggaccaccttggaatttatctatggtccaatatttccctgtattcagttgtttcattacggccacttcctgcagattatgtcccttcaatagtcatgcttcctggtacttgtcaaacccaagatgtagaagtatcagaagaaacagtagaaccaagtgatgaattgatagaatatgattcgccagaacagttgaatgagcaattggtgactctttcacttcttcctgaatcacgatggaaaaaccttcttaaccttgatgttattaagatagtacatacctttaagggtcataaggcagaaatccatttcttgcaaccctttggagaccacattatctctgttgatactgatggcattcttattatttggcacatatattcagaagaagaatacctgcagttgacttttgataaatcagtatttaaaatttctgcaattttgcatccaagtacctacttgaataaaatacttctgggcagtgaacaaggaagcctgcagttgtggaatgtaaaatccaaccagaaatacccaatcaggcagacatttatccctgcgggctatttgttgggtgcacatgggttgaagactcaggcaccagccgtggatgttgttgctattggtcttatgtcaggtcaagttatcattcacaacattaaatttaatgaaacattaatgaagtttcgtcaagactggggacccattacttcaatttcatttcgcacagatggtcatccagtaatggcagctggaagcccatgtggccatattggactctgggatctagaagacaaaaaattaatcaaccaaatgagaaatgcacactctacagcaattgccggactgacatttctccatagagagccacttcttgtcacaaatggcgctgacaatgctcttaggatatggatatttgatggtcctacaggtgaaggccgacttttgagattcagaatgggtcatagtgctcctcttaccaatatcagatattatggacagaatggacagcagattctaagtgcaagattaataaataaaaagagagttaaacgtaaaggacttcagaataccatgtcagtgagacttccacccatcacaaagtttgcagcagaggaagctcgtgaaagtgactgggatggtatcattgcttgccatcaaggtaagctatcttgctcaacctggaattatcagaaatctacaataggcgcttactttctcaagccaaaagagttgaagaaagatgacataactgcaacaatgaggaaagataggaccaagaaggtcacacaattaaatgattataatcaagtcataactggattaaaatttaatgcagatgacactgctctcaaccttctgaaagaatcaggcccatcaggaattgaaacagagctgcgaagcttgtctcctgattgtggtgggtccatagaagttatgcagagcttcttgaaaatgattgggatgatgctggacagaaagcgtgattttgagttagcccaggcataccttgcattgtttctaaagctggtgaaggattcttctgaacccctaccctacctcctcaagctatctttgatattggcaggatggggaatacacattacagaagtgcaggatttgactctgggcatgaaagatggcagcagccctagggtgaccacaagctatacacctcatggtctttttggtgaaagaagggacaagttgaccctttgcccattttcttatggacctcacccatcacaccagcaaggtcataggaccctggccttgttccagatcatctgggacatgtcccactccccactttcactgtgtagaaaacagagacttgtttgcgtggccccaatacccataaggaaaccaggctttaggcccaggggagcagtggaggttcagaaacttagtctggttgcagtaagtaattctgttccacaggatatctgctgtatggcagctgatggcagattagtctttgctgcttatggaaatgttttctctgcatttgcccgtaataaagagaaaaagaataaaccaaaggaaccacccaaagtacccaaatcagcaccatttttcattccaacaattcctggccttgtacccagatatgctgcacctgaacaaaataatgatccccagcagatcagtggcagcatcagattctcagattctcgtaggagcataaaccctattgtgcactgtgcatttgaggttgtgcactccttatga

SEQ ID NO: 15804 - DNA, 1659 bp, Homo sapiens; identical to SEQ ID NO: 5397
  SIMILAR (790)..(1599): 981254mologous to Homo sapiens putative p150,accession number U93574,Smith-Waterman Score=1361.

SEQ ID NO: 15805 - DNA, 1743 bp, Homo sapiens
  SIMILAR (414)..(2981): 981254mologous to Homo sapiens putative p150,accession number U93563,Smith-Waterman Score=4383.
atgaaatctgcccaataccggaagtggtgctggcagcgccagaagatttggtcgactctgcgcagcggcttagcgaggtatgtcagtggctggcggaagctgcaccgacgtaaaaagacgagtttcaggataaagagggagatctaccattatcgggttatttttctctcttcgcctacaggagtgcgcatgtgggatgtcattgatttatcgcgctggcagtttgctctgaccgcgctgtatcactttttatttgtaccccttaccctggggctgatttttttgctggctattatggaaaccatttacgtggtcaccggcaaaacaatctaccgcgatatgacgcgcttctggggtaagctcttcggtatcaattttgctcttggcgtggctaccggcctgaccatggagtttcagtttggtactaactggtcattctattccaactatgtgggcgatatttttggcgcaccgctggcgatggaagcatgtggtattgaaatcgtcatgtgcggtttggatgtcaccaatcaggcaatattaactcctgactatctctctacactgccgcagttaaaccgtaccgggaaaatgcttcacgccctgtttagccactaccgtagcggcagtatgcaaagcggcttgcgaatgcacgatctctgcgccatcgcctggctggtgcgcccggacctgttcactctcaaaccctgttttgtggcagtggaaactcagggcgaatttacctcaggcacgacggtggttgatatcgacggttgcctgggcaagccagccaatgtacaggtggcattggatctggatgtgaaaggcttccagcagtgggtggctgagagaatagctatgcatgatgcaaacatccgcgttgccatcgcgggagccggggggcgtatgggccgccagttgattcaggcggcgctggcattagagggcgtgcagttgggcgctgcgctggagcgtgaaggatcttctttactgggcagcgacgccggtgagctggccggagccgggaaaacaggcgttaccgtgcaaagcagcctcgatgcggtaaaagatgattttgatgtgtttatcgattttacccgtccggaaggtacgctgaaccatctcgctttttgtcgccagcatggcaaagggatggtgatcggcactacggggtttgacgaagccggtaaacaagcaattcgtgacgccgctgccgatattgcgattgtctttgctgccaattttagcgttggcgttaacgtcatgcttaagctgctggagaaagcagccaaagtgatgggtgactacaccgatatcgaaattattgaagcacatcatagacataaggcactgggaatacaatgcgcaggttacagctactggcattcgcatcaggttgccgctgacgacaaagcgcagcaacgcgtcgtgccctcaccggtcttctacgcgctggataccttcacggtcaatttgggcgatgcggatcgcgtactttatatcggcataaccctgcgcctgaaagatgaagctacccgctcgcggctgagtgagtatttgccggaagtccgtagtcgcttgctgttactgttttcgcgtcaggatgctgccgtactggcgacagaagaaggcaagaaaaacctgattgccgagattaaaaccacactttccaccccgcttgttgccgggcaaccgaaacaggatgtcaccgacgtgctgtataccgcttttattctgcgataa

SEQ ID NO: 15806 - DNA, 2779 bp, Homo sapiens
  SIMILAR (181)..(1293): 931254mologous to Homo sapiens putative p150,accession number U93572,Smith-Waterman Score=1873.
atggataaattcctggacacatacactctcccaagactaaaccaggaagaagttgaatctctgaatagaccaataacaggagctgaaattgtggcaataatcaatagcttaccaaccaaaaagagtccaggaccagatggattcacagctgaattctaccagaggtacaaggaggagctgatagggtggcttagagaaagtgtgtcaaaaatatgtctaaaatttgatcaccaggttcaggtgatcactggccgcctgataatccgcttccagatcgccttcggcaccgttgtgctctgccagctcacgcgccatatcgacgtgtttgtaggcaagcggcttgcgaatgcacgatttgcgccatcgctgggtggtgcgcccgacctgttcactctcaaaccatgttttgtggcagtggaaactcagggcgatttacctcaagccacgacggtggttgatatcgacggttgcctgggcaagccagccaatgtacaggtggcattggatctggatgtgaaaggcttccagcagtgggtggctgagagaatagctatgcatgatgcaaacatccgcgttgccatcgcgggagccggggggcgtatgggccgccagttgattcaggcggcgctggcattagagggcgtgcagttgggcgctgcgctggagcgtgaaggatcttctttactgggcagcgacgccggtgagctggccggagccgggaaaacaggcgttaccgtgcaaagcagcctcgatgcggtaaaagatgattttgatgtgtttatcgattttacccgtccggaaggtacgctgaaccatcttctgccccgaattacacttaaaacgactcaacagcttaacgttggcttgccacgcattacttgactgtaaaactctcactcttaccgaacttggccgtaacctgccaaccaaagcgagaacaaaacataacatcaaacgaatcgaccgattgttaggtaatcgtcacctccacaaagagcgactcgctgtataccgttggcatgctagctttatctgttcgggcaatacgatgcccattgtacttgttgactggtctgatatccgtgagcaaaaacggcttatggtattgcgagcttcagtcgcactacacggtcgttctgttactctttatgagaaagcgttcccgctttcagagcaatgttcaaagaaagctcatgaccaatttctagccgaccttgcgagcattctaccgagtaacaccacaccgctcattgtcagtgatgctggctttaaagtgccatggtataaatccgttgagaagctgggttggtactggttaagtcgagtaagaggaaaagtacaatatgcagacctaggagcggaaaactggaaacctatcagcaacttacatgatatgtcatctagtcactcaaagactttaggctataagaggctgactaaaagcaatccaatctcatgccaaattctattgtataaatctcgctctaaaggccgaaaaaatcagcgctcgacacggactcattgtcaccacccgtcacctaaaatctactcagcgtcggcaaaggagccatggattctagcaactaacttacctgttgaaattcgaacacccaaacaacttgttaatatctattcgaagcgaatgcagattgaagaaaccttccgagacttgaaaagtcctgcctacggactaggcctacgccatagccgaacgagcagctcagagcgttttgatatcatgctgctaatcgccctgatgcttcaactaacatgttggcttgcgggcgttcatgctcagaaacaaggttgggacaagcacttccaggctaacacagtcagaaatcgaaacgtactctcaacagttcgcttaggcatggaagttttgcggcattctggctacacaataacaagggaagacttactcgtggctgcaaccctactagctcaaaatttattcacacatggttacgctttggggaaattatgaggggatctctcagcacataatatacttgctgtcagaagtccattttacacagataacatgttgcattctctttgtatgatatacctccctgcttcgacttttgtctacaggaaagattcgaatagatttaccgaaactagcagacacaaactccttcccagtgggagagtaatccacatcaagcactgcagatacatgatccatatggaccattacaggagtgtccagtgcacgcatatcaaaagtatataagttattatcttcatttgctgctgtaaaaatgaaagcttccatagggttccaacagattgtatttgttctcatatctaagataacctttttcaaaggagtagcttgcctcatatcgtacagtactatattcctgtcagatgcacaacttcccaagagaaatgtctcaattgggttaaatttaacactacttatactgtcaaatccccaggtcattgaacatataggattagttctttgttcatcccaaatgtctacttgctgtccacatgtggcaaaaacagcttctttccagtgatgatcaatcccagtatacactgtctttcctaatattgtatgtaatggctcttcctcgtctccatagcctggcccatccattttccactgcttcacagttttgtcatcaccaacctctctgtaagtccaacttggtttcgcggacataattgtccggattccggctcagcatcttcaccttcatctcggttgctcttccggccggactccacgaggtgtccgctaggagttccgcccaccgccacc

SEQ ID NO: 15807 - DNA, 2779 bp, Homo sapiens
  SIMILAR (2138)..(2776): 961254mologous to Homo sapiens putative p150,accession number U93572,Smith-Waterman Score=1087.
atggggaaaaagcagaacagaaaaactggaaactctaaaaagcagagcacctctcctcctccaaaggaacgcagttcctcaccagcaatggaacaaagctggatggagaatgactttgttgagctgagagaagaaggcttcagacgatcaaattactctgagctacaggaggacattcaaaccaaaggcaaagaagttgaaaactttgaaaaaaatttagaagaatgtatgactagaataaccaatacagagaagtgcttaaaggagctgatggagctgaaaaccaaggctcgagaactacatgaagaatgtagaagcctcaggagccgatgcgatcaactggaagaaagggtatcagcaatggaagatgaaatgaatgaaatgaagcgagaagggaagtttagagaaaaaagaataaaaagaaatgagcaaagcctccaagaaatatgggactatgtgaaaagaccaaatctacatctgatgggtgtacctgaaagtgatggggagaatggaagcaagttggaaaacacgctgcaggatattatccaggagaacttccccaatctagcaagtactctctcagaccacagtggaataaaactggaaatcaactccaaaaggaaccctcaaaaccatgcgaatacatggaaattaagtaacctgctcctgaatgcacactgggtcaacaatgaaatcaagatgaaagttaaaaatttctttgaattgaacgataatagtgacacaatctatcaaaatttctcggatacagcaaaagcggtgctagaagaaaagttcctaggactaaatgcctacaccaaaaaacctgaaagagcacagatagagaaagagagaatcctccctaaatcattctatgaagccagtatcaccctaatacccaaaccacgcaaggacataacaaaaaaagaaaactacaaaccaatatccctgatgaacatagaggcaaaaatcctcaacaaaataatagttaaccaaatccaacagcatatcaaaaagataatccaccatgataaactgagtttcataccagggatgcaggggtggtttaatatatgtaagccagtaaatgtgattctccacataaacataattaaaaacaaaaatcatatgatcatctcaatagacacagaaaaagcatttggcaaaatgcagcatccctttatgattaaaaccttcagcaaaattggcacagaagggacataccttaaggtaatagaagccatctatgatagacccacagccaacattatactgaatggggaaaacttgaaagcactccccctgagaactagaccaagacaaggatgcccactttcaccacttttattcaacttagtactggcagtcctagccagagcaatcagacaagagaaagaaataaagggcatccaagtcagtaaagaggaagttaaactgtctctgtttgctgatgatatgattgtatacctagaaaaccctaaagcctcatccaaaaagcttccagaactaaacaaagacacaatataccagaatctctgggatgcattcaaagcagtatgtagagggaaatttacagcactaaatgcccacaagagaaagcaggaaagatccaaaattgacaccctaacatcacaattaaaagaactagaaaagcaagagcaaacacattcaaaagctatcagaagacaagaaataactaaaatcagagcagaactgaaggaaatagagacacaaaaaacccttcaaaaaattaatgaatccaggagctggttttttgaaaggatcaacaaaattgatagaccgctagcaagactaataaagaagaaaagagagaagaatcaaatagacacaataaaaaatgataaaggggatatcaccaccaatcccacagaaatacaaaccaccatcaggagaatactacaaacacctctacgcaaataaactagaaaatctagaagaaatggataaattcctcgacacatacactctcccaagactaaaccaggaagaagttgaatctctgaatagaccaataacaggctctgaaattgtggcaataatcaatagtttaccaaccaaaaagagtccaggaccagatggattcacagccgaattctaccagaggtacaaggaggaactgctgataagcaacttcagcaaagtctcagcatacaaaatcaatgtacaaaaatcacaagcattcttatacaccaacaacagacaaacagagagccaaatcatgagtgaactcccattcacaattgcttcaaagagaataaaatacctaggaatccaacttacaagggatgtgaaggacttcttccaggagaattacaaaccactgctcaaggaaataaaagaggatacaaacaaacggaagaacattccatgctcatgggtaggaagaatcaatatcgtgaaaatggccatactgcccaaggtaatttttagattcaatgccatccccatcaagctaccaatgcctttcttcacagaattggaaaaaactactttaaagttcatatggaaccaaaaaagagcccgcatcgccaagtcaatcctaagccaaaagaacaaagctggaggcatcacactacctgacttcaaactatactacaaggctacagtaaccaaaacagcatggtactggtaccaaaacagggatatagatcaatggaacagaacagagccctcagaaataatgccgcatatctacaactatctgatctttgacaaacctgagaaaaacaagcaatggggaaaggattccctttttaattaa

SEQ ID NO: 15808 - DNA, 4969 bp, Homo sapiens
  SIMILAR (3)..(1511): 951254mologous to Homo sapiens putative p150,accession number U93572,Smith-Waterman Score=2486.
atggctactctgatccccctactgtttcacaagcatcctcatctcacacaaagatatcaattcaacgtcagaggtggctgcccgacgagcaccagtgccattgctactctggatcctagaactgcagtgtttccactcatgtctgtttttcagacctcagctccatggccattttggggtttcactcatcagacaccagtgccacagccactgaaagtgaaaatccacagttctgcagacaccgctgctgatatccaggcaaacagggtctggagtggacctccagcaaactccaagagacctgcagctgaggaaggaaaactaacaaacagaaaggacatccacaccaaaaacccatctgtacgtcaccatcatcaaagaccaaaagtagataaaaccacaaagacggggaaaaaacagaggagaaaaactggaaactctaaaaagcagagcgcctgtcctcctccaaaggaacgcagttcctcaacagcaacggaacaaagctggacggagaatgactttgacaagttgagagaagaagtcttcagacaatcaaactactccgagctacaggaggaaattcaaaccaatggcaaagaagttaaaaactttgaaaaaaaattagatgaatgtataactagaataaccaatgcagagaagtgcttaatggagctgatggagctgaaagccaaggctcgagaactacgtgaagaatgcaaaagcctcaggagccaatgcaatcaactggaagaaagggatcaacaaaattgatagaccactagcaagactaataaagagaaaaagagagaagaatcaaatagacgcaataaaaattgataaaggggatatcaccaccgatcccacagaaatacaaactaccatcagagaatactacaaacacctctatgcaaataaactagaaaatctagaagaaatggataaattcctcgacacatacactctcccaagactaaaccaggaagaagttgaatctctgaatagaccaataacaggagctgaaattgtggcaataatcaatagcttaccaaccaaaaagagtccaggaccagatggattcacagctgaattctaccagaggtacaaggaggaactggtaccattccttctgaaactattccaatcaatagaaaaagagggaatcctccctaactcattttatgaggccagcatcatcctgataccaaagctgggcagagacacaaccaaaaaagagaattttagaccaatatccttgaggaacattgatgcaaaaatcctcaataaaatactggcaaaccgaatccagcagcacatcaaaaagcttatccatcatgatcgagtgggcttcatccctgggatgcaaggctggttcaacatacgcaaatcaataaatgtaatccagcatataaacagaaccaaagacaaaaaccacatgattatctcaatagatgcagaaaaggcctttgacaacattcaacaacccttcatgctaaaaactctcaataaattaggaatggatgggacatatctcaaaataagaagagctatctatgacaaacccacagccaatatcatactgaatgggcaaaaactggaagcattccctttgataactggcacaagacagggatgccctctctcaccactgctatacaacatagtgttggaagttctggccagggcaattaggcagaagaaggaaataaagggtattcaattaggaaaagaggaagtcaaattgtccctgtttgcagacgacatgactgtatatctagaaaaccccatcatatcagcccaaaatctccttcagctgataagcaacttcagcaaagtctcaggatataaaatcaatgtacaaaaatcacaagcattcttatacaccaataacagacaaacagagagccaaatcaagagggaactcccattcacaattgcttcaaagagaataaaatacttaggaatccaacttacaagggatgtgaaggacctcttcaaggaaaactacaaaccactgctcaatgaaataaaagaggatacaaacaaatggaagaacattccatgctcatgggtaggaagaatcaatattgtgaaaatggccatactgcccaaggtaatttatagattcaatgccatccccatcaagctaccaatgactttcttcacagaattggaaaaaactactttaacgctcatatggaaccaaaaaagagcccacatcgtcaagtcaatcctaagccaaaagaacaaagctggaggcatcacgctaccagacttcaaactatactacaaggctacagtaaccaaaacagcatggtactggtaccaaaacagagatatagatcagtggaacagaacagagccctcagaaataatgccacatatctacaactatctgatctttgacaaacctgagaaaaacgagcaatggggaaaagattccctatttaataaatggtgctgggaaaactggctagccatatgtagaaagctcaaactggatcccttccttacaccttatacaaaaattaattcaagatggattaaaggcttaaatgttagacctgaaaccataaaaaccctagaagaaaacctaggcattaccattcaggacataggcatgggcaaggacttcatgtctaaaacaccaaaaacaatggcaacaaaagccaaaattgacagatgggatctcattaaactaaagaacttctgcacagcaaaagaaactaccatcagagtgaacaggcaaactacaaaatgggagaaaattttcacaacctactcatctgaaaaagggctaatatccagaatctacaatgaactcaaacaaatttacaagaagaaacaaacaaccccaacaaaaagaggtattccaaaagaaagcattattgtaataggagatgacagctccatgcatgttaatgcccctgaaggccttccagtgggacaagatttggaggttgaagatggtgatattgattatcctgattctgatggcagctcctcaccagctatggaacaaagctggacagagaaggactttgatgaattgacagaagtaggcttcagaagaataaacagtgtggagaagatgttaaatgacctgatggagctgaaaaccatggcacaagaactttgtgacacatgcacaagtttcagtagcagatttgatcaagtggaagaaaggatatcagtgattgaatatcaaattaatgaaataaagcaagaggaggagtttagagaaaaaagagtaaagagagacaaacaaagcctccaagaaatatgggacaatgtgaaaagaccaaatctatgtttgattggtatacctgaaagtgatggggagaatggaaccaagttggaaaacacttttcaggatattatccaggagaacttccccaacctagcaaggcaggccaacattcaaattcaggaaatacagaaaataccacaaagatactccttgagaagagcaaccccaagacacataattgtcagattcactaaggttgaaatgaaggaaaaaatgttaaaagcagccagagagaaagcactaaatgcccacaagagaaagcaggaaagatccaaaattgacaccctaacatcacaattaaaagaactagaaaagcaagagcaaacacattcaaaagctagcagaaggcaagaaataactaaaatcagagcagaactgaaggaaatagagacacaaaaaacccttcaaaacattaatgaatccaggagctggttttttgaaagaatcaacaaaattgatagaccgctagcaagactaataaagaaaaaaagagagaatcaaatagacgcaataaaaaatgataaaggggatatcaccaccgatcccacagaaatacaaactaccatcagagaatactacaagcacctctacgcaattaaactagaaaatctagaagaaatggataaattcctcgacacatacactctcccaagactaaaccaggaagaagttgaatctctgaatagaccaataacaggagctgaaattgtggcaataatcaatagcttaccaaccaaaaagagtccaggaccagatggattcacagccgaattctaccagaggtacaaggatgaactgataccattccttctgaaactattccaatcaatagaaaaagagggaatcctccctaactcattttatgaggccagcatcatcctgataccaaagccgggcagagacacaaccaaaaaagagaattttagaccaatatccctgatgaacatcgatgcaaaaatcctcaataaaatactggcaaacggaatccagcagcacatcaaaaagcttatccaccatgatcaactgataagcaacttcaacaaagtctcaggatacaaaatcaatgtacaaaaatcacaagcattcttatacaccaataacagacaaacagagagccaaatcatgagtgaactcccattcgcaattgcttcaaagagaataaaatacctaggaatccaccttacaagggacgtgaaggacctcttcaaggagaactacaaaccactgcttaaggaaataaaagaggatacaaacaaatggaagaacattccatgctcatgggtaggaagaatcaatatcgtgaaaatggccacactgcccaagatttttaacaaaatggcacggaaaggggcttccaagccagaaagccttggcacatcaggtgagcctttgacacactgcctgagcagcctacgggctgtcccatctggaactggtgctagagttagggaagcttcaggaagagaccgtgggatctacgcagctgttctgtttttccttcctgagagtgtaaagggattcagggtctctgctcttcacgacgtcatccatagagagtctctctcatatacatctaaggtgatcttcaaaataacccacgaaccagggatcatttacaaacgggaaattgggaagaaaactaacatttacagagttaaataa

SEQ ID NO: 15809 - DNA, 2047 bp, Homo sapiens; identical to SEQ ID NO: 10238
  SIMILAR (730)..(1857): 941254mologous to Homo sapiens putative p150,accession number U93563,Smith-Waterman Score=1884.

SEQ ID NO: 15810 - DNA, 3288 bp, Homo sapiens; identical to SEQ ID NO: 9136
  SIMILAR (4152)..(2752): 1001254mologous to Homo sapiens IDN3,accession number AB019494,Smith-Waterman Score=2401.

SEQ ID NO: 15811 - DNA, 3684 bp, Homo sapiens
  SIMILAR (1039)..(2145): 951254mologous to Homo sapiens putative p150,accession number U93572,Smith-Waterman Score=1800.
atgggagactttaacaccccactgtcaacattagacagatcaacgagacagaaagtcaacaaggatacccaagaattgaactcagctctgcaccaggtggacctaatagacatctacagaactctccaccccaaatcaacagaatatacatttttttcagcaccacaccacacctattccaaaattgaccacatggttggaagtaaagctctcctcagcaaatgtaaaagaacagaaattataacaaactatctctcagaccacagtgcaatcaaactagaactcaggattaagaatctcactcaaagccgctcaactacatggaaactgaacaacctgctcctgaatgactactgggtacataacgaaatgaaggcagaaataaagatgttctttgaaaccaacgagaacaaagacacaacataccagaatctctgggacacattcaaagcagtgtgtagagggaaatttatagcactaaatgcccacaagagaaagcaggaaagatccaaaattgacaccctaacatcacaattaaaagaactagaaaagcaagagcaaacacattcaaaagctagcagaaggcaagaaataactaaaatcagagcagaactgaaggaaatagagacacaaaaaacccttcaaaaaatcagtgaatccaggagctggttttttgaaaggatcaacaagattgatagaccactagcaagactaataaagaaaaaaagagagaagaatcaaatagacacaataaaaaatgataaaggggatatcaccaccgatcccacagaaatacaaactaccatcagagaatactacaaacacctctacgcaaataaactagaaaatctagaagaaatggataaattcctcaacacatacactctcccaagactaaaccaggaagatgttgaatctctgaatagaccaataacaggagctgaaattgtggcaataatcaatagtttaccaaccaaaaagagtccaggaccagatggattcacagctgaattctaccagaggtacaaggaggaactgccgggcagagacacaaccaaaaaagacaattttagaccaatatccttgaggaacattgatgcaaaaatcctcaataaaataccggcaaaacgaatccagcagcacatcaaaaagcttatccagcatgatcaagtgggcttcatccctgggatgcaaggctggttcaatatacacgaatcaatatatgtaatccagcatataaacagaacaaaagacaaaaaccacatgattatctcaatagatgcagaaaaggcctttgacaaaattccgcagcccttcatgctaaaaactctcaataaattaggtattgatgggacgtatttcaaaataataagagctatctatgacaaacccacagccaatatcatactgaatgggcaaaaactggaagcattccttttgaaaactggcacaagacaggtatgccctctctcaccactcctattcaacatagtgttggaagttctggccagggcaattaggcaggagaaggaaataaagggtattcaattaggaaaagaggaagtcaaattgtccctgtttgcagacgacatgattgtatatctagaaaacgccattgtctcagcccaaaatctccttaagctgataagcaacttcagcaaagtctcaggacacaaaatcaatgtacaaaaatcacaagcattcttatacaccaacaacagacaaacagagagccaaatcatgagtgaactcccattcacaattgcttcaaagagaataaaatacctaggaatccaacttacaagggatgtgaaggacctcttcaaggagaactacaaaccactgctcaaggaaataaaagaggatacaaacaaatggaagaacattccatgctcatgggtaggaagaatcaatatcgtgaaaatggccatactgcccaaggtaatttacagattcaatgccatccccataaagctaccaatgactttcttcacagaattggaaaaaactactttaaagttcatatggaaccaaaaaagagcccgcatcaccaagtcaatcctaagccaaaagaacaaagctggaggcatcacactacctgacttcaaactatactacaaggctacagtaaccaaaacagcatggaccccaaatagctgctatatcaccagcattttttcaccttccacggaggaagagtggaaaggacaaagagcagtgatgacccctcacaacccatcagtcagaatactgccacttggccccaccaagaacaacaaggttattttatcgggggacatgggctggtgtggaacaaatgggacacaggagcttctgcaagctatatacctgaacgaatatggcaacatgaccaaagcactgacccagatcttcacagacaaaacgggtgatggccttaagctattgatggcagcggcggcccatctggagtggctgctgccaagatgccagctgcagtggggtgggaggtgcagccagggctgcatgctcccagtagccggcaggagctgggaacaggtggaagccccaaccccttccaagttggaggggcaggaatccggccctcttgggtgcagctgcagccggccacctagccatggctgcagacccaggcatctctgcactctcagtgggccggggaagcccccacgtccgtgcaggctgggaactcccattggctggcctctccctgctcacagcgcacaatccgatttcagaccaaagttgtggccaagcccaggtgctgtcaagaccctggcaggtgtgcttgactcagggcacgcggacaagcagcccctgctgtctcagcacgaaaaccgaaaggaagcaggggggcgagaaatacaaactaccatcagagaatactacaaacacctctatgcaaataaactagaaaatctagaagaaatggataaattcctcgacacatacactctcccaagactaaaccaggaagaagttgaatctctgaatagaccaataacaggagctgaaattgtggcaataatcaatagcttaccaaccaaaaagagtccaggaccagatggattcacagccaaattctaccagaggtacaaggaggaactggtaccatttcttctgaaactatgccaatcaacagaaaaagagggaatcctccctaactcattttatgagaccagcatcatcctgataccaaagccgggcagagacacaatgaaaaaagagaattttagaccaatatcctggatgaacattcatgcaaaatcctcaataaagatactggcaaatcgaatccagcagcacatcaaaaagcttatccaccatgatcaagtgggcttcatccctgggatgcaaggctggttcaatatatgcaaatcaataaatgtaatccagcatataaacagaaccaaagacaaaagccacatgattatctccatagatgcagaaaaggcctttgacaaaattaaacaacacttcatgctaaaaactgtcaataaattaggtattgatgggatgtatttcaaaataataagagctatctatgacaaacccacagacaatatcatactgaatgggcaaaaactggaagcattccctttgaaaactggcacaagacatgggatgccctctctcaccactcctattcaacatagtgttggaagttctggccagtgcaattag

SEQ ID NO: 15812 - DNA, 1854 bp, Homo sapiens
  SIMILAR (1)..(879): 441254mologous to Rattus norvegicus 130kDa-Ins(1,4,5)P3 binding protein,accession number D45920,Smith-Waterman Score=617.
atgaaggcagaaataaagacgttctttgaaaccaacgagaacaaagacacaacataccagaatctctgggacgcattcaaagcagtgtgtagagggaaatttacagcactaaatgcccacaagagaaagcaggaaagatccaaaattgacaccctaacatcacaattaaaagaactagaaaagcaagagcaaacacattcaaaagctagcagaaggcaagaaataactaaaatcagagcagaactgaaggaaatagagacacaaaaagcccttcaaaaaattaatgaatccaggagctggtgttttgaaaagatccacaaaatagatagaccgctagcaagactaataaagaaaaaaagagagaagaatcaaatagacgcaataaaaaatgataaaggggatatcaccaccgatcccacagaaatacaaactaccatcagagaatactacaaacacctctacgcaaataaactagaaaatctagaagaaatggataaattcctcgacacatacactctcccaagactaaaccaggaagaagttgaatctctgaatagaccaataacaggatctgaaattgtggcaataatcaatagcttaccaaccaaaaacagtccaggaccagatggattcacagccgaattctaccagaggtacaaggaggagctgagaataaaatacctaggaatccaacttacaagggatgtgaaggacctcttcaaggagaactacaaaccactgctcaaggaaataaaagaggatacaaacaaatggaagaacattccatgctcatgggtaggaagaatcaatatcgtgaaaatggccatactgcccaaggtaatttacagattcaatgccatccccatcaagctaccaatgactttcttcacagaattggaaaaaactactttaaagttcatatggaaccaaaaaagagcccacatcgccaagtcaatcctaagccaaaagaacaaagctggaggcatcacactacctgacttcaaactatactacaaggctacagtaaccaaaacagcatggtactggtaccaaaacagagatatagatcaacggaacagaacagagccctcagaaataatgccacatatctacaactatctgatctttgacaaacctgagaaaaacaagcaatggagaaaggattccctatttaataaatggtgctgggaaaactggctagccatatgtagaaagctgaaactggatcccttccttacaccttatacaaaaatcaattcaagatggattaaagacttaaacgttagacctaaaaccataaaaaccctagaagaaaacctaggcattaccattcaggtcataggcatgggcaaggacttcatgtctaaaacaccaaaagcaatggcaacaaaagccaaaattgacaaatgggatctaattaaactaaagagcttctgcacagcaaaagaaactaccatcagagtgaacaggcaacctacaaaatgggagaaaattttcgcaacctactcatctgacaaagggctaatatccagaatctacaatgaactcaaacaaatttacaagaaaaaaacaaaccaccccatcaaaaagtggacgaaggacatgaacagacacttctcaaaagacgacatttatgcagccaaaagacacatgaaaaaatgctcatcatcactggccatcagagaaatgcaaatcaaaaccacaatgagataccatctcacaccagttagaatggcaatcattaaaaagtcaggaaacaacaggtgttggagaggatgtggagaaataggaacacttttacactgttggtgggactgtaaactagttcaaccattgtggaagtcagtgtggtga

SEQ ID NO: 15813 - DNA, 2718 bp, Homo sapiens
  SIMILAR (379)..(687): 951254mologous to Homo sapiens unnamed protein product,accession number AK022610,Smith-Waterman Score=482.
atgggagactttaacaccccactgtcaacattagacagatcaatgagacagaaagtcaaaaaggatacccaggaattgaactcagctctgcaccaagcagacctaatagacatctacagaactctccaccccaaatcaacagaatatacatttttttcagcaccacaccacacctattccaaaattgaccacatacttggaagtaaagctctcctcagcaaatgtaaaagaacagaaattataacaaactatctctcagacggcagtgcaatcaaactagaactcaggattaagaatctcactcaaaaccgctcaactacatggaaactgaacaacctgctcctgaatgactactgggtacctaacgaaatgaaggcagaaataaagatgttctttgaaaccaacgagaacaaagacacaacataccagaatctctgggacgcattcaaagcagtgtgtagagggaaatttatagcactaaatgcccacaagagaaagcaggaaagatccaaaattgacaccctaacatcacaattaaaagaactagaaaagcaagagcaaacacattcaaaagctagcagaaggcaagaaataactaaaatcagagcagaactgaaggaaattggggacacaaaaaaaccccttcaaaaaattaatgaatcccaggagctgggttttttgaaaggatcaacaaaattgatagaccgcttagcaaggacttaataaagaaaaaaagagagaagaatcaaatagacgcaataaaaaatgataaaggggatatcaccaccgatctcacagaaatacaaactaccatcagagaatactacaaacaactctacacaaataaactagaaaatctagaagaaatggataaattcctcaacacatacactctcccaagactaaaccaggaagaagttgaatctctgaatagaccaataacaggatctgaaattgtggcaataatcaatagcttaccaaccaaaaagagtccaggaccagatggattcacagccaaattctaccagaggtacaaggaggaactgcatataaacagagccaaagacaaaaaccacatgattatctcaatagatgcagaaaaggcctttgacaaaattcaacaacccttcatgctaaaaactctcaataacttaggtattgatgggacatatttcaaaataataagagctatctatgacaaacccacagccaatatcatactgaatgggcaaaaactggaagcattccctttgaaaactggcacaagacagggatgccctctctcaccactcctattcaacatagtgttggaagttctggccagggcaattaggcagcagaaggaaataaagggtattcaattaggaaaagaggaagtcaaattgtccctgtttgcagatgacatgattgtatatctagaaaaccccattgtctcagcccaaaatctccttaagccgataagcaacttcagcaaagtctcaggatacaaaatcaatgtacaaaaatcacaagcattcttatacaccaacaacagacaaacagagagccaaatcatgagtgaactcccattcacaattgcttcaaagagaataaaatacctaggaatccaacttacaagggatgtgaaggacctcttcaaggagaactacaaaccactgctcaaggaaataaaagaggatacaaacaaatggaagaacattccatggtcatggataggaagaatcaatatcgtgaaaatggccatactgcccaaggtaatttacagattcaatgccatccccatcaagctaccaatgcctttcttcacagaaatggaaaaaaactactttgaagttcatatggaaccgaaaaagagcccgcatcgccaagtcaatcctaagccaaaagaacaaagctggaggcatcacactacctgacttcaaactatactacaaggctacagtaaccaaaacagcatggtactggtaccaaaacagagatatagatcaatggaacagaacagagccctcagaaataatgacgcatatctacaactatctgatctttgacaaacctgagaaaaacaagcaatggggaaaggattccctatttaataaatggtgctgggaaaactggctagccatatgtagaaagctgaaactggatcccttccttacatcttatacaaaaatcaattcaagatggattaaagacttaaatgttagacctaaaaccataaaaacctcagaagaaaacctaggcattaccattcaggacataggcatgggcaaggacttcatgtctaaaacaccaaaagcaatgccaacaaaagccaaaattgacaaatgggatctaattaaactaaagagcttctgcacagcaaaagaatctaccatcagagcgaacaggcaacctacaaaatgggagaaaattttcgcaacctactcatctgacaaagggctaatatccagaatctacaatgaactccaacaaatttacaagaaaaaaacaaacaaccccatcaaaaagtgggcgaaggacatgaacagacacttctcaaaagaagacatttatgcagccaaaaaacacatgaaaaaatgctcatcatcgctggccatcagagaaatgcaaatcaaaaccgcaatgagataccatctcacaccagttagaatggcaatcattaaaaagtcaggaaacaacaggcacatggatgaaattggaaatcatcattctcagtaa

SEQ ID NO: 15814 - DNA, 5034 bp, Homo sapiens
  SIMILAR (449)..(673): 1001254mologous to Escherichia coli Transcription-repair coupling protein mfd,accession number D90747,Smith-Waterman Score= 386.
  misc_feature (1)...(5034): n = a,t,c or g
atggagaatgactttgatgagctgagagaaggcggcttcagaagatcgaattattctgagctacgggaggacattcaaaccaaaggcaaagaagttgaaaactttgaaaaaaatttagaagaatgtataactagaataaccaatacagagaagtgcttaaaggagctgatggagctgaaaaccaaggctcaagaactacgtgaagaatgcagaagcctcaagagccaatgcaatcaactggaagaaagtgtatcagcaatggaagatgaaatgaatgaaatgaagcgagaagggaagtttagagaaaaaagaataaaaagaaatgaccaaagcctccaagaaatatgggactatgtgaaaagaccaaatctacgtctgattggtgtacctgaaagtgatggggagaatggaaccaagttggaaaacacgctgcaggatattatccaggagaacttccccaatctagcaacgcaggccaacgttcagattcaggaaatacagaaaacgccacaaagatactcctcgagaagnagcaactccaagacacataatgaaatacaaactaccatcagagaatactacaaacacctctacgcaaataaactagaaaatctagaagaaatggataaattcctcgacacatacactctcccaagactaaaccaggaagaagttgaatctctgaatagaccaataacaggagctgaaattgtggcaataatcaatagcttaccaaccaaaaaagagtccaggaccagatggatccacagccgaattctaccagaggtacaaggaggaactgggtactccaacagacctgcagctgagggtcctattagaaggaaaattaacaaacagaaaggacatccacaccaaaaacccatctgtacatcaccatcatcaaagaccaaaagtagataaaaccacaaagatggggaaaaaacagagcagaaaaactggaaactctaaaaatcagagcgcctctcctcctccaaaggaatgcaattcctcaccagcaacaaaacaaagctggaccgaaaatgactttgaggagctgagagaggaaggcttcagacgatcaaattactctgagctatgggaggacattcaaaccaatggcaaagaagttaaaaactttgaaaaaaatttagaagaatggataactagaataaccaaggcagagaagtgcttaaaggacctgatggagctgaaagccaaggctccagaactacgtgacaaatgcagaagcctcaggagccgatgcgatcaactggaagaaagggtatcagcgatggaagacaaaatgaatgaaatgaagcgagaagagaagtttagagaaaaaagaataaaaagaaacgaacaaagcctccaagaaatatgggactatgtgaaaagaccaaatctacgtctgattggtgtacctgaaagtgatggggagaatggaaccaagttggaaaacactctgcaggatattatccaggagaatttccccaatctagcaaggcaggccaatgttcagattcaggaaatacagagaacgccacaaagatcctcctcgagaagagcaactccaagacacataattgtcagattcaccaaagttgaaatgaaggaaaaaatgttaagggcagccagagagaaaggtcgggttaccctcaaagggaagcccatcagactaacagcggatctcttggcagaaactctacaagccagaagagagtgggggccaatattcaacattcttaaagaaaagaattttcaacccagaatttcatatccagccaaactaagcttcataagtgaaggagaaataaaacactttacagacaagcaaatgctgagagattttgtcaccaccaggcctgccctaaaagagctcctgaaggaagtgctaaacatggaaaggaacaaccagtaccagccgctgcaaaatcatgccaaaatacagatcaacgagacagaaagtcaacaaggatacccaggaattgaactcagctctgcaccaagcggacctaatagacatctacagaactctccacaccaaatcaacagaatatacatttttttcagcaccacaccacacctattccaaaactgaccacatagttggaagtaaagctctcctcagcaaatgtaaaagaacagaaattataacaaactatctctcagaccacagtgcaatcaaactagaactcaggattaagaatcccactcaaagccgctcaactacatggaaactgaacaacctgctcctgaatgactactgggtacataacgaaatgaaggcagagataaagatgttctttgaaaccaacgagaacaaagacacaacataccagaacctctgggacacattcaaagcagtgtgtagagggaaatttatagcactatatgcccacaagagaaagcaggaaagatccaaaattgacaccctaacatcacaattaaaagaactagaaaagcaagcgcaaacacattcaaaagctagcagaaggcaagaaataactaaaatcagagcagaactgaaggaaatagagacacaaaaaaccctttcaaaaaattaatgaattccaggagctggtttttttgaaaggatcaacaaaattgatagaccgctagcaagactaataaagaagaaaagagagaagaatcaaatagacacaataaaaaaatgataaagggaatatcaccaccaccgatccccacagaaatacaaactacccatccagagattactacaaacacctctacgcaaataaactagaaaatctagaagaaatggataaattccttgacacatacgctctcccaagactaaaccaggaagaagttgaatctctgaatagaccaataacaggagctgaaattgtggcaataatcaatagcttaccaaccaaaaagagtccaggaccagatggattcacagccgaattctaccagaggtacaaggaggaactggtaccattccttctgaaactattccaatcaatagaaaaagagggaatcctccctaactcattttatgaggccagcatcattctgataccaaagccaggcagagacacaaccaaaaaagagaattttagaccaatatccttgatgaacattgatgcaaaaatcctcaataaaatactggcaaaacgaatccagcagcacatcgaaaagcttatccaccatgatcaagtgggcttcatccctgggatgcaaggctggttcaatatacgcaaatcaataaatgtaatccagcatattaacagagccaaagacaaaaaccacatgattatctcaatagatgcagaaaaagcctttgacaaaattcaacaacccttcatgctaaaaactctcaataaattaggtattgatgggacgtatttcaaaataataagagctatctatgacaaacccacagccaatatcatactgaatgggcaaaaactggaagcattccctttgaaaactggcacaagagagggatgccctctctcaccattcctattcaacatagtgttggaagttctggccagggcaatcaggcaggagaaggaaataaagggtattcaattaggaaaagaggaagtcaaattgtcccagtttgcagacgacatggttgtatatctagaaaaccccactgtctcagcccaacatctccttaagctgataagcaacttcagcaaagtctcaggatacaaaatcaatgtacaaaaatcacaagcattcttatacaccaacaacagacaaacagaaagtcaaatcatgagtgaactcccattcacaattgcttcaaagagaataaaatacctaggaatccaacttacaagggatgtgaaggacctcttcaaggagaactacaaaccactgctcaatgaaatcaaagaggatacaaacaaatggaagaacattccatgctcatgggtaggaagaatcaatatcgtgaaaatggccatactgcccaaggtaatttatagattcaatgccattccaatcaagctaccaatgactttcttcacagaattggaaaaaactactttaaagttcatatggaaccaaaaaagagcccacatcgccaagtcaatcctaagccaaaagaacaaagctggaggcatcacactacctgacttcaaactatactacaaggctacagtaaccaaaacagcatggtactggtaccaaaacagagatatagatcaatggaacagaacagagccctcagaaataacgctgcttatctacaactatctgatctttgacaaacctgagaaaaacaagcaatggggaaaggattccctatttaataaatggtgctgggaaaactggctagccatatgtagaaagctgaaactggatcccttccttacactttatacaaaaatcaattcaagatggattaaagacttacatgttagacctaaaactataaaaaccctagaagaaaacctaggcattaccattcaggacataggcatgggcaaggacttcatgtataaaacaccaaaagcaatggcagcaaaagacaaaattgacaaatgggatctaattaaactaaagagcttctgcacagcaaaagaaactaccatcagagtgaacaggcaacctacaaagtgggagaaaattttcacaacctactcatctgacaaagggctgatatccagaatctacaatgaactcaaacaaatttacaagaaaaaaacaaacaaccccatcaaaaagtgggcgaaggacatgaacagacacttctcaaaagcagacatttatgcagccaaaaaacacatgaaaaaatgctcatcatcactggccatcagagaaatgcaaatcaaaaccacaataagataccatcttacaccagttagaatggcaatcattaaaaagtcaggaaacaacagtgatctctaccttatgtctgcaggaaccagttgtttaatgggcagacactgggacagtggacaagaaacgtgtgtccaaaatgtcgtgctggacacgtgcagcccctctgaacaactcttaagagctattgctgatcttgtcccgcaaccctga

SEQ ID NO: 15815 - DNA, 757 bp, Homo sapiens
  SIMILAR (297)..(82): 441254mologous to unidentified cloning vector lacZ alpha peptide,accession number U13869,Smith-Waterman Score=104.
taaagttttggtgattcagaccgaaaaagggggagattgtccccggcgttgcgactcagtggaaaagtaatgacaacgtatcttggcctttacccctgcgcgataccgcaaaatgggcggatggcacaccggtaacggcgcaagattttgtctacagctggcaacgtctggtggacccaaaaacattgtcgccatttgcatggtttgccgcgctggcgggaatcaacaacgcacaggcgattattgatggtaaagctacgcctgaccagcttggcgtcaccgcagttgatgcccatactttgaaaattcagcttgataaaccgttgccgtggtttgtgaatttaaccgctaactttgccttcttcccggtgcaaaaagccaacgtagaaagcggtaaagagtggacgaaacccggaaatctgatcggcaatggcgcttatgttcttaaagagcgcgtagtcaatgaaaaactggtcgtggtaccgaatacccattattgggataacgccaaaacggtactgcaaaaagtgaccttcctgccaattaatcaggaatccgcagccactaagcgttacctcgcgggggatattgatatcaccgaatccttcccgaaaaatatgtatcagaagctgttgaaggatattccggggcagggcggtagtttcggcaaaataacgcgctccggccatactggtttcttcatcagcagtcgccagaatgtagagcggttttttcagtttcgtgacgtcgacatcgc

SEQ ID NO: 15816 - DNA, 1878 bp, Homo sapiens
  SIMILAR (808)..(1515): 961254mologous to Escherichia coli beta-lactamase,accession number A24782,Smith-Waterman Score=1153.
atggggctggacggtcgtacgctggtgaccaaaaactccttccgctatttgcacaccctgcacactatggggccggcaccggaacctaacctgaccattctttggtcggaagaattaccgattgccttcaaaaaatatgccgcgcaggtgtcgatcgtcacctcttccttgcagtatgaaaatgacgatctgatgcgtactgacttcaacagcgacgattacgcgattgcctgctgcgtcagcccaatggtgattggtaagcaaatgcagttctttggtgcacgcgctaacctggcgaaaacgctgctctacgcaattaacggcggggtggacgagaagctgaagattcaggtcgggccgaaaacagcaccgctgatggacgacgtgctggattacgacaaagtgatggacagcctcgatcacttcatggactggctggcggtgcagtacatcagcgcgctgaatatcattcactacatgcacgacaagtacagctacgaagcttcgctgatggcgctgcacgatcgtgatgtctatcgcactatggcatgcggcatcgcgggcctgtcggtggcgacggactccctgtctgccatcaaatatgcccgcgtgaaaccaatccgtgacgaaaacggcctggcgaaagacattcagggaacaacagaaccacaattcagaaactcccacagccggacctccggcactgtaaccctttacctgccggtatccacgtttgtgggtaccggcttttttattcgcgttgatccgccaaagaaaccgctgaagatccgcaaaattgagtttgttgaaatttacgagccgttttccgaaggccaggccaaagcgcaggctgaccgctgcctgtcgtgcggcaacccatactgcgagtggaaatgcccggtacacaactacatcccgaactggctgaagctcgccaacgaggggcgtatttttgaagcggcggaactgtcgcaccagaccaacaccctgccggaagtttgcggacgagtctgcccgcaagaccgtctgtgcgaaggttcctgcactctgaacgatgagtttggcgcggtgaccatcggcaacattgagcgctatatcaacgataaagcgttcgagatgggctggcgtccggatatgtctggtgtgaaacagaccggtaaaaaagtggcgattatcggcgcaggcccggcaggtctggcgtgtgcggatgtcctgacgcgtaacggcgtaaaagccgttgtcttcgaccgtcatccagaaattggcgggctgctgaccttcggtattccggccttcaagctggaaaaagaggtaatgacgcgtcgccgtgaaatcttcaccggcatgggtattgaattcaaactcaataccgaagtgggccgcgacccgcgcgcttcatcgttttatgaagagaagcagcttattgcacgcaaggcactaccctttatcgacaataaaaccaccatggcagccgattccagtagtaccgtaatggaattgctcaaattgttacaggaccgtagtggcctgacgttgctaaccaactcggcggaagcgattcatgttctggctcagtcagaaattaaagtcgtttcaacgggtggggaactaaacaaaaatacactttcactgcaaggaagaattactaaagagatcatcaggcgctatcatgtcgatatcatgtggttgccggacgagctgcgtgtcgaaaaagggtttagcccggatacgctcaagctgctggaagcaaaaggtcagaaagtggcgctgaaagaggcgatgggcagtacacaaagcattatggttgggccggacgaacgtcgaacgggattttcttatttaagatatcagaatcttatgattcgggtaaaattctaa

SEQ ID NO: 15817 - DNA, 2118 bp, Homo sapiens
  SIMILAR (2)..(181): 981254mologous to Homo sapiens Protein sequence encoded by clone p199-7 (PL mutet.rsT4),accession number P93369,Smith-Waterman Score=319.
atcattttttatttttcgtacaatggcgacagatgctgattatgataccgaaaacgggtttgaacgtgcgaagcccgaacgtagtgttcggagttctatgtgctttaccgcattttggagactattatttacactaaatgtgatttgatatattgatacttaaaacatttgatgcttcctttgtcacttttttgatggaagttgtttgcatttctttaaggcgaaacaaataattacgcatcaattttaatgtcggttagagggaaacttatgaagcactctgtttcagtcacgtgttgtgcgctgttggtcagcagcatttctctttcgtatgctgcagaagttccgagcggcacagtactggcagagaagcaggagctggtgcgccacattaaagatgagcctgcgtcgctggatcccgctaaagccgtgggcctgccagagattcaggtcattcgcgatctgtttgaaggtctggtgaatcagaacgaaaaaggggagattgtccccggcgttgcgactcagtggaaaagtaatgacaaccgtatctggacttttaccctgcgcgataacgcaaaatgggcggatggcacaccggtaacggcgcaagattttgtctacagctggcaacgtctggtggtaccaaaaacattgtcgccatttgcatggtttgccgcgctggcgggaatcaacaacgcacaggcgattattgatggcgagaagccgttcttattaccggacaatgaaggggtaaagatgaacacttcaccggtgcgaatggatgatttaccgcttaaccgttttcactgccgcattgctgcgctcactttcggcgcacacctgaccgacggttatgttctcggcgtcattggttacgccattattcagcttacgcccgccatgcaactgacgccgtttatggcgggaatgatcggcggctcggcgctccttggtttgttccttggcagcctggttcttgggtggatctccgaccatattggtcggcaaaaaatcttcaccttcagctttttgctgattacgcttgcttcgtttttacaattttttgccaccacgccagagcatcttattggactgcgcattttgattggcattggtctgggaggcgattattcagtaggtcacaccttgctggctgaattttccccgcgccgccattgcggtatttggctgggcgcattcagcgtggtggggaccgtaggctatgtgctggcaagtattccgggaatcactttctcttgcatgcctgcaggtcctgaacacattctgtttatcgcttctggcgcgttccagattgcgagaccgtctgacctgatcccggaactgcatggtcgtctgcacatccgcgttagactgcaggcgctggacaccagaagcttcgagcgtgttctagaagattcgaatgcctctatcgacgtgcagtacaaagcactgatggcgattgaaggcgtaaatatcgagtttaccgactccggtattaaacgcatcgcggaagcggcatggcaggtgaacgaatctaccgaaaacatcggtgctcgtcgtttacacactgttctggagcgtttaatggaagagatttcctacgacgccagcgatttaagcggtcaaaatatcactattgacgcagattatgtaaccgaagaaaccattcgccgcgatcttgagaagctggaagatgaaggctttttgaccagaacctatggtggtgctgttttaaatacagcgatgttgacggagaatatccatttttataagcgcgcttcatcgttttatgaagagaagcagcttattgcacgcaaggcactaccctttatcgacaataaaaccaccatggcagccgattccagtagtaccgtaatggaattgctcaaattgttacaggaccgtagtggcctgacgttgctaaccaactcggcggaagcgattcatgttctggctcagtcagaaattaaagtcgtttcaacgggtggggaactaaacaaaaatacactttcactgcaaggaagaattgctaaagagatcatcaggcgctatcatgtcgatatcatggtaatgagttgtaaaggtcctgatattaacagcggcgcgctggactcctga

SEQ ID NO: 15818 - DNA, 1263 bp, Homo sapiens
  SIMILAR (269)..(1837): 971254mologous to Homo sapiens embryonic lung protein,accession number AF006621,Smith-Waterman Score=2599.
atggaatactatgcagccataaaaaaggatgagtttctctcctttctagggacatggatgaaactggaaaccatcattctcagcaaactatcgcaaggacaaaaaaccaaacactgcgactctagaggactccccgcgaccgagcgaaatcatctggtgaccgaagagggcgaatgctggtttgattcgccgatcatcgctgaatatattgaattaatgaatgtcgctccggcgatgttgccgcgcgatccgctggagtcgttgcgggtgcgcaaaattgaggcactggcggatggcattatggatgccgggctggtatcggtgcgtgaacagaagaggtttcagttaacaagtgctaaaaggacaaaatcaactttttatgggggcaaaaatccatggggcattcgtattgacgccaacgttatgcaaggcatctggcaaatgaccaaacagggcgatgcgataacggggtcgatggtctttttctgcgttattggtgccccgctcattctggtgacctccatagcttatttatggtttggtaaccgactgggaatgaatttacgtccggtactgctgatgcttgagcgacttaaagagtgggtaatgctcgatatctacctggtcggcattggcgttgcttctataaaggtacaggattatgcccatatccaggctggtgtcggcttgttctcttttgtggcgttggtgattttaacgacggtgacgttgtcacatcttaatgtcgaagaactgtgggagcgattttatccgcagcgccccgctacgcgtagggacgagaaacttcgtgtctgtcttgggtgccattttaccggctatccagatcagcgtggtcgctgcccgcgttgccatatcccgtacagactgcggacctgcacgcctgaaaggttggcggccagtggcagaaagacagagggcaaacctcagacagtatacagagaggaagagagagagacacagagagagagagagtcaccggttcgcaatgatctgcgcttccgtgaactgactgtgttacgcgttgagcgcatcagcgccggttttcagcgcattgtcctcggcggcgaggcgctggacggtgaaattcgccgaaaaccgcagtcaggacggaacgttgaatcccttgttggaagccaccgcttattccgaatcctgcaacagttccagggacctgacgtcccctttttccgggtcagcccgtccccatggcccaacagcagctgcctgacccgaaaatgctag

SEQ ID NO: 15819 - DNA, 1066 bp, Homo sapiens
  SIMILAR (772)..(831): 951254mologous to Homo sapiens embryonic lung protein,accession number AF006621,Smith-Waterman Score=100.
atgaataacaccccccgctacccgcagcgcgttcgcaatgatctgcgcttccgtgaactgactgtgttacgcgttgagcgcatcagcgccggttttcagcgcattgtcctcggcggcgaggcgctggacggttttacatcgcgtggctttgacgatcacagcaaactcttctttcctcaacctgacgctcactttgtgccgccaacggtaacggaagagggcatcgtctgtcaggaagcatggagctgctgcctctcctgcacttcaccagaggctattgccaaatggtggttcaaatgtactcacgatctctatccatacgtggtgttgcctgatgcgacgcttgcgcgtcttatcaggtctacagtgacctttcgggctggcttccagtacctgtaccggcagcggcgaatcgaggctggtacggcggctgatatccacttcccaagggcgcaggaagagatccaccggcccctgatacgcaggtgtgtagcccagcggccagcgatgcgcgccaacatggaactgcccgccgcgaatggttccctgcaggcggttcacttcgcccataaattcgagcacaaaacgggtcgccgtggttgtcgtttctggtggattcggtatgtgttctcaaggcgtgtgttgatgcggtcatgcgagcgggtatttgttctgtgtcttgactggcagtatcagagcggagtaggggctaactcctcggcgctcagcggtttctctcaaggcgcgattatgatgctggagagcattaaagccgaaccgggccttgcttcacgcgtcattgcttttaacggacgctattcgagcctgccggaaactgcgtctacagccacgactattcacctgattcatggcggtgaagatccggttatcgatctggcgcatgcggttgcggcgcaggaagcgttaatcagtgccggtggtgacgtgacgctggatatcgtggaggatttaggccatgcgatcgacaatcgcagtatgcaatttgccctggatcacttgcgttataccattccgaaacattatttcgacgaagcgctaagtggcg

SEQ ID NO: 15820 - DNA, 2655 bp, Homo sapiens; identical to SEQ ID NO: 7766
  SIMILAR (86)..(208): 451254mologous to Homo sapiens Human secreted protein, SEQ ID NO: 6834,accession number G02753,Smith-Waterman Score=94.

SEQ ID NO: 15821 - DNA, 1494 bp, Homo sapiens; identical to SEQ ID NO: 13321
  SIMILAR (12)..(203): 981254mologous to Cloning vector pSport1 beta-galactosidase alpha peptide,accession number U12390,Smith-Waterman Score=334.

SEQ ID NO: 15822 - DNA, 1733 bp, Homo sapiens
  SIMILAR (199)..(585): 771254mologous to Rattus norvegicus phodpholipase C delta4,accession number D50455,Smith-Waterman Score=512.
atgggcgttggttccaaaggcacaatctttgggagcacaaccacacaacatggcagtttcataccctatcttacggggtatctaacttacactcacggccacagtccagcaaatccgaagccggcggtcggcgggcaaattctcacagcggtcttaccagcccatgatggctacgtcagtcgcattatgactatgaacactcaactcactaccccgcttacaaccgcgacacatacagcgcgacaaacagcctcactaatatctgtcatcggccgtcagctacggtgttttcgccacagtagccagccctctgtgctaacccacgtccgtgatgactctacacaatatgcacagctggatatggcaaatggacagccaactagccatgggtatgaacactgggcacaattgatgtatgcaactgacaggagatatggaagacacatgtcagatgctgccagacaaggctgctcagacactggtatcgtaaagttcagtcatccggaaccagagatgtcagtcaggaaattcacgtcagcacgttccgggtgtgtacgatcgggagcatggaacgtgacagtttctgcgcagaccagagtttcccaggccctgaccacgttactccgtcgtgtgcataagagccccatgaatgcattgacggtacctgctgtcatggcagaagctccttcgcaggctcacggtcgtagacagactcggcgtctcagtctacatcagacgctccggcttctgttgactacgcctgattgggttggagttattcgtcgttgtgtccctgtagtatgggggtgtttggaacatttggacactgcgggttttcccctccccaacagtcatacgatgcccctgccgatcggatggaacgatacccggaagcgtctacaccattcagcacataatgggcaacatgacgttgcgcaggggcgtcgcgtgttagggcgtaaagtgggcctgacacatccgaaagtgcaacaacaactgggcgttgatgggttgtcccttttctgtgtctatctggtctggtatattggattgcaccttcgccgacctttcaggttagcttatactatctgtccgtctctggtttatggcgcggatcttcgggttattgtgcgtcttttctccgacagccatcattttatggcattcggaaatcctcaacccaaacatttagactgccaagaatatgcattattcctgctcaatagcatgccggataatacagctgagcattaccgcaataaaatcgccatttatttgcactgcttgccggaagatgatcgcatcaaagcgattaatgaaatccgcatggcgatccatcaggttagcccctttcgtgaagagccagtggattgcgttctgtgggttaaatacagccaacttatgcctaatgattacaacccaaacaacgtggcaccacccgaaaaaaaactgctgcaaaaatccattgaaatagatggttttacccaacccattgtggtcacacatacggataaaaatgccatggaaatcgtggatggttttcaccgccatgaaattggtaaaggctgcatgcatcattaaaattacgcttaagaggttatttgccggtgacctgtctggaaggtacacgtaatcaacgcatcgccgcgactattagccataatcgcgctcgtggacgccatcacatcaccgccatgtcggaagttactccggaacttaggctattgggatgg

SEQ ID NO: 15823 - DNA, 273 bp, Homo sapiens
  SIMILAR (2)..(154): 981254mologous to Mus musculus surfeit 3 protein,accession number M14689,Smith-Waterman Score=263.
atgcggaaattctataacgtaccggacttcctcgtgaagttccatatccaggcggagccaggtcacgacaaaatccgcgatgcggtccgtgcatgggcgtcgtccctggacaatcaggacgtagtgccagcgctgatcatcaacgaataccgggagcatggcggtaccgccatcaacttcccaggagacatcaccaagtaccgccaaaaactatttcgatatgtggataaacggttccactgcgatcagtgcgagagaaccattataaactga

SEQ ID NO: 15824 - DNA, 319 bp, Homo sapiens
  SIMILAR (212)..(99): 711254mologous to Homo sapiens Human secreted protein, SEQ ID NO: 7083,accession number G03002,Smith-Waterman Score=135.
aaatggtgggttcttggtctcactgacttcaagaatgaaaccgcggaccctcgcggtgaccgttacagttcttacaaggcggtgtgtctggagtttgtttcttctagacgttcggatgtgtccggagttttttccttctggtgggttcatggtctcgctggatcaggaatgaagctgcagaccttcacggtgagtgtcacagatcttaaggcggtgtgtctggagtcgttcaattcctcccggtgggttcctggtctcactggcttccagagtaaagcttcagaccttcacggtgagtgttacagctcataaaggcagt

SEQ ID NO: 15825 - DNA, 1113 bp, Homo sapiens
  SIMILAR (220)..(798): 531254mologous to Cloning vector pZC320 SopA,accession number U26464,Smith-Waterman Score=376.
taaaggtggcgtttacaaaacctcagtttctgttcatcttgctcaggatctggctctgaaggggctacgttgtttgctgtggaaaggtaccgcccccccagggaacaccctcaatggtatcgcgggagggggacccagctcttcataattagtgcaaaacacagctcttatgcctctcatatcttggggaaaaggacgatgtcacttatgccataaagcccacttgctggccggggcttgacattattcctttctgtctggctctggaccgtattgaaactgagttaaatgggcaaatttgatgaaggtaaactgcccaccgatccacacctgatgctccgactggccattgaaactgttgctcatgactatgatgtcatagttattggacagcgcccataaccgggggtatcggcacgattaatgtcgtatgtgctgctgatgtgctgattgttcccacgcctgttgagatagtttgactacacctccgcactgcagtttttcgatatgcttcgtgatctgctcaagaacgcgtgatcttaaagggttcgagcctgatgtacgtatttttgttaccaaatacagcaatagtaatggctctcaattcccggtggatggaagagccaattccggaatgcctcccgaagcatgggtctaaaaaaaataatgtgcgtaacgccaatgaagttggtaaaggtcagatccggatgagaacctgtttttgaacaggccattgatcaacgctcttcaactggtgcctggagaaatgctctttctatttgggaacctgtctgcaactgaaattttcgatcgtctgattaaaccacgctgggagattagataatgaagcgtgcgcctgttattccaaaacatacgctcaatactcaaccggttgaagatacttcgttatcgacaccagctgccccgatggtggattcgttaattgcgcgcgtaggagtaatggctcgcggtaatgccattactttgcctgtatgtggtcgggatgtgaagtttactcttgaagtgctccggggtgatagtgttgagaagacctctcgggtatggtcaggtaatgaacgtgaccaggagctgcttactgaggacgcactggat

SEQ ID NO: 15826 - DNA, 681 bp, Homo sapiens
  SIMILAR (295)..(654): 931254mologous to Escherichia coli yjeF,accession number U14003,Smith-Waterman Score=595.
atgagtattggaggcagcgggaacagcttgtgcacaagacccaagcagcagcaggggggcaccggcctgaaacagtatgaagtgagcgtgcctggaacactgaggtgcctggcctgcccacaggcttgtaccttacggaaggagcactggattcattttgctcccaagagcaactatgactcatgtcgatacattgaggaatattttgcttatgaggcatcattcatgtcggtgcagcttacggagctggtcattaagtcacttgaggacctcgcttcccttttcatgatacacaaaaaaaaccccgtaagtataccacacaccgtctggtacgccgacgatatccgccgcggagaacgcgaggcggcagatgtgctggggctcacactctatgagctgatgcttcgcgctggcgaggccgcattccaggtgtgtcgttcggcgtatcctgacacccgccactggctggtgctgtgcggtcatggtaataacggcggcgatggctacgtggtcgcgcgactggccaaagcggtcggcattgacgacacgttgttggcccaggagagcgacaaaccgttgccggaagaggccccgctggcacacgaagcatgggtaaacgcgggtggcgagatccatgctttgaatattggctgggcccgaatcggaacatcttattgttga

SEQ ID NO: 15827 - DNA, 774 bp, Homo sapiens
  SIMILAR (73)..(774): 961254mologous to Escherichia coli K12 putative transcriptional regulator LYSR-type,accession number AE000167,Smith -Waterman Score=1150.
tcgttaaatgcagcgaaaagtgtttatttttacccttggggcaattcagtcagtttattcagaaattgcgcggttatattccttgacccattgtttattcgcaaaggccagggtgtcactcctaccgcatttgcgatgcatctacatgagtatatcagtcagggccttgagtccattcttggcgcgctggatatcgaaggaagctatgataagcaacgaacgataactattgcgaccactccctcggtcggagcactggtccttcctgtcatctatcgggcgattaaaactcactatccgcagcttttactgcgcaacccgcccatcagcgacgcggaaaaccaactcagtcagtttcaaaccgatctcatcatcgataacatgttttgcaccaatcgtacggtgcaacatcatggtctgttcgccgcaaatatggtgttaatttgccgcgagggaaatccactactctctttagaagatgacagagaggctatcgccaacgctgcgcatgtacttctgttaccggaagagcaaaatttcagcggtttgcggcagagagttcaagaaatgtttccgggccggcaaatcaatttcaccagctacaacattttgacaatcgctgcactggttgccaacagtgacatgttagcgattattcccagccgtttgtataacctgtttagccgctgctggccgctggaaaaactgcctcatccgtccttaaatgaggagcaaatagatttctctatccactacaacaaattcagcctgcgt

SEQ ID NO: 15828 - DNA, 741 bp, Homo sapiens
  SIMILAR (2062)..(2964): 841254mologous to Homo sapiens dJ680N4.3 (G-protein coupled receptor),accession number AL121755,Smith-Waterman Score=1238.
atgattaccgtcctgctgatcgccacccagttcgcgccttacttcactgaaatggcgctcaaaggcggtttcagttttgccggtgaaagtgcgcaaatctcagcgttgtccgtgggcaatatgttcggttggtcgatttctgaattgatgtcgcttgggattattggcgttgtcgtggcggtcggtattgtcgccagcgtcgtgctgttcttacgagtactttcaatgagttggctgaaagaggttattgggacggaaaaagcggtcatcgccatgtgccatctacgtgcattgcccggcgacccgagttttgatgcgcagttggggatgaactgggttatcgacaaagcctgggacgatctgatggcgctccaaaatggtggggtggatgcagtcatgttctccaacgagtttagtcttccctatctcacgaaggggctggtgcctgcactggtggcacgagaaattctcgttcgcgggatgtacgtgcgcggacgtaaaatggtggcgttcctggtctgctgcgtggcgctggcgataagcgcgatgtatgaattaatcgagtggtgggcagcgctggcaatgggtcagggagcggatgattttctcggcacccagggcgaccagtgggacacgcaatccgatatgttctgcgcgctgcttggcgcattaacgacggtgatattcctcgctcgctttcattgccgccagctacggcgctttggcttgataaccggataa

SEQ ID NO: 15829 - DNA, 678 bp, Homo sapiens
  SIMILAR (1)..(609): 971254mologous to Escherichia coli K12 putative nucleoside triphosphatase,accession number AE000501,Smith-Waterman Score=1027.
atgtgccatctacgtgcattgcccggcgacccgagttttgatgcgcagttggggatgaactgggttatcgacaaagcctgggacgatctgatggcgctccaaaatggtggggtggatgcagtcatgttctccaacgagtttagtcttccctatctcacgaaggtgcgtccggaaaccactgcggcaatggcacgaatcatcgggcaattaatgagcgatatccgcatcccgtttggcgtgaatgttctgtgggatccggtcgcctcattcgacctggcgatggctaccggcgctaagtttatccgcgagatatttaccggtgcctatgccagcgactttggcgtctgggacactaacgtcggtgagaccatccgtcatcaacaccggattggtgcaggcgaagtgaaaaccttgttcaatatcgtcccagaggccgccgtgtatctgggcaatcgcgatatctgttctattgctaaatcgacagtatttaacaaccatcctgatgcgctctgtgtttctggcctgaccgccgggacgcgtaccgacagcgcgctgttaaaacgggtcaaagaaacggtgcctgacacctgtcgtgttggccaacacgggcgtctgcctggaaaacgtggaggaacaactcagtatcgccgatggctgtgtgaccgcaaccacctttaa

SEQ ID NO: 15830 - DNA, 1581 bp, Homo sapiens
  SIMILAR (46)..(651): 991254mologous to Escherichia coli PhoQ protein,accession number D90393,Smith-Waterman Score=1038.
atgagtcacaagaagcttcgaaccccgataattccctatattcttaagttgcatgtcgagttacccgaaaatatcgacaagcaaagccccaccatgacgctaatttatgatgagaacgggcagcttttatgggcgcaacgtgacgtgccctggctgatgaagatgatccagcctgactggctgaaatcgaatggttttcatgaaattgaagcggatgttaacgataccagcctcttgctgagtggagatcattcgatacagcaacagttgcaggaagtgcgggaagatgatgacgacgcggagatgacccactcggtggcagtaaacgtctacccggcaacatcgcggatgccaaaattaaccattgtggtggtggataccattccggtggagctaaaaagttcctatatggtctggagctggtttatctatgtgctctcagccaatctgctgttagtgatcccgctgctgtgggtcgccgcctggtggagtttacgccccatcgaagccctggcaaaagaagtccgcgaactggaagaacataaccgcgaattgctcaatccagccacaacgcgagaactgaccagtctggtacgaaacctgaaccgattgttaaaaagtgaacgcgaacgttacgacaaattgtcgactctagagcgatcccgtttacgtaagaacggttacactctcccatcaatcaaccaaagaatccgtatccgcctgaaagcgtttgatcatcgtctgatcgatcaagcaaccgcggaaatcgtcgagactgccaagcgcactggtgcgcaggtccgtggtccgatcccgctgccgacacgcaaagagcgcttcactgttctgatctccccgcacgtcaacaaagacgcgcgcgatcagtacgaaatccgtactcacttgcgtctggttgacatcgttgagccaaccgagaaaaccgttgatgctctgatgcgtctggatctggctgccggtgtagacgtgcagatcagcctggaagacggcgtctctatcccagtaaccgtaatcgaagttgaagcaaaccgcgttactcaggttaaagacctggctaacgatggctaccgtgctattcaggtgaccaccggtgctaaaaaagctaaccgtgtgaccaagcctgaagctggccacttcgctacagctggcgtagaagctggccgtggtctgtgggaattccgcctggctgaaggcgaagagttcactgtaggtcagagcattagcgttgaactgtttgctgacgttaataaagttgacgtaactggcacctctaaaggtaaaggtttcgcaggtaccgttaagcgctggaacttccgtacacaggacgctactcacggtaactccttgtctcaccgcgttccgggttctatcggtcagaaccagactccgggcaaagtgttcaaaggcaagaaaatggcaggtcagatgggtaacgaacgtgtaaccgttcagagccttgacgtagtacgcgttgacgctgagcgcaacctgctgctggttaaaggtgtctgtctccgggtgcaaccggtagcgtacctgtatcagttaaaccgagctgtgtaa

SEQ ID NO: 15831 - DNA, 1926 bp, Homo sapiens
  SIMILAR (1448)..(1690): 451254mologous to Escherichia coli K12 putative nucleoside triphosphatase,accession number AE000501,Smith-Waterman Score=113.
atgcccttcgcgttgggtggcggggaccttgaagaaacccctagaagtgaccccggggtgacctttgcctgtagcctcgctcagccaatgaggaagcccactggggtgcttggaaaccgtttccatgacacccaggagccgccggtccctggagggcctggtctgaggggtttccacctttggcacgcacccccgttagatcgccctgcacagttcgcagccattcgcaccgatagcgaattaatgtcatcggcgaacccgaagtcttttactgcaagcccgctgatgacttttaccccagccaggagccgtattaattaccggtattaccccgcaggaacacgggcgaaaggagaaaacgaagccgcgtttgccgcccgtattcactcctttttaccgtaccgaagacctgtattctgggctacaacaatgggccaggctaaaagcgcaatcaaaccgatgagtacagctgtgacaagggatgccagcgtttttcaaacagaatatgagcgatcccggttcggcgcgcgcccttggcccctccggaaggccccggaagccatgggcaggggcttccatgaaatcggggtgcagtgtgaagcccccacggccaacacccttgagccctccaggagaggggccgtgatggccgcgggcctgagtttccagaggaccccctggagggaggtccttggtcggggggaggggagcttcctgggcgctgggtccgaccccgtcctcagggcgctgagtctggccagtacacctttccctggagagaagcacgtgggctcctggggtatggggcgcatcgttttaagaagtttcgcactcgcttcatcgtcattacggcatagcggggagagaattccaggcactgttctaccatgcgatgacatttttgcctgccaccagcgcaactacgcggaagtgttcgggatttggcgcaccacgtccagcgtgctgcaaccaatcgagccggtcgagcccaaatgcatcagtcagtttctgtacatcgtcctggaacggcgatcgtcgtcttcgctgatctctttatctttcaacagtgcttcactttgtcgttcgcgtcacgacgcacgttacgtactgcaacacgcgctgttctgcttcaccacgaacgattttggtcagatctttacgacgttcttcgtcagcggcggcagcggaacacggatgtcgctacccgcagagttcggggtgatcgcccagtccgatcaaaaagtgttatttattgatgccgacttagccgtggttattcgcataacctgtttaccgagtacttcaatgagttggctgaaagaggttattgggacggaaaaagcggtcatcgcatgtgccatctacgtgcattgcccggcgacccgagttttgatgcgcagtggggatgaactgggttatcgacaaagcctgggacgatctgatggcgctcaaaatggtgcgtccggaaaccactgcggcaatggcacgaatctcgggcaattaatgagcgatatccgcatcccgtttggcgtgaatgttcttgggatccggtcgcctcattcgacctggcgatggctaccggcgctaagttatccgcgagatatttaccggtgcctatgccagcgactttggcgtctggacactaacgtcgccagatccagacgcatcagagcatcaacggttttccggttggctcaacgatgtcaaccagacgcaagtgagtacggatttcgtatgatcgcgcgcgtctttgttgacgtgcggggagatcagaacagtgaagcctctttgcgtgtcggcagcgggatcggaccacggacctgcgcaccagtggcttggcagtctcgacgatttccgcggttgcttgatcgatcagacgatgtcaaacgctttcaggcggatacggattctttggttctgcattga

SEQ ID NO: 15832 - DNA, 900 bp, Homo sapiens
  SIMILAR (712)..(900): 981254mologous to Escherichia coli K12 putative alpha helical protein,accession number AE000169,Smith-Waterman Score=339.
tcaatttttgaggtagttgagaaggccccctgaaccggcaaggccccagcaaggccccagcgtgtcaccgcccggcagacctcggggcatccgcacaatcttggactcctggaggcccatacatagcatctggagcgaggagtaggattgatggatagagtagatacgtacatagataattagaattatagagggttcacacaattccacatagaatcttgttcccgtgtgtaatttgtagctcatggtcatcctgattccgatagcgaactggggatctgcaggcaggaacttgagtcggtatgcacgtctacctccaatgtgtttaagtcgagataatcgccgtgagcgtgtttctacatggtacgggtatggccagaaattccgttggaagtgtcgcccgtccatacaccagataatcagagtatagcacgtgtagacgcccctgtttcttaggccccggaggctgcccgaggtagaagactcgttattcgtgtcgaggagagacgtggtcgaacccgcagtcatcgcagctttcggctttaatcgcggctgttcgtcatccagcgaccagtaatgcagtttgccgctctgctcgcagttgctgcattttacgcgcactacgtgccattcagtttcacacaggttgcagtgcaggtaacgtagcccctgagtggtgccaatttgcaccatgctggaggaagcccttgaaagacagaatctgacagcgtctttatgcgggtgattaaagaaagcttgtggcaggagctggcagacatcaccgataaaacgcagcttgaatggcgcgaagttttccaggacctcaatcatcatggggtttatcacagcggagaagtggtcgggctgggaaatctggtctgcgagaaatgtcacttccat

SEQ ID NO: 15833 - DNA, 555 bp, Homo sapiens
  SIMILAR (145)..(363): 891254mologous to Escherichia coli ferrienterochelin receptor protein,accession number M13748,Smith-Waterman Score=315.
tcaaaggttttcgcggtagcgggatgcgtcgtgttgatgacgaccatgcccgacagttgcaattcgtggcaaaaatgcaggaataaaacaatgaacaagaagattcattccctggccttgttggtcaatctggggatttatggggtagcgcaggcacaagagccgaccgatactcaggcgcctggcgtttcgaccatcaccgcagatgaaatccgcaaaaacccggttgcccgcgatgtgtcgaagatcatccgtaccatgccaggcgttaacctgaccggtaactccaccagtggtcagcgtgggaataaccgacagattgatattcgcggtatgggtccggaaaacacgctgattttgatgacggcaagccggtaagcagccgtaactcggtacgtcaggggtaccgactggaatgcggcgacggttaacggaatactggcgacatccggcgcaggatccaatccggggaaatcgcgatggacataacttggggctgacctgcgatccggttgccgagcaggtacaaatcccgtgcattgaacgtaatgccat

SEQ ID NO: 15834 - DNA, 1359 bp, Homo sapiens
  SIMILAR (138)..(245): 331254mologous to synthetic construct synthetic amphiregulin gene,accession number M61898,Smith-Waterman Score=64.
atgacggccgcagcaagccaaaaagagggcggggccagacggaaccaagggagaagggaccggccccggaaaaggacgcagagaaccaaaacccggccggagcaagacggcaaaccggaaggaccggacccccggccccgccccccggaaaaacgcaaaaccgaagacgggaagaccaacccagcagaggcaagcaagccggacggccccaaagctcgaatacaaaaaacccaccaaatgaaaacattggatttgaaaaagggagcaataaatgcaacttacttggagggtgggatgccgtcggagcaactcgttgaacatgcgggagacgacgacgtagaccatttggaaggttacgcgttggatgatcatgttgaagtattgaaactgaaaaagacagatggctggtcaatacttagaatctgtgactcagagtggtatcgatccttatgcaatcacgctgcgtgcagataccagcataccgaagctgactcagcaggatgttaccgagctgatcgcctatctgaacaaaggtggatcggtgctgatcatggaaaacgtctgtcgatggcactgaacaagtcggtagtaaataacgattcgcaaagggtatccgaaccgcgttcgtcagcagcggcaacgggcatttgggtctatgaacgttatcctgccgtatatggtgcgctgccgtacaccatcgatagtaagacaggggaagttatgtggaaatatcaggtagaaaacaacctgatgacaaccgaagctggagttgcagctgctgaagatgagatggcaacaggaacgcgttatgctttattgagaggcgatcaaaacagagattctctgaaggctgcaagagaaatttctcgccgcgttctcgggctgaagagtgtactaatccgacatatcactatgagctcactcctgaaatatcgtcatgacacggagatccggaaaactgcgatggtgcagcatgcgaatttagccaccaacattcagcgtctgtatcagcatgagctctactaccggaccaatggtcgcaaaggtgagcgtctgagcagcgtcgatctggaaacaacatgtcggtctggctgtggaacgatacgagctatcgttatgaagaaggcaaaaatgacgagctgggctttaaaaacgttcaccgagttcctgaactcgtacgccaatgatgctatgcaggcggcaccaaagtgttctgcagatctgaaaaaatcgctggtcgataacaacatgatctacggtgacggtagcagcaaagcgggcatgatgaacaccgagctacccgctcaactatatggaaaaaccgctgacacgcctgatgctgggccgttccggtgggat

SEQ ID NO: 15835 - DNA, 546 bp, Homo sapiens
  SIMILAR (32)..(205): 691254mologous to Homo sapiens Human secreted protein sequence SEQ ID NO:103,accession number Y87064,Smith-Waterman Score =199.
ttatgtggatgtcctttttgttgatgttgatgctattgcattctgtttgttagttttccttctaataggcccctctgctgcagatctgctggagtttgccagaggtacactccagaccctttttgcctgggtatcaccagcagaggctgcagaagagcaaagattactgcctgttccttcctctggaaacttcatcccagaggggcacttgccagatgccagccggagctctcctgttggaggtgtctgtcgacctctcctggaaggtgtctccccatcaggaggcacaggggtcagggacccatatgaggaggcagtctgtcctttagcagagctcaagtgctgtgctgggagatctgctgttctcttcagagctggcaggcagggacgtttaagtctgctgaagctgttcccacaactgcccttttccccatgtgttctctgtctttctaagttagttccagtgtcccctaattcaactagaacttccaaactattgtccattccatattcccgtggtcctgcactactggaggtgctctccat

SEQ ID NO: 15836 - DNA, 479 bp, Homo sapiens
  SIMILAR (2)..(478): 951254mologous to Escherichia coli K12 putative enzyme,accession number AE000490,Smith-Waterman Score=775.
tttccaggaacgcgaagctgaaaaatacgcgaatcccatccctagtcgggaatttatcctcgaacatttaaccaaacgtgaaaaaccggccagccgtgatgagctggcggtagaactgcacattgaaggcgaagagcagcttgaaggcctgcgtcgccgcctgcgcgcgatggagcgcgatggtcaactggtcttcactcgtcgtcagtgctatgcgctgccggaacgcctcgacctggtgaaaggtaccgttattggccaccgtgatggctacggctttctgcgggttgaagggcgtaaagatgatttgtatctctccagcgagcagatgaaaacctgcattcatggcgatcaggtgctggctcagccgctgggtgctgaccgtaaaggtcgtcgtgaagcgcgtattgtccgcgttgtggtgccaacccccagccacattgttggtcgcccctttaccccaccgggcgtcggctttg

SEQ ID NO: 15837 - DNA, 1386 bp, Homo sapiens
  SIMILAR (1085)..(1249): 1001254mologous to Escherichia coli K12 putative enzyme,accession number AE000490,Smith-Waterman Score=282.
ttacaccaaggcaagcctagatcttgaatattcaacatctagaagtaaagatgggagccctagtgccactccccagagaggcagcccatgggagtcaaaagctgggtctttgatgtcaaagggacttgagttcagaatcctggaattgccaccgagtgactttgggtagggcatttcaacttttgactgccagcttttcctctgctgtaaaacgcaggttatgtgaaggttagatgaggtgaagtatgtaaagcgcctggaactgagctctctgcctctcttgtccatatcctgtgagtaacgctgccgatttctcagtacggtaggaaaaagcaaaagggatggtccttgctggccttctccatcttcttttgtttttcttacataaatgcctaccccagctaagggaattggatcacatgattctggaggctgagaaatcccatgatcttccagatatgccatctgcaagctggagaaccaagaaagcctgtggtgtgatttagctcgagtctgcagtcctgagaaccagagaagccacagtgtaactcccagtttgaggcagaaagcctgaaaactggtagggttgtcggtgtaagtcccagagtggaaaggccctagaaccaggagctccaatgtcttatgtcggtggctttgagctgattgccgaatgccacggcagctttcacacttaaaggattccaggaggccctgtggtccctctggttgcgtgttcagattaagggtcctggaaacctgtagcaacccttccttacattccgggtgtcgcagcaccacaacttttgagtctttactcaaaagtaaatcaagacacaccatccttggcatgctgatgagattaatgtaacctacatttaggggaatttcagaaattttgtaattagaggtaccgttgctccttgcagaatccaggtctcttctcttcagaaatgtggcttttgagtgaatagtctttgttaagtcaccagtgttggctctgccaccaccaaccgtgttgaaatctttggcatcagagcagaaccggatgactccgggaagctgagctggaaggctcgtttgagctgatcctttccaggaacgcgaagctgaaaaatacgcgaatcccatccctagtcgggaatttatcctcgaacatttaactaaacgtgaaaaaccggccagccgtgatgagctggcggtagaactgcacattgaaggcgaagagcagcttgaaggcctgcgtcgccgcagtgctatgcgctgccggaacgcctcgacctggtgaaaggtaccgttattggccaccgtgatggctacggctttctgcgggttgaagggcgtaaagatgatttgtatctctccaagcgagcagatgaaaacctgcat

SEQ ID NO: 15838 - DNA, 401 bp, Homo sapiens
  SIMILAR (3)..(329): 961254mologous to Escherichia coli glutamate synthase large subunit (EC 2.6.1.53),accession number M18747,Smith-Waterman Score= 533.
cgtttgaagatctgcccgatgaagaagtgggtagccgcgaactggacgacgacacgcttgccagctaccagaaacagtttaactacagcgcggaagagctggactccgtaattcgcgtactgggcgaaaacggtcaggaagcggtcggttcgatgggcgatgataccccattcgccgtgctctccagtcagccgcgcattatttacgactacttccgccagcagtttgcccaggtgactaacccgccaatcgacccgctgcgtgaagcgcatgttatgtcgctcgccaccagtatcggtcgtgaaatgaacgtgacgatgaaagaggagcactaccgcgcagatacgctggatatcacctttgacgtcactaaaaccacgctcgaagcgacagtcaaagag

SEQ ID NO: 15839 - DNA, 3675 bp, Homo sapiens
  SIMILAR (3133)..(3495): 951254mologous to Escherichia coli 'elongation factor EF- Ts',accession number D26562,Smith-Waterman Score=569.
atgtcgtcgctgtacggttccgatgcgctcggcggtgtagtgaatatcatcaccaaaaaaatcggtcagaaatggtcgggtaccgttaccgtcgataccaccattcaggaacatcgcgatcgcggtgacacctataacggtcagttctttaccagtggaccattaattgatggtgtgctgggaatgaaagcttacggcagcctggcaaaacgtgaaaaggatgacccgcaaaactcaacgaccaccgataccggagaaacgccgcgtattgaaggattctccagccgcgacggcaatgtcgaatttgcctggacaccgaatcaaaatcacgattttactgccggatacggtttcgaccgtcaggatcgtgatcccacctcgctggacaaaaaccgcctggaacgcacagaactactccccagacctgctcactcgcacacgctgccaccccatcatcgccccgtgctgcacaactcaccccccaccaccatcgccgtcacaccgccacgacaacactcaccccgtcattcccacgccgcccactctccgccccactctccacgcgtcgctgctacacctcgtctgcgccacacgggccccactcccgaatggggcgtggtgcatcagcatccactcgaacgcttgcccgccaagctgtcggcaggccgcaaatatcgcgagcggttgatggcgaccggggcacgtcattacgggaatattcgtgccaccgcgcagaagtggctggaagaggtggagattcccgccaaccggatcgacgacctgccgaccaccttttccggcggtatgcagcagcgtttgcagattgcccgcaacctggtgacgcatccgaagctggtgtttatggatgaaccgaccggcgggctggatgtgtcggtgcaggcccgcctgctcgacctgctgcgcggcctggtggtggagctgaaactcgcggtggtgattgtcacccatgatgttagcgtatcgtccctgctggcggaccgtttgctggtgatgaagcaggggcaagtggtggagagtgccttaaccgaccgcgtgctcgacgacccgcatcatccgtatacacagctgctgcatttgcgcgccgaaaccaatattcagtatgaagggcgtcagggtgggacgctgcaactgttccgtaccgaacaacagtatgaaaatgcgaccccgcgatatcgccgtgctggaagatgccggcgtaccgtatcagctgctggaatccagcgcctggcggaagtggagcccgcgctggcagaagtggcgcacaaactgacgggcggcctgcagttacccaatgatgaaaccggagactgtcagctatttacccagaatctggcgcggatggcggagcaggcgggggttaaattccgctttaatacgcccgttgaccaactgctttgcgacggcgagcaaatctacggcgtgaagtgtggcgatgaagtgattaaggccgatgcgtatacttgcgaaattactttaatctacgtggaaacacacaggcttggctctgatccctatcagtctcggtcccatcttacccacttccggcgtgaacatttggagaaggccagaccaaatgtgcccgttgaatttgccagctccatatttggcacaatcccggcaatcacactccagaccaagaaaagcccacagcgtcatagcgatggaagaacctaccgcactgaagaacggtgcatgatgcggattccaggaatcaacgtacagcgtcgggctaaaccagaaccagccaataatgcacagaccgacgaccggaataatgaccccccacacggtaatgctactgatttgcccggtaatgcgcgcaccaccaaagttagccacggtacaaatccacagcaccccgatggtcgcaagaccaatctgcactggcgacaaactcgcgccgagcagttcggtgccgtaaccaaccgccgaaatagcaatcgcgacgttagcaatcagcaagataaacggtttcgccgttttctcttcgcgtttttcgatctctaccggcagcgcgatatggtcggagtatttgctgatgatggaacgcacgcgccagtcatcgaggaaccggtcttcgccttcacgcagatgcagggtgatttcagtaccacgatcttcttggtgatgtcggcaacggtgtattcaccttcgccagccgattcccagaagacgccattttctggtttttcgccttgccgcgcgaaacccagggattcgaggaatgatttggtaccggatttagcgatagtccccagatggtcaatcacttcgtcgcgtgtcatccccacgccgttatcggagatggtcaggaacccagcaccagaacgcctaagggagaaaaactaccggccaaccaagggcaccattcgagcaaaattacaaggttgcagcaacccattcgggaaaaagccgaacccgtccagcgggccatcttcggccaataatagcccagacttggcggacaaacggggaattgttacaacaaaagccgaattaaagctgcggataaacgcccaggggttactacccaagtacaccgaacgtttgtacaaacgacccggccaaagaggagagggcgatttcacccagcacgccttcgttagtggggacatcacgccagcccacaatcgacaaggtttcgcgttgcagttcttcttcaacgatgcggcgtgcggcagcggcgagttcaggatctttattcaggaagagcatcccgacagccaagccgcaaccgtcgccggttttaccatcggcgagaatcgcgccacggtgctgcatgcgggccagtgcgtgtattgcagtacgcactaccttgtggctaggttcgccttctatgtgggcgatcaggccgaaaccacagttatccctctcaagggatttatcgtacaacatatcgtgaacctcccccaggctctgcgggaaccccacttccgaaccgtgcgcacgggcacagaaagagcgtggcgacggggtgaggtcatccaggccacaacgccaaggatcgtcttcaccgaccagttgcccgtcagcaaaaccttcccgttgatagctatagggaatatcttctccgttatcgccatcattaaggaccattctgccgtcgtgggtaaagatggcaaaggcatgatggattccaaaaaggcactgactgaagctaacggcgacatcgagctggcaatcgaaaacatgcgtaagtccggtgcttttaaagcagcgaaaaaagcaggcaacgttgctgctgacggcgtgatcaaaaccaaaatcgacggcaactacggcatcattctggaagttaactgccagactgacttcgttgcaaaagacgctggtttccaggcgttcgcagacaaagttctggacgcagctgttgctggcaaaatcactgacgttgaagttctgaaagcacagttcgaagaagaacgtgttgcgctggtagcgaaaattggtgaaaacatcaacattcgtcgcgttctgcgctggaaggcgacgttctgggttcttatcagcacggtgcgcgtatcggcgttctggttgctgctaaaggcgctgacgaagagctggttaaacacatcgctatgcacgttgctgcaagcaagccagaattcatcaaaccggaagacgtatccgctgaaagtggtagataaattataa

SEQ ID NO: 15840 - DNA, 1951 bp, Homo sapiens
  SIMILAR (1524)..(730): 951254mologous to Escherichia coli glutamate synthase, large subunit,accession number U18997,Smith-Waterman Score=1264.
tcatctggcctgaactgccggaggagtaggccattcaatatctggcgcactggaagtatcgaccagctccagtgcgtccagataatccagccacaaattatattgcgccagttcctcacctttcagacgaccaatagccgctttaccagcccattgtttactgttcatataatcgttggcctgattaatcaattgctgctttttcagttcggctgcagcaatctgttcctcatgtgttggtggtggaatttcagaccatgcaggaaaaccattttctccagcgatacggatttttcctttcggcggtaatccggaaaactcaatatacacttgctcatcaacttcaacagcatcatctggccatgagccagcttgcgtgtaaaagtacatatttgctgatttaacagggatttttgtggatcggacttcagattgataaaggggacgccccgtagctccgacgacagcataaaaataatgctttttcaccagcccaatcagcgagccgccatcggcgacgaaatcgcgcattagctgcgcttcattcagaccgctgacgacctggcgatgcagggcctcaatcgcgctcgatgcaccaattttatgtgcggaaggggcgattttttccagcaatcgcaaggtatcttccgttagcggtcgacgatctccagtgtgcggatcggtgatgacgccttcaagcccatagcgatcgacagccgtaaagccatgtgagatgccattgtgacatgatttgtacagcctttgtgatgcgttacggtagttgagcatcacggtacgataatctttggcatcggcataggtgtctaccaggcggcccagcgtttcataggcaaggtatggataaatagccgtcgcgccgaagcccagcaacacggcgaagtggtgcggatcgcgggcgctggcggtttcgacgatgatgttggcatcgcaacgcaggctttgatcgaccagacgggtctggatcgcgccaaccgccatcggggctggaaccggcaggcgatctttagcgatattccggtcggagagcaccagcagcacggtgccgctacgtaccattttttcggctttgacgcacagctctttgactgtcgcttcgagcgtggttttagtgacgtcaaaggtgatatccagcgtatctgcgcggtagtgctcctctttcatcgtcgtgagctgtttgaaatcggagtagagcagaatcggcgatttaaagcttaaacggtgcgcctggccctctgcttcgcaaaagacgttcatttcacgaccgatactggtggcgagcgacataacatgcgcttcacgcagcgggtcgattggcgggttagtcacctgggcaaactgctggcggaagtagtcgtaaataatgcgcggctgactggagagcacggcgaatggggtatcatcgcccatcgaaccgaccgcttcctgaccgttttcgcccagtacgcgaattacggagtccagctcttccgcgctgtagttaaactgtttctggtagctggcaagccgggtcgtcggccagttcgcgggtacccacttcttcatcgggcagatcttcaaacggtaccagtcggcggacgtttttctccatccactctttatatggatggcggcttttcagatcgtcatcggtttctgccgagtgcagaatacgcccactgcgggtgtcgataaccatcagttcgcctggcccgacgcggcctttttcgaccacttcgtcaggctggtaatcccagataccgacttcagaggcgcaggtgatgagcaatctaatgggcaccaacggagtgttgcgtccagcgagggcatacaggaacgaggcagttttatcgtgagcactggtttctgcgatgtattcgcagactttcaggaacgcgtcttttggcgtaccacagatgttttcaaccacatctggcgtgtagcgggaaacgtg

SEQ ID NO: 15841 - DNA, 1466 bp, Homo sapiens
  SIMILAR (635)..(1132): 891254mologous to Escherichia coli Putrescine transport protein,accession number D90708,Smith-Waterman Score=752.
atgaaagaggagcactaccgcgcagatacgctggatatcacctttgacgtcactaaaaccacgctcgaagcgacagtcaaagagctgtgcgacaaagccgaaaaaatggtacgtagcggcaccgtgctgctggtgctctccgaccggaatatcgctaaagactcgcctgccggttccagccccgatggcggttggcgcgatccagacccgtctggtcgatcaaagcctgcgttgcgatgccaacatcatcgtcgaaaccgccagcgcccgcgatccgcaccacttcgccgtgttgctgggcttcggcgcgacggctatttatccataccttgcctatgaaacgctgggccgcctggtagacacccatgcgattgccaaagattatcgtaccgtgatgctcaactaccgtaacggcatcaacaaaggcttgtacaaaatcatgtccaaaatgggcatctccaccatcgcctcttaccgctgctcgaaactgtttgaagcggtcggtctacacgatgatgtagtgggcctgtgcttccagggggcggtcagccgcattggtggagcaagctttgaagacttccagcaggatctgctgaatctgtcgaaacgtgcctggtggcgctgcagattgtctgcgaccatcgggtgctgtgattgtacccgtggctacttgggtggtgcgcgcattaccgggcaaatcagtagcattaccgtgtggggggtcattattccggtcgtcggtctgtgcattattggctggttctggtttagcccgacgctgtacgttgattcctggaatccgcatcatgcaccgttcttcagtgcggtaggttcttccatcgctatgacgctgtgggcttttcttggtctggagtctgcgtgtgcgaatactgatgtagtggaaaacccggaacgtaatgtgccaatcgcggtactcggcggtacgttaggtgcggcggtgatttatatcgtctccaccaacgtgattgccgggattgtgccaaatatggagctggcaaattcaacggcaccatttggtctggccttcgcgcagatgttcacgccggaagtgggtaaagtcattatggcggttgatggagatgtcttgtgcgggttcgatacttggtggcaagttcaccattgcacaggtgtttaaatcttcatctgatgaagggtacttccttacaattttctcccgtgtaaccaaagtggatgcaccggtgcagggaatgttgaccattgtgattattcagagtgaattggcactgatgaccattagcccgtcgctaaacagtcagttaaaggagatggttaacctggcagtggtgaccaatatcattccgtatattctgtcaatggcggcattagtcattattcagaaggtcgctaatgtgcccccgtcaaaagcgaaagttgcaaactttgttgcttttgttggcgcgaggaatagcttttatgcgctgtaa

SEQ ID NO: 15842 - DNA, 3669 bp, Homo sapiens
  SIMILAR (2524)..(3063): 1001254mologous to Escherichia coli yehP,accession number U00007,Smith-Waterman Score=918.
atggggatcgtcaacgccgggcaactggcgatttacgacgacctacccgctgaactgcgcgacgcggtggaagatgtgattcttaatcgtcgcgacgatggcaccgagcgtttactggagcttgccgagaaatatcgcggcagcaaaaccgacgacaccgccaacgcccagcaggcggagtggcgctcgtgggaagtgaataaacgtctggaatactcgctggtcaaaggcattaccgagtttatcgagcaggataccgaagaagcccgccagcaggctacgcgcccgattgaagtgattgaaggcccgttgatggacggcatgaatgtggtcggcgacctgtttggcgaagggaaaatgttcctgccacaggtggtcaaatcggcgcgcgtcatgaaacagggcaaagagcagggcaaaaccaacggcaagatggtgatcgccaccgtgaagggcgacgtccacgacatcggtaaaaatatcgttggtgtggtgctgcaatgtaacaactacgaaattgtcgatctcggcgttatggtgcctgcggagaaaatttctcgctcaaaggccactgccgagcgggaaccactgccagtgcaactcaccggagagcgagtgcgaagaaggaaagcaaaagtaccacaacaaccagccggttatggtgccgaccagcaggccataacgggcaaaacgttgcggcaggaagataatcatcgccagtaccaggcacatcaccgccaccgagagcgcgaacggcgcccgagcatacctttgaaaaagatagtggtcagctgcgcgcccagcatcaacataaacaagaccatcaccgacggcgtaaataaccgtgccaggcgatggcctaatccgctaaaaccaatcaacatcgtcagcacgccggagagtgcaatccccactgccaggctggtggcgatatcgttgatcggtgtcccgcgcgatgcttcaccaagggtgataatccttctcggcttcctctgcaacctgaatgaactctttgccacggtgactcacttccatcaccgacgtaccaagaccgttccagtcgcgcagttcctgttgagcctgtttaagcacctctgccggttcaagacgatatttcctagcttccacataacattgaaaaacgccactgagcactacagctatctcaatagcctacgactggtggcggcaaacagctatacgtcagtggcttttcctgcaatcagtactggggtttatggttaccctcgtgcggcagcggctgaaatcgcagtaaaaaccgtttcagaatttattacccgtcacgctttacccgaacagatgtcatggcataagacccgtggtagaggacgtgccgatgatttcgcctgctactggtatgccaaatcggatatactatgtgacatgtgctctaaagcgcagcacgatcaactgtatcagctgtcgtcatcaggcgtgaccaaagtctcagcattacctgactcgctcaccacgccgttagggagtttgtggaaactgtatgtttacgcctggctggaggatacccatcaaccggagcagccctaccagtgtcgcggaaactccccggaagaggtttattgttgtcaggctggggagagcataacgcgcgataccgcgctggtacgttcctgtgggctctattttgcgccgcagcggttgcatattggcgcagatgtgtgggggcaatactggcaacagcgtcaggcacctgcgtggttagcgtctctgactacgctgaagccagaaacctcggtaacggttaaatcgctgcttgattcattagcgacgttacccgcgcaaaacaaagctcaggaagtcttactggatgtggtgctggacgaggcgaaaatcggtgtcgcatccatgctcggtagtcgggtacgggtgaaaacctggagctggtttgccgatgataaacaggaaatccgtcagggtggttttgctggctggttaaccgatggtctggttgcccgtttcctcgggagtttgctcatcgcgccccgcgtcagcgatccttcccgcctgatttccgccttgcgcgtgctggcactgctgacacttctctttgctgtcgccttctgggcgggggcgcacgtagcgtggctgatgctggtgatgattggctttaaccctctttttctcaccactgtgcgactgtggggctcggtggcgtttgtcattggctcggcgctgacgggcaaactggtcactatgtttgattatcgggtgatcctcgcgctgttgacgttgggcgtggcatccatgctgctcggctttctcatccgtccgacgattcagccacaaggggcaagtcgccagcaggagagcaccggcctgtaccgccagtacgacatgttcgcaaagtgtgccttcaatacaatcacaacgggcgaaacgaatactgctgcgggaataaaaacgcacatcgctcatcggccattgcacatcatcaacaactcgaacagcaggcactggcatcgctgcaaaactggggagttttccatgtctgaactgaacgatcttctgaccacccgtgagctacaacgctggcgattaattcttggcgaagcggcagaaacgacgctttgtgggctggatgacaacgcccggcagatagaccacgcgctggagtggctgtatgggcgcgatcctgaacggctccagcgtggtgaacgttccggtggattaggtggctcaaatctcaccacccctgagtggatcaacagtattcacacgctgtttccgcagcaggtgattgagcggctggaaagcgatgccgtgctgcgctacggcattgaagatgtggtgacgaatctcgacgtgctggaacgtatgcagccttctgaaagcctgctacgcgctgttttgcacaccaaacatctgatgaaccccgaagtactggctgccgcccgccggatagtgtgccaggttgttgaagaaattatggctcgactggcgaaagaagttcggcaggctttttctggtgtccgcgatcggcggcgccggtcatttattccactggcgcgaaactttgatttcaaagtactctgcgcgccaacctgctacactggcacccgcaacacgcgaacaagggcgcgcgacggggcttctccggacaaacctgtctacaccgaatggtgtgtagatatgagcaaaccgggcatcaaagtgaccaaacttgaaaagctcggtctgcgtatggatagctgctgtgaaatcacctttgacgacgtggaactggacgagaaagacatgttcggtcgggaaggtaacggctttaaccgcgtcaaagaagagttcgaccatgaacgtttcctggtagccctcaccaactacggtacggcgatgtgcgcctttgaagatgcggcgcgctacgccaatcagcgcgtgcagtttggcgaggctattggtcgtttccagttgattcaggaaaaattcgcccacatggcgatcaaattaaactccatgaaaaacatgctgtatgaagcagcgtggaaagcagacaacggcaccatcacctctggcgatgcagcgatgtgcaaatacttctgcgccaatgcggcatttgaagttgtggatagcgcaatgcaggtgctgggcggtgtcgggattgcgggcaaccaccgcatccagccgcttctggcgtga

SEQ ID NO: 15843 - DNA, 2067 bp, Homo sapiens
  SIMILAR (1024)..(1428): 621254mologous to Escherichia coli hexosephosphate transport protein,accession number M89479,Smith-Waterman Score=344.
tcaactgcagtgaggtccagcgtacatatcttcgtgcgcgcacacgttgaacggatagactgatgtgccatgaggcgtttgatgaatgtctgcggcatgtcggctatcagcctgtccagctcgtagagcattgccgtcgtctgtggtgtgccggttgcgggcaagtccatcgtcagccggagcggcctcgacagctccactaatctggtcctgacgttctagatcagagcttcgttgagcggctgtccagtgttcggcgtcgcgagagatcgcgagcaatagcatgtcgcgatagctccagaatagagccaggtgtccggtgtactggggcctggcgacgttgcgatattgccctgtcaaggcgtaggcatttccgtcctctttggtgtgaccttttgcagtacgtccatcgtagccggaccggcgctggccctccccaaccaggtctcggcccgtggcggacgataggccccgatttatggccccgtttaccgttggtacgggagccttgccactttcgcgaatgacggctatggacgacagcgccacttcccgtggcggtaccgcaattggaattctgcggaagaatggctgtaattccgccagttttgccttaatggctttcgcggtatcgagagcattcgcgccggttgccagcttaactcggacaacgccgccagttggtcggcctgatgttccttccatcacttcatccaggcggtagagcgtcaggttgatgcggtgatcggtaacgcgccctttcaccgctttctggtagcaaaccggaagcaaatccgcaaaaggaattaccactaagttgatgctgccagttgacggaaaccgtggcgtgtttgaacgctttgttccagttaatattaaggttgcttgagtcattgtcaccgtcgtaactatatgttttatagccatgttaaatcgggcaggggaaccagactcgaccggattgatgccgcctgataattttctgctacgataacgccgccgttcattgcactccagcgtgtcagattccatccgctcgatgcattgctgctgtttgttatcagtctctggctccagttgggattgccggacgaactgtcgcgctttacgccattctgtctggcgctgccgattatcgcgctggcctggcactatggttggcaaggggcgctgattgcgacgttgatgaacgccatcgcgctgatcgccagtcaaacagggttgttgcttggcgctggcatccagcggttgcgtgaacttaaccagtcgctgcaaaaggaactggcgcgcaatcagcatctggctgaacggttgctggaaaccgaagagagcgtgcgccgtgatgtggcgcgtgagctgcatgatgatatcggtcagaccatcactgctattcgtactcaggcgggcattgttcagcggcctggagcaggccatccgctcactgatgcgggaaatggagctggaagggcgcggtattgtcagccatctcgaatggcgaatcgatgaatcagcgttaagcgaaaagtcgtagagcatcggtgcttcgtcgatttcaccttcaccaatgacgatggtgccgtcaatgttgaccgccgcgccgtccgcggtgtttttatcgccgcgtcctaaccatttgtagccagccagcgccgctgattcggtgacgcgggaaaattcgatggcaagttctcgtctcatagcaaactgctcagtggtttcgatgcctggacggaactcgcgctcaatcaccgctttctcttgcagctcgtcgaggttctgccagaagccaaccgccagcttcgccagtcgggcgcaggcgatggtggtcagcaggccgttttctgatttcaccgctttctcgccagtgttcatcagcataaagcagccagtgcttctccgccgtacctgttccgcataaaatgcccagtcccacggctgcgcgctaaacccgccctgctgcttatcgataaccgcctgtatggaggctaattcatcgctcgcacgttgacgcgccgctggaacaatttcccgcataaagttaagtgctgcttcaggtgtttttgccat

SEQ ID NO: 15844 - DNA, 666 bp, Homo sapiens
  SIMILAR (1)..(312): 991254mologous to Escherichia coli K12 putative DEOR-type transcriptional regulator,accession number AE000357,Smith-Waterman Score=499.
atgtcagcaggacaaaggaaggagcaaaagttgatacccgtagagcgtcgccaaatcatccttgagatggtagctgaaaaaggcattgtcagtattgctgaactaacggacagaatgaatgtgtcacatatgaccattcgtcgggatttacaaaaactggagcagcagggagccgttgtgctggtgtccggaggcgtccagtctccgggacgcgtggcgcatgaaccttctcatcaagtaaaaactgcgctggcaatgacgcaaaaagcggctattggcaagctggcggcaagtcttgttcaaccgggaacatctgattcacatggagtcactgactgtggtccaaacagtgtcatgggagtcgtctcagatgagatgtcatactatgtgaatgctgaacgagatcacgacgaacgtgaaacgagcttgaacggcagtatcagtcccaatctccattacacccaagtcagccttgccgcaggagcaagcggcagtgatagccgtacttacaacgacacacgacgatcgtcaagaatgagttcatcgcagcgcactgcaaattgcacactctctgataacgcctgtaatgaagaagtatcatcacgttggatcccaagacaagccccgagtagccctaataacccgcttcgggtcggaaatcttccg

SEQ ID NO: 15845 - DNA, 1137 bp, Homo sapiens
  SIMILAR (166)..(591): 941254mologous to Escherichia coli K12 putative outer membrane protein,accession number AE000401,Smith-Waterman Score= 730.
atggggaaatttggacacacagaaattggtgaagttgatgtcagagactggagtgatgctttacaagccaaggaactccaaaagttgccaggacactccaggaagctagaagaccctcctaccagcctcttcatgctcctgaaccctcactccgaccagttctccagcaatgcccatcaccacctccacgctacagcgattgatgatgattataccgatccgactaaaagcacttatgcgcttggtttaaactggtctaactccattctgggtggtttcaacatcagtggctataaaacatatagttacgacggtgacaatgactcaagcaaccttaatattaactggaacaaagcgttcaaacacgccacggtttccgtcaactggcagcatcaacttagtgcttcagaaaataatgaagacgatggtgatctgttctacgtcaacatcagtattccatttggcagatcaaacaccgccacactgtatactcgccatgacgatcataaaacccactatggtactggtgtcatgggagtcgtctcagatgagatgtcctactatgtgaatgctgaacgagatcacgacgaaccgacgttacccgcgcaaaacaaagctcaggaagtcttactggatgtggtgctggacgaggcgaaaatcggtgtcgcatccatgctcggtagtcgggtacgggtgaaaacctggagctggtttgccgatgataaacaggaaatccgtcagggtggttttgctggctggttaaccgatggtacaccgctgtgggttactggcagtggcaccagcaaaacggtactaacccgttatgcgacggtgcttaatcgggttttgccagtgccgacgcaggttgccagtgggcaatgtgtagaggtggagctgtttgcccgctatccgctgaagaaaatcacagcggaaaagagtacgacggcagtaaatcccggcgtacttaatgggcgctatcgtgtgacgtttactaatggtaaccacattacgtttgtcagccacggtgagacgaccttactgagcgaaaagggcaaactgaaattgcagtcgcatctcgatcgtgaagagtacgttgccagagttctggatcgcgaggcaaaaaagtacgccccctga

SEQ ID NO: 15846 - DNA, 695 bp, Homo sapiens
  SIMILAR (505)..(693): 1001254mologous to Escherichia coli MviM protein,accession number D90743,Smith-Waterman Score=339.
tcaccaaatatgagcaacgtttttgtaattcagaatttggcgatctgaactgagcgcagcggaagtggcgttaatcaccacgttgttattgcgtggtgccagacgccaggtgaactgcgcagccgcgccgcgcgaatgtatgaattcgcgatatggcggaagtggagtcgacgctggaacaactggcaaatcgcgagatggtccttttgtggtgcgtctggcccgcgaaccgggtaaacgcgaaaccgctacatgcatcttttcagtggtgaggttgaagatcagccggcggtgcggatatgtcgaacgcggttgacggtgatttacaggcccgcgtcgaagcctggaaatcgaagtggcagaactgaaacagcgtcttgattcgttgctggccatcggtgctggcggcagcgtctgctggacgttacaaggagcctggtcgcctacgcgcgcgaaagccggtgagttaaaaacgcaactcgccaccgcagcctcgctaagaatgataaacatcgtagcaatagcgtcgggccacacgatctttatttcacgttgctggatgattatctgcatgtggtggataccgcgctgtggttgtcgggcggcaaagcctctctggatggcggtacgctactgactaacgacgctggcgaaatgctgtttgccgagcaccatttttcggctggtcctttgca

SEQ ID NO: 15847 - DNA, 235 bp, Homo sapiens
  SIMILAR (234)..(115): 1001254mologous to Escherichia coli methionine synthase,accession number J04975,Smith-Waterman Score=212.
cagatcctgagcgacaaacgaggtcaccagcatggtggtggcattactgctctgtaccagtgcggtaacgccgatccccgcgcaaaaggcgagcggctttttttcgacgctccggcccagattcggtgccagccagcgctcaacttcggtaacgctcatacctttacggcgggcataatcttcaacctgatcgcgctgaatttgtgctacagcgtagtacttgctgtccgggtgg

SEQ ID NO: 15848 - DNA, 593 bp, Homo sapiens
atgatcgataacggtcatgccgctcggttggcagggttttatcaccgctggtttcgttattcgccatgtgaatggcgtgactatcttgctgaactaaatgagcaaggtcaggcttatgcgcaatttgtcgccagcaccgccgaatgctgtggcgaagggggaatcaaagcctgggattatgtccggatgggttttttaagccgaatgggcgtacttaataactggttgagcgaagaagaaagtctatggatccagtcgcgcattcatctacgggctctacgttattatagtaactggcggcaatactttgccggttatacctttggtcggcaatattggcagtctcccgaagatgatcatctgcctttattacgcgaattcttagcgcgccacgagtatatgcagaagtatctgctggggaccgaaagcgggattcagggcgaggaactcggtgccagcgacgggatcaaaccggaagaagtcgagtggcaaactgcagcgattgaaggcaagctcgacctgctggtgacgctcgacttccgcatgtccagtacctgcctgttctccgatatcgttctgcccaccgccacctg

SEQ ID NO: 15849 - DNA, 4106 bp, Homo sapiens
  SIMILAR (2061)..(2960): 931254mologous to Escherichia coli phenylacetaldehyde dehydrogenase,accession number X99402,Smith-Waterman Score=1407.
agaagttcgccacagcaatccgaaaccactggcacgtggagaataagctgcacaggcgtctggacgtggtaatgaatgaagacgactacaaaataagaagaggaaacgcagcagaattattttcagggatacggcacattgctattaatattttgacgaatgagaaggtattcaaggcagggttaagacgtaagatgcgaaaagcagccatggacagaaactacctggcaggaattcgcccggaagcgcagaaagaatcgacggcttaccacgaagcgggtcatgcgattatcggtcgcctggtgccggaacacgatccggtgcacaaagtgacgattatcccacgcggtcgtgcgctgggtgtgactttcttcttgcctgagggcgacgcaatcagcgccagccgtcagaaactggaaagccagatttctacgctgtacggtggtcgtctggcagaagagatcatctacgggccggaacatgtatctaccggtgcgtccaacgatattaaagttgcgaccaacctggcacgtaacatggtgactcagtggggcttctctgagaaattgggtccactgctgtacgcggaagaagaaggtgaagtgttcctcggccgtagcgtagcgaaagcgaaacatatgtccgatgaaactgcacgtatcatcgaccaggaagtgaaagcactgattgagcgtaactataatcgtgcgcgtcagcttctgaccgacaatatggatattctgcatgcgatgaaagatgctctcatgaaatatgagactatcgacgcaccgcagattgatgacctgatggcacctaggggtcccaccccagacctgtgtgggaccccgcgcctttatcgcggaaacgtggaaagcggcataaacggccgccgcacacaggtgaacgcttcaagtgattcgctgcacgggttaaacccgggggacaacgccgcgggtttctccgcagaagagcgcgaaaccgccaaaccggcactggtgatggcctgtgttggcgttactgaaggggcgattcctttcgccgctgccgatccgctgcgtgtcattccttccatcatggtcggttcagtttgtggtgcagtaactgcggcgctggtcggtgcgcagtgctatgcaggctggggtggtctgattgtgctgccggtggttgaaggcaagctgggttatatcgcagcagtggctgtcggagcagtggtgacggctgtttgtgtgaacgtgctgaaaagtctggcgcgtgttgcccatacctatatggcagcagaggcgctggaaagtgccgcgaaagcgaaaggctgggaagtgaaagtagaaacccaggggtcaattggtctggaaaatgaactgactgcggaagatgtggcgagcgctgatatggtgattctgaccaaagatatcggcatcaagtttgaagagcgttttgctggcaagaccatcgtgcgcgtcaacatcagcgatgcagagttcctaatgacgatggtaccggcggcctttggcgttccggcaacggtgcacattttattggcggcgctggtaggtatcgcacctatttatatcgccattcaggcaatccctgacggtacgggcaaaaatgctgccgatggcacccagcatggcgaaaaaggcgtacctttttatcgcgatatccagttgctgctgataggtgttgtggtgctggcgatggcctttgccgaaggttctgccaacgactggttacccttattaatggttgacggtcacggttttagccctacttccggctcgctgatttatgccggttttaccctggggatgaccgttggacgcttcaccggcggttggttcatcgaccgttacagtcgcgttgccgtggttcgggccagtgcactaatgggggcgttgggtattgggctgattatttttgtcgatagcgcctgggtcgctggggtgtctgttgtactctggggactgggtgcctcgctgggcttcccgctgaccatttctgccgccagcgataccgccccgagcaccaacccttttgatacgactttagctcggtacccggaaggctgttcaatcgtgattaagccttcggaaaccacgccactgacgatgttgcgcgtggcggaactggccagcgaggctggtatccctgatggcgtttttaatgtcgtcaccgggtcaggtgctgtatgcggcgcggccctgacgtcacatcctcatgttgcgaaaatcagttttaccggttcaaccgcgacgggaaaaggtattgccagaactgctgctgatcacttaacgcgtgtaacgctggaactgggcggtaaaaacccggcaattgtattaaaagatgctgatccgcaatgggttattgaaggcttgatgaccggaagcttcctgaatcaagggcaagtatgcgccgccagttcgcgaatttatattgaagcgccgttgtttgacacgctggttagtggatttgagcaggcggtaaaatcgttgcaagtgggaccggggatgtcacctgttgcacagattaaccctttggtttctcgtgcgcactgcgacaaagtgtgttcattcctcgacgatgcgcaggcacagcaagcagagctgattcgcgggtcgaatggaccagccggagaggggtattatgttgcgccaacgctggtggtaaatcccgatgctaaattgcgcttaactcgtgaagaggtgtttggtccggtggtaaacctggtgcgagtagcggatggagaagaggcgttacaactggcaaacgacacggaatatggcttaactgccagtgtctggacgcaaaatctctcccaggctctggaatatagcgatcgcttacaggcagggacggtgtgggtaaacagccataccttaatgacgctacttaccgtttgtgggatgaagcagtcagaacgatttttttcattaaatttagagatccctgggcgtagacggtgccaacgaagtgataacgagattcgtcagggccagccgattggtctgggcgaagcatctaacgatacgtggatcaccaccaaagtgcgttcgcagctcttaaatgagccattgttccccaactacctgtttgtggaatttgacccagaagtgattcataccacgactatcaacgcgacccgcggtgtcagccacttcgtgcgctttggcgcgtcgccagcgatagtcccatcggcggttattcatcagctatcggtatataaaccgaaagacattgtcgatccggcaaccccttatccgggtgataaggtgattattaccgaaggcgcgttcgaaggctttcaggccattttcaccgaacccgatgggtgccaaaaaaggttattaagcgcgctcggcaaaagttgcctgagctggaaagcatttcgccgaccgccgccgctacgcaagtggatggtacgcaaatgtctttgctgtcagtaccagaagaaacttcgcctgcggtcgaagctctggaaaatcttgatccggattcactcaccccgcggtaaaaccatgccatctacacgctatcaaaaaatcaatgcccatcactatcgccatatatgggtcgttggtgatattcatggtgaatatcagttattacaatcccgcttacatcaactctcttttttccccaaaatcgacttacttatttctgtcggcgataatattgatcgtggaccggagagtcttgacgtcctgcgcctgctaaaccaaccctggtttacgtcggttaaaggcaaccacgaagcgatggcgcttgaggcattcgaaactggcgatggcaatatgtggcttgccagcggtggtgactggtttttcgatttaaatgattcagagcaacaagaggcaatagatctgttgctgaaattccatcaccttccacatattattgaaatcactaacgacaacataaaatatgccatcgcacatgcagattatccggggagtgaatatctctttggtaaagaaatagcggagagcgaattactctggcctgttgatcgtgtgcagaaatcgcttaatggcgagttacaacaaataaacggcgctgattattttatatttggatggcgcacacatcctgaccatcgatttacactctaa

SEQ ID NO: 15850 - DNA, 1361 bp, Homo sapiens
  SIMILAR (616)..(1359): 941254mologous to Escherichia coli leucyl-tRNA synthetase,accession number X06331,Smith-Waterman Score=1244.
atggagatgagttccttggagtttcttcacagcatctgtagccatctgaagtgtcatcttctgtactatattgccagtgcctacaattacgactggtatactcaaccagccaaactaagcttcataagtgaaggagaaataaaatactttacagacaagcaaatgctgagagattttgtcaccaccaggcctgccctgaaagagctcctgaaggaggcagtaaacatggaaaggcgcaacaggtgggttgatatcggccccggtaccgagctcgattgtatcagtcaggcttatgcgcaatttgtcgccagcaccgccgaatgctgtggcgaagggggaatcaaagcctgggattatgtccggatgggttttttaagccgaatgggcgtacttaataactggttgacgcgaagaagaaagttgctatggagtgccaggtcgcgcattcatctacgggctctacgttattatagtaactggcggcaatactttgccggttatacctttggtcggcaatattggcagtctcccgaagatgatcatctgcctttattacgcgaattcttagcgcgatatgagcgacctatgaaaaagttggctggaagatcctcgatagccattttggcgttccggggccacgaccagcgcgattacgagttcccctctaaatccgccttgaacatcaaccggtttatcttgccagctgacgtctctgacccagatctttctcagcaagccctgactgaaaaaggcgtgctgttcaactctggcgagttcaacgttctggaccatgaagcggccttcaacgccatcgccgataaactgactgcgatgggcgttggcgagcgtaaagtgaactaccgcctgcgcgactggggtgtttcccgtcagcgttactggggcgcgccgattccgatggtgacgctggaagacggtaccgtaatgccgaccccggacgaccagctgccggtgatcctgccggaagatgtggtaatggacggcattaccagcccgattaaagcagatccggagtgggcgaaaactaccgttaacggtatgccagcactgcgtgaaaccgacactttcgacacctttatggagtcctcctggtactatgcgcgctacacttgcccgcagtacaaagaaggtatgctggattccgaagcggctaactactggctgccggtggatatctacattggtggtattgaacacgccattatgcacctgctctacttccgcttcttccacaaactgatgcgtgatgcaggcatggtgaactctgacgaaccagcgaaacagttgctgtgtcagggtatggtgctggcagatgccttctactatgttggcgaaaacggcgg

SEQ ID NO: 15851 - DNA, 1100 bp, Homo sapiens
  SIMILAR (631)..(2): 981254mologous to Escherichia coli K12 putative chaperonin,accession number AE000297,Smith-Waterman Score=1047.
gtaacggttccatcaacggcatggtccgtgctggagcatgaaggcggaatcgctgcaactctgtcgcgccgactgtcaacgccgattccagccgatgtcgtttggcggtcattttcgccattaccgcttgtctgtctgctggcgttatcgcttcattcggcctgaacacaaaacggcgttcacagctcgctttccagtcgataaccgcctgggtcagatggtcgccaaaccctttcacttgcttaacgccacgacgggtaacatctgcggctgtttcaataccaaaagaccgtaacgccgctttacgcgcagggccaacgccgggaatagaggcaacatcaataaaaaatccctccagaaacttctgcttctgccgttcccttgcagtgtcatgaagtgctgccagagcgcgtttctcttcttccggtaacccgagaatttcgtccttcattttttcgagcatcgtccgtttggcgataaaaccttccaggccgcctacctgctggatctggcggactaaatggtcatagtccattttcgcacgattaaatgcctcacggcgttgctgaacttctgctttgtacgctttgcttgtcagactgccaataatccagataaccgccaagggaatcctatagacaccgctggcaagccacatattgccatcgccagtttcgaatgcctcaagcgccatcgcttcgtggttgcctttaaccgacgtaaaccagggttggtttagcaggcgcaggacgtcaagactctccggtccacgatcaatattatcgccgacagaaataagtaagtcgattttggggaaaaaagagagttgatgtaagcgggattgtaataactgatattccccatgaatatcaccaacgacccatatatggcgatagtgatgggcattgattttttgatagcgtgtagatggcatggttttaccctgtaaaataagctttcctattatacagggtgtttttattttattcgtcagtggtcgttaatattcccgatagcaaaagactatcgggaattgttattacaccaggctcttcaagcgataaatccactccagcgcctgacgcggggtgagtgaatcc

SEQ ID NO: 15852 - DNA, 952 bp, Homo sapiens
atgtatttaggtgcctgcctttttgcccctttcttcctcatggggaattgatgaccgtgatgacctgctgcgcacaattcaccgaatgatcgataacggtcatgccgctcggttggcagggttttatcaccgctggtttcgttattcgccatgtgaatggcgtgactatcttgctgaactaaatgagcaaggtcaggcttatgcgcaatttgtcgccagcaccgccgaatgctgtggcgaagggggaatcaaagcctgggattatgtccggatgggttttttaagccgaatgggcgtacttaataactggttgagcgaagaagaaagtctatggatccagtcgcgcattcatctacgggctctacgttattatagtaactggcggcaatactttgccggttatacctttggtcggcaatattggcagtctcccgaagatgatcatctgcctttattacgcgaattcttagcgcaggaaacgactgacgtcgatattatccgccgcgcttatctggcgctgttaccgtcctttcatacagaaaccgatccgcagggttttaaacaacttcgtcatgcgtatgatgatgcgctaccgattgcgcagtcgcctgctaaatctgttttgcaaccagaagaatatgagtgggaagcgttgctggtggaaatgctcggcctgttgcatcgtattgcgatggtacaactttcgcctgctgcacttggcaacgacatggccgccatcgagctgcggatgcgtgaactggcgcgcaccataccgccgacggatattcagctttactatcagacgctgttgattggtcgcaaagaattaccgtatcgaacctgccaacttcatgcctgcacgtctgcagacacacctcttcgtaaaatcccgcgcttcagtggcaaactccatttttatgcgttttgccctaatatttattcttcttatcac

SEQ ID NO: 15853 - DNA, 1585 bp, Homo sapiens
  SIMILAR (845)..(1294): 921254mologous to Escherichia coli K12 putative enzyme of polynucleotide modification,accession number AE000169,Smith- Waterman Score=740.
atggctgacagggtagattcaaagtgttctcgttcgaggccgggcgcggtggctcacaactataatcccagcactttgggaggccgaggcgggcggatcaccttctggttgttgagtgccaacccgtcgatcaaccgcggtacgctggagaaagagagccgcaccgtcgcgcaacgtctctccgtgctgcacggcatcaacgcgccggagttcttcgacaaggcggtgttcagttctctggtgctgacactgcgtgatgaagggtatatcagcgatagcggcgatgccgaaccggcagaaacgatgaaggtttatcagttgctggcggagttgattacatcagacttaatgatctttaacatcagcgccaccgttctctacatcaccgccttcatcgcctgctctgcggcagttgacctgacatccctgaggggcacccggccttataaccagcgcgcggctgcctcgaaagaaatagaagacctgaaaaagaagctcacagaaggggaagaaatatcaggctgtgatgtcagtgggtcggacggagatgacaatgaagagggtaagattggagaagatgaagagaaaaggaacaccgggggaaataaagtcttcccagagaggacggttgaaacgccggcgacagcggatgcggagagaaaggcacttgaaacaaagcttgacgtggaagaagaaacaaggctgcagcttaattcgagaaacaggaaaaaagatcttaaaacccgacaagagcatcagtctttgcccgaaaagttctctggcctccagaagaacgtactgttggaggcggtgattgacccggctctgattgcacaacttcgtcaggcgtatgaggaggcgctacaggattgcgcaagcgcctgctaaatctgtttggcaaccagaagaatatgaggaagcagaacatgaaattctgctcgcctttcgtgcgttacttgcctctgatagtgaacgatttctgccctccgcctggcagcgattcattcagcaattaaattattgctcgatggaggagattgacgaattacgctggtcgctgtgcacaatcgccatgaacactgcccatttatccttcgagtgcgtggtgttattagcagaaagattgcggtggttacaggaggaaaataccggggaaatagacgaagaagaactggaatcctttttatatgccattgcgaaggggaatgtttttaacttccagaccattctgcatctgcccgttgccgtgcaaaatgacaccatcgatttttaccaaatgttcgctcggatttggctaccaggagccccaggggcatactgtgacgggctacacacaagcaagcgcactacctgcaccacctcaacccaccagcgtcagaggaaagacactcccccagcactcaacccacacacggctacttgcactccaccgcacacctggctgggagcaccacccccggccagcatgagaagtggcccccacaatgcaccaacaccaccattcactggctccacacccagacatacccacgaccacacaaacatcaccaacgccaacatcccacacaacgtcaactccaactaa

SEQ ID NO: 15854 - DNA, 1229 bp, Homo sapiens
  SIMILAR (423)..(743): 941254mologous to Escherichia coli K12 putative enzyme of polynucleotide modification,accession number AE000169,Smith- Waterman Score=523.
atgggcgtacttaataactggttgagcgaagaagaaagtctatggatccagtcgcgcattcatctacgggctctacgttattatagtaactggcggcaatactttgccggttatacctttggtcggcaatattggcagtctcccgaagatgatcatctgcctttattacgcgaattcttagcgcgatatgagcgacctatgaaaaattgctggaagatcctcgatatagaggaaacgactgacgtcgatattatccgccgcgcttatctggcgctgttaccgtcctttcatccagaaaccgatccgcaggattttaaacaacttcgtcaggcgtatgaggaggcgctacggatttgcgcagtcgcctgctaaatctgtttggcaaccagaagaatatgaggtagcagaacatgaaattctgcatcgcctatcgtgcgttacttgcctctgatagtgaacgttttctgccctccgcctggcagcgattcattcagcaattaaattattgctcgatggaggagattgatgaattacgctggtcgctgtgcacaatcgccatgaacactgcccatttatccttcgagtgcgtggtgttattagcagaaagattgcggtggttacaggaggaaaataccggggaaatagacgaagaagaactgggatcctttttatatgccattgcgaaggggaatgtttttaacttccagaccattctgcatctgcccgttgcccgccgtcccgacatctgcacccagcacaatgaccagagccggtgcgagggctaccagatcctgagcgacaaacgaggtcaccagcatggtggtggcattactgctctgtaccagtgcggtaacgccgatccccgcgcaaaaggcgagcggctttttttcgacgctccggctaaggacagtacgcaaacgcgcgccgaagacgcgcattacgccggttcgaacaatatgagtcccccagaccagcagggcgacggcagaaagcagatttgggaatcagtccgcgtccataccccagttcggtgccagcagcggtcacttccggtaacgtcataccttaacggcggggaaatcttcaacctgatcgggctgatttgtcgaacacggagaattgcggcccggtgggtgaagtcccaccggaaccgtgcccggagtttcgaatgcctcaagcgccatcgcttcgtggttgcctttaaccgacgtaaaccagggttggtttag

SEQ ID NO: 15855 - DNA, 507 bp, Homo sapiens
  SIMILAR (198)..(308): 1001254mologous to Homo sapiens HTRM clone 082843 protein sequence,accession number Y73328,Smith-Waterman Score=194.
  misc_feature (1)...(507): n = a,t,c or g
cgcccccccccttgaaatcgagacctataccagngcggtggaattcgagagacagaggcagcgtgtttgagctgctggtgcggtggtcagcgcgatgcccaaggccaagggcaaaacccggaggcagaagtttggttacagtgtcaaccgaaagcgtctgaaccggaatgctcgacggaaggcagcgccgcggatcgaatgacctggaggcagaagccagccttccagaaaagaaaggaaatactctgtctcgggacctcattgactatgtacgctacatggtagagaaccacggggaggactataaggtgagcggctcangccccgtgggctggctgggaaggcgccctggaccattcgcggcttgatctgcttgcgcagcacctgtttcctgaaaccgagtgcaaagaaagggaggcaaaagagactctaggaaatggatcccattgacagggatctaacttgaatgaatgcttatgggcaggatagactgagtgaccttgggtn

SEQ ID NO: 15856 - DNA, 722 bp, Homo sapiens
  SIMILAR (147)..(722): 591254mologous to Homo sapiens HSPC185,accession number AF151019,Smith-Waterman Score=501.
cggcacgaggttacacgaggtctgagagacagaggcagcgtgtttgagctgctggtgcggtggtcagcgcgatgcccaaggccaagggcaaaacccggaggcagaaagtttggttacagtgtcaaccgaaagcgtgatgagccggaatgctaaacggaaggcagcgcgcaggactcgaatgctcccacatccgacatgcctgggaccacgctaaatcggtacggcagaacctggccgagatggggttggcttgtggaccccaacagggccggtgccctcccgtaagagaaaggtgaaggccatggaaggtggacatagaggaagaggcctaaaagaacttgtaccggaagccctatgtgctgaatgacctggaggcagaagccagcctttcagaaaagaaaggaaatactcttgtctcgggaccttcatttgactatgtaccgctacatggttagagaaccacggggaaggactataaggccattgccccgtgattgagaagaattactatccaagatacccccaaacagatttcggagttaagatcaacgtctataaacgcttttacccagcagagtggcaagacttcctcgattctttgcagaagaggaagatggaggtggagtgactggtttacatcacagctgccccaggctgaggcgtcccccggaccagtgaagctggagccagggtgtaaggcaaagaggtgctgtgtggctcca

SEQ ID NO: 15857 - DNA, 1409 bp, Homo sapiens
  SIMILAR (1132)..(1242): 971254mologous to Homo sapiens Human secreted protein, SEQ ID NO: 5362,accession number G01281,Smith-Waterman Score=188.
  misc_feature (1)...(1409): n = a,t,c or g
tttttttttttttaaatacaagtggatttttagagtttattaagcaggggagtggaggggagatgtggcacaaatagaagtatgtaacattcaaacaacagcatctaggatttttgaaaaaactttcggttacagnttacacaaggggtcactgctcctccccagcgacagcagtgggcctctcaaaggagaggagggagtaattccccacggtaagggccagtggttgctcccctgggtttttggaaatccatttctgcggactttttcaagggccagaccgctggggctttagggtcgagactttcatagcagttgaccagccagaccccagcaaaaatggctgcgaaccgtgaaaacccctgggggcggcgatcgcgggtgccgcaatcaatgaagctgaaaagcgcctggcctgtttgcccccggtgggaaaggagtaagaggccgtaaggtgaagggcgggccgccgtggcccaggcaacctatgggtaccaccgggttctcgcggggtctttgcgaacgaacttttccttgaaactctctggattcctgtaaacagtggggctcagcccctcaatgactggaggcttcgatggttcaaaggggacctccggaattcacagggccgggagtcgccatgtccgggccacagcagcaggagaaaatcgggactccgacctcagcctcccggtgaaggtcatgaaaggggcggggaaacgaataaattgagccttgtacgcaggcgcaaatgctcgttgcatcctggggagtcgtagtgctcagcacgggtagttaaccaaaaaggactacatttccccaaatgcccgcaaagcctttgtgcaacgccttccggaaaggaatttgttaacacgaggtctgaaaagacagaggcaaccgtgtttgagctgctggtgcggtggtcaagcgcgaatgcccaaggccaagggcaacaacccggaggcagaagtttggttacagtgtcaaccgaaagcgtctgaaccggaatgctcgacggaaggcagcgccgcggatcgaatggtgagggggctggggttccgggtggccgtgggcctcggccgggacggtccgcgagatgacggatccgcgatgtctctctttgccggtagctcccacatccgacatgcctgggaccacgctaaatcggtacggcagaacctggccgagatggggttggctgtggaccccaacatggcggtgcccctccgtaagagaaaggtactgacatggcagggtctcggtccttgtcttctttactcttcccccgccatactgacctaggtgtcagaacgtggtactgcccattccttccctcaggcccttccgagttttcgacctccccacagtcagatacgtcaactgacgttgagcaagggtctctttacgac

SEQ ID NO: 15858 - DNA, 675 bp, Homo sapiens
  SIMILAR (238)..(672): 1001254mologous to Homo sapiens similar to 2-oxoglutarate dehydrogenase ; similar to Q02218 (PID:g1352618),accession number AC004859,Smith-Waterman Score=773.
atggcgtttcaccatgttggccaggctggtctcctgacctcagactcagcatcgtactcacgtagctcttcgtctctgactgctccactctcccccttgagcagtgggcgatggctcttgggaaagagtggactcatcctccaccctgctactggacttgtctttgtactctcaaagcagtgtgaggagattcatcaaccggtggtgtggacatgtgaacagcgtgaggcagagagaacccacttccagcgggtgatcccagaagatggccctgcagctcagaacccagaaaatgtcaaaaggcttctcttctgcaccggcaaagtgtattatgacctcacccgggagcgcaaagcacgcgacatggtggggcaggtggccatcacaaggattgagcagctgtcgccattcccctttgacctcctgctgaaggaggtgcagaagtaccccaatgctgagctggcctggtgccaggaggagcacaagaaccaaggctactatgactacgtgaagccaagacttcggaccaccatcagccgcgccaagcccgtctggtatgccggccgggacccagcggctgctccagccaccggcaacaagaagacccacctgacggagctgcagcgcctcctggacacggccttcgacctggacgtcttcaagaacttctcgtag

SEQ ID NO: 15859 - DNA, 717 bp, Homo sapiens
  SIMILAR (286)..(495): 351254mologous to Lycopersicon esculentum extensin (class I),accession number X55681,Smith-Waterman Score=107.
atgcatggagtaagaaagaaaccatcctacaatagcaccaaatccagcatggatggactcatcctccaccctgctactggacttgtctttgtactctcaaagcagtgtgaggagattcatcaaccggtggtgtggacatgtgaacagcgtgaggcagagagtttaaaatctatcaagaacgacaactcaatgtctcctgcatttttagcttatgttaatacttatgtatttttagctactggccccgtgcccccggcccacccggccgcccttaccatgttctcggcgccgactccgcctccgctcggccgcgcgccctcccgctgccgacccgcgccgccgccgccgctctcgcagcaccgaccgccgccgccggagccggacaataccccgtgcccgcctcgcgctgctgtggccaatgcccgcttgtcttgctggttcgaaccccagcggctgttcaatcgcgcgcctccttctagccagaccccgcccccccggcaccgccttcctaacggctgtttgtttttgcacacggcacgcggaggcggggcctccagccccaatagtgacgcgctctctgcctttcaccaggcgcccaagcctgacgaacagaaaggcaaaccaatgagattggacgcctcgcagacgaaagccaataaaaatatcgcccgcgagcaagggaggcgggccactgggaaggacagcaaaattagctaa

SEQ ID NO: 15860 - DNA, 1387 bp, Homo sapiens
  SIMILAR (922)..(1290): 691254mologous to Homo sapiens putative p150,accession number U93567,Smith-Waterman Score=394.
cggccgcggaccgacttccttcgccggccacgcggagggaagggggcgcccctaccccgggagggggctgggcgagccgggagacggtcaagttggggtcgggggagcgcgggcgctccgcactctggggcacgcggggacgagcccggccgcattgtctgcgcggcctcggaacaagcacggccggcggtggcaccggcgggcgcggggaggagttgccgtcccctttcgccgccgccgcccaccgcgttctttgtgtgtctttcgccggcctacagccgttttcgccgattgcctgacagctgatgggctcaccgcgccgggtcccgcgtcctctcggccgcagccggcggagcccggcccggcaggaggaggaggggagaagaggagcgttgacagatgctgtcttggagcgggcaccgccgggggaaaagtctggactgcctcggcgagaagcggccggtaggcaaccggccccagcctcgcattcgcctcaaagaccccaattggctaggagcccttccctccgcagcggctcgcgcagctccgctcttgcgccccgcgcccggctcagcggacggactagcgcgcccggtcaagaatcctggggaacccgctccgccccctggctccagcgccctccaatgatgtcggcgtacagagggctgttccgcccaatcaggtgtcggaaagcccagccagtccccgggagtgtagccaatagaaggcgactccggcaacacacccgccctgatccactaggaacaaaccgctccgagcccgggtggtgggaccgatcctggagcccagatcaagccaagtccggccaaagctgtgtcgcaaaaattaaaaacaaaaatcatatgatcatctcaacagactcagaaaaagcatttgacaaaatccagcatcgctttatgattaaaactctcagcaaaatcagcatacaagggacacactttaatgataataaaagccatctgtgacaaactcacagccaacattatactgaatggggaaaagttgaaagcattccctctgagaactgaaatgagacaaggatgtccacgcttatcacttcttttcaacatagtactagaagttctagccaaagcaattagacaagagaaagaaataaaggacatccaaattgctaaagaggaagtcagactgtcactgtttgctgatgatatgattgtttaccttgaaaaccctaaagactccttcagaaagctcctagaactgataaaagaattcagcaaagtttctggatacaagattaagaatcaatattgtgaaaatgaccatactgctgtgtccggagttggttccttccagtggatttgtggtctcgctgatgtcaagaatgaagctgcagaccttcgca

SEQ ID NO: 15861 - DNA, 3204 bp, Homo sapiens
  SIMILAR (562)..(2910): 411254mologous to Homo sapiens non-ocogenic Rho GTPase- specific GTP exchange factor,accession number AF127481,Smith- Waterman Score=1275.
agtcggagcggggcttccgcgccggggaccttcgctacccgacccactttctcagcaccaactctgtccttgcctctgtcacagcctcgctcaaggagcacccccggggcaccctcctgtccgatggcagcccggccctgtccaggaatgtcggtatgacggtctctcagaaagggggtccccagccaacaccgagcccggctggccctgggacgcaactcggaccaatcacaggagagatggatgaagccgattctgcgtttttaaaatttaagcagacagctgatgactctctgtcccttacatctccaaacaccgagtccatttttgtagaagatccctacaccgcctcgctgaggagtgagattgagtcagacggccacgagtttgaagctgagtcctggagcctcgccgtggatgcagcctacgccaagaagcaaaagagggaggtggtgaaaagacaagatgtcctttatgagctgatgcagacagaggtgcaccacgtgcggacgctcaagatcatgctgaaggtgtactccagggccctgcaggaggtgctgcatgttcatcagcacggccattggccgcctcttcccatgcgctgacgacctgctggagacgcacagccacttcctcgctcggctcaaggagcgccgccaggagtccctggaggagggcagtgaccggaattatgtcatccagaaaatcggcgacctcctggttcagcagttttcaggtgaaaatggtgatagattgatagaaaagtacggtgtgttttgtagtggccacaatgaagctgttagtcattacaagttgctgcttcagcaaaacaagaaatttcaaaacttgatcaagaaaattggcaacttctccatcgtgcggcggcttggcgtgcaggagtgcattctcctggttacacaacgcataaccaaatacccagtgctggtggagcgcatcatccagaacacggaagctggcactgaggactatgaagacctgacccaggccttgaacctcatcaaagatatcatctcacaagtggacgccaaggtcagtgagtgtgagaagggccagcgcctcagggagatcgcagggaagatggacctgaagtcttccagcaaactcaagaacgggctcaccttccgcaaggaagacatgcttcagcggcagctccacctggagggcatgctatgctggaagaccacatcagggcgcttgaaagatatcctggctatcctgctgaccgacgtacttttgctgctacaagaaaaagatcagaaatacgtctttgcttctgtggactcaaagccacccgtcatctcgttacaaaagctcatcgtgagggaagtggccaacgaggagaaagcgatgtttctgatcagcgcctccttgcaagggccggagatgtatgaaatctacacgagctccaaagaggacaggaacgcctggatggcccacatccaaagggctgtggagagctgccctgacgaggaggaggggcccttcagcctgcccgaagaggaaaggaaggtggtcgaggcccgcgccacgagactccgggactttcaagagcggttgagcatgaaagaccagctgatcgcacagagcctcctagagaaacagcagatctacctggagatggccgagatgggcggcctcgaagacctgccccagccccgaggcctattccgtggaggggacccatccgagaccctgcagggggagctaattctcaagtcggccatgagcgagatcgagggcatccagagcctgatctgcaggcggctgggcagcgccaacggccaggcggaagacggaggcagctccacaggcccgcccaggagggctgagaccttcgcgggctacgactgcacaaacagccccaccaagaatggcagtttcaagaagaaagtcagcagcactgaccccaggccccgagactggcgaggccccccaaacagcccggacttgaagctcagtgacagtgacattcctgggagctctgaggaatcgccgcaggtggtggaggcgccaggcacggaatccgatccccgtctgcccaccgtcctggagtcggagcttgtccagcggatccagacactgtcccagctgctcctgaaccttcaggcggtaatcgcccaccaggacagctatgtggagacgcagcgggctgccatccaggagcgggagaagcagttccggctgcagtcgacgcgtgggaacctgctgctggagcaggagcggcaacgcaacttcgagaagcagcgggaggagcgcgcggccctggagaagctgcagagccagctgcggcacgagcagcagcgctgggagcgcgagcgccagtggcagcaccaggagctggagcgtgcgggcgcgcggctgcaggagcgcgagggcgaggcgcggcagctacgcgagcggctggagcaggagcgggccgagctggagcgccagcgccaggcctaccagcacgacctggagcggctgcgcgaggcccagcgtgccgtggagcgcgagcgggagcgcctggagctgctgcgccgcctcaagaagcagaacaccgcgccaggcgcgctgccgcccgacacactggccgaggcccagcccccaagccaccctcccagcttcaacggggaagggctggagggccctcgggtgagcatgctgccatccggcgtggggccagagtacgcagagcgccccgaggtggctcgccgggacagcgcccccaccgagagccggctggccaagagcgatgtgcccatccagctgctcagcgccaccaaccagttccagaggcaggcggccgtgcagcagcagatccccaccaagctggcggcctccaccaagggtggcaaggacaagggcggcaagagcaggggctctcagcgctgggagagctcagcgtccttcgacctgaagcagcagctgctgctcaacaagctcatggggaaagatgagagcacctcacggaaccgccgctcgctgagccctatcctgcccggcagacacagtcctgcgcccccaccagaccctggcttccccgccccgagcccaccgccagctgacagcccctccgagggcttctctctcaaggccgggggcacagccctcctgcccggccccccagctccctcgccactgccggccacaccactcagcgccaaggaggacgccagcaaagaagacgtcatcttcttctaa

SEQ ID NO: 15862 - DNA, 2286 bp, Homo sapiens
  SIMILAR (952)..(1641): 311254mologous to Caenorhabditis elegans Similar to collagen,accession number AF022985,Smith-Waterman Score=160.
atgcgcactccaaaagcggggacaggcacagcgcgctccccggccgccccgagctgtctttttacggctctttccccaggaaatggagcgagacgtcttcttggataacgagctgctgacctccaagatcctgtctgtgctcggccgcagtcggagcggggcttccgcgccggggacctccgctacccgaccactttctcagcaccaactctgtccttgcctctgtcacagcctcgctcaggagcacccccggggcaccctcctgtccgatggcagcccggccctgtcaggaatgtcgaaagggggtccccagccaacacgagcccggctggccctgggacgcaactcggatccctacaccgcctcgctgaggagtgagattgagtcagaggccacgagtttgaagctgagtcctggagcctcgccgtggatgcagcctcgccaagaagcaaaagagggagctgatgcagacagaggtgcaccacgtgcggacgctcaagatcatgcgaaggtgtactccagggccctgcaggaggagctgcagttcagcagcaagccattggccgcctcttcccatgcgctgacgacctgctggagacgcacagcacttcctcgctcggctcaaggagcgccgccaggagtccctggaggaggcagtgaccggaattatgtcatccagaaaatcggcgacctcctggttcagagcctccccgactactggcagcatcccatggtgcatttgttacaactgatgcccctccatggatccatcatcacccaaaatcaaatggaattgttcacggccatcgaagtcctgtgtgccccgcctgctgcggcattcttgttcgggcatgtggtttttcatcatttctctggatttgcatcacaacccggcacacccacggccgaggctggagagtgcaggtgcctggtggactggcccgggtggtgccatgcacggctgcagagcctgctgggagcacagaggctgcccacgggtagccccttcctcagcctgcagatgccagccctgggggcccaggggtcatccagacaggtccagccaatgtccggggtcccttggatgctgctgaaactgagacagaggctgcggagccccacggcgcccttcaccagcccgctgccccggggcaagcggagggccatggaggcgcagatgcagtcggaggcgctgtcacttctcagcaacctggccgacctggccaacgccgtgcactggctgccccggggcggctgtgggccggccgcttcccgccgtggctacatgtaccaggcggcccgggccggcggccaggcgaggccactaccccctgacactgccggaagagcacagggacacagccaggcccacggagggcccttcccgcaaagcagaagccgccagggcaggggccgggctctcatggagctgcctgtggtgaaacccatgggcagggacggacccaaagttggaaaccacactaccccagcccaccttcagaatgccctcagcccgcaagaccccgtattacatctcggaaacggaaagcaagatcccgcattaacaccgtggaaacggaagcaagatcccgcattaacatctcggaaacggaaagcaagatcttgcataacatctcggaaacggacagcaagatcccgcattaacatctcggaaatgacagcaagatcccgtattaacatcttggaaatggaaatggaaagcaagacccatattaatgtcttggaaacagaaagcaagatcgacattcacacctcgaaatggaaacagaaagcaagatcctgtattaacatctcggaaatggacgcaagatcccgtattaacatctcggaaacggaaacggaaagcaagatccgcctcctccggagtggagctgggagactgcaagatcagctatggatcaacgtgttcggagcagaaaacaagctacaggccccaggatctgcctgaagatagcctcccgggcagctctgcacctgttccgcttctggcagagccttttgttcttcacacgatcagactccggagtcgcacatcctgaaaggaaattggtgccccggcccggcagtctggacaccttcatgcagtacttctacggccagagactagagaccgaatggggcactggttgtcgggcaactggtccccaggtcagagcagagtccaggggcaaattgacaaagccatcaagatattatgaggtccaggggggtataattcctaaattagtcaagactgtcacggatgcaaagaacagacatcactaa

SEQ ID NO: 15863 - DNA, 444 bp, Homo sapiens
  SIMILAR (328)..(375): 681254mologous to Homo sapiens homeobox protein alx3,accession number AF008202,Smith-Waterman Score=59.
  misc_feature (1)...(444): n = a,t,c or g
tcctcggaaagtgcggtggaattctctgaacccgcttccgggtcctcgccgagctgggagttaggatccgagggggccattagggataagaaaacttctctgggtgcccacgtgggactgagcgcccttgggagggctctggagaataccatcgccttccaggggaaggaaactgatgtccagaaaagttatgactcgccccaaggggattgcctggcaggacgtgaaggggaagaggcccaccctggagtaaccctcactggagaatccagagacacgccgctttttggatgcctcctatgcctggcgggagtcttgtctgagctggcaccaccacacggcccacgacatcttcgcagggaagcctgtggaccctctgccaggctccacaagaggtcaggacagtgcagtgtgttcacaaggccagtttctgatcgtccgccn

SEQ ID NO: 15864 - DNA, 395 bp, Homo sapiens
  SIMILAR (226)..(146): 371254mologous to Homo sapiens Human secreted protein, SEQ ID NO: 7717,accession number G03636,Smith-Waterman Score=44.
atccgagggggccaagagggataagaaaacttctctgggtgcccacgtggtactgagcgcccttgggagggctctggagaagaccatcgccttccagggtagctccctccctcaaagggaaggaaactgaggtccagaaaagttatgactcgccccaaggggattgcctggcaggacgtgaaggggaagaggcccaccctggagtaaccctcactggagaatccagaggtgagatgagccttgtacctatctcagcagagggagtaggataatatttaaatattaagggtggggagaaggaatgaaggcaagaaataaaatgcccaaaatgccccaaacgccatccggaccataaaagtgatggcgatagtgttggacttaagagctcaaagatg

SEQ ID NO: 15865 - DNA, 459 bp, Homo sapiens
  SIMILAR (1)..(180): 1001254mologous to Homo sapiens Similar to CG15084 gene product,accession number BC002905,Smith-Waterman Score=332.
aagaaggtgggcaattactacacaaccccgatctacaggttccggatgaaatgccacctctgtgtcaactacatcgagatgcagacggaccccgccaactgcgactacgtgatcgtgagtggcgcccagcgcaaggaggagcgctgggacatggcggacaatgagcaggtgctgaccacaggtgagcgccacccacttacctgcctgggggccctggccctgagtctgcgctggggcccccaaagcccagccgagctctgatcgttgcagagcatgagaagaagcagaagctggagacggacgccatgttccggctggagcatggcgaggccgaccgcagcacactcaagaaggcgctggcgcacactgagccacatccaggaggcccagagcgcctggaaggacgacttcgccctcaacagcatgctgcggagaaggttccgggaaaagaaaaaagct

SEQ ID NO: 15866 - DNA, 1190 bp, Homo sapiens
  SIMILAR (595)..(768): 431254mologous to Homo sapiens Human secreted protein sequence encoded by gene 11 SEQ ID NO:72,accession number B24447,Smith-Waterman Score=100.
agctgggagttaggatccgagggggccattagtgataagaaaacttctctgggtgcccacgtggtactgagcgcccttgggagggctctggagaagaccatcgccttccagggtagctccctccctcaaagggttgagatcatggtccagttctcgggtctcccagcctcagtttccccatttgtaggaaaggcgttcacagcctctatctcagaggaggctttgaggattcagagagctcacaagagggtaggctttgtgggaaggaaactgaggtccacaaaagttatgactcgccccaaggggattgcctgccaggacgcgaaggggaagaggcccaccctggaataaccctcactgtagaatccagagacacacccgctttttggatgcctcctatggcctggcgggagtcttgtctgagctggcaccagcacacggcccacgacatcttcgcagggaagcctgtggaccctctgccaggctccacaagaggtcaggacagtgcagtgtgttcacaaggccagtttctgatcgtccgccccgaggctgaggaccagtaggcagctcccaagatgggtgaaaggaaaggggtcaacaagtactatcctccagacttcaaccctgaggaagcatggctctcttcaaccgattaccacaacagccacccgtttcgggagcgggcttcgggaagctgttcacagggcatctctcatcatccgattcgaaatgccatataacatctggtgcgaagggtggcagaaccaacttcggcatgggtgttcgttacaatgcagaaaagaagaaggtgggcaattactacacaaccccgatctacaggttccggatgaaatgccacctctgtgtcaactacatcgagatgcagacggaccccgccaacttgcgactacgtgatcgtgagtggcgcccagcgcaaggaggagcgcttgggacattggcggacaatgaacaggttgttgacccacagaggcattgaggaagaagcagaagcttggaagactgacgccatgtttcgggctggaacaatggggaggccgaccgcagcacacttcaagaaagcgctgcccaaacttgagccacattcaggaaggcccagagcgccttggaaggacgacttcgccctcaacagcatgctgcggagaaggttccgggtaccatccaagccctag

SEQ ID NO: 15867 - DNA, 1047 bp, Homo sapiens
  SIMILAR (400)..(519): 471254mologous to Volvox carteri f. nagariensis hydroxyproline-rich glycoprotein DZ-HRGP,accession number AJ242540,Smith-Waterman Score=96.
tttcgtagacggcaagctgcatgggagaggttcgactgatgatattggcccggtggccggctggataaacgccctggaagcgtatcagaaaacaggccaggagactcctgtcaacgtccgattctgcctcgaaggcatggaggagtcaggctctgagggcctagacgagctgatttttgcccggaaagacacattctttaaggatgtggactgcgtctgcatttctgacaattactggctgggaaagaagaagccctgcatcacctacggcctcaggggcatttgctactttttcatcgaggtggagtgcagcaacaaagacctccattctggggtgtacgggggctcggtgcatgaggccatgactgatctcattttgctgatgggctctttggtggacaagagggggaacatcctgatccccggcattaacgaggccgtggccgccgtcacggaagaggagcacaagctgtacgacgacatcgactttgacataaaggagtttgccaaggatgtgggggcgcagatcctcctgcacagccacaagaaagacatcctcatgcaccgatggcggtacccgtctctgtccctccatggcatcgaaggcgccttctctgggtctggggccaagaccgtgattcccaggaaggtggttggcaagttctccatcaggctcgtgccgaacatgactcctgaagtcgtcggcgagcaggtcacaagctacctaactaagaagtttgctgaactacgcagccccaatgagttcaaggtgtacatgggccacggtgggaagccctgggtctccgacttcagtcacccctcattacctggctgggagaagagccatgaagacagtttttggtgttgagccagacttgaccagggaaggcggcagtattcccgtgaccttgacctttcaggaggccacgggcaagaacgtcatgctgctgcctgtggggtcagcggatgacggagcccactcccagaatgaaaagctcaacaggtataactacatagagggaaccaagatgctggccgcgtacctgt

SEQ ID NO: 15868 - DNA, 1390 bp, Homo sapiens
  SIMILAR (92)..(142): 1001254mologous to Homo sapiens Homo sapiens clone D329_1,accession number W52989,Smith-Waterman Score=106.
ggccggattcccggtcgacgatttcgtcggcgccgcgcttgctgctggtaacagggccttgcctagtgggccttccttacgcagggcgccgctcaccctccactactaacaggactgaccagacgctcttctgtccgagaaccttcaacatctgcactgtgaagactggttgaaagatggcggccctcggggaccctgtttaagtacatagatgaaaatcaggatcgctacattaagaaactcgcaaaatgggtggctatccagagtgtgtctgcgtggccggagaagagaggcgaaatcaggaggatgatggaagttgctgctgcagatgttaagcagttggggggctctgtggaactggtggatatcggaaaacaaaagctccctgatggctcggagatcccgctccctcctattctgcttcggcaggctgggctctgacccacagatgaagaccgtgtgcatttacgggcacctggatgtgcagcctgcagccctggaggacggctgggacagcgagcccttcaccctggtggagcgagacggactcacgtggtgttcctcgtgtcgtggcccttattgcagagggagcagcacaggctttcctggaagctcccctcggtcatgtggggtgactccagagagccccaccttgcgagactggaccagtccaagtggcctggagccacagcggcctggcagtacctggggagggggtgatgacaggcgaggaggccgggcactcagcaggcagctgccctacgctgggtatgcagctgctcagtgcaagggcgaggtccgaccccaggtctccagctccaggcttgtggtggagtgcagcaacaaagacctccattctggggtgtacgggggctcggtgcatgaggccatgactgatctcattttgctgatggaggagcacaagctgtacgacgacatcgactttgacatagaggagtttgccaaggatgtgggggcgcagatcctcctgcacagccacaagtcgcacctgcacctggacctcctgcctgtggttgtcaggctcctgggccaggccctgtttcataccgctcatttcccagacaacattcccagctcctcgaaagacatcctcatgcaccgatggcggtacccgtctctgtccctccatggcatcgaaggcgccttctctgggtctggggccaagaccgtgattcccaggaaggtggttggcaagttctccatcaggctcgtgccgaacatgactcctgaagtcgtcggcgagcaggcatgtggggctgggacacgggaatccatgtcctcacttgggtaccccagcagagcagaggatgacagtggcctgagcgccctgccttctcagccccagcccttcattctctatgccacgtga

SEQ ID NO: 15869 - DNA, 433 bp, Homo sapiens
  SIMILAR (3)..(224): 981254mologous to Homo sapiens JAB1-containing signalosome subunit 3,accession number AF031647,Smith-Waterman Score=374.
  misc_feature (1)...(433): n = a,t,c or g
acttcgaaacgctattctcacaggttcagctcttcatcagcacttgtaatggggagcacattcgatatgcaacagacacttttgctgggctttgcattcagctaacaaatgcacttgtggaaagaaaacagcccctgcgaggaattggcatccttaagcaagccatagacaagatgcagatgaatacaaaccagctgacctcaatacatgctgatctctgccaggctataactactcctgccatggcggtgcagtcatatcatgttggaatcatataaaaagtatattttagtgtctttgatattacttggcaaagtacaacagctaccaaaatatacatctncaaattngtgggtagattcattgaagcctcttagcaatgcatgaccacgagttnaggcacaagttgtatttcaaccaacaacccctgcag

SEQ ID NO: 15870 - DNA, 1481 bp, Homo sapiens
  SIMILAR (3)..(470): 981254mologous to Homo sapiens CTL2 protein,accession number AJ245621,Smith-Waterman Score=812.
caacagtaacgggtgggcagctaggtatagtctcgcggtgcttgaaccagcggaagtgacgtcgccgctcgcgaggacctcaggtggatcgccgcggcccctcctcccagagcggcagccttttcccgcgcgtgctgccttcgccgctcgggccgcccgggggaaaacatggcgtctgccctggagcagttcgtgaacagtgtccgacttctcttatctcaagtgctgctcctgttttccagggcaaatgacacagctttgtgaactgatcaacatgagtggggaactccttgcgaagaacttatcccatctgggacactgtgctcggggctctgggatgtacaagaacactccttgggcgtccttgctgttttgtttgtgaagttttctatgcccagtgttcctgacttcgaaacgctattctcacaggttcagctcttcatcagcacttgtaatggggagcacattcgatatgcaacagacacttggcaggaaacagtccttttgaaatctatggtgttagttttggtagtaatttactaccagcccctgcgaggaattggcatccttaagcaagccatagacaagatgcagatgaatacaaaccagctgacctcaatacatgctgatctctgccagctttgtttgctagcaaaatgctttaaggctgcccttccatatcttgacggggatatgatggatatctgtaaagagaatggagcctatgatgcaaaacactttttatgttactattattatggagggatgatttatactcgggctgaagaacttttgaaagagctctctacttttatggacacggctataactactcctcgccataggcggtcagacatatcatagtgtgggatcatataaaaagtatattttagtgtctttgatattacttgggcaaagtacaacagctacccaaaatattccatctcaaattggtggggtagattccattaagcctccttagcaatgcataccacgagttagcacaagtgtattcaaccaacaacccctcagaactccgaaacctggtgaataagcacagtgaaaccttcactcgcgataacaacatggggctggtgaagcaatgcttgtcatctctttataagaagaatattcagaggctaacaaagacctttttaactctatcattacaagatatggcaagtcgtgtgcagttgtctggacctcaggaggcagagaaatacgttctgcacatgatagaagatggtgagatttttgcaagtattaaccagaaggacggtatggtcagtttccatgataaccctgaaaaatataataacccagccatgcttcataacattgatcaggagatgctgaagtgcattgagctggatgagcggctgaaagccatggaccaggagatcacagtgaaccctcagtttgtacaaaagagtatgggctcacaagaagatgattcaggaaacaaaccatccagttattct

SEQ ID NO: 15871 - DNA, 3411 bp, Homo sapiens; identical to SEQ ID NO: 14332
  SIMILAR (10)..(312): 1001254mologous to Homo sapiens CTL2 protein,accession number AJ245621,Smith-Waterman Score=570.

SEQ ID NO: 15872 - DNA, 1410 bp, Homo sapiens; identical to SEQ ID NO: 6421
  SIMILAR (1)..(1050): 931254mologous to Homo sapiens KIAA0433,accession number AB007893,Smith-Waterman Score=1666.

SEQ ID NO: 15873 - DNA, 453 bp, Homo sapiens
  SIMILAR (239)..(349): 351254mologous to Homo sapiens small proline rich protein,accession number M20030,Smith-Waterman Score=58.
ggctcggcgccgcagtcctgcgcctctcccgcccctgtctcccgctccgcagccccgggcacggcggaggcagcggagccctgggccatcgtacctggagtagaacagaaaaattattatgtctgtgttcccttgggactcattggaaattgtacagtgacatcttctgggatttagtctggattgtgcagactggtgcttaaaatggaagtcgatattaatggagagtctagaagtaccctgaccaccttgcccttccctggggctgaggccaactccccgggaaaggcggaggcagagaagccccgctgctccagcacaccctgctccccgatgcggaggaccgtgtcaggctaccagatcctacacatggactctaactatttggttggcttcacgactggcgaggaactcctgaagttagctcataagtgcacaggaggtgaagagagc

SEQ ID NO: 15874 - DNA, 1417 bp, Homo sapiens
  SIMILAR (575)..(1165): 821254mologous to Escherichia coli Collagenase precursor (EC 3.4.-.-),accession number D90783,Smith-Waterman Score=805.
gtctttgccttctgccgtgattgtaagtttcctgaggcctccccagaagcagacgctgccatgcttcctgttcaacctgcggaactgtgagccaattaaacctctttacaacctccaacactggctgtacgatccggaaaaaggcatgttcctgccggaccgttttgtgaaaggcacctgcccgaaatgtaaatccccggatcaatacggcgataactgcgaagtctgcggcgcgacctacagcccgactgaactgatcgagccgaaatcggtggtttctggcgctacgccgttaatgcgtgattctgaacacttcttctttgatctgccctctttcagcgaaatgttgcaggcatggacccgcagcggtgcgttgcaggagcaggtggcaaataaaatgcaggagtggtttgaatctggcctgcaacagtgggatatctcccgcgacgccccttacttcggttttgaaattccgaacgcgccgggcaaatatttctacgtctggctggacgcaccgattggctacatgggttctttcaagaatctgtgcgacaacgcggcgacacgcccatttataaccgagctggtgccgttcgcccatcgtaatggtgcaaaaattttcgtcacgcttaacaccattttgcatgatgatgagctggaacccgcgcaacggctgattactgacctctaccagaccggtgtcgatgcgctgattgttcaggatatggggattctggaacttgatattccgccgattgaactgcacgccagtacgcagtgcgacattcgtacagttgaaaaagcgaagttcctctctgatgttggcttcacgcagattgtgctggcgcgagagctgaatcttgatcagatccgcgcgattcaccaggctacggacgcgaccattgaattctttattcatggggcactgtgcgtggcctattcgggtcagtgctacatttctcatgcgcaaacagggcgtagcgccaaccgtggcgattgctcgcaggcgtgccgtttgccatacacattgaaagacgatcaagggcggtgtttgcaggtccgggaaggccggagggtgattcgccgcctgatcgccacgcaaaaaatccagactcgctttacgctcaaagcgcccattgatggcgtgatcaccgcgtttgatctgcgcgcgggaatgaatatcgccaaagataacgtggtagcgaaaattcagggtgtggacccggtgtgggtcactgctgcgatcccggagtctatcgcctggctggtgaaagatgcctcgcagttgaccctcagcgttccggcgcgaccggtgaaaacactcaccatccgcaaatggacgctgctacctggcgtggatgccgcgacccgcacgctgcagctgcgtctggaagtcgacaacgccgacgaggcgtag

SEQ ID NO: 15875 - DNA, 862 bp, Homo sapiens
  SIMILAR (218)..(1042): 801254mologous to Homo sapiens Keratin 8,accession number X74929,Smith-Waterman Score=1041.
attcaatggtcgcgtccgtagcctggtgaatcgcgcggatctgatcaagattcagctctcgcgccacgacaatctgcgtgaagccaacatcagagaggaacttcgctttttcaactgtacgaatgtcgcactgcgtactggcgtgcagttcaatcggcggaatatcaagttccagaatccccatatcctgaacaatcagcgcatcgacaccggtctggtagaggtcagtaatcagccgttgcgcgggttccagctcatcatcatgcaaaatggtgttaagcgtgacgaaaatttttgcaccataacgatgggcaaacggcaccagctcggcaatatctttcaagctattactggcattatgacgggcaccaaaaccagggccgccgatataaacagcattcggcaccgtgcaaaattagcttcgcgtggcaatagcgggcatcggttgccgggcttaaacagtttcaagtcgatgagaagatacggtcacattcttatccagtagctgaaaaatggcggctattttagccacaagcgcgacgttgcgaaatagttttcccgcagcaaggaagatcttccgttcaatctgccttagctgagccagactgattcccagaatacgctggtcaacatcagccacgacgggcatcccttccttgtcatagaagcgaccacaaatgacacctactgcgcctaaatcccgatacgtctgcatttccttcttattcagcacgcccacccgaatcaggggattttcatcaagcgcgttacccacgacaaaaaaggctttcgtacagcgagtcagaacgtcaaaattcgatcgaataataggctctgctgtaaactcatggccagtctggcg

SEQ ID NO: 15876 - DNA, 5814 bp, Homo sapiens
  SIMILAR (377)..(802): 931254mologous to Homo sapiens delta 4-3-oxosteroid 5 beta- reductase,accession number Z28339,Smith-Waterman Score=706.
gattctgggaaatattttaattaggttccactttaaaaaaaaagtagcttccttatgacctccacagtgagtacattaactacattttcacaaacagaaaacttacatacattcaactgtttacaagacatgtctccatataacacatttacattcgtgtgaaatctatgaacttctttaattgcatatatttatgactcttacatctggtaccttttaaaacagctaacatatagtatgcttatttcctataagttaattaatatatgactatttaaggtgagaagagtctcatttgaagaattacaatagttatattcataccatgggaaatcaatagtttttctaaacataaatttcaagctaaagctttagcaatttaagttatttaactaccaatgcatgaaattcttatcagattgtcccatttggattacagtttaagtcatttcaagctgttcacaattatttgtgcattggtgggggggaaagcaccaaggataataaattgatttttcacatcacagatgaaatcacagcgcaatgatttcaatatcccttcaaaaatctaatcatttataaagagcatttatttcaaatgctcaatctttaagctttcttagtgtgatcaactgatacactagggataagaatggaaatggttaaaaacagatgctatacataatacttactaacttaacagaattcagatttctcctaacattgttgatttccatttttgaactgacttctttagatctaaaaagaactctgaaagtaagtgtaacatttatacacttgtcaactatacttaaaaagaaactctgaaggtgcctttcttgtcaaaatacaaaacaaaagttttcctgatgaacaaggcaccttgtatggtaaggaaatatataaagaaaatattttctacaaattaatatataaatctatgtgcacaaaggtgtagttctcccagctgcatatgtaatattttaaataacacacaataaaaaaattcaaaacacagattgaaaaaataacccatgtggctaatactccagttgttaaatattgcagcatatatgtcactgtaacaattgggaaagatattctaatctaaacggttaatgaaatctctttggaaagacactttaaaagtccccaatatgtaaccctggctgtcaaatttcaatctagaagttttaacagctaagatgcaatcccatgaaaataaaagtgtgcacaaaggccagctcatcagactctgcagtacatagcattactgctgtgactttggtacgagcctgctgggcttttatgttccttttcattactatgtgcacatggtaaacatcatattaacaacaatcgatttttatcactataagttttgctgctcacagaatgctaacaaacattgttttaaacatttccagatcatgacaacagttccttacctgaacataaacaaagaaaaccttagatttaaaaacatttttaagtgaacacataaatgcataaggagaaacataagaacacactatttttataagtataaaaagttccagcttctgctaagatttcatttctttttcccagtgttttttttgtgttcatgcgtttctgttttgctagttatattctttttccgagatgaggtattaggaacaactgcactagaaggtccacttgtagctggtttgctgcttgctttagtgctctttaaggtagctggtggtgttgggaggatctttgcaggtgtatacgtatttaaagatactttttttctcattattggactggaacgtaaagctgtagaggaaatttcagcggtcttccgtggaacgtcagatgatggagaagcaatggaagcaagaaattcatccacttgctttaaagatagggcattatgaagagtttctagaggacaaatagatggcaccatggaatacaattcaaagccattggttgggtgtcgagcaaatgagatagaaaaccttttaacagcagaaccgcgtgtggcgtcatctatgcagccagaagaggtcagctttttacgatgagtacgagcataatcctgtaggttaggtgcgcttgaagaacccccgagcaccgaggtgctaaacaggcccgcacagtgagaccctacagtaggattctgcttctgttccacaagagttcttggtgttcgcaggtaattagcattttcagatacaacctgttgccatgagccaaaaatactggatgtgaaagccaatgatttgggggagacaggggaagaagtgatttgttcccctgatctgcgtcttcgacgcccagtacccacaccactggtataatgcagccaggtaccagtaccctctgggctagacacactcagggggctctcttcatcatttgtagccgtcttcctagatcttggaagtggagacttcctgtgtatatgaattggctctgataccattggtttaaacaatatcacagctcgatcaacttcatctcttttagaagtatgtggttcatcatcattatcaattttaaaaggtctcctgccttcattctctctggaagctggtctatatccatagccagatggcaaatttttgtcttcttcacaacctttggctcccggactaaagtgtaattcaacatgaaagcgttcttctgaggaaagatccttattaggatcctcataaagcatgataacaatctgagtcatgtagttgagctcattgacaacgtttaaataatccatagctcgtttccactgttcatcctttgattcattgcataaggcaccatagcgaagaatagacagcaaagaatgtacatgactttcactggtaaaatataatctagtacgaacatgacgttcaggagacagaacacctctagaatacacaggatgaagtttatttacagtgtcatcatcttgtgtcctctgaaggtctgagcgaatttttctaaccagaggagtacagtagcctttggcaatctccagtttttcagctttagttataccatattcctgagggataacaatatctgctaatgccttcgaaagcctatataattccattgtgttttctaatttcaaggaaccattatgctggacatcatattttatacagtcatatatgtcagggattttactaatatcatatcttccattctttgttttaaagtctttctctaacttggaccatctacgtagcataagctccaatgtttcactatggtaaagctgaatatctgatgatttaggatcttccattcgatgtctgatttgagaagtcaaactctgaattaaggaataaactttatcacaggtcttcacagggtttttaattaaatgcattgatttgataagagaaatgcttccagatggagtaagcttttcataatcttcagcagtaaaatctctgtctttctgaagtatttcatgaagccttgccttcacacgttgctgacaactgctcagagagtcactatcactatccaaaagaccgttcatatttgcacttttcaccatttgaacaagaatgggtgtaagctctccttccaaagctaaaagcccctttgcaaaagcagctgcagtcatctggactcgtccttcatcagaggcatatattttgaggtcatgtctgtaggtgctatgtaatctaagtaaaccacaaccaggaaatcctgcataatctccttgacctccaggatacatacacctgaaggctcttccaagttcttcagcctggaccctgcctgcaggagttaattcacctccccattttagaaccaaaagtaaagatggttcttctcttcggctgtcctcctcttcactagatgttttaggacaaccatgagggagataggtcaactgaaccttacgatttattccagaaaaatgaccatacatctctaatacagtcttaagttgttcaagttttggcttgttttcttcaatttcagaatcattattttgccctagctccataagaagctgtcgtgcaatatctagcacttcctgtaactgttttggttttttgagttttaatttccctgatttatatccatcacacttttcaaaaagatcaaaaaatttctgatgtctcacttccattttcattttttgttttggtgttcgatccccatgacgtataacagctatgacacatctaagttccatcatagttccagatgtagttggtacaattgggatatcttcagcttctaagggtattgaccatggaatatgaaattgtggagcaagttctcgcattacaatatttccaagtatttttgcacagtcatcataatacttcatggaatttttcacaaaactgaagccattgacatcacagacataggactgtccattggcccgtaacaaatcaaagccacaaactgtttgcttaaaagcaaggcagactttccaagcaattaatttctctcgtgcattgagaataacagggtatcttacttcttttccttcactgtctcgttccaccttgccatcaagtgctggagattttcgagcttcagcatgggcataatctggacccactgtataaaccttaacatcagtaccatctgtgggcataaactcttcatatatatatgagcctgtttttcgtacattgctttctggagaataaacactacttctactgccaatctttctaaagagtctttgacttccaccaccagcagaagttgggtaataaatgtaaacattgtgatcttctgcactgactggcttttctacaaatggcttttgaaaaacttccccatttacttctacatgatcttccccttcaatcagattacattctttgggattatttgggtcacggttcaaaatagcataacgaggaagtaaaataccttcagcttgaagaatactatatacttctctcctatcttgtatgagatactgcatattcaagtcattgattacaaatggattcctgagttttgcataggcaaccgctttgtccagtggaaatcctttagaatggaaagaaataagacaatcacataaaggccagttttccactggttcattcaaaataacctcctcttcaaatactactactgtgatatatttaaataaggagatccgttcaagaatttccttcattggtttggatttggatttctttgccatggaacatattccaaccacaatctgcctttctggtggagaatcatcttcctcctcatcgtcttcatctgcatggtggaagaaatgtcgataatttccaggatttatttctgtatcttctggtccaacgaagaatctgggggcttcactcatttttattttatttgatgtagatataattgaaatgatttatattaaaactgcctctaagtaaatagtatcagaagaaagcattctccatatattagctgacgcacaggtctgtgacagcttgtttctgcttatacaatcacttgatattatgatgactgttggcaaatactcttttgttcttagatatcattgcttcattgttgatatcaaagttgttgttgcaattcaaaatacaaagacagtgaagttactgctttcttgagttgatacagcaatcttcttacctgccacgaatgcggtcgtcacgcgagcagttgtgagatggtcaagcccattcaggtctaggttaccccctttcatcccggaggcaggggtgaggtgtttgtcaagagacttcagttgtaggcgtggacgtaggctacttccttcagtaacagctatagggccacataagggaacctcaggctactacacctcaggaatctccgtcacgcctcttccccgccctc

SEQ ID NO: 15877 - DNA, 1472 bp, Homo sapiens
  SIMILAR (79)..(240): 291254mologous to Ectromelia virus 35 kDa chemokine binding protein,accession number AJ277112,Smith-Waterman Score=66.
atgaaagatttggcaacgtttatagatgcttctatattgctgaaatttacgtggatccaactagatgacatcagacaaagtgccaagccaaaaatagaatataaacacaatgtccaagggagcaacacaagaaaaccaaggtgcagaagctccattacattctcactttttctaattttgactctgcttcctgctttgtgggaggaggaggaagagcaggaggaggaggaggaagagcaggaggaggaggaggaggaggaggagtccacccgcgacaggtggggcgagggtggcaatgcccgacatctgccgcttaagcttctggctcggaccgggccccaatccacacgcgcacacacggccacagccggccagtccacccccactgcaccggcagacactcggagggcgcgggcggcctcgcacgcgggttgcaaccaggacgaggagggtcggcgagatcagaccgccggggctcgccctgagcacaaaaggttacagacggagccgtcgtccccgtgcaacctaccgatggcccagggctccgctgcctccgccgtgcccggggctgcggagccgggagacaggggcgggagcaggcgcaggactgcggcgccgagatccaggcagaggccgccagccgagccagccgggtgcaggaaggatcttacccgaggcccccgaatggaccctttagtaccgatctaacaggcctaatgcagttcacaaaactgctggttctgaaggtagagagccagctgacaaggagaattagaaaatgccacaatctgcgtgaagccaacatcagagaggaacttcgctttttcaactgtacgaatgtcgcactgcgtactggcgtgcagttcaatcggcggcccgatagtccagggtattctagaggtgttctgtctcctgaacgtcatgttcgtactagattatattttaccagtgaaagtcatgtacattctttgctgtctattcttcgctatggtgccttatgcaatcgcggcggcacactctgctgtcgggcgatccacacgctccatcgtcataccatcgtactcaatggtgttaccgtcacgctcaacctcgtacagctcacgttttacggtaacgttagtgagatcatcagacatcaatgtcaacttacccggcacggcaatcacccgctgccactgacggcaatccagggtatcgccctctttagtgacaatcaggctgcctatcgcttccgggctgaccagcgcacgttgcggccctttggtctgccagtagcccgccagccagtccggcgcgggggttttcacgacattgttatagttttcgacttcggcacagcccgccagcaacaagagcgcgcctgcaattgcgagttttttcatcattcgtcctgcatgagaagaaaagaggattgtggcattaaagccctgatgtcgccagcctttcaaggttcagagagaaatttgatctaa

SEQ ID NO: 15878 - DNA, 1619 bp, Homo sapiens
  SIMILAR (611)..(733): 531254mologous to Homo sapiens PRO2738,accession number AF116712,Smith-Waterman Score=96.
tcagagaggcttgaggttcgggtagtcggtgacatggcggaggccgcggcgctggtgtggattcgcggccctggcttcgggtgcaaggcggtgcggtgtgcctcgggtcggtgcaccgtccgggattttatccaccggcactgccaagatcagaatgttccagtggaaaacttctttgtgaaatgcaatggagcactcattaacaccagtgacacagtgcagcatggagctgtttatagtttggaacccagactttgcggtggaaaaggaggttttggatctatgctccgagcacttggtgctcagattgagaagacaaccaatcgagaagcttgtcgggatctcagtggaaggagactacctccatgtccaacatgaaaaagcaatggctgaatgggtaaaacaacaagccgagcgagaggctgaaaaggagcaaaagcggctggagcgactgcagcggaagcttgtagaacccaagcactgcttcaccagccccgactaccagcagcagtgccatgagatggctgagcgtctggaggattccgtcctcaaaggtatgcaggctgcctccagcaagatggtttcagcagaaatcagtgagaatcggaaacggcaatggcctactaaatctcaaacagacagaggagccagtgcgggaaagaggagatgcttctggttgggcatggagggactagagactgcagaagggtccaactctgagagttcagatgatgacagtgaagaagcaccaagcacttcaggaatgggtttccatgctccaaaaattggtagcaatggtgtcgagatggcagccaaatttcccagtggttctcagagggcgagagtagtgaatacagaccatggatcaccagaacaactgcagatcccggtgactgactctgggaggcatattttagaagactcatgtgctgagctgggggagtccaaagagcacatggaaagcaggatggttacagaaacagaagacgacccaggagaagaaggcagagagtaaagctcccatagaagaggagcccgctggggctggattgaataaggataaagagacagaagaaaggtctgatggggaaagagttgctgaggtagcacctgaagaaagggaaaacgttgccgttgccaaactgcaggaaagccagccaggaaacgcagtaagctgtagcgggggaaggaggaaagaagacgaaagggaggactggggaaaacggactcagaggacccacccacctgcagctgcccaggctcctgggcagtgccctccaggaagcacagaagtaggggctggaggcgggcttcggtggaccccgagcccgggccggcagccagcaggggtcgctgcagacatgggaatcacggtgctgaccgtgcctctgcagcgctgtcttcagaactcctgggccaaggagccagtgctggtggtctccttcgtcatcgggagcctcactgtaattctgcccccactcagcccctacaccaagtattccatcatgatcaatgaggccacaccctacaactatccagtgcccgtccacgatgatgggaacatgcggacatgtgcagccacccccagggcccccagggccccagcttggagtggctga

SEQ ID NO: 15879 - DNA, 568 bp, Homo sapiens
  SIMILAR (229)..(459): 761254mologous to Homo sapiens PRO2221,accession number AF116695,Smith-Waterman Score=290.
atgggccggcctattagagctgaagctgtggggcagtggaaagcaagcagcggctttaatgcagtggaaggaaatggagtcagtgggggtgggacagaaaggatcatgtgcagagagcagccaagttggtgcagagcaccttctctggggccacattctgcccctttcctgcttttccacagtttcagttccaggaccctgactgcacctgccccatttgctgatgaaaccaactgccagtgtcaagcaccccatgaaaaactgaccattgctcaggcccgcttaggaacaccaggccctttcacaacatggcagcttgcttcttcaaagccaccagtgcagaaagacactgacaggcctgtcagagtatacgccgatggaatatttgacctcttccactcaggtcatgcaagagcccttatgcaagcaaaaacactgtttcccaacagctacttgttggtaggaggtttacacagaatttcagatattcccttaatggctattacatgggttgtggaagtcaagggcatattgaactacttggatgaccatgagactgtatcctttg

SEQ ID NO: 15880 - DNA, 1308 bp, Homo sapiens
  SIMILAR (163)..(294): 971254mologous to Homo sapiens Human secreted protein encoded by gene 21,accession number Y76144,Smith-Waterman Score=208.
cttttctttttttttttatttttttattgtaaacaaatttaatttaccaaatgatagactggtaaaaaatgtgcctatcaccaagggctgatacctttcctgtggcccaggccctctgctctttaaaaatggggcacaaatacaggcaggtaagagacagacagctctcatcctgcactcttggctttctgagagatatgaccccaaggtcctgggagtctagctggctgcttcctcctctgggaaatagaggagtgatattggtagtacctagggcatagcactgctgggacaattcagtgatttggggaactgatctccatattcaagatgacctgatcctgtctgtgtgcgggacagtggctaggcacgggagcccttgttagggcccgcctaccatcttgaccctttttcaaaccttcccgtctgagggacatctgcatgcacacttgtccctccaatgctgtctcactctggatggccctgacacctgagaggccagacagccaagtggtttctaggacctttgtgattttagagcagtgggttcccgtttcatttctgcctctgatggccgagtggccttgcaggaagcaccttctttccaggcctcctttgacccacttcactagttcatggggccatctgaggatccaacccggtgtcaggcacttcgctcgggcctgacagaggacagaagcgctccgtagcagaggcttttttttctttaatagtcgctctgagcatcttgtctgcctccatccagctctcactttccctgtctggctctaattctggttgacccagagggcatagctgaggctcggaggtcaggaaccgtggactccaggaggcagttttgagggtccttcaggcttggccacggcaggataccaccattccatctcagaggcatgaaggagtccctaggccccgactttggtgacccttgccctgtgtgccccctcaacagtgggccagggcctcctgtgtgtgtctgctgggggagcaggagccgggtgtgggggcatgggaaggcgggacgcctgggttcccacaggcccggtggctgagtcaccaggcggccatctggctcccattagcccagggcggcagggggctccatggggcgggccctgcggccagctgggggcagggacgctggggcaggctgtgtgtgggatgactcaggacccatgataacagcctgtgcgcatatggggagtgtaaacaggagagggagaggaaggcggaggaagggaaaattgtggttgggcgaattccaccacacggactagcgcgctgcaa

SEQ ID NO: 15881 - DNA, 444 bp, Homo sapiens
  SIMILAR (82)..(231): 701254mologous to Homo sapiens dJ889M15.3 (novel protein),accession number AL031177,Smith-Waterman Score=194.
atggggcaaggcctgtgcacagttttatccaagtatgaagatcagattactattttcactgactacctagaagaatatccagatacagatgagctggtatggatcttagggaagcagcatctccttaaaacaggtggaacgggcccttcatcagatgctggttggggatgtatgctacgctgtggacagatgatgctggctcaagcccttatctgtagacacttgggaagggcacaaatgggtgtaggagaagggaaatcaattggagaatggtttggaccaaatacagttgcacaggtgttaaacaagaggcaaggtggagaggtcaggaccaactttttgaaagcaaacagggtgagtgatgttagtacttacacctgcagaccaccttacctgttgtcactctccttcctaacaacctatcactggatggaaactccatga

SEQ ID NO: 15882 - DNA, 462 bp, Homo sapiens
  SIMILAR (48)..(161): 941254mologous to Homo sapiens Human secreted protein, SEQ ID NO: 7575,accession number G03494,Smith-Waterman Score=191.
ctgaattcggcacgagggcccaggatgacagctggagaatggagtcagttttatccaagtatgaagatgggattactattttcactgactacctagaagaatatccagatacagatgagctggtatggatcttagggaagcagcatctgcttaaaacagattgggaaagaaagaccttttaacctgaaactgctaacagcccagcacccagataaagccagagcttggaaagaggcagctcttagatttgtgattttcctgaagagaaattcccttcagaggccctcacttagcgtggaggaaggaacaggaagaggctgatgaaaaggcaggagaggaagttaggcattgtggagctcctcctgagcctggcttcattattttgattggagaattctgaacagtggaaagcctggagctagcaattaggagaccttttgtattcagactcttctaactcag

SEQ ID NO: 15883 - DNA, 475 bp, Homo sapiens
  SIMILAR (53)..(298): 841254mologous to Homo sapiens dJ889M15.3 (novel protein),accession number AL031177,Smith-Waterman Score=350.
cggtggaattggcccacgatgaccgctggagaaaggacgtcagttttatccacagtatgaagatcagattactattttcactgactacctagaagaatatccagatacagatgagctggtatggatcttatggaagcagcatctccttaaaacagaaaaatctaagctgttgtctgatataagtgctcgtctatggtttacatacagaaggaaattttcacccaattgggtggaacgggcccttcatcagatgctgggttggggatgtatgctacgctgtggacagatgatgctggctccaagcccttaatctgtagacacttgggaagggactggagctgggagaaacaaatagaacaaccccaagaataccaacgcatcctacagtgcttcttaaatagaaaagattgttgctactctatccatcaaatggcacaaatgggtgtaggagaagggaaatcaattggagaatggg

SEQ ID NO: 15884 - DNA, 418 bp, Homo sapiens
  SIMILAR (157)..(333): 1001254mologous to Homo sapiens sirtuin type 2,accession number AF083107,Smith-Waterman Score=304.
ctccttgcaggtgcagccctttgcctccctcatcagcaaggcacccctctccacccctcgcctgctcatcaacaaggagaaagctggccagtcggaccctttcctggggatgattatgggcctcggaggaggcatggactttgactccaagaaggccttgctgagctccttggatggaagaaggagctggaggaccttgtccggagggagcacgccagcatagatgcccagtcgggggcgggggtccccaaccccagcacttcagcttcccccaagaagtccccgccacctgccaaggacgaggccaggacaacagagagggagaaaccccagtgacagctgcatctcccaggcgggatgccgagctcctcatggacagctgagccccaaccgggcctggccccctcttaaccagcag

SEQ ID NO: 15885 - DNA, 1220 bp, Homo sapiens
  SIMILAR (403)..(834): 561254mologous to multiple sclerosis associated retrovirus polyprotein,accession number AF009668,Smith-Waterman Score=390.
tgctggggttgggaccccccgcccccgactgggcatctaatgctggccgtgcctcccctccggaaaaaggtcctaccagctcctttcttccaatcccaaggcagctcagcaaagggcccaggcagcccctggtcgcattcacccaagccaggccacgtcccctgtaggcctttcttggaagtcaaagtcccaatgcctcctccgaggccccataatcaatcccccagaaaagggtcccgaactggcccagctttctcccttgttgatgagcaggcgaggggtggagaggggtgccttgctgatgagggaggcaaagggctgcacctgcaaggaggtacccatgacccaggaggaggtccaccttcaggaagtctgactgcatacaggagaagaaacgcgctgggaggctctcaccaaaaaaagacgatatcaggcttcaccaggctctgacagtcttcacacttgggcgtcacctcagagaagatcttctctttcatccagcttaacgggtattcgtgccggcagctggcgctgacgcaatgtgatgtgtagaaggtgccgtgcgcctccaccaagtcctcctgttccagcccggctattcgctccagggtatctatgttggtgtcgtggcgcacgtcttcggtgaacgcactctggccacactggagcgtcttctgagcctgctgtcggcctttgaggtcgtggtatagatgacggatggctggccgctgctctttgctagtggtgctggggacacagagtgaggcttgtcctggctgcaggtccttcgagccgtggtgttttgttgctgctggtggtcctgccgtcgtgggcctcgtttctggtccgcgtttgtgcctgggtgggggtgttgggggacgacggtgtgctgggtggttttctgctgtggctgggggttgtcggtcggccgctggccgttctgcgtgccgatctggccgtttgtgtcggcgttgtttgcgcttgcgtgccgtttgtggtgctgccgatttgtgccgcgttggttcgtgttggttgttcgctggtggaagcggcgctggggtctcggtgcacgaccgctgaagacgttctttgctgtggtcgtgccgctgactaaaggtggggttgttgccggatcgatgctggtgtttgtcccggctgtgggcgagtttgtgatcccggaactgctcggtggcccggacagcatcgtgatcgggcgcgtg

SEQ ID NO: 15886 - DNA, 3492 bp, Homo sapiens
  SIMILAR (475)..(3465): 431254mologous to Homo sapiens high-risk human papilloma viruses E6 oncoproteins targeted protein E6TP1 alpha; putative GAP protein alpha,accession number AF090989,Smith-Waterman Score=1571.
cccggaagcacaaggtgggcatcctctattgcaagcccggccagagctccgaggaggagatgtccaacaatgaggaggccggccccgcctttgagaagttcctctccctcatcggcgagaaggtctgcctgaagggcttcaccaagtacgctgcccagctggacgtcaagaccgactccacgggaacccactccctctacacgatgtaccaggactacgagatcatgttccatgtctccaccctgctcccttacacccccaacaacaggcagcagctgctacggaagaggcacataggaaatgacatcgtgacgatcatcttccaggagcctggcgcgctaccgttcacccccaagaacatccgctcccacttccagcacgtcttcatcattgtccgagtccacaacccctgcactgataacgtctgttacagtatggctgtgacccgatccaaagacgctcctcctttcggcccccccatccccagtggaaccacattccgcaaatccgacgtcttcagaggacttcttgctggccaaggtgatttaacgcttgaggaacgccgcggaacaagttccgacaagtttcacaccatgggccaccaggacccgccaggagtatctcaaggacctggccgaaaactgtgtctccaacacccccatcgactccaccggcaaattcaacctcatctccctgacctccaagaagaaggaaaagacaaaagcacgggctggcgctgagcagcacagtgcaggggccatcgcctggagggtggtggcccaggactacgcccagggggtggaaatcgactgcattttgggaatttccaatgagtttgtggtgctcctggacttacgcaccaaggaggtggtgttcaactgctactgcggggatgtcattggctggactccagactcctccacactcaaaatcttctatggacgaggagaccacatcttcctacaggcgacagagggttctgtggaggacataagggagatagtgcagagactgaaggtgatgaccagtggctgggagacggtggacatgacgcttcggcggaacgggctcgggcagctgggcttccacgtgaagtacgacggcacggtggccgaggttgaggactatgggttcgcctggcaggccggcctccggcagggcagccgactagtggagatctgcaaggtggccgtggtcacactgacccacgaccagatgatcgacctgctgcgcacctctgtcactgtgaaggtggtcatcatcccgccttttgaggacggcactccccggaggggttggccggagacctacgacatgaatacctcggagcccaagacggagcaggaaagcatcactcctgggggccggcccccctaccgcagcaatgctccctggcagtggagcgggcccgcatcccataactctctaccagcctccaagtgggccactccaaccactcccggccatgcccagtccctgagccggcccctgaagcagacccccatagtccccttccgggagtcccagccactgcacagcaagaggcctgtcagcttcccagaaaccccttacacagtatcaccagcaggggccgacagagtccctccctaccgacagccttctgggagcttctccacccccggttcggccacctacgtgagatacaagccatccccagaaaggtacacggctgccccacaccccctgctatctcttgatccccacttcagccacgatgggacgtccagcggcgactcctcttccggcggcctgaccagccaggagagcaccatggaacgccagaagccagagcctttgtggcatgtgcctgcccaggccaggctctcagccatagccggaagcagcgggaacaagcacccgtccaggcaggatgcagcaggcaaagattctcccaacaggcattccaaaggagaacctcaatactcaagtcattccagcagcaacaccctctccagcaacgcatccagcagccacagcgacgaccgctggttcgaccccctggaccccctggagccagagcaagaccccctctccaagggtggctctagtgacagcggcatcgacaccaccctctacacctccagccctagctgcatgtccctggccaaggctccacggcccgccaagccacacaagccccctggaagtatgggcctttgtggcgggggtcgcgaggccgctgggaggtcccaccacgcagacaggcggcgggaggtctcccctgcccccgcagttgccggccaaagcaagggctaccgaccgaagctgtactcctccggctccagcacccccacgggactggcggggggcagccgagacccaccgaggcagcccagtgacatgggctcgagggttggctaccccgctcaggtttacaaaactgccagtgcagagactcctcggccctcccagctggcccagcccagcccctttcagctctccgcctccgtccccaagtccttcttctccaagcagcctgtacgcaataagcacccaacagggtggaagagaacggaggagcccccaccacggccactccccttcagtgacccaaagaagcaggtggacacgaacaccaaaaatgtctttgggcaaccgaggttgagggcatccctccgagacctccggtcaccacggaagaactacaaatccaccatcgaggatgacctgaagaaactcatcatcatggacaacctggggccagagcaggagagagacacgggacagtcaccgcagaagggcctgcagcggacgctgtcggacgagagcctgtgcagcgggcgccgggagcccagcttcgccagccccgctggcctagagccagggctgcccagcgacgtgctcttcaccagcacctgcgccttcccgtccagcacgctgcctgcacgccgccagcaccagcacccccacccgcccgtcggccccggtgccacccctgccgccggcagcggctttcccgagaagaaatccaccatctcagcctcggagctctcgctggctgatgggcgggaccgccccctgcggcgcctggaccctgggctgatgcccctgcctgacacagctgctggcctcgagtggtccagcctggtgaacgcagccaaggcatacgaagtgcaaagagccgtctcactcttctctctgaacgacccggccctgagcccggacatcccgcctgcacacagtcctgtccacagccacctgagcctggagaggggacccccgacccccaggaccacccctaccatgagcgaggagccacccctggatctgacaggcaaggtgtaccagctggaggtgatgctgaaacagctgcacactgacctgcagaaggagaagcaggacaaggtggtgctccagtcagaggtggccagcctgcggcagaacaaccagcggctgcaggaggagtcgcaggccgccagcgagcagctgcgcaagtttgcggagatcttctgcagggagaagaaggagctc

SEQ ID NO: 15887 - DNA, 2884 bp, Homo sapiens
  SIMILAR (2381)..(4093): 291254mologous to Takifugu rubripes pol polyprotein,accession number AF030881,Smith-Waterman Score=597.
ccggggcgtccagatgcacagtctctgacatcagctctcctgggaccctccaagagcatatagtgtctagaaggcactaaggcatggcgaggacaacatccttgctgcctccagctggcgggcgaccacagctactgcctgctctgcgctactgagccactcggtctggagcccccaggacagcacctgcttcctgaggttgtcctggctcagctgtgcacagcgatggtggagaactgggactccacagggttcacaaccttcctgtcaggtttcagggcccagcatccttcatccttgggccttggcttgccctggaacaattggcttgattggctgggggacccagtagagtgacaccacagcgtacggggccagcagcactccagtgctcgtggactatgaccacctatcgggccatccccagcgatggtgtggacctggcagccagctgtggcgccagggtgggcgatgtcctccctgggccacacacaggggactacgctcccttgggattctgggcccagaatggcagcatgtcccagcctcttggcgagagcccggccaccgccaccgccaccgccaccgccaccacccgccccagccccaccactcccgcaatgcccaagatgggcgtgcgcgcaagggtggccgactggccgcccaagcgggaggccctgagagagcacagcaacccaagcccctcccaggacacagatggcacaaaggccaccaagatggcccattccatgaggagcatacagaacggacagccccccaccagcaccccggcttcctcagggtccaaagccttccaccgactctccaggagaaggtccaaagacgtggagttccaggacgggtggccccggtcccccggcagggccttcctcccccttcggcaccgcagcagcagcgagatcaccctcagcgagtgtgacgcggaggacgcgggggagccgcggggggcccggcacacgggggcgctgcccctcttccgcgagtacgggagcacctcgtccatcgacgtgcagggcatgcccgagcagagcttcttcgacatcctgaacgagttccgcagcgagcagcccgacgcccgagggtgccaggccctcaccgagctcctccgggcagatcctggcccacacctcatggggggcggcggcggagccaagggggactcccacaacgggcagcccgccaaggacagcctcctgccactgcagcccacgaaggagaaggagaaggcccggaagaaacctgcgcggggcctcggcggcggggacacggtggactcgtccatctttcggaagctaaggagcagcaaacccgagggggaggctgggcgttccccgggggaggccgacgagggccggagccccccggaagccagcaggccgtgggtgtgtcagaagagcttcgcccacttcgacgtgcagagcatgctgttcgacctcaacgaggcggccgccaacagggtgtcggtgtcgcagcggcggatcactcaccacgggtgcttcggccgcttccgccgcctcggccataggctaccctcacggcctcgcgggcacacagcctcggaggcctggacccggccttcaccagcacagaggacctaaactgcaaggagaacttggagcaggacctcggcgatgacaacagcaacgacctgctgctcagctgcccgcacttccgcaatgagatcgggggcgaagtgtgagcgcaacgtgagcttctcccggctttccgtgggctccccgagcagcggcgagggccactggggcagagcccgccctgagcgcctaccgcaccaacgccagcatctcggtgttggaagttcccaaggagcagcagcggacgcagagtcggccccggcagtaccagcatcgagcatgtggacctgggcgcccgctactaccaggattacttcgtgggcaaagaacatgccaattacttcggcgtggatgagaagctggggccagtggctgtgagcattaagcgggagaagctggaagaccacaaggagcacggacctcagtaccagtacaggatcatcttccggacccgcgagctcatcaccctgcggggctccatcctggaagatgctacgcccacagccaccaagcatgggaccgggcggggcctgcccttgaaggatgccctggagtatgtcatccccgagctcaacatccactgcctgcggctggccctcaacacccccaaggtgacggagcaactgctgaagctcgatgagcaagggctctgccggaagcacaaggtgggcatcctctattgcaaggccggccagagctccgaggaggagatgtacaacaatgaggaggccggccccgcctttgaggagttcctctccctcatcggcgagaaggtctgcctgaagggcttcaccaagtacgctgcccagctggacgtcaagaccgactccacgggaacccactccctctacacgatgtaccaggactacgagatcatgttccatgtctccaccctgctcccttacacccccaacaacaggcagcagctgctacggaagaggcacataggaaatgacatcgtgacgatcatcttccaggagcctggcgcgctaccgttcacccccaagaacatccgctcccacttccagcacgtcttcatcattgtccgagtccacaacccctgcactgataacgtctgttacagagccaaaatcaccagccaggcctgggcactgggcttcaaggaccaagaggcacgagtgatggcccagaggaaagtcggagggaagcagggcctacctgtggaggcagctcctctctggacagacctgaccctgcctctaccctgtggagggagcccggacacagctctccagcttaccatctcctga

SEQ ID NO: 15888 - DNA, 2556 bp, Homo sapiens
  SIMILAR (1)..(90): 801254mologous to Homo sapiens Human secreted protein, SEQ ID NO: 6603,accession number G02522,Smith-Waterman Score=135.
aagaggaaactggttcagaactgtgggcagccagcccaagagcacgcagctgtccaggggcagagtccacgtctggcttctttgtctggagttgaaagccagatcaccaccttctggtatctttcatttgtgttaaaggggtggaacctgagcctccaacagcagcctcaggtcattcataggtcaagccccaggcctgaactgccactagacaaggcttttggctcccttcctgccctctcgccaatctcccagccatccgcagagccatcctgtgcaaaggaaggagctaggctgtgcgccctgggcgtcatgatccttctgcgggcctccgaagtgcggcagctgcttcacaataagttcgtggtcatcctgggggactctgtgcatagggcagtatacaaggacctggtgcttctgctgcagaaggaccgcctgctcactcccgggcagcttagagcaaggggggagctgaacttcgaacaagatgagctggtggacggaggccagcggggccacatgcacaacggccttaactaccgtgaggtccgcgagttccgctccgaccaccatctggtacgtttttacttcctcacccgcgtgtactccgattacctccagaccatcttgaaagagctgcagtcgggcgagcacgcccccgacctggtcatcatgaattcctgcctctgggacatctccaggtatggtccgaactcctggagaagctacctggagaacctggagaacctgttccagtgcctgggccaggtgctgcccgagtcttgcctcctggtgtggaacacggccatgcctgtgggcgaggaagtcaccgggggttttcttccgcccaagctccggcggcagaaggccaccttcctgaaaaacgaagtggtcaaagccaacttccacagcgccaccgaggcacgtaaacataacttcgatgtactggacttgcatttccacttccgccacgcgagggagaacctgcactgggacggggtgcactggaatggacgtgtgcaccgctgcctctcccagctgctgctggcccacgtggccgacgcctggggtgtggagctgccccaccgccaccccgtgggcgagtggatcaagaagaaaaaacctggcccgagagtcgaagggccgccccaggccaacagaaatcacccggccttacctctgtccccacccttaccttcccccacataccgccccctgcttgggttcccaccccagcgcttgccgctgctcccgctcctgtccccacagcctcctcctcccattctccatcaccagggaatgccccggttcccacagggtcccccagatgcctgtttttcctcagaccatactttccagtcggatcaattctattgccattcagatgtcccctcatcagcccatgcaggtttcttcgtcgaagacaattttatggttggtcctcagctgcctatgcccttcttccccacaccccgttatcagcggcctgccccagtggaccaacaacagcccttcacggtcagccacagagctcttgctcttgctgccaggaggcaacatttacggttaaatctggagttgtacaaagcggccgcccgtctcttcgacaattttatgttcacgacttctgcaaaatacagccgcagcagctcctggtcagccatgccaccacgaaggcaacaactgatagatattctacagcgtcctgtgttgccagatgattttgcccaattggaggctaatacaagtgttctgagcacatttaagatgagaaaactgaggactcagaaattaaataacttgcctaagatggtagagctctcttcaaacagggatccactgagagggtggccagagatgcagggggtaaaactccacagggagaaggaatgctctagccgaaatttgtaccaatttgaacaggagcctatccaaatgagaaggagccagaaaaccaatccttgtaatatgacaaaacaaggcccttcaacaccccccaaaaatcacactagttcaccaacaatggatccaaaccaagaagaaatccctaatttacctgaaaaagaattcaggagaacaatcagtgttcccaaggaagaagagaattctaaaagcttagaaaatatatttgggagaataattgaggaaaacatccccagcattgctagagacctagacatccaaatacaagaagcacatagaacacatcagaaattcatcacaaaaagatcttctcctaggcaccttgtcatcaggttatccaaagctaagatgaaggaaagaattttaagagctgtgagacagaagcaccaggatgaacctgggcacttagctgtgcaggaacaatggcaagcctttagcccgatcgggggcggcaataggcaactcgctggatcagaagcacagtggacaccctgcctgatctggagggatggaagtcagcggcaggtctgcgacggtggcagacagcagtggtggatggtgatcgaaagctcagctcgagcagtaacaaacatggaccagaagagagtgcagttgcaagatttaatagagtga

SEQ ID NO: 15889 - DNA, 1269 bp, Homo sapiens
  SIMILAR (527)..(357): 411254mologous to Homo sapiens Human secreted protein fragment encoded from gene 7,accession number Y30863,Smith-Waterman Score=82.
tttttttttttttacttctgtgcaacttgtttatttccattttatttttacacaaaggcaaagagaataggagtgaggaggcaggaataacgctgggtcactcccaggaagtggggaagaggctgcagccaagaagaatgagtcaggctgctcttccttggctttcttggtaacagcaatgaacaaaaggaagacgaggcatggactccaggcttaagttaacaaggtcagtctgttcaggccaagcaatggaaaggaagtgtcagatctgtccaatccatgttcataaagaggaaataaggcctaggtccgtctattgaggccttggctcaggattggctggggcccttctctttgaaggtcgaggccgctgtccccagggcgtataggggccacggggacgatacctgccaaaacccctatgtaccactggggcaggccgctgataacggggtgtggggaagaagggcataggcagctgaggaccaaccataaaattgtcttcgacgaagaaacctgcatgggctgatgaggggacatctgaatggcaatagaattgatccgactggaaagtatggtctgaggaaaaacaggcatctgggggaccctgtgggaaccggggcattccctggtgatggagaatgggaggaggaggctgtggggacaggagcgggagcagcggcaagcgctggggtggaacccaagcagggggcggtatgtgggggaaggtaagggtggggacagaggtaaggccgggtgatctctgttggcctggggcggcccttcgactctcgggccaggttttttcttcttgatccactcgcccacggggtggcggtggggcagctccacactccaaggcgtcggccacgtgggccagcagcaggttgtgccgcatataaggccaattgccaaatggacaaactcgtaaatttcgccatacgcgcgccgaacaatggaggcgaataattgatataccaattacccaacgatacccaaaaccagccgctgactcgaaggaaacgccaacacacgcagctgcccactgaatccccatccccttccccaccaccgcctccacccacccaaggcggtgccaatcttgcggatcaaatctctttctgtccgccatccccaccacaatgcctactcttttcaccaagttgagttctgcagctctcagtgaccatggtgggctgaagttggttcccagaggctcctgagagccaattgctaaatatttaggagttttgccagtcagttgtagag

SEQ ID NO: 15890 - DNA, 197 bp, Homo sapiens; identical to SEQ ID NO: 4798
  SIMILAR (1)..(186): 611254mologous to Homo sapiens stromal antigen 3, (STAG3),accession number AJ007798,Smith-Waterman Score=187.

SEQ ID NO: 15891 - DNA, 4205 bp, Homo sapiens
  SIMILAR (2142)..(2336): 1001254mologous to Homo sapiens unknown,accession number AF116909,Smith-Waterman Score=373.
  misc_feature (1)...(4205): n = a,t,c or g
gcaggacgcctgagagcttgaggccacacgaggctgtggagcggcgtgactcaaacgtggcgcgcatcagctcgcacacttccaaacctcgcgatagctactggccctgggcgagccgttgggattgcgcttgcgcacagcgtgtcttctggatcgccatacctaccctgtggtcctcatcttcctggcctcatagctcctcctcgccaagcatgtccaccccgttgcaaagagctgtgggagataccaagagggccttgtctgcatcttctagttcctctgccagtctaccctttgatgacagggactcaaaccatacctcagaggggaatggcgactctttgttagctgatgaagacactgactttgaagacagcttgaatcgcaatgtgaagaagagagcagcaaaacgaccaccgaaaacaacaccggtggcaaaacatccaaagaaagggtcccgagtggtacatcgtcatagccggaaacagtcagagccaccagccaatgatcttttcaatgctgtgaaagccgccaaaagtgacatgcagtctttggtagatgagtggctggatagctacaagcaagaccaggatgcaggatttctggagcttgttaactttttcatccaatcttgcggatgtaaaggcattgtgacccctgagatgttcaagaagatgtccaactcagagatcatccagcacctaacagagcagtttaatgaggactcgggggactaccctctcatagctccaggtccatcctggaagaagttccagggcagcttctgtgaatttgtgaggacattggtctgtcagtgccagtacagcctcctctatgatggcttccctatggacgacctcatctccctgctcactggcctctcagactcacaagtccgcgccttccgtcacactagcaccctggctgctatgaaactgatgacctccctggtaaaagttgccctccaactgagtgtgcaccaagataacaatcagcgtcagtatgaggctgaaagaaacaangggccanggcagagggcacctgagcggctggagagcctgttggagaaaccaaaagagctccaagagcatcaagaggagattgagggggacatgaatgccctcttcaggggtgtctttgttcatcggtacanggatgtccttcctgagatccgtgctatctgcattgangaaattgggtgttggatgcaaagctacagcacgtctttcctcaccgacagctatttaaaatatattggttggactctgcatgataagcaccgagaagtccgcgtgaagtgcgtgaaggctctgaaagggctgtacggtaaccgggacctgaccgcacgcctggagctcttcaccagccgcttcaaggactggatggtttccatgatcatggacagagagtacagtgtggcagtggaggccgtcagattactgatacttatacttaagaacatggaagggttgctgacggacgcggattgtgagagcgtctaccccgttgtgtatccttntaatngaggcntggcttctgccgcaggcgaatttctgtactggaaacttttctaccctgagtgcgagataagaacgatgggtggaagagagcaacgccagagcccaggcgcccagaggactttcttccagcttctgctgtccttctttgtggagagcgagctccatgaccacgctgcttacttagtanacagtctgtgggactgtgcaggggctcggctgaaggactgggagggtctgacaagcctgctgctggagaaggaccagaacctgggtgatgtgcaggagagcacactgatagaaatccttgtgtccagtgcccggcaagcttcagaggggcacccgcctgtgggccgggtcactgggaggaagggcttaacctctaaggagcgcaagacccaagccgatgacagggtgaagttgactgagcacctcatccccctgctgccccagctcctggccaagttctcagctgatgcagagaaggtcactcccctgctccagcttctcagctgctttgacctccacatctactgcactgggcgcttggagaagcacctggagctgttcctgcagcaactccaggaggtggtggtgaagcatgcagagccagcggtgcttgaggctggggcgcatgccctctacctgctctgtaatcccgaattcactttcttcagccgggcggactttgcccgcagccagctagtagatttgctgactgaccgcttccagcaggagcttgaagagctgttacagtcgtccttcctagatgaggatgaggtatataatctggcagccactctgaaacgcctctctgccttctacaacactcatgacctgactcgctgggagctctatgagccatgttgccaactcctgcagaaggctgtggacacaggagaggttcctcaccaggttatcctgccagccttgactcttgtctatttttccattctctggacactaacccacatttctaaatcagatgcttcccagaagcagctgtcgagtttgagggacagaatggtggccttctgtgaactctgccagagttgcctctcagatgtggatactgagatccaggagcaggcttttgtcttattaagtgatctacttctcatctttagccctcagatgatagttgggggccgtgatttccttaggccacttgtcttttttcctgaagctactctccagtctgagctagccagcttcctcatggaccacgtcttcatccagccgggagacctgggcagtggtgattcccaggaggatcatttacagatagagcggctacaccagcggcgccgcctcctagccgggttctgcaagctgttgctttatggggtgctggagatggatgcagcctcagatgtttctaaacactacaacaagttctacaatgactatggtgacattatcaaggaaacantaactagagcaaggcagattgaccgaagtcattgttcccgaatcctgctgntgagcctnaagcagctgtacacagaactgctgcaggagcatgggccccagggcctgaatgagcttcctgccttcatcgagatgagggacctggcccggaggtttgccttgagttttggaccccagcagctgcagaaccgtgacctcgtggtcatgctacacaaggaaggcatccagttctccttgtctgagcttcctccagctggctcctccaatcagcctccaaatctggcattcctggagctcctttcagagttttccccccgactcttccatcaggacaagcagcttttgctgtcctatctagaaaagtgcctgcagcatgtctcccaggcacctggccatccctggggcccagtcaccacctactgccactccctcagccctgtggagaacacagcagagaccagccctcaggtcctccccagctccaagaggaagcgcgttgaagggcctgccaagcctaacagagaggacgtctcctcgtcccaggaagaaagtctgcagctgaacagcatcccgcccacgcccaccctcacctccacagctgtgaagagcaggcagcccctgtgggggttgaaagagatggaggaagaagatggctcagagttggattttgcccaggggcagcccgtcgcaggcaccgagaggtcaaggttcttgggtccacaatatttccagactccacacaacccttcaggtcctggcctgggcaaccagctgatgcgactcagccttatggaagaggacgaggaagaagagttagaaatccaggatgagtcaaatgaagaacggcaggatacagacatgcaagcaagtagctactcttccaccagtgagcgcgggctggacctcttagattctacagagctggatattgaggatttctgacaggactctgggcccctccccagctccactccctacctcaagaatgtgaccatttggaaaaggcttcagccctgggctctgaggggaaagagttgggcattgtttttctaacctaacctttccctctggggtagagaagccgagagaccctgtcctccctaatgcactgtggcccagtccccttgcctttttcctgttctgtttggagtggagaagggcagcacctctgtgtttaatggaaatagcccatagtctcctggatttttggaacatctttctcagcctattttgtgtcctaatgattcgctcaataaa

SEQ ID NO: 15892 - DNA, 497 bp, Homo sapiens
  SIMILAR (177)..(287): 971254mologous to Homo sapiens stromal antigen 3, (STAG3),accession number AJ007798,Smith-Waterman Score=190.
aagggaaaaaagttaataaacttcataatataaaaatcaattatttcaggactaactcagactctgccatggaagtggcagcataagcctacttgtgtgataatgatgagaccaagtgttaatgtcattgttacctttttttcatatttctgatctttttatacatattagatggcaaacatccagagaaagggtcccgagtggtacatcgtcatagccggaaacagtcagagccaccagccaatgatcttttcaatgctgtgaaagctgccaaaagtgacatgcaggtaaagcagtgtctcacctctgttgataccatctcactttttgtaaggtggtaaggacaagtgtctacaaacttgatttgatgtgaacgttttagtgaatgtaacatatcaagaaagataagattatggagtgaatccttgggagtgataggaagggggtaaccttgaatgagagagcatgttcctttttttttttttttgagacttagc

SEQ ID NO: 15893 - DNA, 474 bp, Homo sapiens
  SIMILAR (450)..(154): 961254mologous to Homo sapiens hPMSR3,accession number U38979,Smith-Waterman Score=524.
tttttaatgtcattgttacctttttttcatatttctgatctttttatacatattagatggcaaacatccagagaaagggtcccgagtggtacatcgtcatagccggaaacagtcagagccaccagccaatgatcttttcaatgctgtgaaagctggactatgttgacatggaaattcaccttccattatccacggctcctctccctgctccacttccttcacctccactccatgatgatgtttggcttggtgataatcataccccacagaaactagatggctgtagttctccaacatcacatccccgtatgctatcttctcatcagggtccagttgctgccactcctcctgggtgaaatccacagccacatctttgaatgacactggcccctgcaatgtgttcattttctgctgctcttggaaacttgcagagactgtggctgatagaccgtacagcgacggccgggggccagc

SEQ ID NO: 15894 - DNA, 1098 bp, Homo sapiens
  SIMILAR (1138)..(1470): 811254mologous to Mus musculus Pro-Pol-dUTPase polyprotein,accession number Y12713,Smith-Waterman Score=471.
gagtgtcgtggaattcagcagggtcagaagggaggtggtcgccctccgtcgtggtctggcgtgtattccgagccttggtgtctggcggtttccgagcgttggtgtctggcggtttccgagcgttggtgtcttggcggtttccgaccgttggtgtctggcggtttccgaccgttggtgtctggcacgcgccaccctctcttgctttggttgcgccatgccgatgtaccagacaagaagacaagaaaatgatttgaggacagcttcaatcgcggtgtgaagaagaaagcagcaaaacgaccactgaaaacaacgccggtggcaaaatatccaaagaaagggtcccaagcggtacatcgtcatagccggaaacagtcagagccaccagccaatgatcttttcaatgctgcgaaagctgccaaaagtgacatgcagcaccgagaagtccgcgtgaagtgcgtgaaggctctgaaagggctgtacggtaaccgggacctgaccgcacgcctggagctcttcactggccgcttcaaggactggatggtttccatgatcatggacagagagtacagtgtggcagtggaggccgtcagattactgatacttatccttaagaacatggaaggggtgctgatggacgtggactgtgagagcgtctaccccattgtacttttctaccctgagtgcgagataagaacgatgggtggaagagagcaacgccagagcccaggtgcccagaggactttcttccagcttctgctgtccttctttgtggagagcaagctccacgaccacgctgcttacttagtagacaacctgtgggactgtgcagggactcagctgaaggactgggagggtctgacaagcctgctgctggagaaggaccagagcacgtgccacatggagccagggccagggaccttccacctcctaggagaatctccaggaatttctgccattgtgcagggagcaattgaaaaatcaggcgagaggagctcgcccccacccaaacgtattggttcgatgaaggaagggcccatggttctgccactggccctggacacccagtgctggtttcccgtggaagtccccctggactga

SEQ ID NO: 15895 - DNA, 870 bp, Homo sapiens
  SIMILAR (556)..(801): 711254mologous to Homo sapiens stromal antigen 3, (STAG3),accession number AJ007798,Smith-Waterman Score=265.
gtcgcagttttttttttttttttttttttattttttgagacagagtctcactctgtcacccaggctggagtacagtggcgcgatcatagctcactgcagccttgaactcctggactcaagcagtcctcccacctcagcctcctgaatagctgaatacaggcatgcgctaccatacctggctaattattattattgtttttgtagaaatggggtcttgctctatagccccaggctggtcttgaactcctgggctcaagccatcctcctgccctggcctcccaaagtgctgggattataggcatgagccacggtgcccagcctttgtcttagtttttggtccccctcacccgaccccagagttctagaaccattcccttgcaaagaaagggactgctcacggcctggggatggagaagtgctgtggtaggagccctttcttctctttcttccccagctggattgccaaacctaccctgcggtcctcgtcttcctggccccatagctcctcctcgccaagcatgtcttccccactgcagagagctgtgggagatacccaagagggccttgtctgcatcttctagttcctctgccagtctacccttcgatgacagggactcaaaccatccctcagaggcatgtacaacccctggtgggggctgggaggtggcagatgggaatactgactctttattagctgatgaaggcagtgactttgaagatagcttcaatcgcaatgtgaagaagaaagcagcaaaacgaccaccgaaaacaacaccggtggcaaacaaccaaagaaagggtcccgagtggtacatcgtcatagccggaaacagtcagagccaccagccaatgatcttttcaatgctgtga

SEQ ID NO: 15896 - DNA, 475 bp, Homo sapiens
  SIMILAR (538)..(882): 751254mologous to Mus musculus Pro-Pol-dUTPase polyprotein,accession number Y12713,Smith-Waterman Score=440.
  misc_feature (1)...(475): n = a,t,c or g
ggggtncnnaaactgagacctattgaagngcgctggaaacgaacatcggctcctcctacaactacggcagcgaggaccaggcagagttcctgtgtgtggtgtccaaggagctccacagcaccccaaacgggctgagctcagagtccagccgcaaaaccaagctgttacaagccagaggcacccggatgtgaggccccagatcacctccagggacttggggttcccatctgaaatcctttatttttgtaccatggggtgggccccgggcctgagaaggaagaagcaccctctccccggcctcctctgtctgcacccgtggggctgtgacttactcctgcctccaggggccgggcggggcccccctgggacctcttaaggcccaaggtgggccccaggacctctgggcagagtggactgctcatggcatatgtgtggcaatgtctggctgtgtctctccggcacctgcgtcccctct

SEQ ID NO: 15897 - DNA, 930 bp, Homo sapiens
  SIMILAR (466)..(885): 971254mologous to Escherichia coli K12 putative outer membrane lipoprotein,accession number AE000337,Smith-Waterman Score =687.
atggacgtcgtccggctgcagctgaaattcacggagcatctatttcatactgatgcacacaggcagctttacagtcgtctgcgactatcttgtctacctagagctggccgacggctcttcatctactgtgcccttctagcccgcgtaagctctgttcgctggttctcgctccgtatatctggtagtgctcgtgtcggagcagagagcttccttacaattttttctgacgagcttgctcagcacccaggacccctcggcactggccacccccaaaacctcagccccttacccaacctgtctcgcggtacactagttcatcaatgtgccccaaagcagtgctgggccttcgcacacgttgtttcccgttcatcaagaaggggcgaatttttttcattcgacagatggaagaagcaccgctcagaagtcagggaatctgcccaggttcctacaactaaaagggagccaggatgccagtcaaatgctgacgatcatgctgccgatgtttatcaaaccgatcaactgaataccaaacaagaaactaaaaccgttaatattatttccattcttcccgcaaaagttgccgtagacaactcccaaaataaacggaacgcacaagccttcggcgcgcttattggcgcagtcgctggcggtgttatcggccacaacgtcgggtctggcagcaattccggaacgacggcaggtgcagttggcggcggagctgtaggcgcggcagcgggttctatggtgaatgataaaaccttaatggaaggtgtttctttaacctataaggaaggcaccaaagtgtatacctctacccaggtgggtaaagagttccagtttacgacaggtttagccgttgttattaccaagacgtataacgaaacgatcacctgcggtcaggaatttgagaacacctgggcagcatggtga

SEQ ID NO: 15898 - DNA, 612 bp, Homo sapiens
  SIMILAR (1)..(255): 951254mologous to Homo sapiens Membrane-bound protein PRO1151,accession number Y66642,Smith-Waterman Score=413.
atggtgacagccgccctgggtcccgtctgggcagcgctcctgctctttctcctgatgtgtgagatccgtatggtggagctcacctttgacagagctgtggccagcggctgccaacggtgctgtgactctgaggaccccctggatcctgcccatgtatcctcagcctcttcctccggccgcccccacgccctgcctgagatcagaccctacattaatatcaccatcctgaagggaaaggcaaccacgggggacccccggggggggggctatcggctgcgtattatcaccgtgcctttttgctactttgtgcctgctccatccagggaagagctctccctccactctccttccctccctgatgagaccggggcctacctcattgaccgtgaccccacctacttcgggcccatcctgaacttcctccggcatggcaagctggtgctggacaaggacatggctgaggaggccgctgagcaattcacgtccagggctctctgggctgcctggtttgggaaatgtcacgttgattcccgcacgtgcccagggccatctccgctgcccccgctacccccgcccctgctgtgggcgcgtcagactgcggggctgcggtga

SEQ ID NO: 15899 - DNA, 1044 bp, Homo sapiens
  SIMILAR (1588)..(2877): 951254mologous to Homo sapiens putative p150,accession number U93572,Smith-Waterman Score=2091.
  misc_feature (1)...(1044): n = a,t,c or g
atgaggatggaggccggggaggcagcgccgccggcgggggcgggcggccgcgccgcaggcggctggggcaagtgggtgcggctcaacgtggggggcacggtgttcctgaccacccggcagacgctgtgccgcgagcagaagtccttcctcagccgcctgtgccagggggaagagctgcagtcggaccgggatgagaccggggcctacctcattgaccgtgaccccacctacttcgggcccatcctgaacttcctccggcatggcaagctggtgctggacaaggacatggctgaggagggtgtcctggaggaagccgagttctacaacatcggcccgctgatccgcatcatcaaagaccggatggaagagaaggactacacggtcacccagggtcccacccaagcatgtgtaccgcgtgcttgcagtgccaggaggaggagctcacgcaaatggtctccaccatgtctgatggctggcgcttcgagcagctggtgaacatcggctcctcctacaactacggcagcgaggaccaggcagagttcctgtgtgtggtgtccaaggagctccacagcaccccaaacgggctgagctcagagtccagccgcaaaaccaagagcacggaggagcagctggaggagcagcagcagcaggaggaggaggtggaggaggtggaggtggaacaggtgcaggtggaggcagatgcacaggagaaaggttcccgtccgcaccctctcagacctgaggctgagcttgcagtgagggcttctcctcggcccctcgcccgcccccagagctgccatccctgctgttacaagccagaggagnccggatgtgaggccccagatcacctccagggacttggggttcccatctgaaatcctttatttttgtaccatggggtgggccccgggctgtagaaggaagaagcaccctctccccggcctcctctgtctgcacccgtggggctgtggacttactcctgcctccaggggcggggcggggccnctggggaacctgcttgaaggnccaaggtnggctcnaggg

SEQ ID NO: 15900 - DNA, 2448 bp, Homo sapiens
  SIMILAR (399)..(866): 361254mologous to Caenorhabditis elegans Similar to cuticular collagen,accession number AF000198,Smith-Waterman Score=129.
atgagaagaggagaaacccgctctcggcgccccccacagtgctgggccttcgcacacgttgtttcccgttcatcaagaaggggcgaatttttttcattcgacagatggaagaagcaccgctcagaagtcagggaatctgcccaggttcctacaactaaaagggagccagtgttatttcaacataaaatcaatataaaaattgttatcgcgttggttgacatcctgtttgcacttggccttggaaacctggtgtgcgtctcccccgtgcagcttttctcagttcagactgactcaagagccacgggtgaccagcggctaccgtcatggacagcacagcgctacggaaccaggactctagggcctgatggtttcactgaaagatgcccctatggccctagcccagagtccctgctctgctctgctctgccctggctgagggacctcgggatgcccgtggccgaggccccccaggtggctggcgggcagggggacggaggtgatggcgaggaagcggagccggaggggatgttcaaggcctgtgaggactccaagagaaaagcccggggctacctccgcctggtgcccctgtttgtgctgctggccctgctcgtgctggcttcggcggggctggagatgctgtcagaccctggctccaggtcctatggctcgggtctgcttcctgcttgggcaaagtgccccaaagctccccaccagaggagtttaattccccctgattatgctcctggggtaaatcaccccccaccccaggagaggtgctccatggggctgaggacccaagggactttgggccgccaccgggtcctttccgctcagcaggttgctttttctgtgtccctgctgatggccaaaatagcctttgcaaaacagaagtctgatgacatcattcctgattttaaacttttcatggttacccttgttcatcggccaaacaggctttcagcccgggtcctcaccatggtccccgtgctaccggccccgtgccccatgctgctccctctgctggaagggtacaaggcggaggtgatggtcagccaggtgtactcaggcagtctgcgtgtactcaatcgccacttctcccaggatcttacccgccgggaatctagtgccttccgcagtgaaaccgccaaagcccagaagatgctcaaggagctcatcaccagcacccgcctgggaacttactacaactccagctccgtctattcctttggggagggacccctcacctgcttcttctggttcattctccaaatccccgagcaccgccggctgatgctgagccccgaggtggtgcaggcactgctggtggaggagctgctgtccacagtcaacagctcggctgccgtcccctacagggccgagtacgaagtggaccccgagggcctagtgatcctgggtcagtactgcgagtggaaaccgcccgggaggaggatgcagacgccgcggccggcgatgaggatggaggccggggaggcagcgccgccggcgggggcgggcggccgcgccgcaggcggctggggcaagtgggtgcggctcaacgtggggggcacggtgttcctgaccacccggcagacgctgtgccgcgagcagaagtccttcctcagccgcctgtgccagggggaagagctgcagtcggaccgggatgagaccggggcctacctcattgaccgtgaccccacctacttcgggcccatcctgaacttcctccggcatggcaagctggtgctggacaaggacatggctgaggagggaagccaggtgtggacggtcacatccggaggctggggtgacaggaacgcagtgttgacaggcatggggagagctctgtctctctttctctggctgatccagtatctcaaattctgcctggtgagggcttgggtcctggaggaagccgagttctacaacatcggcccgctgatccgcatcatcaaagaccggatggaagagaaggactacacggtcacccaggtcccacccaagcatgtgtaccgcgtgctgcagtgccaggaggaggagctcacgcaaatggtctccaccatgtctgatggctggcgcttcgagcagctggtgaacatcggctcctcctacaactacggcagcgaggaccaggcagagttcctgtgtgtggtgtccaaggagctccacagcacccccaaacgggctgagctcagagtccagccgcaaaaccaagagcacggaggagcagctggaggagcagcagcagcaggaggaggaggtggaggaggtggaggtggaacaggtgcaggtggaggcagatgcacaggagaaagcccagtcatctcaggatcccgctaaccttttctcccttccaccactgcctcctcctccgcttcccgctggagggtcccgtccgcaccctctcagacctgaggctgagcttgcagtgagggcttctcctcggcccct

SEQ ID NO: 15901 - DNA, 576 bp, Homo sapiens
  SIMILAR (167)..(129): 841254mologous to Homo sapiens Human secreted protein, SEQ ID NO: 7141,accession number G03060,Smith-Waterman Score=57.
atgccgggcctgctgagccgcccccggcgggggtcgctccgggccaggccgtgcgggggcggcgaggcgctgcctgagcatgtggccatcgacgtgtgccccggccccatccgccccatccagcagatctctggctacttcccccacttcccgcgggacctgccccatgacgcccccgcgcgcccagccactgccagcgccggccgccgccgcccctctgacggcgcccgcgaccacgacaaggatggcgaccatctcttcggaagcctaacgatccagcacaggccctggcagctccatcccccgatttcccattcacaccctttgctgttctctacccgggacctgaagcccatggaccacaatgggctggcagacccctgtgtcaagctgcacctgcggccaggagccaggaaggttcccgaggcatgccagctagcacctgacctacaagattccagctgtttaactgccatcacaaaggctcatgatgtgttgacagtatttctgcctgctgctctgaaaattcaaggaaataaatacctgacatttattgaatgccagaagctgttctaa

SEQ ID NO: 15902 - DNA, 2025 bp, Homo sapiens
  SIMILAR (142)..(333): 921254mologous to Homo sapiens -14,accession number X90857,Smith-Waterman Score=314.
gtggctgccccctgcgttcctccatccaaccatgagctggtgtgctgcccagccctgctgctgcagatgtggagtgttattcatacggagcccagtggagggtcatctggcaacagcgggggctggggggtggagtgcagtcgggcttggaactgccagcaagaaatcgcgcttggattgcagagggacaccatgggagtccgaggagggcgggcggggagggcggtaaagagcgagggagttagaccacctccttctgcatcccagctcccccgctccctggtgtacgaccctgacattgctaacctccctggacctccgtttctcttcttcataatggacgttagtgacggtacctatgctgtaagcctgccaaaagaccaaactgacttgaggaggaaggaaaagaagagcctgcagggaggcaccagctcaccctgccagcaggatggctgggggccaaggcccatcaccactgagaatgcaccaaagaatgtagtggacaagggagaaggagcctcccggggtggaaacacacggaaaagcctcgaggacaacgctgggcctcagcctttggtgctgcctccatctaagcgagatccagagctcattcatcagcgactgcgccaggcctcggtgctcagggcggctccctgggtctggtcccatgctcctggccacacctcacgtcttggctaccgttgtggcttccagttgttcaaagcagctgtggtggcttcctccaaaagtggctacggatcagcaacagatgaaactcaaggggctatttatagcaggggctccaccagggtcaccccgagtgtccagccccacctccagcccatcagaaacatgagtgtgagccggaccatggaggacagctgtgagctggacctggtgtacgtcacagagaggatcatcgctgtctccttccccagcacagccaatgaggagaacttccggagcaacctccgtgaggtggcgcagatgctcaagtccaaacatggaggcaactacctgctgttcaacctctctgagcggagacctgacatcacgaagctccatgccaaggtactggaatttggctggcccgacctccacaccccagccctggagaagatctgcagcatctgtaaggccatggacacatggctcaatgcagaccctcacaatgtcgttgttctacacaacaagggaaaccgaggcaggataggagttgtcatcgcggcttacatgcactacagcaacatttctgccagtgcggaccaggctctggaccggtttgcaatgaagcggttctatgaggataagattgtgcccattggccagccatcccaaagaaggtacgtgcattacttcagtggcctgctctccggctccatcaaaatgaacaacaagcccttgtttctgcaccacgtgatcatgcacggcatccccaactttgagtctaaaggaggatgtcggccatttctccgcatctaccaggccatgcaacctgtgtacacatctggcatctacaacatcccaggagacagccagactagcgtctgcatcaccatcgagccaggactgctcttgaagggagacatcttgaactctgagatcctgtttggtgttgatgagctctccctcaccgggtttgggctgaagtgctaccacaagaagttccgaagcccagcccgagacgtcatcttccgtgtgcagttccacacctgtgccatccatgacctgggggttgtctttgggaaggaggaccttgatgatgctttcaaagatgatcgatttccagagtatggcaaagtggagtttgtattttcttatgggccagagaaaattcaaggcatggagcacctggagaacgggccgagcgtgtctgtggactataacacctccgaccccctcatccgctgggactcctacgacaacttcagtgggcatcgagatgacggcatggagggggcccagcaccctcagattggccaagacaccccaccaggcccctccgaccccccaggctgcttgtga

SEQ ID NO: 15903 - DNA, 1166 bp, Homo sapiens
  SIMILAR (358)..(1368): 851254mologous to Homo sapiens p40,accession number U93564,Smith-Waterman Score=1476.
tttcgtcctgggaccaggtgtgctgcttgcaccccgctccctgcctggacacaggctcactcgctgccttcttctgggggaaaccaactttttgccagcccacagctgctgtctccgccactggccaccgcccctgtcctgggagtcccttggcccagacacccacctgacttagtggctcctctgcaggaaaggtggctgccccctgcgttcctccatccaaccatgagctggtgcccatcaccactgagaatgcaccaaagaatgtactggacaagggagaaagaccctcccggggtggaaacacacggaaaagcctcgaggacaacggcttcaacagggtcaccccgagtgtgcagccccacctccagcccatcataaacatgaatgtgagccggaccatggaagacagctgtgagctcggacctgtgtaccgcacagagaggaacatcgctgtctccttccccagcacagccaatgaggagaacttccggagcaacctccgtgaggtggcgcagatgctcaagtccaaacatggaggcaactacctgcaaagaaatgtttccttaaaaggctctcgccttctctccggcaccctggcccctggccaccctctcaggagcccggaatgtgccagggagagccagggccccctgccactctatggcccatgccctgtggccccacagtcctggagtccccagggggcccaggtccctgagcacaatgccaacaacagggcacacccgtgcagactcccccaggacatgagggaaaaagcactagagagcagccagcccaggcagggaactccctgcatgacccaggctctgccctcctctccctcttcgttctatgctcagcccccttgtccgggacccgaagccacacacagagggaggctgggggacagggccggcagcacagagaacagagcttctaggaagttcctagaagagctgctcaaggaaagggctgtggtctgtggtcatggttctagtggaactggtgtgaaaggaggcagacctcagagatgcacgtatctgaaaccaggtctggaggggaaggaggagggcaaacggaggggcggaagaagacctggctctctgactcggaaaacactgagagattttaaacggatagaagacaaagctggcatcagctaa

SEQ ID NO: 15904 - DNA, 972 bp, Homo sapiens
  SIMILAR (145)..(753): 961254mologous to Homo sapiens calcium channel gamma 5 subunit,accession number AF142621,Smith-Waterman Score=976.
atggaccccactttggataaactcatggggtgggagtttgagaacgcaagccttgaaaaagggcttgggagtggggcaagccccagagcgcagtccgtgctggtgggagcgtggcgactagttgcacagcaacggtccaggaagatgagtgcctgcgggaggaaggccctgaccctgctgagcagtgtctttgctgtctgtggcttgggcctcctgggtatcgcggtcagcaccgactactggctgtacctggaggagggtgtgattgtgccccagaaccagagcaccgagatcaagatgtccctgcactcaggcctctggcgggtctgcttccttgcaggtgaggagcgggggcgttgcttcaccatagaatatgtgatgcccatgaacacccagctgacatccgagtccacggtcaatgttctaaagatgatccgctcagccacaccattccctctggtcagcctcttcttcatgttcattgggtttatcctgaacaacatcggacacatccgtccccaccggacgatactggcctttgtctctggcatcttctttatcctctcaggcctctctctcgtggtgggcctggtgctctacatctccagcatcaacgatgagatgctcaacaggaccaaggatgcagagacctacttcaactacaagtatgggtggtcgtttgccttcgccgccatctccttccttttaacggagagtgccggggtgatgtctgtgtacctgtttatgaagcggtacaccgcggaggacatgtacaggccccaccctggcttctaccgccctcggctgagcaactgctccgattactcaggccagttcctacacccagacgcctgggtcaggggccgcagcccctccgacatctccagcgaggcctccctgcagatgaacagcaactaccccgccttgctcaagtgccccgactatgatcagatgtcctcttcaccctgctga

SEQ ID NO: 15905 - DNA, 1224 bp, Homo sapiens
  SIMILAR (2276)..(2869): 961254mologous to Escherichia coli hexosephosphate transport protein,accession number M89479,Smith-Waterman Score=965.
atggcccgttcttacggcggccgggtgctggctgcaagaccctgctgggcatcgcggcggccgtgctggcggcgctgggcgcgcagtgctgtttcagctgcaggcgggccgcgccgagctgcgggggctgcgcgcgaggggctgggccaggagctgggcgccggccccgggctgccagaggacgggccgggacgctgctgccgctggccgccgcgctggccgcgctggtgctctgctggggttcacctgcttgctgctcgccgcgctctgtggccacctggggccgagctggcgcgggggcctggccccaggaggggaatggatctggctcagggcatcagagacacggggaccaagtggacccagacctgctctcatggggtcacagaaaataagaaacataacaaggacaaggcatgggcctttgcactggctgcattccggatgtaccacagcgactcccttttgcctcaccaggtcctgctcagatgccgcctgctctctcaagggcctcccctgcctctgcccttgcggtctctctgtgctgatccgcgtgcgcctggagctgcggcggcaccagcgtgccggccacaccatcccgcgcatctttcaggcggtagtgcagcgacagcccgagcgcctggcgctggtggatgccgggaccggcgagtgctggacctttgcgcagctggacgcctactccaatgcggtagccaacctcttccgccagctgggcttcgcgccgggcgacgtggtggccatcttcctggaggccggccggagttcgtggggctgtggctgggcctggccaaggcgggcaggaggccgcgctgctcaacgtgaacctgcggcgcgagcccctggccttcgcctgggcacctcgggcgctaaggccctgatctttggaggagaaatggtgcgggccccaccccccaatgctcaggccccacccctaacacctgtatctcctgcagatcgtcttttctacatttacacgtcggggaccaccgggctgcccaaggctgccattgtcgtgcacagcagtgccaggccttcgtgcccatcctcaaggactcttcgtgcggctcacagatgagttctatgtactgcgggcggctcagctgccctggtgtacgtgtcccaggactccacggaggagcagcaggacctgtcctcaaggacatgccaaagaaatggcttttcctgccctttgaggatgattga

SEQ ID NO: 15906 - DNA, 597 bp, Homo sapiens
  SIMILAR (91)..(198): 431254mologous to Mus musculus SPR2B protein,accession number AJ005560,Smith-Waterman Score=80.
ttaatttctgtctgtccatctaatggaagggcagttccatgagacagagatcttgactgtcttcttcatcacagtatcaccatcatctaaaacgttctgggcactggttagttgtagtaggtgatcagtaaatttccggggatgaatgaaggtcacataactcatgttgcattcagaaaagcatctgaaagtaaaaatgtgggccttgtcttcacgactgcgagcatctcgccagtttctcgctgcgagtttgtgaattcgccagtctttggtgactttcagagtgtgtttccattcacctgaactctgtgagaggcttcttccatccagaagcactttcctactatctttccttggagcctgatagaccaccaatggaatttgttccattgctaaagcatcaaatcccctgagatccattctccaagcacaaggatcagaatgggatgttcttctctccccacagaagaagcgcacgctgaaggggtcattgagctctcccgaatcaaatgtgttgagattgtgaaaagtgacatcgcatcccatgccactataaatacccgtttcaggtaagtccatcaggtggtagttccccat

SEQ ID NO: 15907 - DNA, 6401 bp, Homo sapiens
  SIMILAR (535)..(723): 981254mologous to Escherichia coli No definition line found,accession number U00039,Smith-Waterman Score=343.
cgcggccgctatatataatgcagcatcacaccatgtagggcatttactcttattttatacattcagatatgtttgaaacattcttaaggctacaaaacagaacatagaaaaataaacaggaatatattcaacacttacaaaaagtgatatgataaagaatataaagtactagtttccttttaacacttcaaaagatatgtatatatacttttttttacaagtaacatcacaaatgctcacatcttcacatgctcttaaagtattatttgtactcagtgtaaggctattatcgtttttcatacataaaattttctagctctgtaacacaatgcaatttttaatccattcaagtaagttcaaccccaaagttgccgcttcccagcattaagacatgcacccacccctcttctaagattttctaaacttgtatttcggggagaaagacctcttttaaaaaataatccaattagtgggagagtaaatggctgacattagtagcaaaaccttagttatctgaaaataacatattggaaatgagacattattaggattttaaacaaacaatagcatttagacataaagtaggaagcaaaatacagtaaacagaaatagtgtagccaaatatcattctcttcagctaccttaagtaaaagacaaaacatttacctcatctaaaaatgaaggtaaaacgaaagaggcaaaaataaatattgctagtttctaggatggctgaatgttttctaaaccagaaatggttagaaaggaactttattgcaccaagtcaatcataagcaagtttgcagttcacaggcattttaattcaaccttgagtcacaaaggagaacaacacgctgcgagaatacagtctacagtctgcattaaataagaatatatcagcattgtggtctgggaaaacctatgcttgccaggacaaggcagggtgctgagcttaggtcatgccatgaaaatgaatttgtgggttatcagtaaacagtatgaggactacacagatgccagcatcctgctgccaaggagacatggggcaagagttgaagatttgagaggaaatgaagagacatacacaacaccaaaggaaaagggggctggaatcaagttcagccaaagcacctaacacaaaaaacaggtgagctttggtcagtctgttcttcaaaatatgtatgatcatatggtaatgaagtttcataatttccaactcaaaaatacaaatgatcctcagttctatacttttgcctctattctcttataaagaaatatgtcaacataacagtatgacataacagttaaaataaggacaaaagcttgcttatcttagtttgacctcagcataaggcaaaatcccctggagaatacatttaaaaacaaacttaaaaggaaaaaaagcgaaaccaacttcatgcaaagattccttttaaaactatcaaaagtcagttcttttattccagaggtcactgagaaaagtaccatctgctaaaattctctttcaagcacttcttccatcatatcctagaggtgagatatgggaaacagaaagcaaatcagtgttcctcaggagctatatctgttactcaattgagggtaagacaaagtgacaatgaagatatgagtagtatttccttccaatttttaaagattttcagaagctgagatcaaaccccactcaataaaatgcaggagactagaagcaacaacttattttggactcctgagatcaaacacattgaactttcaaatctgggtgtttctatcaaaatgtgattttcattaaaatcagtaagctagtcctacataaaaaagcatgagctgaaagtggaggaccctctatcttctcattccttaactgagccaccgatgttaagaaaaaaatggcttaagcggtaccttcaacaactattctagttaagaaggtgacaacaaattgaggccgcgaattcggcgaaaactctttcctttggttgtgctaagaggtgatgcccaaggtgcaccacctttcaagaactggatcatgaacaactttatcctcctggaagaacagctcatcaagaaatcccaacaaaagagaagaacttctccctcgaactttaaagtccgcttctttgtgttaaccaaagccagcctggcatactttgaagatcgtcatgggaagaagcgcacgctgaaaggggtccattgagctctcccgaatcaaatgtgttgagattgtgaaaagtgacatcagcatcccatgccactataaatacccgtttcaggtggtgcatgacaactacctcctatatgtgtttgctccagatcgtgagagccggcagcgctgggtgctggcccttaaagaagaaacgaggaataataacagtttggtgcctaaatatcatcctaatttctggatggatgggaagtggaggtgctgttctcagctggagaagcttgcaacaggctgtgcccaatatgatccaaccaagaatgcttcaaagaagcctcttcctcctactcctgaagacaacaggcgaccactttgggaacctgaagaaactgtggtcattgccttatatgactaccaaaccaatgatcctcaggaactcgcactgcggcgcaacgaagagtactgcctgctggacagttctgagattcactggtggagagtccaggacaggaatgggcatgaaggatatgtaccaagcagttatctggtggaaaaatctccaaataatctggaaacctatgagtggtacaataagagtatcagccgagacaaagctgaaaaacttcttttggacacaggcaaagaaggagccttcatggtaagggattccaggactgcaggaacatacaccgtgtctgttttcaccaaggctgttgtaagtgagaacaatccctgtataaagcattatcacatcaaggaaacaaatgacaatcctaagcgatactatgtggctgaaaagtatgtgttcgattccatccctcttctcatcaactatcaccaacataatggaggaggcctggtgactcgactccggtatccagtttgttttgggaggcagaaagccccagttacagcagggctgagatacgggaaatgggtgatcgacccctcagagctcacttttgtgcaagagattggcagtgggcaatttgggttggtgcatctgggctactggctcaacaaggacaaggtggctatcaaaaccattcgggaaggggctatgtcagaagaggacttcatagaggaggctgaagtaatgatgaaactctctcatcccaaactggtgcagctgtatggggtgtgcctggagcaggcccccatctgcctggtgtttgagttcatggagcacggctgcctgtcagattatctacgcacccagcggggactttttgctgcagagaccctgctgggcatgtgtctggatgtgtgtgagggcatggcctacctggaagaggcatgtgtcatccacagagacttggctgccagaaattgtttggtgggagaaaaccaagtcatcaaggtgtctgactttgggatgacaaggttcgttctggatgatcagtacaccagttccacaggcaccaaattcccggtgaagtgggcatccccagaggttttctctttcagtcgctatagcagcaagtccgatgtgtggtcatttggtgtgctgatgtgggaagttttcagtgaaggcaaaatcccgtatgaaaaccgaagcaactcagaggtggtggaagacatcagtaccggatttcggttgtacaagccccggctggcctccacacacgtctaccagattatgaatcactgctggaaagagagaccagaagatcggccagccttctccagactgctgcgtcaactggctgaaattgcagaatcaggactttagtagagactgagtaccaggccacgggctgcagatcctgaatggaggaaggatatgtcctcattccatagagcattagaagctgccaccagcccaggaccctccagaggcagcctggcctgtggcatcagtccctgagtcaccatggaagcagcatcctgaccacagctggcagtcaagccacagctggagggtcagccaccaagctgggagctgagccagaacaggagtgatgtctctgcccttcctctagcctcttgtcacatgtggtgcacaaacctcaacctgacagctttcagacagcattcttgcacttcttagcaacagagagagacatgacgtaagacccagattgctatttttattgttatttttcaacagtgaatctaaagtttatggttccagggactttttatttgacccaacaacacagtatcccaggatatggaggcaaggggaacaaagagcatgagtctttttccaagaaaactggtgagttaagtaagattagagtgagtgtgctctgttgctgtgatgctgtcagccacagcttcctgccgtagagaatgatagagcagctgctcacacaggaggccggatattctgagaagcagctttatgaggttttacagagtatgctgctacctctctccttgaagggagcatggcgagacccattggatggattggggtgaacagttcaggtcccatgcttggagcattgggtatctgatgtctgcaccagaacaagagaacctctgacggtggagaaccatgtggtgcaagaagagatcttaggtctcttctttataccaagctcatgttttataccaagctcatcttttataccaagctgtgcaggtgactatgcctcctcttctgcacagaatgcttccaccagcatcctgagaagaaatgattacttctgtaaaacatccttttttccagcctctgggaatcagcccccccctctctgcactatccgatcctcatcaacagagggcagcattgtgttggtcagtgttcccttggcgagcaattgaaacttgtttaggccctagggttgagcaattttaaggttgagactccaagtctcctaaaattctaggagagaaataaagagtctgtttttgctcaaaccatcaggatggaaacagtcaggcactgactggggtgcttccaagaggcatgagagtgcctactctggcttgagcacttctatatgcaaggtgaatatgtactgagctaggagacttccctgcaaaatctctgttcaccctgggttcacatccccatgaggtaatattattattcccattttacaaataatgtaactgaggctttaaaaagccaagacatctgcccaaagtgatggaactagaaagtctagagctggtattctagcccaaatctgtctgaccgcaatacacagattatttattcctattagacactggcttctactgaaaatgaaacttattgcagagggaataaatacaaagatggaaagccagtaaagaagtcagtatagaaccactagcgaatagtgttgctctggcacagaccactgtggttgatggcatggccctccaacttggaataggattttccttttcctattctgtatccttaccttggtcatgttaatgactttggagttattcagttaatgaccctttaattctcacaaccaaccagtcatgttgcttgaagccatttatagacgagcttcaaagcaactttaaaagattcttctgtagaagtatgagttcttcctttaattatcattccaactttcagctgtagtcttcttgaacacttcatgaggagggaggacattccctgatataagagaggatggtgttgcaattggctctttctaaatcatgtgacgttttgactggcttgagattcagatgcataatttttaattataattattgtgaagtggagagcctcaagataaaactctgtcattcagaagatgattttactcagcttatccaaaattatctctgtttactttttagaattttgtacattatcttttgggatccttaattagagatgatttctggaacattcagtctagaaagaaaacattggaattgactgatctctgtggtttggtttagaaaattcccctgtgcatggtattacctttttcaagctcagattcatctaatcctcaactgtacatgtgtacattcttcacctcctggtgccctatcccgcaaaatgggcttcctgcctgggtttttctcttctcacattttttaaatggtcccctgtgtttgtagagaactcccttatacagagttttggttctagttttatttcgtagattttgcattttgtaccttttgagactatgtatttatatttggatcagatgcatatttattaatgtacagtcactgctagtgttcaaaataaaaatgttacaaatacctgttatcctttgtagagcacacagagttaaaagttgaatatagcaatattaaagctgcattttaa

SEQ ID NO: 15908 - DNA, 1703 bp, Homo sapiens
  SIMILAR (1251)..(1703): 611254mologous to Homo sapiens dJ998C11.1 (continues in Em:AL445192 as bA269H4.1),accession number AL035106,Smith-Waterman Score=385.
  misc_feature (1)...(1703): n = a,t,c or g
cctctccgcaggtctttgtcactacagagtactgctgtcgttatgcccattttacagatgtggatgcagagtctcagagagggcctacagcagtgcctgtccttctggacgtgctacatgcgtcatttgccgagagaaccaatgagtgcctgctcaccaccaccctggtcaaatcctccatcacctcccgcctggacgattgcaggagactcctcctgagctccctgctacagtctgttgttcacacacagccagatggccccttaagaactcagatgagtaaaactgaggtcggcgaacgtagtgacctgcccagggatatgtggtccctgagtacacttgttttgatttctccagacaacttcgccattggccttggcactcagccatgcggccatcctggctggacggcagtggacaggcttgatgtggtgggaagttccgcaaagagaaaaagggaactgctgggtctgtgtcccgtggttggtggctggggcagtatttggggcattggagtgctgtcctcctatggcactgcttgggctggggcatctcttctgcagtatttattcagcatcttctgtctacctcaacccatgctgtggattcagcacaagcagccagagaccctcaccatcacggagctggcagtgcgcagagaggaggactctaaattagcaaaatgcatagaacaacactttgtgctacctgcattacagggaattaaaacagattatcgagatacacgcaatgctgtttgctccctgtgtctgctccacgtgaaacctgcctccacgtctgaccggggactgcctgtggttccgcagccacctcctctgaccttcagccctgcacatgtagagattttccccatcagctcagaagtattttggtgttttaacaggcagcgaggccgtcctgcccataccctggccctctcaagtttcaccatatgtctggtcctgctggccatcactgagggctgctcccaggcagtcttacttcttccgcacctctggcctgccctgcacatgagagcggggtcttcaggccaagagatgcaggtgctggcagctcgatgtggtgtgggggagaccatgtgctcacctggagcagcccccgtgtggacccccaatctgtcatccatcttggcagggcaggtgactgataggccccacagctccccgtggccctgtggctatgacagcaccatgaattccttttcccaggggtctccatgtggctgcttccaggcattcctgcatcgcatccggcagaacgtggccgactcagtggagaagggcctcacggaggagaatgtcaaggtcctgttctcgaacatcgaagacatcctggaagttcataaggatttcttggccgccttggagtattgtttacacccggagccgcagtctcagcatgaacttgggaatgttttcttaaaattcaacggacaagttctgccgtgtacgaggagtattgcagcaaccatggagaaagccctgagggctgcctggtggagctgaacaagatccctaccgtgcgcgccttccttttgagctgcatgcttctgggaggccgcgaagaccaccgacatccctttggaaaggctactgggtgcttccgatncagaaggatccttgcaagtaccccgtccctccctagggagcttggccaagagggacttcccggcaagctacccg

SEQ ID NO: 15909 - DNA, 415 bp, Homo sapiens
  SIMILAR (174)..(353): 601254mologous to Mus musculus mitotic checkpoint protein BUB3,accession number AF149822,Smith-Waterman Score=145.
atggggcgagtccggaccttggcgggcgagtgctcggcgcaggcgcaagcgcagagtctcctcgcggtcgtccttttggcccctcccctctggggggacccccagtgccaggctgtcagtgcgcagcccccagcctgcgggacccctggggactctgggcgcctgttctgcaaatgaccggttcttacgagttcaagctgaaccagccacccgaggatggcatctcctccgtgaagttaagcccccacacccttcccagtcctgggttgtctccttcctgggagacgttccgtgcgtctttacgatgtggccgggcaacttcatggcggttaagtaccaagcacaccggggcccgtcctgggaatgggcctttttaatttcaatttacccccttggccggagagtcaaatgttga

SEQ ID NO: 15910 - DNA, 2851 bp, Homo sapiens
  SIMILAR (1110)..(1562): 881254mologous to Escherichia coli K12 putative oxidoreductase,accession number AE000303,Smith-Waterman Score=643.
gtctaccctcgcacaacaatggcaggctggcgacagcatctggtcacgcccggctattcgtgtcttcgcaacctacgccaagtgggatgagaaatggggttacgactacaccggtaacgctgataacaacgcgaacttcggcaaagccgttcctgctgatttcaacggcggcagcttcggtcgtggcgacagcgacgagtggaccttcggtgcccagatggaaatctggtgctcgtatctcctcgcgctcagacagtgtcaggccgacatccatagcgctggctgcatctgccacggtgtagttctggtcaacgaccagtgtttgccgccagtaaagtgctggggccgctgtggagcaaagtctccattttgcgctatcacatttcgggtccgctggacgatccgcaaatcaacgaagtgttgcgccaaccgcgcctacaaacggaacataaccgtaggtcggataaggcgtttacgccgcatccggcagccgttgcctgatgcgacgctgtgcgtcttatcaggcctacaaacggaacataaccgtaggtggccaaattcagtgtgccacttcagccctgattcgactttttacaatgacttatctggacgcatgaagaacgtcaggctaatgttcaacggtatacacagggacaatggattctccaaacgacccacagacttgaactacacgcgtaaaccactcgtcctggctttccagacggcatggtttatcaccgtccgcgttgaaattgtgggttttcgcggtatcaaccgtttgtcgttgatgctggaacaaaacaacgtcctgattggggagaacgcgtggggtaaatccagcttgctggacgccttaactctgctgctatcgccagaatcagatctctaccattttgagcgcgacgatttctggttcccgccgggagatatcaacgggcgagaacatcatctgcatattattttgaccttccgcgaatcgctgccaggccgacatcgggttcgccgttatcggccgctggaagcgtgctggacgccatgcaccgatggctatcaccgtattttttatcgtctggaaggggagagtgcggaagacggcagcgtgatgacactgcgcagttttctcgataaagacggacatccgattgatgtcgaggatattaacgatcaggcacgccatctggtgcgtttaatgccggtgctgcgcttgcgtgatgcccgttttatgcgccgtattcgtaacggcacggtgccaaatgtccctaatgtggaagtcaccgcgcgccagctcgatttcctcgcccggggcggacaggcgcgatatcgtttaatgcggcggcgagccagcaatgagcaacgaagctggcgctatctggatatcatcaaccggatgattgaacgacctgaaacccgttacacgcgtgagattggttttacctccaccaacatcgacctgatttacggcctgccgaaacagacgccggagagtttcgcctttaccctgaaacgtgtggcggagctgaaccccgatcgtctgagtgtctttaactacgcgcatctgccgaccatttttgctgctcagcgcaaaatcaaagatgctgacctgccgagtccgcagcaaaaactcgatatcctgcaggaaaccatcgccttcctgacgcaatcgggctatcagtttatcggtatggatcactttgcccgtccggatgacgagctggcggtggcccagcgtgaaggcgtgctgcatcgtaacttccagggctacaccactcagggcgataccgatctgctggggatgggcgtttccgccatcagcatgattggcgactgctacgcgcagaaccagaaagagttgaagcagtactatcagcaagtggatgaacaaggcaatgcgctgtggcgtggtattgcgctaacgcgtgatgactgtattcgccgcgatgtgattaagtcgctcatctgcaacttccgtctggattacgcccctattaagaaacagggggatttgcacttcgctgattactttgcggaagatctcaagctgctcgccccgttagcaaaagatgggctgggggatgtggatgagaaggaatacaggccggataaggcgtttacgcgcatcaggcatctgagcatgatgcctgatgcggcctggtcgcgtcttatcaggcctacgactttctccgcatccggcataaacaacgagcttcagctaaacggcccaatcattgcggcacacagcacggcagcaacggcagtttgcggcatggaagcatgggcgtggaatactaagcatgcctgcaggtgcattctgaaaaagacgtcaaaccttgtgcaccagatgctgcactcggtcggtcttaatgcgctggcgacagctagcgacatgaaccgtaacgtactgtgcacctcgaacccttacgagtcgcagctgcacgcggaatcttacgagtgggcgaataagatttctgagcatctgttgcctcgtacccgcgcgtatgcggagatctggctcgaccaggaaaaagtcgccactactgatgaagaaccgatcctcggccagacctacctgccgcgtaaattcgaaaccacggaagtgatcccgccacagaacgatatcgatctgcacgccaacgacatgaacttcgtggcgatcgccgaaaacggcaaactggtgggctttaacctgttggtgggcggtgggctttccatcgagcacggcaacaagaaaacctacgcccgcgccgtgaatgattttgctatctgccgcggggacatacgctggcggtggctgaagccgtttgacactcaccgtggcggggaaccgaaccgatgtaaaatcccaacccaataa

SEQ ID NO: 15911 - DNA, 1195 bp, Homo sapiens
  SIMILAR (253)..(897): 921254mologous to Escherichia coli put. Cyt repressor (aa 1- 341),accession number X03683,Smith-Waterman Score=1041.
gagagttaagagaagcacaattaatggggagaacccaggggtttaacagaatacgacatgtaaagagagcgcaatgcccaaatttcgaaaccagcgagtagatcaaagaggagaaatgaagggcgcacacaattgtgtcttgagccaccgctaattggaatggaaaaggcgtttaacagggaatttgtgaaggttatgccgaattgggggggcatggaccccaaaagggcggatgaaatttaaaattaagctgcgcgtaaaagccccggtaccagcgcaaaggttgtattaatgagcggaaaaccatccagggccctttagtggtcgaaggaaaaatgacagcccccgagcgcatgaagcatgaaagcaattacctgcgcggcaccattgcggaaaaatttaaacgacggtctgaccggcggctttaagggcgccaacttcctgctgattcgcttccacggcatgtatcagcaggatgaccgcgacatccgcgccgaacgtgctgaacaaaagctggagccgcgccacgcgatgttgcttcgctgtcgtctgccgggtggggtgattaccactaaacagtggcaggcgatcgacaaatttgccggtgaaaacaccatctatggcagcattcgcctgaccaaccgccagacgtttcagttccacggcattctgaaaaagaacgtcaaaccggtgcaccagatgctgcactcggtcggtcttgatgcgctggcgacagctaacgacatgaaccgtaacgtactgtgcacctcgaacccttacgagtcgcagctgcacgcggaagcgtacgagtgggcgaagaagatttctaaacaactgttgcctcgtacccgcgcgtatgcggagatctggctcgaccaggaaaaagtcgccactactgatgaagaaccgatcctcggccagacctacctgccgcgtaaattcaaaaccacggtagtgatcccgccacagaacgatatcgatctgcacgccaacgacatgaacttcgtggcgatcgccgaaaacggcaaactggtgggctttaacctgttggtgggcggtgggctttccatcgaacacggcaacaagaaaacctacgcccgcaccgcgagtgagtttggctatctgccgttggagcatacgctggcggtggccgaagccgtcgtgacaactcagcgtgactggggataaccgaacc

SEQ ID NO: 15912 - DNA, 3258 bp, Homo sapiens
  SIMILAR (1)..(675): 1001254mologous to Escherichia coli O157:H7 putative ATP- binding component of ABC transporter,accession number AE005655,Smith-Waterman Score=1128.
atgcaaaacaaaacgctgcttttctcactggatgacacgctggttaataacgcgctgcaaaaattaggcggtttacgagcggtgaaacattacatgcagcgaaccgctgttcagggtagtccgacgatgcttgccgctatcagtaaacagtgggtgcgcgataactgcgacctccacttcaaggtggcccgagatcggagtagtggctatccgctcacaattgagggctttgcatacctgtggtcaggagcccgtgccagctatggggtcagaaggggccgtgtatgcttcgagatgaaggtcgcgtcttcacctgattatcaacaaaaaagaattgcccgggcaacatgcggaggaaatatgaaactgttgattgtcgaagatgaaaagaaaaccggagaatacttgaccaaagggttaaccgaagccggttttgtggtcgatttggccgacaacgggctgaatggctaccatctggcgatgaccggtgattatgatctgataatcctcgatattatgctgccggacgtgaacggctgggatatcgtgcgcatgttacgctccgccaataaagggatgccgattctgttgcttaccgcgcttggcaccattgaacatcgcgtcaaggggctggagttgggggcagatgactacctgggtactttcgagttcctgttcgaaaacggcgagttctatttcatcgaaatgaacacccgtattcaggtagaacacccggttacagaaatgatcaccggcgttgacctgatcaaagaacagctgcgtatcgctgccggtcaaccgctgtcgatcaagcaagaagaagttcacgttcgcggccatgcggtggaatgtcgtatcaacgccgaagatccgaacaccttcctgccaagtccgggcaaaatcacccgtttccacgcacctggcggttttggccagagttggttttctccctgcgttagcgcacaatacgccactttctttttcccggatttttacgttatgtctcaccgcgacacgctattttctgcccctatcgccagactgggcgactggacctttgatgaacgggcacatgttttccctcgggatatgaacatccagagcgttcgcgggatataccttatagtatttacagtgatagggatggttatgccgattcgctacagttctaaccggggtaacgcagagtttaacgactctaggtggtgctggaagatgtcccacgaggccgtggttaagactggcggggatggcagcgcagttgattttgaccagcggcttgtcgcgtcgcgggctaagttgatggatcgctctggcgatcacctctttgccagttccggtttcaccacaaatcaacaccgtactgtcgctcttcgccacaatatctacctgctggagcaggtcttccattgcctggctttgatagataatgtcaccgatgcccagattcgaaaggagctgctcgctaagctggtggttttcttgctgcaaactttcctgcaaatcggtcatgctacgccagacattgcacaactgcgccagctactgaaacagctgaagcgttatttgcaggataaccgtatcgtgacgatgtcgctgaagccgcagaatatcctctgtcaccgcatcagtgagtcagaggttatcccggtcgtctgcgacaacattggtgaaagcacattgattccactggcgacctggtcgaagtggtgttgtctgcgtaagcaagagcggttatggaaacgatttatcgcccaaccggcgctggctattgccctgcagaaagatctgcaacctcaatgtgaatgtgaaccttccctgaatgtgccccctaggcatagagcaattgtgtactacccaaccttcacaaccatctatgagcacgatctggtacacgctattccgctgtatgcgatcaaacaaggtctgctgaccgttgagaagaaaggcaagaaaaacatcttctctggccgcatcctggaaattgaaggtctgccggatctgaaagttgagcaggcctttgagctaaccgatgcgtccgccgagcgttctgccgctggttgtaccatcaagctgaacaaagaaccgatcatcgaatacctgaactctaacatcgtcctgctgaagtggatgatcgcggaaggttacggcgatcgtcgtaccctggaacgtcgtattcagggcatggaaaaatggctggcgaatcctgagctgctggaagccgatgcagatgcggaatacgcggcagtgatcgacatcgatctggcggatattaaagagccaatcctgtgtgctccgaacgacccggatgacgcgcgtccgctgtctgcggtacagggtgagaagatcgacgaagtgtttatcggttcctgcatgaccaacatcggtcacttccgtgctgcggggaaaaaggacctccattggggtctggggtgtacctatctgtccacctcaccccatgtacgcgttacgtggggggttacgcaaaatattggtgcgcacgaaagcaaagcgccagaaggtgttttgccggtaagccagactcagcagggcgaagcgcaaatctggcgtcgcgaagtgagttcccgatacggccagtatccgaaagcgcaggcggcgcaacccgatcaattaatgtcggattattttttccgtgtgtcgctggcgatgcaaaacaaaacgctgcttttctccctcgatgacacgctggttaataacgcgctgcaaacactgaataaaacccgcccggcaatggtggatgtaatacccactgatggcatcgttccgctctatatcaatccacaaggaatagcgaaactgctgcgtaacgaaacgttgaccagtctgccgaagaatctcgaaccggttttttataacgccgcacaaactttattaatgccgaagctggacgctttatctcaacaaccgcgttatgtcatgaagctggcccagatggaacccggcggagtgtcccacgcccgctggcaggatgtctggcagctcttgccggtggtggtcactgcagtccctgtcgtgttgctgctggcgaatcaactgaacctgctcaacctcagcgacagcaccgcccatacgctgggagtgaacctgacgaggctacgtttggtcatcaatatgttagtgctgcttctggttggtgcgtgcgtcagcgtagcaggtccggtggcgtttatcggtctgctggtgccacatctggcggactctacgaggatccgatcgaccggtaccggggactattag

SEQ ID NO: 15913 - DNA, 3499 bp, Homo sapiens
  SIMILAR (169)..(756): 971254mologous to Escherichia coli put. Cyt repressor (aa 1- 341),accession number X03683,Smith-Waterman Score=964.
tggtctttgcgcggctgatgaccggtgtcggcctgggggcggcgttgccgaatcttatcgccctgacgtctgaagccgcgggtccacgttttcgtgggacggcagtgagcctgatgtattgcggtgttcccattggcgcggcgctggcggcgacactgggtttcgcgggggcaaacttagcatggcaaacggtgttttgggtaggtggtgtggtgccgttgattctggtgccgctattaatgcgctggctgccggagtcggcggttttcggcacatccgcaatcaacggctggttaagcgtatgcaggtcgagattttcctgtttcacgccggagagcatcaccgcttttagcgctgcctctttggtgccgcgggcaaactgtagcccctgctcatccactggcgtttcgccacgatcgaggaagcagacgaccaccggcttgcggcaggcgcgcgcacgttccagcactttgcgggccaccgcaggcgcaggcggtttggagataagcgcaatgatttcagtttgcggatcgttttccagcatcccgatggcgtcgagcatcatcaggccgccgattttctcgctcaggtcgcgcccgccggtgccaatcagttgcgaaacgccgccgccaaattcatgaatgcggacgctcaactcctgactgccggtgccggatgcgccaacaataccgatgttgccgcgacgcacggcgttaccaaaacagagcgccgcgccgttgataatcgccgtgccacagtctggccccatcatcagcagccctttttcgtgggccagttgcttgagcgccagttcatcttcaactgagacgttatcggaaaacagcatcacgttgagatcgttttgcagcgcctgacgcgccagagggacctttcctccaactgtgaccacatggaattcagtcaagaacgtgaaaagaagcaagcgggccttaaataaatctgcaactattccataatctgccacatggaaaattggagcttctgggtctttattaattgccacaattgtcttaaataaatctgcaactattccataatctgccacttggaaaattggagcttctgggtctttattaattgccacaattgtcctgtcctggcagacgctgggtcgggccggcagcccgcgttgcgcccgcacgtgcacaagcagacggagaagacgacccgcgtgcggactgtgctgaacgagaagcagctgcacactctgcggacctgctacgccgccaacccgcggcccgacgctctcatgaaggagcagcctgccccttggcgcacttgatgcgaacaagcctgcgggcccaaggtgcgccggtgtcagcgctgggcctgcggccgccctcatctccctggctgtacgggctccggcgcgcgcccaggacactttgtggccaccaggagactgcggtgacccgcctgcgggcattcccgggcccgggggagcgctgcggcacccgtgcgggatgcggatggccttctccctgacatagtcccgcttgcagtaggtcttcccgtctctcacgaagcacgtgcacgtctcgtccaggtactggctgcactcggcacacttgaggcaggccgcgtgccactcgaggtcgggcgacacccgcaggataaactggtcgtggatctgactcccgcagcccacgcacatggccgtcccgggcttctccagtaaggggcacagaggaggtggccattcacttaattcagcaggtggagctgatgggctagtaaaacatactttttttagttttcctttcttttcattaatctcctccggtagctgtttctcacactcagaatctgaagttagtttttcccactcgtcctcctcttcctcatctttattagtgcccacactggccaaatgagggatcactcgagagtctcgtcgtgtatgtcggtgctttcgtgcgctcccgttgttgcgtggtgtcgtcgtcttcgtcgcgtgggtgtcgagtggcgctgctgtcgtttcgttattgtcgttcttggcgccggtccgtggtcgttgctgctccgtccgccgtggtcggcgttgggcctgtggcgcgcccggtgtcgcgtctcccgccgcgtgatgccttttttcgcgcgttttgcgtcgctttggcctcttgttcgccgtttggtggtcctgcgcgtgtttaccctgtctttgcgcttgtccgccttctccccttttgtgcctggtccgctttcgccgcgtatcctcgtttctgctgttgccctgttcgcgcctcgccgttgtcccgtttccttgtcctctgttggctgttgggcgcttgctgctggctcccttgcgctgtttgctgtctggctttcccgcctcgccctgtgccgttggggctttggccctgcgcctttccctttgtcccctgtccggttgcctttgcggctttgggcttcgctgtgttgttgcccctgttgctttgcccttcgcgtgtgtccttgtgcctttggcttcttctccgccctttttctttccgttttgtgtcgcgccgtgttccctctcgcctttcctctgggcctgtcgtcttcctctgtggggtttgccgtctcgttttggctttttgggtgcgtctttgtccttctgcctctgctttgtccgttgcctcttttgcctatctctggcgcttttgggtctgtggccctcggcgtgccgctttgctcttgcgccgttcccgcttcggggtttggggtgggccttcccccgttccccgataaaaccccgcccccttgtggtgctcggcctgctcgtctttggcaccaaaaggcgctctttctctctgtgtcgtgacggctttatcttcgccttccggccggaatagtcagtgtagaataaacggatttttccgtcagatgtaaaggttgcagaaccggaccattcttgcgtctgatctttcaggatcggatcgttggcgtcgaacttatcgctgtctttaaagacacggcccgcgtttttccagctgtcgattgagttgtcgccgaccttttgataaaacatgtagattgatgtgtcatcagcgtgtgaaatattttctgcatcagccagcgcagaaatattttcagcaaattcattctgcaatcggcttgcataacgctgaccacgttcataagcgcttgttgggcgataatcgttacccaatctggataatgcaggcatgtgctcatcatgcagcttgccagccagaccacgataatcactttcggtaagtgcagcagctttacgacggcgacttccatcggcaatttgtatgacaccagatactcttcggccgagcgccggtgtctgttgaccagtcagtagaaaagaagggatgagatcacccagtgcgtcctcagtaagcagctcctggtaacgttcaaggcctgaccatacccgagaggtcttatcaacactatctcggcggagcacttcaaaaggatcatgtgacagtcccggttttggtgcaccagaatccagcggcat

SEQ ID NO: 15914 - DNA, 1514 bp, Homo sapiens
  SIMILAR (22)..(576): 941254mologous to Escherichia coli MdoG,accession number X64197,Smith-Waterman Score=934.
gagttcctcatgacgaatcgtatctctcgcctcaaaactgcactgtttgccaatacccgtgaaatctcgctggagcgggcgctgctttataccgccagccatcggcaaaccgaaggcgaaccggtgatattgcgccgggcgaaagcaacagcgtatatccttgaacatgttgaaatttcgattcgtgatgaagaactgattgccggtaaccgcaccgtaaaaccgcgcgccgggattatgtcgccggaaatggacccttactggctgctgaaagagctggatcaattcccgacgcgttcgcaggaccgctttgctatcaacgaagaagaaaagacgatctaccgggaagagttgttcccgtacttgggaaaaacgttccatgaaagatttcatcaacgggcagatgacagatgaagtaaaagccgcgaccaacacgcagattttcagcatcaaccagacggataaaggccaggggcacattattattgattacccacgcctgttgaatcacgggctgggcagatggcgtattgggatctggcgctcttcctctttcactgacactgtctccttgggctctcgggtgcggctagcgcgatcagcttacatctacgcgagagtccggttaccgacatacacagaggataggttactggtggagattgaagaactgctcaacaccaaagcgcaaagcggctcgcacgaggcgcgttacgccactattggcagcgccaaaaagcatatcccggaaagtaacctggcggtgatttcggtcaacggtctgtttgccgctcgcgaagcgcgtcaggcgctgcaaaacgatctcaacgtgatgctgttttccgataacgtctcagttgaagatgaactggcgctcaagcaactggcccacgaaaaagggctgctgatgatggggccagactgtggcacggcgattatcaacggcgcggcgctctgttttggtaacgccgtgcgtcgcggcaacatcggtattgttggcgcatccggcaccggcagtcaggagttgagcgtccgcattcatgaatttgccgtcggcgtttcgcaactgattggcagcggggcgcgcgacctgagcgagaaaaccggcggcgtctatgatgctatgaggccatctgggatgctggaaaacgatccgcatcctggaatcattgcgcttatctccgcgccgcctgcgcctccggtggccctcaagcagaaccagacacatggagaaggtaaagtaaagcaagagtggttttgtatgggccttacccgcatcaccctgctgctggccgaagatcatgcttacggcatcttttactggctggcaggcggagtgtcccacgcccgctggcaggatgtctggcagctcttgccggtggtggtcactgcagtccctgtcgtgttgctgctggcgaatcaactgaacctgctcaacctcagcgacagcaccgcccatacgctgggagtgaacctgacgaggctacgtttgatccaagctcgcatgcctgcag

SEQ ID NO: 15915 - DNA, 1281 bp, Homo sapiens; identical to SEQ ID NO: 10411
  SIMILAR (271)..(684): 981254mologous to Escherichia coli 37KD protein, similar to YI22-ECOLI,accession number D85613,Smith-Waterman Score=731.

SEQ ID NO: 15916 - DNA, 1673 bp, Homo sapiens
  SIMILAR (1768)..(2223): 921254mologous to Homo sapiens alpha-tectorin,accession number AF055136,Smith-Waterman Score=768.
atgactcctatttgtacagtgttccgagcactgtcaagactgccagacctctggcacaggtccataggtactctcacggaggcattgcctcagacagacaagagacaggaacaaattgcagttgctttgacatcttacagtggcctatacgggttgggatacggcagtaaggagattcagctgacgtattcagggactgaaagtggaatttggccctttccttattcccccaatgccactcacaagggatgtggcagacatcgttttgcctgtccaatagccccccacttcctggtcatagaaccccagtcagctttgggaagctgcccctccccagtggaagtggatccagggggctgcgtttttggggctataaggcttctggtacttcgagatgcccctagtttctcgcggttgctaaacacacttgcgtcgggggagagtcttcagggggggcccggctttgtcggggttagcaaggtctacgcttttctcgtagttcggaatcccaccgggaccccaatgttcacagggactttcgagattccgaagtggccaacttttccaattcccccagtgtttggacggttgggttccttcgttctccagctccagggacctcgaagtcccgggcagtgcgagtacgaccgcgagcttgtgtccgggtctcgatcggtgtctagctgtctactggtgcttggtactctgcatttacttagctacaaagatgccggtgttgatattgacgcgggtaatgctctggttggaagaatcaaaggcgtagtgaagaaaacgcgtcgtccggaagtgatgggcggtctgggcggcttcggtgcgctgtgtgcattgccgcaaaaatatcgtgaacccgtgctggtttctggcactgacggcgtaggtaccagaagacggctggcattagtattaaaacgtttcgtcttcattggtattgatctggtcgccatgtgcggtaatgacctggtggtgcaaggtgcagagccgctgtttttcctcgactattacgcaaccggaaaactggatgttgataccgcttcagcgatgatcagcggcattgcggaagaaaaatcagaaatcctcgacggctctaaagtcagcgacggcgatgtgctgattgcactcggttccagcggtctacactcgaacggctattcgctggtgcgccaaattcttgaagtccaccgcgccgccgctgacgatgtactttctgacgccgatgctgtttcctggcgtgcgccatatcaaacatcgtccggtttacgtaaaaagatcaatcagggcgcggtgagtttcgttgacctgcatttgagcgaagtggcgcaaatggtcaattacggtttcttcggcgacattgatgttgccgtcattgaagcatcggcactggcaccggatggtcgagtctggttaaccagcgggatccgtaatgcgccgacctggctgctgcgggcgaagaaagtgatcattgaactcaatcactatcacgatccgcgcgttgcagaactggcggatattgtgattcctggcgcggcatcgcggcgcaataacgggtccatcttccatgcaatggatcgcctcggtaacccgcatgtgcaaatcgatccggaaaagcattgtcgccgtcgtgggaaaccaacttatccggacgccggtcataa

SEQ ID NO: 15917 - DNA, 807 bp, Homo sapiens
  SIMILAR (934)..(1353): 761254mologous to Homo sapiens alpha-tectorin,accession number AF055136,Smith-Waterman Score=524.
ctacggggtggagcacttcacagcggtgaggcctgataagacgcgcaagcgtcgcatcaggcagtcggcaccattgcggatgcggcgtaaacgccttatccggccgttgcggatgcggcgtaaacgccttatccggcctacggatggtgcgggaatttgaggcctgataagacgcgcaagcgtcgcatcaggcagttggcactgttgcggatgcggcgtaaacgccttatccggcggagggtgcgggaatttgaggcctgataagacgcgcaagcgtcgcatcaggcagtcggtaccgttgcggatgcggcgtaaacgccttatccggtcttctttgctgtcgtgggtgtccactccaattgtgaggggggcagtggttggcacgcgtctagtctcggccattatctgggggtacgttttgtaacgatccccgcttggcttgaggatctggttcgcgtcgccggcgtccgcccctggttggtcctcggcccttgttatcccgggggtccacaccacagccactgttgagcagggtaatctggcgagtgcctcctctccaggccgcaggtttattaaacatttgtggttagggtgactggcaggagttgtttcttgtctggagaaaactgctgtgtctgttgagttgttggctctgttgtgttgcggagagttggatgtgtcagtgtacggtgagtaaccccctcttgcctggtgctcagtgggcagcaggctccccctgtatcctggtgtggggctctttaggaacaccactgtgccccctgttggttcattgccaacactctccat

SEQ ID NO: 15918 - DNA, 1386 bp, Homo sapiens
  SIMILAR (280)..(615): 851254mologous to Mus musculus ribosomal protein,accession number M76763,Smith-Waterman Score=478.
  misc_feature (1)...(1386): n = a,t,c or g
ttacgcgataaatttattcactattttcagcaatggcgtgaacgccattaagccgtggcgaacactggctggcacaacacctggcggggcgttctcgcgtgaaaagggcatgttactggcagcggtggtgttcctgtttagcgtcgatattacgtcctcatctggcagccgttgagcgaacggattgagcaacagagacaatattgcagcagctggtggcgatgaacacccgactgaagaacgcgcgccggatattattgcagcgcgaaaatctgccacaacaacgcctgcgaggtatcgcgggtcatcagtgacagtgcttccgcgcactcggtggtcataggcggatagccgatcgtggggagaatattcaggtctggatagaacctgggtgtttaatgacctgctgaaatggttaaacgcactggatgaaaaatatcgctcacgtctggtatgtgccagaagcagtaaaaactcgctatgcgcatctgaagccaactggctggagatgaataatcggctcagcaagggcgatttgccgtgtatcaggccaatattaataattatgttaatcagatagacctgttcgtatggctttacagcactacgctgaacgcaaaatgctgctggtggtggcgattccctggctggcggcatcggtattttcacgctggtcttttttactttgcccgcatacgccatcaggtggttgccccgctgaatcagctggttaccgccgtcagcgtattgaacacgggcagttcgactcgccgccgctggataccaactgccgaatgagcttggtctgcttgcaaaaacctttaaccagatgtcgacgagctgcataaattgtaccgttcggaagataacggcatgtacatctgcccggaagtgcctacgaatggaacgacgcagaacctgcacaggaaagcgacgagctatcgttaaagatgctaacggcaatctgctggctgacggcgacagcgttacatcattaaagatctgaaggtgaaaggtagctcttcgatgcctcgtaggccggataaggcgtttacgccgcatccggcaacagtgccaactgctgatgcgacgctcgcgcgtcttatcaggccgcctctcatctgtataaattcgaactacacttaactggcttctcttaactgaggtcaccatcatgccgtaagtccctacctctcttttgccggtaactgttccgacgcgattgcgttgggcgcggaactgctctataaaatcagcttcggcgaatgccaaaatcagcgcaggacagcgccgagaactgcccttccggaatgaatttcccgataccgccatcgcccacgccaatgtgcgcattgccgngaacgacatcatgatgagcgatgccat

SEQ ID NO: 15919 - DNA, 999 bp, Homo sapiens
  SIMILAR (55)..(270): 511254mologous to Salmonella typhimurium LT2 98 1040187392dentity with E. coli diaminopimelate epimerase (DAPF) (SP:P08885),accession number AF233324,Smith-Waterman Score=158.
atgtcgatacgcggcggtagaaacgcttggtcctgttctggaaagccacgagcgttttcggagcgcgccaatatcggttttatgcaagtggttaagcgcgagcatattgtttacgcgtttatgagcgtggggcaggagaaacccaggcctgcggcagggcgcgtgtgcggcggttgcagtagggattcagcaaggtttgctggccgagaagtacgcgtggaactccccggcggtcgtcttgatatcgcctggaaagtccggccttggcactgtaaccgacaccggttgcatacactctatattttccataaggtccgccttaattccattttaggtagtgggcatcagatggtgacccctacgctgaccctcgccgccctgccttcacggcccacctgtaaggtatttagtcttgcaaggcattctccgcgcgcaaagggtgcaccggtgccactcgacgaacgcatcttcgtatgcaaatggtgaacgggtgcgactcgacgaacgcatcctcctacgcaaatggtgaacgggtgcgactcgacgaacgcatcctcctacgcaaatggtgaacgggtgcgactcgacgaacgcatcttcgtatgcaaatggtgaacgggtgcgactcgacgaacgcatcctcctacgcaaatggtcaacgggtgcgactcgacgaacgcatcctcctacgcaaatggtgaacgggtgcgactcgacgaacgctcctcctacgcaattggtgaacgggtgcgactcgacgaacgcatcctccacgcaaatggtgaacgggtgcgactcgacgaacgcatcctcctacgcaatggtgatcggacatatgctgatccggtcttcaggcacgttaaagttactccatgtcacgacgacttggcactattgatacttggcgaacacagaaccactcaggcagcacaatccagcagcacacgcagcctcggtgttgtccccagagtgaacctcacaatgttttctggcaactgg

SEQ ID NO: 15920 - DNA, 2529 bp, Homo sapiens
  SIMILAR (265)..(741): 1001254mologous to Escherichia coli glycerophosphate dehydrogenase,accession number M55989,Smith-Waterman Score=820.
ggggcgcagtacggcctctttttcctgcaacttttggtgcgcgcgggcaacgttaatgctttcgaactgatccatgcgtctctctttctttacaaacaagtgggcaaatttaccgcacagtttacgtcgaagcggcagataaacgccataatgttatacatatcactctaaaatgttttttcaatgttacctaaagcgcgattctttgctaatatgttcgataacgaacatttatgagctttaacgaaagtgaatgagggcagcatggaaaccaaagatctgattgtgatagggggcggcatcaatggtgctggtatcgcggcagacgccgctggacgcggtttatccgtgctgatgctggaggcgcaggatctcgcttgcgcgacctcttccgccagttcaaaactcattcacggtggcctgcgctaccttgagcactatgaattccgcctggtcagcgaggcgctggctgaacgtgaagtgctgctgaaaatggccccgcatatcgccttcccgatgcgttttcgcctgccacatcgtccgcatctgcgcccggcgtggatgattcgcattggtctgtttatgtacgatcatctgggtaaacgcaccagcttgccgggatcaactggtttgcgttttggcgcaaattcagtgttaaaaccggaaattaagcgcggattcgaatattctgactgttgggtagacgacgcccgtctggtactcgccaacgcccagatggtggcgttggaaaagtgtaattcaatcgtcgcctttgtggtttgccacacgtcagatgagccgtgcaattgtttgccacaggtgtacggttctgatgagaacgcgtcgctaacagcgtactggtattctggtggtgttcagggcgtgtgcgcgctcctgccgggtcatcatcgcgtgcccgggcttctgtatgccggttcagccgcagcggtttcgggcctcctgcgccagtttggtatccgcctggacgttcaggttcgccttataccgatcctcgctcagttcgccggtatctctgtgctgctgggtgtgtgggcgtttagtcgtccgtggcaccagcctggtaaggcactggcgttggcgaagcgtaaagcagatgtcgcatttgagtttttccacaagttacatgtgccattttattgcttccacgatgtggatgtttcccatgagagcgcgtcgttaaaagagtacatcaataattttgcgcaaatggttaatgtcctggcaggcaagcaagaagagagcggcgtgaaagtgctgtgtggaacggtcaactgctttacaaaccctcgctacggcgcgggttacaaaacgctgttaaataccgacttgcgtcaggagcgtgaacatctgggccgctttatgcagatggtggttgagcataaacataaaatcggtttccagggcacgttgcttatcgaaccgaatccgcaagacccgaccaaacatcaatatgattgcgatgccgcaacggtctatggcttcctgaaacagtttggtctggaaaaagagattaaactgaacattcaagctatccacgcgacgctggcaggtctctctttccatcagggtaccaagctcgagcctttaaaaaaagggtggctcaactgtggaaaaggacgatcgttgcggtccttttggttattacgcaacgtggcaaaaggggtatgtgtgcaaaggcgattaagttggcaattcaaacacgcctggttgattaaattctgggcccccatccctgcggtcatcgcgtcgggtattctctctacctactattttggcataactggcaccttttggactgtcacgggtgaatttacccgttggggcggccagctcctgcaactgttcggcgtccatgctgaagagtggggttactttaaaattatccatctggaaggatcgccattaagccgcatcgacgggatgatgatcctcggtatgtttggcggctgctttgccgcagcgctgtgggccaacaatgtcaaactgcgaatgccgcgcacccgtacccgcattatgcaggccatcattggcggcattatcgccggttttggcgcgcgtctggcaatgggctgtagcctggcggcgttctttaccggtattcctgggtaccgagctcgaaattcgaatcccggtaaagaattctgccaggttacagcccattgccagacgcgcgtcaaagctggcgataatgccgccaatgatggcttgcataattcggatacggctgctcggcattcacagtttgacattgttggcccacagctattcggcaaaccagccgccaatcatcgcgaggatcatcatcccgtcgatgcggtaaccccactcttcagcatggacgccgatcagttgcaggagctggccgccccaacgggtaaattcacccgtgacagccccaaaggtgccagtaatgccaaaatagtaagtatagagaatacccgccgctatgaccgcagggatgggggcccagaatttaatcaaccaggcgtgtttgaaatgctgccatga

SEQ ID NO: 15921 - DNA, 1663 bp, Homo sapiens
  SIMILAR (1663)..(548): 1001254mologous to Escherichia coli O157:H7 putative amino acid/amine transport protein,accession number AE005611,Smith- Waterman Score=1913.
cgcacgtctcgaaaatctgaatcccctgttgcagatccaccaggaagacttccggtgccgggttgtcgatcaccagcgagcagcgacgcgctgcggtgagcaggatttccgtcacttcttcgctattggcatcggcaggggccggtatcgtcaacaccacgcgcgtgaccgagtcagagagcgaccagttgataaactgctcggtaataaacgccttgttcggcacgattatctctttacggtcccagtcgctgatggtggtggcgcgggtgttaattttcgtcacgctaccggtgagatcgcgaattgtcaccgtatcgccaatgcgaatcggtttttcgaacaggataatcagaccagagataaagttggcgaaaatttcctgcaaaccaaaaccgagaccaacaccgagcgcggcaaccagccactgcaatttcgaccactcaataccaatcattgagaagccgaccagcccgccaatcagcatcagcagatatttggtgatggtggtgatggcgtaacccgtacccggcgttaaatccaggtgcatccccggaagcacgctggcactgtagacgtagacaaacacacgctgcggattgggaatgatgtagttcaggcatgagccaattagcagaatagcaatagatactgccacacccgcaaccggtacgccgtgacgggaaactttcgccattgccgccggtaactgacggtttttcgccagtgcgtagagcatacgtccgcaactgtacatgccgctgttacagccagagagcgcagccgtcagcaccacaaagttgataatgcccgccgctgcggtaataccgattttggcaaaagtcagtacgaacgggctgccgttgctgcctatttcattccacgggaagatggtgacgataacgaaaatcgcgcctacgtagaaaatcaggatccgccacagcaccttgcctacggcactgcgcagcgtcacctgcggattcttcgcttcaccggcagtaatgccaatcagctccacgccctggtaggacgccaccacaatacacagagcggtcaggaaccctttccagccacccgcaaagaaaccgccatgctctgtgagattgctaaaaccaatcgactgcccgccattgccaaagccaaagaaaatcacgcccaggccaatgacaatcatcacgataatcgtggtgactttgatcatcgcgaaccagaactcgatttcgccgtacaaccgtaccgccgccagattcgccaacgccaccagcgccactgcgatcaatgcgggtatccactgcgccatctccgggaaccagaactggacataaacgccaatggcggtgatttcagagatccccaccgccatccacataaaccagtaagaccaggcggtgagatagccaaagaacgggctcatataacgatgcgcataaacggcgaacgaaccggtaaccggttcgaggaacaacatttcgcccattgaacgcatgatgaaaaagacgaacagcccggcgatgatataggccaacaatacggatggcccggcccatttcagggtactggcggcccccataaacaggccgacgccaatggtgccccccagggcgatgagttcgatatgtcgagcttccagcccacgctgtagctctggtttgttatctgccat

SEQ ID NO: 15922 - DNA, 682 bp, Homo sapiens
  SIMILAR (242)..(490): 431254mologous to Escherichia coli hypothetical protein,accession number U73857,Smith-Waterman Score=118.
gacccccgggataacaagggccgaggaccaaccaggggcggacgccggcgacgcgaaccagatcctcaagccaagcggggatcgttacaaaacgtacccccagataatggccgagactagacgcgtgccaaccactgcccccctcacaattggagtggacacccacgacagcaaagaagaccggataaggcgtttacgccgcatccggcaacggtgccgactgcctgatgcgacgcttgcgcgtcttatcaggcctacaaattcccgcaccctccgtaggccggataagggcgtttacgccgcatccggcaacagtgccaactgcctgatgcgacgcttgcgcgtcttatcaggcctacaaattcccgcaccatccgtaggccggataaggcgtttacgccgcatccggcaacggtgccgactgcctgatgcgacgcttgcgcgtcttatcaggcctacaaattcccgcaccctccgtaggccggataaggcgtttacgccgcatccggcaatggtaccgactgcctgatgcgacgcttgcgcgtcttatcaggcctacaaattcccgcaccctccgtaggccggataaggcgtttacgcccgcatccggcaacagtgccgactgcctgatgcgacgctcgcgcgtcttatcaggccgcctctcatccgtataaatttcgaa

SEQ ID NO: 15923 - DNA, 1737 bp, Homo sapiens
  SIMILAR (1162)..(1404): 591254mologous to Escherichia coli glp D gene,accession number D00425,Smith-Waterman Score=151.
atggtgaacgggtgcgactcgacgaacgcatcctcctacgcaaatgtgaacgggtgcgactcgacgaacgcatcttcgtatgcaaatggtgaacggtgcgactcgacgaacgcatcctcctacgcaaatggtcaacgggtgcgctcgacgaacgcatcctcctacgcaaatggtgaacgggtgcgactcgacaacgcatcctcctacgcaattggtgaacgggtgcgactcgacgaacgcacctcctacgcaaatggtgaacgggtgcgactcgacgaacgcatcctcctcgcaaatggtgatcgggtgcgacaccacgaacgcatcctcgaacgcaaagcaactttcaacaactcaggcaccacctgctgccgggccgtatattcgcgggtcagcgcgatgacggcgccggataaggcgtttacgccgcatcggcaacggtgccgactgcctgatgcgacgcttgcgcgtcttatcaggccacaaattcccgcaccctccgtaggccggataaggcgtttacgccgcatcggcaacagtgccaactgcctgatgcgacgcttgcgcgtcttatcaggccacaaattcccgcaccatccttcaatgccaaatgtttccgcgaacggttaccgttcgttcccgtttatggcatcgtatatgaccccgttctttggctatctcaccgcctggtcttactgtttatgtggatgccgttggggatctctgaaatcaccgccattggcgttatgtccagttctggttcccggagatggcgcagtggatacccgcattgatgcagtggcgctggtggcgttggcgaatctggcggcggtgcggttgtacgcgaaatcgagttctgcggcgggcattatcaactttgtggtgctgacggctgcgctcttggctgtaacagcggcatgtacagttgcgacgtatgctctacgcactgggaaaaaccgtcagtaccgcgcaatgcaaagtttccgtcggtccagtattgataaccgggtggatacgtttttcaagggtactggcgccctgggaatctcggtaaccgtaatagcggtgacctgcaagtcccgccttgtgtatccgataccagtctatacgggtttaagtcttccacaacgccccgcggtcgtgaaagtgaatgagggcagcatggaaaccaaagatctgattgtgatagggccggcatcaatggtgctggtatcgcggcagacgccgctggacgcggttttccgtgctgatgctggaggcgcaggatctcgcttgcgcgacctcttccgcagttcaaaactcattcacggtggcctgcgctaccttgagcactatgaatccgcctgcgaggcgctggctgaacgtgaagtgctgctgaaaatgccccgcatatcgccttcccgatgcgttttcgcctgccacatcgtccgctctgcgcccggcgtggatgattcgcattgccgagaacataagtattttgtagagccaaagttgtgtttaccccgaatgggtacccgggaatccgtgttgcccggtgtatgccggaattatgagtctaccataacatccgtgatatcagtttcaccatgtgaaagagatatggcgaattatgttcctcggcattcagccggatatcgtcggcgtttctacccgatgacccagccgattaaagatgcggtagaacccgttgatcaagactggaaggctgggaaggaaatggcggcttcgcgcagttag

SEQ ID NO: 15924 - DNA, 5898 bp, Homo sapiens
  SIMILAR (1570)..(2232): 981254mologous to Escherichia coli O157:H7 putative oxidoreductase, Fe-S subunit,accession number AE005366,Smith- Waterman Score=1174.
atggtgaaagttgcaggggagtgccgagtaagagcctcagcacacttgccagggcttaacaggagcacaaaaaacacagaggaccgaggcgcaaacaaccaagaaggcacaaacacacagaagacacgcggagaaacaaacgagagactcaaaaagaacgaacacagagatctgcgcttagctcgttacccagcaaaggagaacaacaaacaaggcgataaaaacaaaccacgaacgtacgaaaagttaaccggcacagtaacacaccaggagccacctcatcacgcggatcaatctccaggcctgtgtctctttcgtacttctcgagctcaggtggagagaggtcccacagtgttgctgctgatatctcaagaaaatcaaatagaaagatatgacagtgacaaccattcacagctcaacctctgcctcagagtgccgaccgtcaccacacaaaggagagattatgatattgctgaacggtaccgacagaaaggcatcaaattgcctgccaggaaggagagattaatgactattgctgaacggctgcggcaggaaggacatcaaattggctggcaggaaggtaaattagaaggtttgcatgaacaagccattaaaattgctttgcgcatgctggaacagggctttgatcgtgaccagggcatcgctgtagagcatcgtgtcaacgccaacagcgacaaagttcgctccccacgccaggcattgctgcgccatatcaggagccacagccagaaaaccagccgctttacccgcagcacggatccgccgaatactggtttcaataattcgctgcacttccgggtgcccggcgttatccgggtagcccaacgacgcagaaagatccgcaggtccaataaacacgccatcaatcccttcgacgtcgaggatttcgtccaggttatccagtgccgttttactttccacctgcaccaacagacaaagcgaatcgtaacttgcgccatagaaatcattcatcgcctgttcaacatggtcatagaccgcgttgtaccatgggttggtggcttcgcgagactggaaataagtgtcaggattggcggacgtaccgcggatcaccggatgttccgggttgagtgcccgggcgcgatgagcatcaatttcgacctgcggcatgagatcaagaatcgtgtcatcggccagcgggacaattttattgatttcgtgggacgtgcggaaaccatcaaagaaatgaataaatggcacgcggcttttcagcgtcgcgatttgcgaaatgagagcaaagtcttgcgcttcctggacgtttgctgcacacaacatcgcgcaacccgtctggcgcaccgccataacgtcggaatgatcgccaaaaatagagagtgcatgtgtggcaacggtacgtgccgctacatgcaggacaaacgggttttcaacatccggagtgctccattgcgtcatcaagtcggcagccagatagggagacacgaagctggtcggcgaaccctaagaagcccgcccccggaccccccgcccaatgcccccggggtccgaaccccccgagttcgggaaagcacggcaactggcccgatggccactacgcgctgggaaaaacgccatatcgccgaagagatccccatctggaaagaggaactctgtacccaatgtaaccactgcgttgccgcttgcccacactcagctattcgcgcaaaagtggtgccgcctgaagcgatggaaaacgcccctgccagcctgcattcgctggatgtgaaatcgcgtgatatgcgcgggcagaaatatgtcttgcaggtggcaccggaagattgcaccggttgtaacctgtgcgtcgaagtttgcccggcgaaagaccgtcagaatccagagattaaagccatcaatatgatgtctcgcctggaacatgtcgaagaagagaaaatcaattacgatttcttcctcaacctgccagaaatcgaccgtagcaaactggaacgtattgatattcgtacatcgcagctgattacaccgctgtttgaatattcaggtgcttgctccggttgtggcgagacgccgtatattaaattactgactcagctctatggcgaccggatgttgatcgctaacgccactggctgttcttcaatttatggcggtaacctgccctctacaccgtataccaccgatgccaacggtcgtgggccggcatgggcgaactctctatttgaagataatgccgaatttggcttgtttccgcctgacggtcgatcaacaccgtgtccgcatgctgcgtcggaccggctagtacgggaaatccacaagtcattaccacacggcccaaaatgcaactccgaatacacctacgaagataacggcatgtacatctgcccggaatgtgcctacgaatggaacgacgcagaacctgcacaggaaagcgacgagctgatcgttaaagatgctaacggcaatctgctggctgacggcgacagcgttaccatcattaaagatctgaaggtgaaaggtagctcttcgatgctgaaaattggcaccaaagtgaaaaacatccgcctggttgaaggcgaccataacatcgattgcaaaatcgacggttttggccggataaggcgtttacgccgcatccggcaacagtgccaactgcctgatgcgacgcttgcgcgtcttatcaggcctacaaattcccgcaccatccgtaggccgataaggcgttacccgcatccgcaacagttgaaaagctggagaaaatgccgcatcaccgacgataccgccgagaatcgccactgcgttcagaccgatttggaccacggtaaagaacatgccgggattttcctgcatattcagaacgcgttgggcatttatattgccttcatcagccaccagtttaagtttgattttgcgccagatcctcggaaggggaagttgattaatttgtgtgaaatacacattgaaagccgattcgaagaaagtgaaccggcatttctcagtggcatagtactacgccgtcatatgacagacgccaattccgccaattccaaaatgcatgcagctgccttaccccaccacgtgctaagggcaggagttgagtcagctgtggcctgccctgggggctggggtccttggggagaacacgggcatgttgatttggacactcattcagcaaacatctacgaagcacctgctgtagaatgcactggacgttgccaatccgtacaacaggtgatagtgaacgccaagagaggccccctttgtcctcacggaccttctcttgtaggagcaggaagagtgaggaaaacttttaacagctcccagcagatgcccgtatgtctcattgagcctgtgttcgcttctaaactgatccctgttagagcgatcttcggatcaatcggtccgatcgtgcagggtaaatcgaccctgttccgtatgatctctgctcaggaacagccggacagcggcaccatcactttgggtgaaacggtgaaactggcgtcggttgatcagttccgtgactcaatggataacagcaaaaccgtttgggaagaagtttccggcgggctggatatcatgaagatcggcaacaccgagatgccaagccgcgcctacgttggccgctttaactttaaaggggttgatcagggtaaacgcgttggtgaactctccggtggtgagcgcggtcgtctgcatctggcgaagctgctgcaggttggcggcaacatgctgctgctcgacgaaccaaccaacgacctggatatcgaaaccctgcgcgcgctggaaaacgccctgctggagttcccgggctgtgcgatggttatctcgcacgaccgttggttcctcgaccgtatcgccacgcacattctggattaccaggatgaaggtaaagttgagttcttcgaaggtaactttaccgagtacgaagagtacaagaaacgcacgctgggcgcagacgcgctggagccgaagcgtatcaagtacaagcgtattgcgaacttcagcaccaagttactttttgtcgacctgcttaagaatgcctacctatacgatctccatttaccgttgttaaacctgatgctgacgccagatgagcgcgaagcgttggggactcgcgtgcgtattgtcgaagagctgttgcgcggcgaaatgagccagcgtgagttaaaaaatgaactcggcgcaggcatcgcgacgattacgcgtggatctaacagcctgaaagccgcgcccgtcgagctgcgccagtggctggaagagaatcaccgcaggcaacggcaaagtagccgaacgcgcctcgccgcgctggctggcgttttcaatcaccacccaactgaaagtgctgtcaccatcgatgccagcttcaatcgccacccaaaaatcagcctctggaaatccgcatctcaacccgccaaccgatcggtcgttttaccgagcaagaaccagagcactgacaaaacagggtacactctgaaagaagatgctggtcgcggctatcgccgtgttgttgcctcgccaaaaccggttgatatcattgaaaaagaaacggttaaagctctggtagatgcaggtcaggtggtgatcaccgttggcggtggtggtatccctgttattcgtgaaggtaaccatctgcgtggtgccagcgcggttatcgataaagactgggccagcgcccgtttagcagaaatgattgatgccgatatgctgatcattctgactgcggtagaaaaagtggccattaacttcggtaaagagaatgaacagtggctcgatcgcctgtcattaagtgatgctgaacgctttatcgaagaaggtcattttgcgaaaggttctatgctgcctaaagtggaagctgccgcctcgtttgctcgctctcgcgcaggtcgtgaagcactgattaccgtattgagcaaagcgaaagaagggattgaaggcaaaacaggaacggtgatttgccggataaggcgtttacgccgcatccggcaacagtgccaactgcctgatgcgacgcttgcgcgtcttatcaggcctacaaattcccgcaccatccgtaggccggataaggcgtttacgccgcatccggcgatattagtttacgccgttaacagattagctatcgtgcgcacaccaagtcccgtagcgcccgcagaccactgttcaaccggcgctttacgtcgccgagcagtcgatatgcagccagccttgctgatagttctcaacaaagtgcgacaggaagcccgccgccgtgctcgcgcctgccggatacgccgcgcttccggtattgttcagttcggcaaagttagacggcagctggctgcggtggaactccgccagcggcagacgccagaacggttcgttctcctgcgcggcactcgccagcaagcgaccggccagcgcatcgtcaaaactgaacagcgcgtgataatcattacccagcgcagttttcgccgccccggtgagggtcgccgcatcaatgatcatttccggtttctgcgcactggcatcaatcagaccatcggcaagcaccagacgcccttcggcatcagtgttcatcacttcaacttttttaccgttgcgatagaacctgcacaggaaagcgacgagctgatcgttaaagatgctaacggcaatctgctggctgacggcgacagcgttaccatcattaaagatctgaaggtgaaaggccggataaggcgtttacgccgcatccggcaacggtgccgactgcctgatgcgacgcttgcgcgtcttatcaggcctacaaattcccgcaacctccttaacagctgctccgcggcgcccgaggcccggaccaccgatcccataaagcgctacaacaggcccacaaacgtggggaacagcggaaccagcgaccgagccacaaagaggatccagccggaacccacagactaa

SEQ ID NO: 15925 - DNA, 436 bp, Homo sapiens
  SIMILAR (360)..(292): 541254mologous to Homo sapiens Human secreted protein encoded from gene 7,accession number Y25717,Smith-Waterman Score=63.
  misc_feature (1)...(436): n = a,t,c or g
atnnnnnnnnnnnnnnnnnnnnnnnnnnnnnnnnnnnnnnnnnnnnnnnnnnnnnnnnnnnnnnnnnnnnnnnnnnnnnnnnnnnnnnnnnnnnnnnnnnnnnnnnnncattcacctttaatactgagcatccattctatgcgaggccctgtcagcaggctcagcataggcaatgtccctgaccttcagggactatggtccactccatcattctggcagattcagaggctacaataaaggagtaaagtctgagggtggggcacttcctgaagacacatctttgcactgggggaagggagtaccaagcagagagcatagcacgtgcaaaggcccagaggtacgattagtcctgcaactgggaggccaagaataagagagagtgaggggaaggaggtcagggaaaggagggtgtgggctccattcgaattccaccaga

SEQ ID NO: 15926 - DNA, 477 bp, Homo sapiens
  SIMILAR (463)..(284): 381254mologous to Canis familiaris D4 dopamine receptor,accession number AB030236,Smith-Waterman Score=64.
  misc_feature (1)...(477): n = a,t,c or g
ccccccacccccgggtaaattttggannnnnnnnnnnnnnngtattttnnnnnnnnnnnnnnnnnnnnnnnnnnnnnnnnnnnnnnnnnnnnnnnnnnnnnnnnnnnnnnnnnnnnnnnnnnnnnnnnnnnnnnnnnnnnnnnnnnnnnnnnnncattcacctttaatactgagcatccattctatgcgaggccctgtcagcaggctcagcataggcaatgtccctgaccttcagggactatggtccactccatcattctggcagattcagaggctacaataaaggagtaaagtctgagggtggggcacttcctgaagacacatctttgcactgggggaagggagtaccaagcagagagcatagcacgtgcaaaggcccagaggtacgattagtcctgcaactgggaggccaaggatcagagagagtgaggggaaggaggtcagggaaaggagggtgtgggctccattcgaattccg

SEQ ID NO: 15927 - DNA, 466 bp, Homo sapiens
  SIMILAR (464)..(3): 981254mologous to Homo sapiens Similar to single-stranded-DNA -binding protein,accession number BC000274,Smith-Waterman Score= 839.
atgttcatggcaggcaggcctgggccggcgagggagttgggtgggggtcgcatgccacctccatagctctggggccccacgctggccatgccacgaggaggcgtcaccctctgcattgggctgcccatgctcggatgcccctgggctcgtggggagggctccatggcgccagggaggaggggctgggagccagggaggcctgcgggaggctgactcggcatccgcagggtgggccgggggccccctgggaagcgcggtgacatgaagggctgaccgtgaggccccatcacgggggcattggggttgtggggggacggctgggagccgggggggccctggaagaagccagccgccatggagcctgcggccattgtgtcacctggggccatactgcccataacggggctgggggcggctgcagcactatagtcctggaaggccttggcctcgccggagtgctcgcagg

SEQ ID NO: 15928 - DNA, 2865 bp, Homo sapiens
  SIMILAR (199)..(918): 881254mologous to Escherichia coli yojH,accession number U00008,Smith-Waterman Score=1065.
atggatgctgcagagctgattgccgaactgaaacggttgcatcgtcaggggaaagacatcgggcagtacatttatctgcgtcgctatgagcgtagccgcaagcacagtgcggcgttgatgctggctgactcctttgtacgaacaacacacgctttgcggcgctcgcatggtggatttccacggctggatgatgccgctgcattacggttcgcaaatcgacgaacatcatgcgagcgtaatgacgataacacctgtagccgttccctgtatgccgatctgaaaaatggcactgcacagaacattcgtgccaaatttgtctttatcggcgcgggcggtgcggcgctgaagctgttacaggaatcggggattccggaagcgaaagactacgccggtttcccggtgggcggacagttccttgtttcggaaaacccggacgtggttaatcaccatctggcgaaggtttacggtaaagcatccgttggcgcaccaccgatgtcggttccgcatatcgatacccgcgttctggacggtaaacgcgtagtgctgtttgggccatttgccaccttctcaaccaaattcctcaaaaacggttcattgtgggatctaatgagttccaccaccacctctaacgtgatgccgatgatgcacgtcgggctggataatttcgatctggtgaaatatctggtgagtcaggtgatgttgagtgaagaggatcgttttgaagcgttgaaagagtactatccgcaggcgaaaaaagaggactggcgtttgtggcaagcggggcagcgcgtgcagattatcaagcgtgatgccgagaaaggtggcgtactgcgtctgggtactgaagtcgtcagtgaccagcaaggaaccatgccgcgctctgggggcatcgccaggggccgcgttcattccacagccaatatccacgcccaccgccgccggaataatcgcccctttggtcgggatcacgctaccaatggtggaacctttacccaggtgtacatcaggcattaccgcaatatgtttgaaaataaacggcatcttcgccgtattaataagttgctgacgcgcatcggcctctaccggcacgcctttggtccacatttttaccggggcattttcagtgcattggcaatggaagcatggaataaccaacaaggtggtaataaatatcaggttattttcgatggcaaaatttatgaaaatgcctggtgggtttcttctacaaattgcccgggaaaagcgaaagcaaatgatgcaactaacccgtggcgtttaaagcgtaccgcaacagctgctgaaattagtcagtttggcaatacactttcctgcgaaaagagcggcagctcatcttcttcaaattcaaatacgcctgcatccaatacgccggctaatggcggttcggctacaccagcacagggcactgttccgtctaattcttctgtagttgcctggaataaacagcagggcggtcagacctggtatgtcgtctttaatggtgcgcctcttctaactgtccgggtgatgcgaaaagccatgatgacagcaacccatggcgttatgttcgtgccgctacggcaacggaaatctcagaaaccaagtaatccacagtctgtacttcagaaccaaagtcttcacggatgtgaaccgcagctgaaagcagaaaaccgcgcggtactggtcaccgtggggttatcaagcggttccgggctaccgctgtttgagcatagtgacgttgagattgccgtcgacttcttgcaacgtgcacgacaggcgcaaggcgatatcagcattccacaaagcgcattaattatcggcggcggtgatgtcgcgatggacgtagccagcacgctgaaagttctcggctgtcaggcggtaacttgcgtagcgcgtgaagagttagatgagtttccggcaagcgaaaaagagtttaccagcgcccgggagctgggcgtttcgatcatcgatggattcacgccagtagccgtggaaggcaataaagtcacgtttaagcatgtacggttatcgggcgaactgacgatggcggcagataaaattattctcgccgtcggtcagcatgccagactagatgcctttgcggagttagagccgcagcgtaacaccatcaaaacacaaaattaccagacccgcgacccgcaagtctttgctgctggcgataagcggccactcgcgagataccgtataggaatcggcaatgaacgaatctccggcacccatggtgacaatgctgccgttttcacccagcgtgacaatcactgttcctgcgccacgggcaacaatcgctttcatcttcagacgcagcgtttcgtcttcttgcggtgcggaggcaaaggcaaaatcgagatgcggcaccagtgtctgccagagcgggctgtcccacttgtcggagaagtcgaaagcggtaagtttgcccgcagcgtgcagctgtgggaatgcgtcttccgcatgtccccagattgccgcgtgcacaatgtcatactgcgccagccaggcgtaatcctcttcactcagggcaaagtcggccatcacgccttcggtgtagtcgccaaaaacgcgatcattgtcgtgcagttccacctgagtttgtgcggtaatgcatcccggctgtatgccgtagcgagtgccgtacaccgccacattgaccgcattaccgccagaaaccgctttattcagttgcgggtagatatcgacgcagttatcgccgattgtcgccagggtttcatctctcatcctccggcagcagcgcgcgaaagcgtccagcgcctggcgggcatagagtcgggatcgtacattcatagtcacagttcacggaaggacgctatagcccggcaaaatttcggctag

SEQ ID NO: 15929 - DNA, 1568 bp, Homo sapiens
  SIMILAR (1110)..(1562): 881254mologous to Escherichia coli K12 putative oxidoreductase,accession number AE000303,Smith-Waterman Score=643.
atgaagctcaacaaagccggattcaacgtgccggaaagttatagtttgttgaaaatgcccccagtgggatgcctgataagcgcacttaagaaagctgaagaccgacaagaagtgattttacggctgtttaatccggctgaatcagcaacctgtgatgcgactgttgctttcagtcgcgaggtgatttcttgctcagaaacgatgatggatgaacacattaccaccgaggaaaatcaaggttcaaatctatcggggccttttttacgggtacgagctggagagagtatcaagtttttcaacgtgctgctggccgatacccccggcttggacatcgacacgatggacaaagacgtggctcacgacagccgctctatccagcttgcgatgctgcgcgacgacgaaatcctcacccatccggtgtttaatcgctaccacagcgaaaccgaaatgatgcgctatatgcactcgctggagcgtaaagatctggcgctgaatcaggcgatgatcccgctgggttcctgcaccatgaaactgaacgccgccgccgagatgatcccaatcacctggccggaatttgccgaactgcacccgttctgcccgccggagcaggccgaaggttatcagcagatgattgcgcagctggctgactggctggtgaaactgaccggttacgacgccgtttgtatgcagccgaactctggcgcacagggcgaatacgcgggcctgctggcgattcgtcattatcatgaaagccgcaacgaagggcatcgcgatatctgcctgatcccggcttctgcgcacggaactaaccccgcttctgcacatatggcaggaatgcagagtcgaaaaacagcaggcatctgctgtgtccacctttgggctggattcggcaaagtcgcgattattggcgcaggtcctgccggattgcaggccagtgtgacactgacaacccagggttatgacgtcacgatttatgagaaagaagcgcaccccggtggctggttgcgtaacggtattccgcaattccggttaccacaatcagtgctggatgcagagatcgcccgtattgaaaaaatgggcgtgccccattaagtgcaccaccgaagtcgggtaacacactcacccttgagcaggtgaaagcagaaaaccgcgcggtactggtcaccgtggggttatcaagcggttccgggctaccgctgtttgagcatagtgacgttgagattgccgtcgacttcttgcaacgtgcacgacaggcgcaaggcgatatcagcattccacaaagcgcattaattatcggcggcggtgatgtcgcgatggacgtagccagcacgctgaaagttctcggctgtcaggcggtaacttgcgtagcgcgtgaagagttagatgagtttccggcaagcgaaaaagagtttaccagcgcccgggagctgggcgtttcgatcatcgatggattcacgccagtagccgtggaaggcaataaagtcacgtttaagcatggggatctacgtacagcacccttcttgggcgtggccgataagcgcaacaaaagcgcaggtaatcacccatag

SEQ ID NO: 15930 - DNA, 329 bp, Homo sapiens
  SIMILAR (306)..(127): 361254mologous to Haliotis rufescens lustrin A,accession number AF023459,Smith-Waterman Score=81.
cattcacctttaatactgagcatccattctatgcgaggccctgtcagcaggctcagcataggcaatgtccctgaccttcagggactatggtccactccatcattctggcagattcagaggctacaataaaggagtaaagtctgagggtggggcacttcctgaagacacatctttgcactgggggaagggagtaccaagcagagagcatagcacgtgcaaaggcccagaggtacgattagtcctgcaactgggaggccaaggatcagagagagtgaggggaaggaggtcagggaaaggagggtgtgggctccattcgaattccaccacag

SEQ ID NO: 15931 - DNA, 1217 bp, Homo sapiens
  SIMILAR (914)..(1129): 501254mologous to Escherichia coli K12 putative oxidoreductase,accession number AE000303,Smith-Waterman Score=141.
tcatccgttgtcggctctctctgcggttcgctccctggttgtgcgtttgtccccgccggggtgtgcgtcttcctgagctgttgtctgtttttgtatcttgtgagccgctgacgccgtctgcgcccctctgccctgtgtctgtttctttctttctttctttccctttcgtgagttggtgagggtccttgcttctccaggggtcggggtctctgctgcttggttgaggctggcgccctcaaacgcatgttcagccagagttgggggccagtggactccagcggggccatacctggaagaagccagccgccatggagcctgcggccattgtgtcacctggggccatactccccataacggggctgggggcggctgcagcactctggggtgtgccccctcctctctgcaggtggccggccccatgggacagcgagctggcattggtcagtgagcacactggggttgtcggcctgaggatctgtgggtctgaagaccccagccccgcattcacctttaatactagcatccattctatgcgaggccctgtcagcaggctcagcataggcaatgccctgaccttcagggactatggtccactccatcattctggcagattcagggctacaataaaggagtaaagtctgagggtggggcacttcctgaagacaatctttgcaccagaacgttggggccgttcctttggcctcgataacccactcaataaatgggcttgtcctagagcttaaggcctgcccctggggccccacgctggccatgccacaggaggcgtcaccctctgcattggcccgcccatgctcgaatgccctgactcggcaccgcagggtgggccgggggccccctgaccgtgagggcccatcatggggcgttggggttgtggggggacggctgggagccgggggtggccgtgtttgagcatagtgacgttgagattgccgtcgacttcttgcaacgtgccgacaggcgcaaggcgatatcagcattccacaaagcgcattaattatcgcggcggtgatgtcgcgatggacgtagccagcacgctgaaagttctcggcgtcaggcggtaacttgcgtagcgcgtgaagagttagatgagtttccggcagcgaaaaagagtttaccagcgcccgggagctgggcgtttcgatcatcgtggattcacgccagtagccgtggaaggcaataaagtcacgtttaagcat

SEQ ID NO: 15932 - DNA, 2994 bp, Homo sapiens
  SIMILAR (859)..(1455): 971254mologous to Escherichia coli similar to S. cerevisiae Lpg20p,accession number U82664,Smith-Waterman Score=1016.
atggtggcgttttatcgccatgccgggcgcatgtggccgggaattgcgctgagctgttcgctgggaaatatcgccgcatccatcctgcttttttccaccagctcgctgaacatgacctggacgaccatcaatattgttgaagccgtggtcggggcagtgctgctacgtaaattgctgccgtggtataaccccttgcaaaatctggctgactggctgcgtctggcactcggcagcgccaactcagccggtgtgaacatttccacggcgacagtttgccgtcagtgtgaagatgcaccgtgcgctaacgtctgcccgaatggtgctatcagccgtgataaagggtttgttcatgtgatgcaggaacgttgcattggttgcaaaacctgcgttgtggcttgcccgtatggtgcgatggaagtggtggtacgtccggtgatccgcaacagcggcgcgggtctgaatgtacgggctgacaaagccgaagccaataaatgcgacctgtgcaaccatcgtgaagacggcccggcgtgtatggcggcttgcccgactcatgcgctgatttgtgtcgatcgtaataaacttgaacaactgagcgcagaaaaacgccgccgaattcccggaaatattcgtagaatacggagcgggcggtatcgccgacctgtgactgccggatgcgacgctgtcgtgtccggcagggcgggttacgcaattcatgatggcgggaataactcaatggcaaaaaacacatcttgcggtgtccaactgcgtattcgtggcaaagtgcagggcgtcggttttcgtccgtttgtctggcagctggcacagcaattatctcacgggagtcgtatgcgggatggcacatgcaacttgaagtatgacgagtatagcaggagtggcagcatgcaatacaaccccttaggaaaaaccgaccttcgcgtttcccgactttgcctcggctgtatgacctttggcgagccagatcgcggtaatcacgcatggacactgccggaagaaagcagccgtcccataattaaacgtgcactggaaggcggcataaatttctttgataccgccaacagttattctgacggcagcagcgaagagatcgtcggtcgcgcactgcgggatttcgcccgtcgtgaagacgtggtcgttgcgaccaaagtgttccatcgcgttggtgatttaccggaaggattatcccgtgcgcaaattttgcgctctatcgacgacagcctgcgacgtctcggcatggattatgtcgatatcctgcaaattcatcgctgggattacaacacgccgatcgaagagacgctggaagccctcaacgacgtggtaaaagccgggaaagcgcgttatatcggcgcgtcatcaatgcacgcttcgcagtttgctcaggcactggaactccaaaaacagcacggctgggcgcagtttgtcaaaagcgatgaaaatgacgcgccagatcgccagagcggttcaacaggcagtcagtgcaagaactgcggggcagacacagagccacaagttgcagctggccctggattgtctgagttaaacccggtgcattgcccgcacctgcattatcgggcacacttccgcgccgacagacacagcgttgcatgcagcctattggacacgccagtcacgggccatcaggtggcaccaacgtacagacagcaagtaccccgagcgggccaggtgcatgacccgagtaaacatacacggatgccgtgcgagaacatcgaccccgtgcgaacaatcatccgtcgaatcagtgatccaccagtgcccgccagtgcgacacttggcgcatccaaagccagccggatccggccacggcgttcccacagtatcccagaaatcacggcaaaatcacgaaagcccggcggacaacccaaatggcaagtcatctgctggctggatcgcgacgagaaagtagtggtcatgcaaaccgtgcgtgaccagataggccagcatgtttttactgctcatcgtctggaccgacccacttctggtgtgttgttgatgggattatccagcgaggccggacggctgctggcacaacagtttgaacagcaccaaatccagaaacgttaccatgcgattgtgcgcggctggttgatggaagaagcggtgctggattatccactggtggaagaactggacaaaatcgctgataaatttgcccgcgaagataaaggcccgcagccagcagtgacgcattatcgcggtctggcgaccgtagaaatgccggtagcgaccggacgttacccgaccacgcgctacggcctggtggaactggagccgaaaaccggacgcaaacatcagcttcgccgacatcttgcccatttgcgtcatccgattattggcgatagcaaacatggcgatttacgccagaatcgcagcggtgctgagcattttggcctccagcggttaatgctacatgccagtcagttgtcattgacgcatccttttactggcgagccgctgactattcacgcgggcctggacgacacctggatgcaggcgttatcacaatttggctggcgcggtctgcttcctgaaaatgaaacggttgactcatgcgcctcgggtcggatgagaatagttcctaatccagaaaaacgatggcgaaatggcttttggcgcccatgtcggattctcgtgtggcaaaaggacgccctaccgcgggccaacaggattgaacgaaaacagggccatcgaaatgtgggtatcccaggggaacttattgactggaaaaaaggccacttaatgggaatattgggatcgcaccttcgcgacaattgcactgccgctggttactaccagcagagaggcaagcgatttaaccaggcttgcggcgtaatcgaactgtccatcggtttgcaacgcttccatataatcggtcggcgcatgagggcgttgttgggtaaatttctgccagcccatcagcaacaaacccgccgccagtccgccgagcgccggagttag

SEQ ID NO: 15933 - DNA, 3159 bp, Homo sapiens
  SIMILAR (469)..(1593): 991254mologous to Escherichia coli Nodulation protein V (EC 2.7.3.-),accession number D90844,Smith-Waterman Score=1918.
ggcagggacgcatgcgacgatcgtgcgacactgtgccgatattgcgatcagcgcgacgagcgcgcgcgagagatagagccagtagaccggcccggggcccgagcgacgaaggaggaggagacacagcaccgagagtactggtgagagtgctgaatagtgggaggagctaccaacatgcgagccgacagaccggcccccgcgcgacgtcgtgtctaacagtggtgagcggcaggggtattagatctcctgcacctgttacaaccgcccccccctgcccaacttgaacggcgagcagggtgactcctagaggatcagttttagtaaaggtaaaaaatgtttaccgcaggtgcgcaaattttccgcctttacgtcactttatgagcatttcgcatataaaatgtagaacttttgtcctagcataaccacagaaacgaatcttggcgcccaggtctggcggataaagcggtaatgagcaaccaatcacagcatgtattaattgccctgccccacccgctgcttcacctggtcagtttaggtttagtctcgtttatctttacccttttctcgcttgagctttcgcagtttggcacccaactcgccccactgtggttcccgacgtccatcatgatggtggcgttttatcgccatgccgggcgcatgtggccgggaattgcgctgagctgttcgctgggaaatatcgccgcatccatcctgcttttttccaccagctcgctgaacatgacctggacgaccatcaatattgttgaagccgtggtcggggcagtgctgctacgtaaattgctgccgtggtataaccccttgcaaaatctggctgactggctgcgtctggcactcggcagcgccattgttccgcctctgttggggggtgttctggttgtcctgctgacgcccggagacgatcctctcagggcatttttgatatgggtactgtcagaatccatcggcgctctggcactggtgccgctgggattgttatttaaaccacactatctgctgcgccatcgcaacccacggttgctttttgagtcgctgctcacgttagccatcacactgacgttaagctggctttcgatgctgtatctgccgtggccttttactttcattattgtgctgttgatgtggagcgccgtgcgtctgccacgaatggaagcctttttgatcttccttaccacggtgatgatggtgtcgctgatgatggccgcggatccctccctgcttgctacgccgcgtacgtacctgatgagccatatgccgtggctaccgtttttgctgatcctgctgcccgccaacatcatgaccatggtgatgtatgcctttcgtgcggaacgcaaacacatttccgaaagcgaaacccactttcggaacgcgatggaatattccgctatcggtatggcgttagtgggcaccgagggacaatggctgcaaaccaacaaagcgctctgccagtttctcgggtacagtcaggaagagctgcgcggactcacctttcagcaactgacctggccggaggatctcaataaagatctccaacaggttgaaaagctgataagcggtgaaataaacacctatgcctactcgtgcctggggctttgtgctgccttctatgtcggtccgctactctgttgttcttcggggccgccgtggatcattccccggattatgcctgatgaagcgcaacccttgccggatagtgccttgccgcgcgtcgccccactggcatggaaaacgggcaccagctatggctatcgtgacgcctgggcgattggggttaacgctcgctatgtcattgggatctggactggcagaccggacggcacgcccgttgttggtcagtttggctttgccagtgccgtaccattgttgaatcaggtcaataatatcttactgtcgcgcagtgcgaatctgccggaagacccgcgcccgaactcagtcactcgtggcgttatctgctggccgggcggacagtctttgccggaaggtgacggtaactgtcgccgccgcctggcaacctggctgctggacgggagtcagccgccaactctattactgccggagcaggaaggcattaatggcattcgtttccccatctggctggatgaaaatggcaaacgtgttgccgctgattgcccgcaagcgcgacaagaaatgataaatgtctggccgctaccgctggaacactggctgcccgcatcagaacgtcgcgctgtgcgcttaccaccggcctcgacaagttgcccgccatacggtcacgatgcccagctcccgctgcagctgacaggcgttcgcgatggcgcgattattactagcttcgtcgttagtcttgttgtatctcgctgctgcatcgtgcggagcccaaacaaggaccgagtaaaagggaacctccaaaatgcgctccaaagaacgaacagcggaggtgtgcaaaataaaaccgtaaagtatgaacagcggctcaacttgaataaaactcgctgggaacaatttaatgcctccataaaaggtaaaccgggaaacgtgcccggttcaatttctgcaaatagcgataacagccgtcaagtttctctcagcaccgacggtggttttgtattgcatagcggtggactgactttcagtaatgatagttttagcgactccgatacactggcggtagttcaggctccaggtgctcaaggagcgcgaataaattatggcaacagtactatcgatcgatggggttatggtgtcaccagcgctctttctccttatcatgaaaaccgtatcgcgctggatatcaacgatcttgagaacgatgttgaattaaaaagtaccagtgcagtagctgtaccgcgtcagggttcagtcgtctttgctgattttgaaaccgtgcaagggcaatcagccattatgaacatcacacgaagtgatggtaaaaatattccatttgctgcagatatttatgatgagcaaggcaatgtcattggtaatgttggacagggtggacaagcatttgttcgtggtattgagcagcagggaaatatcagcattaaatggctcgaacaaagtaaacccgtaagttgtcttgcgcattatcaacaaagcccagaagcagaaaaaatagcacaatctattattctgaatggaattcggtgtcagattcagtaa

SEQ ID NO: 15934 - DNA, 2172 bp, Homo sapiens; identical to SEQ ID NO: 6909
  SIMILAR (817)..(2169): 871254mologous to Homo sapiens putative p150,accession number U93563,Smith-Waterman Score=2028.

SEQ ID NO: 15935 - DNA, 2409 bp, Homo sapiens
  SIMILAR (607)..(1209): 1001254mologous to Escherichia coli K12 putative ligase,accession number AE000154,Smith-Waterman Score=1049.
atgttcgttttggctgatttcggccacacaagacgcaccaaccgaagtttggggcacaacattttaccggcgcgaattgcgccagacgcgatcaacaaatggctaagtggatttttctcccgcgaagtgcaattacgctgggtggggccacaaatgacccggcgcgtgaaacgccacaacactgtacctctgtcatttgctgatggctatccttaccttcttgctaacgaagcctcgttacgtgatctccaacaacgttgtccggccagtgtaaaaatggagcaattccgccccaatctggtggtttccggcgcgtcagcctgggaagaagatcgctggaaagtgattcgcattggtgatgtggtgtttgatgtggttaaaccttgtagccgctgtattttcaccaccgtcagcccagaaaaagggcaaaaacatccggcaggcgaaccattaaaaacattgcaatctttccgcactgcccaggataacggcgggggggaaggcgaggcacgcgcagcaaatactggcgcaactcatcgcggtaggcatcggtcgccgtcggctgtaaggtaccgagatcgattgaatatgtatgttcttcgtcgtatggatctgttgtaccgggtaaaaacgctttgggccgcgctgcgcggtaatcattacacctggcctgccatcgatatcaccctccccggcaatcgccattttcatctgattggcagtattcatatgggtagccacgatatggctcccctgcccacccgtttgctcaaaaagctcaaaaacgccgatgcgctgatcgtcgaggcggatgtttccaccagcgatacgccttttgctaatttgcctgcctgcgaggcgctggaagagcgcattagcgaggagcaactccaaaacctgcagcacattagccaggagatgggcatttctccctcactcttttctacccaaccgctgtggcaaatcgcgatggttcttcaggcgacgcaggcacaaaaactggggctgcgggcagaatacggtatcgattaccagctattgcaggcggcgaagcaacaacataaacccgtgattgaactggaaggggctgaaaaccagattgccatgttgctccagctccctgacaaaggactggcgctgctggacgatacgctgacccactggcataccaacgcacggttgctgcaacaaatgatgagctggtggctggagtgtgaaggaggggagagagaaagaatatttccagtctccaagaggatggggaagaagcttgatgccgtctttggggataatcatacggcctccttgacggaaaccgaagaatacagaaaatcgcaggtgcatttctgcatctgtgacaagcgagaaagaagctccggaaactatcaatcaatacaaggctgccgttcggcggccttttttattcctagcaacagcactcgcacaaagcgaggtgagagtatgtatcgcatggacaaactaaccactggtgctgcctatggcgcttcagccgggagcatcctaaacggcatgttgaatgcctacagccccgagcagtggaacgctatcggcgtgctgacaaccgccgcagcaggagccgagatgaacccaacgttgaggaataagctggtgggtgccattgttggcggatcaggggcaatcactattgctgcagtaatgctgggcaatgcggatggactcgaaggtcggcgttattacgcctatcaggatgtggtcggcgtctggaccgtttgcgatgggcacactggtaccgacattcgccgcggtcaccgatataccgacaaagagtgtgacaacctgcttaaggcagatctgcgaaaggccattatttacatcagtggttatagtggcactaacggcattcgcgactcgctgttattcagttcgctgtggttgatcccggtattcctctttccgaagcggattaaaattattgccgcagtaatcggcgtggcgttcagccgctttatcgccagtcatctggcggttgcgtttgagtctgacccggaagcagaaatccgtcaactgaacagccgtcgcgtcgaactggagcgggcgttaagtaatcatgaaaatgataaccagcagcagcgtattcagtttgagcaggcgaaagagggcgttacggcgctgaaccgcattctgccgcgtctcaacctgttggctgatgacagcctggcggatcgcgtcgatgaaatccgcgaacgtctggatgaagcccaggaagccgcgcgttttgttcagcagtttggcaatcaactggcgaaactggaaccgattgtttcggtattgcagagcgacccggaacagttcgaacagttaaaagaagattacgcgtactctcagcagatgcagcgcgatgcccgtcagccaggcgtttgcccctga

SEQ ID NO: 15936 - DNA, 3108 bp, Homo sapiens
  SIMILAR (1156)..(1878): 991254mologous to Plasmid R100 transposase of Tn10,accession number AP000342,Smith-Waterman Score=1260.
atgttcccggcacaggttcgcgcattaggcgttggtctgtcatatgcggtcgctaatgctatatttggtggttcggcggagtacgtagcgttgtcgctgaaatcaataggaatggaaacagccttcttctggtatgtgaccttgatggccgtgagaacatcaatccaaacatggcactgcgatcccggctttgagcctgatggtgaaggtgagcatattctggttagaatcctcaaaaacggctgcaatacccgttttgtggcggatgcactggcgaaattcctgaaaattcatgcccgtgaagtcagcttcgctgggcaaaaagacaaacatgctgttacggaacagtggttatgcgctcgcgtgccgggcaagggaatggcccgatcttggagcgccctttttcacctgggccagggcttggccaggttggctggaggtattccgcggggacaaagcaatatagaaggagccaatcagctgggcattaccagtattctggtgaaagataaaaccaccatcccggactatttcgcgaaggacaaagccaggcaccgtacccgtccactatgggcctggctaaaactactctggcaacgcattgatgaggacaacatgacaaccctggcaggtaaccttgcctatgtgtcgttgctctcattagtgccgctggttgccgttgtttttgcgcttttcgccgcttttcccatgttttccgacgtcagcattcagttacgtcactttatttttgccaactttctgcctgctactggcgatgttattcagcggtatatcgaacaatttgttgccaattccaacaagatgaccgccgttggggcgtgcgggctgatcgtcaccgcgttattgttgatgtactccatcgatagcgcgttgaataccatctggcgcagtaaacgagcgcgaccaaaaatttactcgttcgccgtgtactggatgattttaacgctggggccgctgctggcaggggccagtctggcgatcagttcctatttgctctccctgcgctgggcgagcgatctcaatactgtcatcgacaacgtgctgcgtatttttccgttgctgttgtcgtggatctccttctggttgctgtacagcattgttcctaccatccgcgtacctaaccgcgacgcgattaaagctcatgaccaatttctagccgaccttgcgagcattctaccgagtaacaccacaccgctcattgtcagtgatgctggctttaaagtgccatggtataaatccgttgagaagctgggttggtactggttaagtcgagtaagaggaaaagtacaatatgcagacctaggagcggaaaactggaaacctatcagcaacttacatgatatgtcatctagtcactcaaagactttaggctataagaggctgactaaaagcaatccaatctcatgccaaattctattgtataaatctcgctctaaaggccgaaaaaatcagcgctcgacacggactcattgtcaccacccgtcacctaaaatctactcagcgtcggcaaaggagccatggattctagcaactaacttacctgttgaaattcgaacacccaaacaacttgttaatatctattcgaagcgaatgcagattgaagaaaccttccgagacttgaaaagtcctgcctacggactaggcctacgccatagccgaacgagcagctcagagcgttttgatatcatgctgctaatcgccctgatgcttcaactaacatgttggcttgcgggcgttcatgctcagaaacaaggttgggacaagcacttccaggctaacacagtcagaaatcgaaacgtactctcaacagttcgcttaggcatggcaagtttgcggcattctggctacaccataaccacgggaagactcactcgtgggttggacccgcttatcccaatctttctcacatggcttgcacaaccgttatggcgttctcgtgccggaaggttgaacacgtcggcaaaaatctggcataaacagatcgctgttcgaaccgccgccagtaatgatcacatgcttcgcaaacgtcagcgccacgctttccagtatcgaacgatatatccatgcgtaatccatgctggaatcaaagccgatcataatcccgcgtttgtacggttcccacggattgaggtgtctatgtccgtcccggtccctgttcgcacagggtgtgatgcgggatccttgcgggtatcaacgggaagagggtggccaggcttcaaaatccgggggaaggaggggttcaccctttggggacttcttttccggggaggaaatcaacttacgggggaaaattaccaacagcgagatgagttagcacgggaacgccatcgcgctgatcgccagtcaaacctggcgcgatcatccggtggatttattgctctcgctgctggtgcaaagtctgacaggcggttgcgtgaacttaaccagtcgctgcaaaaggaactggcgcgcaatcagcatctggctgaacggttgctggaaaccgaagagagcgtgcgccgtgatgtggcgcgtgagctgcatgatgatatcggtcagaccatcactgctattcgtactcaggcgggcattgttcagcggctggcggcagataacgccagcgtgaagcagagcgggcagctcatcgaacaactatcgctgggcgtttacgacgcggtgcgccgtttgttgggtcggttacgtccgcgccagttggatgatctcaccctggagcaggccatccgctcactgatgcgggaaatggagctggaagggcgcggtattgtcagccatctcgaatggcgaatcgatgaatcagcgttaagcgaaaaccagcgcgtgacgctgtttcgtgtctgccaggaagggctgaacaacattgtgaaacatgctgatgccagcgcggtcaccctgcaaggctggcagcaggatgaacggttgatgctggttattgaagacgatggcagcggtttgccgccgggttccgggcaacaaggttttgggctcaccggaatgcgcgagcgcgttacggcgctgggtggggcatttcacatttcctgtctgcacggtacgcgtgtcagcgtttctctagctcaacgccatgtctaa

SEQ ID NO: 15937 - DNA, 1374 bp, Homo sapiens
  SIMILAR (853)..(1593): 991254mologous to Homo sapiens tensin,accession number AF225896,Smith-Waterman Score=1298.
atgggaaagaagcaaagaggagggggaagacattaccggaggaggaaggaactgtgcgtgagggtccttgcttcacagaaaggaagctccatttggaatctgtccaacagagtggaatcttggcactgggaaggagagaaagatggtgaagacagagataatgatgatggggatgacagcgatggtggggatgacaatggggaagaggatgatggtgacaacagcaacgctgatgtaaacactgacaattgtgatgatggtgaagacagggatgatgcttcctttcactcgaacacaccagaaacacgagatgtaggtacgcgtgagcaaagaccaaaggtagataaaaccacaaagatagggaaaaaacagagcagaaaagctgaaaattctaaaaatcagagcacctctccccctccaaaggaacgcagctcctcaccagcaacagaacaaagctggacagagaatgactttgacgagttgagagaagaaggcttcagacgatcaaacttctccaagctaaaggaggaagttcgaacccatggcaaagaagttaaaaaccttgaaaaaagattagacgaatggctaactagaataatcaatgcagagaagtccttaaaggacctgatggagctgaaaaccacagcacgagaactacgtgacgaatgcacaagcctcagtagccgattcgatcaacgggaagaaagggtatcagtgatggaagatcaaatgaatgaaacgaagcgagaagagaagtttagagaaaaaagaataaaaagaaatgaacaaagcctccaagaaatatgggactatctgaaaagaccaaatctacgtctgattggtgtacctgaaagtgatggggagagtggaaccaagttggaaaacactctgcaggatattatccaggagaacttccccaatctagcaaggcaggacaacattcaaattcaggaaatacagagaatgccacaaagatactcctcgagaagagcaactccaagatacataattgtcagattcaccaaagttgaaatgaaggaaaaaatgttaagggcagccagagagaaaggtcgggttacccacaaagggaagcccatcagactaacagctgatctcttggcagaaactctacaagccagaagagagtgggggccaatattcaacattcttaaagaaaagaattttcaacccagaattgcatatccagccaaactaagcttcataagtgaaggagaaatacaatactttgcagacaagcaaatgctgagagattttgtcaccactaggcctgccctaaaagagctcctgaaggaagcactaaacatggaaaggaacaactggtaccagccactgcaaaaacatgccaaatggtaa

SEQ ID NO: 15938 - DNA, 2896 bp, Homo sapiens
  SIMILAR (384)..(566): 861254mologous to Homo sapiens tensin,accession number AF225896,Smith-Waterman Score=256.
  misc_feature (1)...(2896): n = a,t,c or g
atgaatgtagctggaagccattatcctcagcaaactgacacaggaacagaaaaccaaacattacatgttctcacttataagtcggagctgaatgatgagaacacatggacacatagggggcggggaacagcacaaactggggcttttgataggcagaggcttggagggagagcattaaggaagaataggtttttaacttctttgcgttgggatcaaacttcctcctttagctcggagaagtttgatcatctgaatccttcttctcttaactcgtcaaagttattctccgtccagctttgttccgttgctggtgaggagttgcgttcctttggaggaggagaggccattatttacatcagtggttatagtggcactaacggcattcgcgactcgctgttattcagttcgctgtggttgatcccggtattcctctttccgaagcggattaaaattattgccgcagtaatcggcgtggtgctatgggcggcctctctggcggcgctgtgctactacgtcatctacggtcaggagttctcgcagagcgttctgtttgtgatgttcgaaaccaacaccaacgaagccagcgagtatttaagccagtatttcagcctgaaaattgtgcttatcgcgctggcctatacggcggtggcagttctgctgtggacacgcctgcgcccggtctatattccaaagccgtggcgttatgttgtctcttttgccctgctttatggcttgattctgcatccgatcgccatgaatacgtttatcaaaaacaagccgtttgagaaaacgttggataaccctgcctcgcgtatggagcctgccgcaccgtggcaattccttgaccggctttatcaatatcgcagtgtgttcgtatcgatcatgattggcgtggtgaatctgccgattattcattactccgtggagtggtggaacaccctgcatcagggatcaacgcggatgcagcaaagtatcgatccggcgatgcgttcgccgctgcgctggtcgatttttggcttcctgctcctgtctgccacgctgacgctgatgcggatgcgtaatttgattttgctgatggaaaaacgccgtccgtgggtgagtgaactgatactgaaaagaggccgtaaatgacccctgcatttgcttcctggaatgaatttttcgcaatgggcggttacgccttttttgtctggctggcggtggtgatgaccgttattccgctggtggttttggtcgtgcactcggtgatgcaacatcgcgcaattctgcgtggcgtggcgcaacagcgggcgcgtgaggcgcgtttacgtgctgcgcaacagcaggaggctgcatgaatattcgccgtaaaaaccgcttgtggattgcctgtgccgtgttggcagggctggcgctgactatcggtctggtgctatatgcgctgcgctcgaatatcgatctcttttatacgccgggggaaattctctacggcaagcgtgaaactcagcaaatgccggaagtcggtcagcgtctgcgcgttggcgggatggtgatgccgggtagtgtgcagcgcgatcccaattcgctgaaagtgaccttcaccatttacgatgctgaaggctcagtggatgtctcttacgaaggcattttgccggatctgttccgtgaagggcagggcgttgtggtgcagggcgaactggaaaaaggcaatcatatcctcgcgaaagaagtgctggcgaaacacgatgaaaactatacgccgccagaagttgagaaagcgatggaagctaaccaccgtcgcccggcgagacccagcatcatgatgccagaaattggtaacggactgctgtgcctggcgctgggaattgcgctgctgctgtccgtgtatccgctatggggcgtggcgcgcggagatgcgcgcatgatggcgtcttcccgcttgtttgcctggctgctgtttatgtctgtggctggcgcatttctggtgctggtcaatgctttcgtggtcaacgacttcaccgtcacctatgttgccagcaactccaatacccagcttccggtgtggtatcgcgtggcggctacctggggcgcgcatgaaggctcgctactgctgtgggtgctgctgatgagcggctggacctttgcggtggcgatttttagtcagcgtattccgctggatattgtggcccgtgtactggcgataatggggatggtcagtgtcggctttttgctgttcattctctttacctctaacccgttctctcgcacgttgcatcttgcgtacccaaatcggtgccagccaatcaactggcgcgggcgacatctggtctggtacttgctgctgtttgttatcagtctctggctccagttgggattgccggacgaactgtcgcgctttacgccattctgtctggcgctgccgattatcgcgctggcctggcactatggttggcaaggggcgctgattgcgacgttgatgaacgccatcgcgctgatcgccagtcaaacctggcgcgatcatccggtggatttattgctctcgctgctggtgcaaagtctgacagggttgttgcttggcgctggcatccagcggttgcgtgaacttaaccagtcgctgcaaaaggaactggcgcgcaatcagcatctggctgaacgggtgctggaaaccgaanaaagcgtgcgccgagatgtggcgcgtgagctgcattatgatatcggtcagaccatcactgctattcgtactcacgccggcattgttcagcggctggcggcagataacgccagcgtgaagcaaagcgggcagcttatcgaacaactatcgctgggcgtttacgacgcggtgcgccctttgttgggtcggttacgtcccgcccagttggatgatcttacccctggaacaggccattccgctcactga

SEQ ID NO: 15939 - DNA, 723 bp, Homo sapiens
  SIMILAR (466)..(534): 601254mologous to Mus musculus protein tyrosine kinase TecI,accession number AF071947,Smith-Waterman Score=78.
atgatgatgagtaaaaaattggccaaaaagcgccactcggtgaagcccgtggtggcgaaagaacctgctcgcaccgccaaaaattttggctatgaagagatgttgagcgagctggaagctatcgtcgcggatgctgaaacgcgtttagccgaggatgaagctaccgcccgaagcactggtcgaaaccttcatcgcgcagctgttcgacgcaccatcgcaaatcatgccgctgacatcgccgatcatactgctgatcgcaatcgagatgggttcataaacgccatcccacagccatgccatcccggcggcgggccccattgctgcggtcgttgcggcacacagcgcagacaaacgcgctttctgaagtgcgcttatcaggcatcccactgggggcattttcaacaaactataactttccggcacgttgaatccggctgtgttgagcttcatcacatcccatgggattttgttgtaacactgtactggagtcagccatgctcgcgcctgctgagctacaccagcggcggttggcgtaccgcacaccgcaaggagacgatcatgaccaataatcccccttcagcacagattaagcccggcgagtatggtttccccctcaagttaaaagcccgctatgacaactttattggcggcgaatgggtagcccctgccgacggcgagtattaccagaatctgacgccggtgaccgggcagctgctgtgcgaa

SEQ ID NO: 15940 - DNA, 2919 bp, Homo sapiens; identical to SEQ ID NO: 10698
  SIMILAR (1003)..(1521): 991254mologous to Escherichia coli ferrienterochelin receptor protein,accession number M13748,Smith-Waterman Score=924.

SEQ ID NO: 15941 - DNA, 2865 bp, Homo sapiens; identical to SEQ ID NO: 15928
  SIMILAR (199)..(918): 881254mologous to Escherichia coli yojH,accession number U00008,Smith-Waterman Score=1065.

SEQ ID NO: 15942 - DNA, 3102 bp, Homo sapiens
  SIMILAR (2160)..(3884): 991254mologous to Homo sapiens tyrosine kinase,accession number L10717,Smith-Waterman Score=3068.
atgaagacaggtgtggtggtagaaaaggcgcctggtcatcagcgggggagtacacttcctccttcctttgctgcgtggtgcgtcctctaccacgtcagaagaatccagctgttactccgtcggcgtctctatctagttgtacggctcctctcatcgcatcgctgcgccccccgcaggcgggctgagtccgaaaagagagttagcaagggtggtggaattttgcgcgcactgtgtaaagagccgctgcgcaccgggcgtattcttaatattaacgttccggatttacccttggatcaaatcaaaggtattcgcgtgacgcgctgcggtacacgacatccggcagatcaggtgatcccgcagcaagatccgcgcggcaatacgctgtactggattggcccgccgggcggtaaatgtgatgctggtccggggaccgattttgctgcggtagatgagggctatgtctccatcacgccgctgcatgtggatttaactgcgcatagcgcgcaagatgtggtttcagactggttaaacagcgtgggagttggcacgcaatgcagcttaaacagcagctcgacccttgcggcgtgtttaaccccggtcgcatgtacgcggaactttgaggagcaggctatgcaaacccaattaactgaagagatgcggcagaacgcgcgcgcgctggaagccgacagcatcctgcgcgcctgtgttcactgcggattttgtaccgcaacctgcccaacctatcagcttctgggcgatgaactggacgggccgcgcgggcgcatctatctgattaaacaggagcatctcgatcgctgcctcacttgccgtaattgtgaaaccacctgtccttctggtgtgcgctatcacaatttgctggatatcgggcgtgatattgtcgagcagaaagtgaaacgcccactgccggagcgaatactgcgcgaaggattgcgccaggtagtgccgcgtccggcggtcttccgtgcgctgacgcagctgcttcggttacggcttcacttcggggtccgagctatccccagcagcccgagtgtcctagcagggtctgacaaccacggatgttccagttccacagccagcgatgatctcctctacggcaggaatccaactcgtatccacggtcgaaatcgaagctctctggaaagtgttacgagtgacgcgcacccgccaattccatggtcaacggtccccagtgatacactgagtgttcctggcatggcccagcgccccccactaaccaactctctcagagtgtgcccgacggagaaattatgccaaagcggttgtacccgtgccggtgttgatgctcccattgatatcggccgcttacagcgttttgttactgattttgaacaacaaaccggaatggaaatttatcagcccggtactaaaacgctcggcaaagtcgcgattattggcgcaggtcctgccggattgcaggccagtgtgacactgacaaaccagggttatgacgtcacgatttatgagaaagaagcgcaccccggtggctggttgcgtaacggtattccgcaattccggttaccgcaatcagtgctggatgcagagatcgcccgtattgaaaaaatgggcgtgaccattaagtgcaacaacgaagtcggtaacacactcacccttgagcagctgaaagcagaaaaccgcgcggtactggtcaccgtggggttatcaagcggttccgggctaccgctgtttgagcatagtgacgttgagattgccgtcgacttcttgcaacgtgcacgacaggcgcaaggcgatatcagcattccacaaagcgcattaattatcggcggcggtgatgtcgcgatggacgtagccagcacgctgaaagttctcggctgtcaggcggtaacttgcgacttgtattcccagcactttgggagtccgaggcgggcagatcacttaagtcgtcagtctgatgtgcatgtgaacgccgagggaacgctggtaatgagtctgcctctaattacgcctaaatcccgcactcgtccgccggtcgccgtgtgcgccgaatttcgatgtaagtgcacgtctgtgcatcgaccagggttgtccacagatctgagtcgggttgaatgcggcgttttcagcgtagctgccactgaaaatacgaccgtctttacattccagcgcgacaccgcttggcgacttactgtaaggcatgtgcgaacggtttgccgccgcaatcgctgcctgagaaagcgcatcacccgtcagcgcatagccgtgatcctgttcgtccatcagcagcgttttaatctccagatctttcggcccaaaggcatctggcagatagtcacgcagcgcgtgtgcctcgcggcccggcagatgaatacgcagatccagaccgctgttcagttcattcataaactgacggcagtgaccacaaggcgtgtagttaacggtgatggctgcaagcgctttttcaccactcaaccaggcgtggctgatcgcgctttgttcggcatgaacggtttgctgcattgtcgcaccaataaattccatattggcaccgaaataccaggttccgctcacaccgcgcgcaattgcgccaacattaaaattcgacaatggcgtacgcgcacaggccgccgccagcggaagtacggggaagtacttgtctgccagaataggttccagtgcagattgcaagtatccgcaagttggcaaaacaatgccgcgcgcaagctggcagcctaccccggaacgctgccgattaatctcgcgcagttaaaatcggtacgtcgcatccgtgaatttgacgatctcatcaccgccagaattcacggctacgccgacgctatcgactattatcgtcagtgtagcgccatgccgatgctgaaccggatcgccaaaccgacgctgattattcacgccaaagacgatccgtttatggatcatcaggtgatcccgaaaccggaaagtctccccccgcaggtggagtatcaactgactgaacatggcggtcatgttggctttattggcggtacattacttcatccgcaaatgtggctggagtcacgcattcctgactggttaacaacgtatctggaggcgaaatcatgttga

SEQ ID NO: 15943 - DNA, 1568 bp, Homo sapiens; identical to SEQ ID NO: 15929

SEQ ID NO: 15944 - DNA, 921 bp, Homo sapiens
  SIMILAR (921)..(391): 971254mologous to Escherichia coli similar to ~start codon is not identified yet,accession number D90870,Smith-Waterman Score= 865.
tcatacccggcgcttaaactgccctgcatcaatgccatgttgcttcattttccgccacagcgtagtgcggccgatcccaagtaaagccgacatttcctgaatgcgaccgcctgtgacctgggctgcgttaataattgcctctttttcaacttccgcaaatgacagactggtggaaaggcgggtggcgctgacatcatctgtcgcctgctcggtaaacagatgttccggcaaatcactgacgcgaatgcgcccgttatcactactcagagcaagattctcgatgacgctgtaaagttcaaaatcgttgcgcgaaggcgggatggtaatttcaaatgcaggcggggggaaataaagctggcgaactaaaacaatttttgttccaccacctcgcatcatggtcagcaccatcataccgatcaccgatgtggggaacagaatgtttgccatcgggatgccatttgccagactctttttcgaaccacaaaagacgatagtaatttcatctgccttattgaagctcagtcggcgtgccataaagacgttaactacaatcacgatagccagaagaacgcagctgaccaccacgataaacagcaatgatccccagccaactttatgccagataccattaacgacggcttcgctgaacgctgtataaaccaccaacagaatggacgtctggtcagttttcgcaatccattttttattgcgcgacacccagtcaccaatccacggccgggaaagatgccccaacacaaacggcagcagcagttgcagcataattttaccgacctgctcaaggctgccccctgcaccgtgaacattcatcaccagaccaaccagcaatggtgaaaggaaaatccccagcaggctggatgccgacgcaaaaaaaaccgctgccgcgacgttaccgcccgccat

SEQ ID NO: 15945 - DNA, 1067 bp, Homo sapiens
  SIMILAR (31)..(429): 991254mologous to Escherichia coli Glycerol metabolism operon regulatory protein,accession number D90754,Smith-Waterman Score= 659.
atgcatcaacgacctcggactcgcaatgctgtggaacaacatcgttttagtcgccagctgtattacgcgctgcatgcatttgaaattaccatcccgcctctgcgtatgcggcgtggcagcattccggcgctggtgaataacaaattacgcagtcttgaaaaacgcttctctacgcggctgaaaattgatgacgatgccctcgctcgcctggtttcttgtgcatggccaggcaacgattttgaactttacagcgtcatcgagaatcttgctctgagtagtgataacgggcgcattcgcgtcagtgatttgccggaacatctgtttaccgagcaggcgacagatgatgtcagcgccacccgcctttccaccagtctgtcatttgcggaagttgaaaaagaggcaattattaacgcagcccaggtcacaggcgcgtttccgtggtggctgggtgatgtaaaactgacgattccgctaacgctggggatggtggcagcggcgctgaccgatctcgatgaccgactggcgggacgtttgcgtaacctcatcattacgctgttctgcttttttatcgcctcggcctcagtagaattgctgtttccctggccctggctatttgcgattggcttaacgctctctaccagcggcttcattttgctcggcggtctgggtcaacgctatgcaacaattggccttcggtgccattgttgaacgccatttacactatgttgggaacatcactgtatgagcactggtatcagcagccgatgtatctgctggccggtgccgtctggtacaacgtcctgacacttattggtcatctgctgttcccggtccgcccgctgcaggacaacctggcgcgttgctatgaacaactggcgcgttatcttgagctcaagtcgcgcatgtttgatcctgatattgaagatcaaagccaggcaccgctgtacgatttggctctcgccaacggtctgctgatggcgacattgaatcagacgaaactctcgctgctgacccgcttacgtggcgatcgtggtcaacggggaacgcgtcgcacggggatcctctag

SEQ ID NO: 15946 - DNA, 954 bp, Homo sapiens; identical to SEQ ID NO: 13743
  SIMILAR (1412)..(2182): 881254mologous to Escherichia coli hemN,accession number D16509,Smith-Waterman Score=1149.

SEQ ID NO: 15947 - DNA, 775 bp, Homo sapiens
  SIMILAR (1)..(474): 991254mologous to Escherichia coli similar to,accession number D90875,Smith-Waterman Score=808.
atgacgcaacaaatcaccctcattaaagacaaaattctctccgataactatttcaccctgcacaacattacttacgatctcacgcgcaaagacggcgaagttatccgccataaacgtgaagtgtacgatcgcggcaatggtgcgacgatcctcctgtacaacacgaagaaaaagaccgtggttctgattcgtcagttccgtgtcgctacctgggttaatggcaatgaaagcgggcagctgattgaaagctgcgccgggctgctggataacgacgaaccggaagtgtgtattcgcaaagaagcgattgaagagacgggctatgaagtgggtgaagtgcgcaaattatttgaactgtatatgtcgccaggcggtgtgactgagctaatccacttttttatcgccgaatacagtgacaatcagcgcgctaacgcccgtggcggtgtcgaagatgaagatattgaagtgctcgagctggtccagtgcggcgggcagatcggtgtaccagataccgtgcttgctgttttcgccaccggtattggttttttggctatgtccgtgaccaaaccccggattaacgcgcagccatacccgatgccctggcgaaacctggcccagttggtcgagcatatcaacagaacccgcattcaccggaatttgcaattcactgacgcgttcaagcgtcgcctgatcgataacatctgccgtaaaaacaatatcatcgggacccacaccgggcagtcgaaattcagcgggcaaacgcaacagattttcggcg

SEQ ID NO: 15948 - DNA, 1050 bp, Homo sapiens; identical to SEQ ID NO: 9220
  SIMILAR (388)..(1185): 971254mologous to Escherichia coli sulfite reductase (NADPH) hemoprotein alpha subunit,accession number U29579,Smith-Waterman Score=1365.

SEQ ID NO: 15949 - DNA, 425 bp, Homo sapiens
  SIMILAR (161)..(313): 1001254mologous to Escherichia coli similar to,accession number D90875,Smith-Waterman Score=258.
gagttttgtgtctatattctttgctgatgtatctgggtaccgagctcaaggttgtttcaatttagtcagttccgtgtcgctacttgggttaaaggcaataaaccgggcagctgaattgaaagctgcccccgggctgctggaaaacgacgaactcggaaccggtgtgactgagctaatccacttttttatcgccgaatacagtgacaatcagcgcgctaacgccggtggcggtgtcgaagatgaagatattgaagtgctcgagctgccgttcagccaggcgctggagatgatcaaaaccggcgagatacgtgacgacaacgcctctgacaaggacctggccgacctggtcttggagatggaggtgatgaatctgatcggccgacacaagaacatcatcaacctgcttggtgtttgcacccaggaag

SEQ ID NO: 15950 - DNA, 1054 bp, Homo sapiens
  SIMILAR (1885)..(2469): 921254mologous to Escherichia coli K12 aconitate hydrase B,accession number AE000121,Smith-Waterman Score=907.
gattgaggtttaaaccgctcccgatgcgaggcggatcgaaaaattcaatattcatcacacttttcatgaaaattctgtacccgttttcacgcgctatctgctaaaaatgttgccgatgtgaagtaaacatggatgtagtacgcctgacgtgccaggcgaggagtgagtgtgaaagcgaagaagcaggaaactgccgcgaccatgaaagacgttgccctcaaggcaaaagtctctacagcgaccgtctcccgagcattaatgaatcccgataaagtctcccaggccacccgtaatcgggttgaaaaagcggcccgggaagtgggttatttcccgcagcctatggggcgcaacgtcaagcgtaatgaatcccgcaccattctggtgattgtcccggatatctgcgatcccttctttagcgaaattattcgcggtatcgaagttacggcggcaaatcacggatatctggtgctgattggcgactgtgcgcttcaaattcagcaggaaaaaccctttatcgatttgatcatcaccaagcaaattgatggcatgttgttgctgggttcaaggctgccgtttgatgccagcattgaggaacagcgtaatctgccgccgatggtgatggcgaacgaatttgcaccggagctggagctgcctacagttcatatcgacaatctgaccgccgcatttgatgcagtaaattatttatatgagcaagggcataaacggattggctgtatagccggtcccgaagaaatgacagctgtgtcactaccgcctgcaaggctatgttcaggcgctgcgtcgctgcggcattatgttctgccgtttcaccgcggaaggcgttcaagagatcgactataaagatatcgctacgctgaaaaactacatcaccgaaagcggcggtgtgactgagctaatccacttttttatcgccgaatacagtgacaatcagcgcgctaacgccggtggcggtgtcgaagatgaagatattgaagtgctcgagtcactacgccttaatgaaaatcatgccatcaaggaacgttgcaggagttga

SEQ ID NO: 15951 - DNA, 741 bp, Homo sapiens
  SIMILAR (3)..(413): 971254mologous to Escherichia coli put. mal G protein (aa 1- 296),accession number X02871,Smith-Waterman Score=691.
cgattatgttcccgctgctgatggtcgtcgctatctcgctgcgtcagggaaactttgcgaccggcagcctgatcccggagcaaatctcctgggatcactggaaactggcgttaggttttagcgttgaacaggctgatggtcgcattacgccaccgccattcccggtactgctgtggctgtggaactcggtaaaggtcgccgggatttccgcgattggcattgtggcgctctccaccacctgcgcttacgctttcgcccgtatgcgctttccaggcaaagcgacgctgctgaaaggaatgctgattttccagatgttcccggcagtactttcactggtcgcgttgtatgcgttgtttgatcgtctgggtgagtacactccattcattggcatgaatactcccggcggcgtaatttcaagttcaaaggatcaaacaaggggagccttgatgggccagaatcctggaaggaggcagggatgggaaactttagcagattccactagaacagaaaaaatggtgaggttgggattctcgcaagagcaggcttttgtcactttgggtgcttttgctgcgctggtctatggcctcatttccattggcggctatgtcggcgaccacctgctggggaccaaacgcaccattgttcttggagcacttgtgctggcgattggctacttcatgaccggcatgtcgctacttaagcctgacctgattttcatcgccctggggactatcgctgtcg

SEQ ID NO: 15952 - DNA, 1656 bp, Homo sapiens
  SIMILAR (1656)..(913): 971254mologous to Escherichia coli pot. PBP 1A,accession number X02164,Smith-Waterman Score=1217.
ttacgatctccgtccaagcgcatgggtgactccgaaaggggagtggggtaaaggcagcgttgagctggtgggaaatccaaccaacgactcgtatgcctgcaggtccaccagccggtcagccatcagcccggaacagctaatcagcgttgatgcttcatattcgtcgccctgacgggtacgtatcaccacgccgtttttatgctcattaagcccgctgacttcggcgttatagataatttcaccgcctctggactggaagatttttgccatcgccgccgtcacgtcgcggtactgacaatgccgctggacgcacaaaaatgccgccgagcccggtgatattcggttcgcgctcgcgcagttcgtcggcgttaagcattcgcgctcgataccgttcgccgctgtgcgttcccataaggcgcgcatccgttccatttcgagatcggacgtggcaaccagcatcttgccgcagttgtcgtagcgaatgccgttttgatcgcaaaaggctttggtggcgcggtttcccgccaggcaaaactgcgccttcaggctgccgggcgtgtaatagaccccggcatggatcacgccgctgttgtggcccgtctggtgacaggccggggcggaatcgtttggttcggcagagacttttatcggagtgttgatgatattcactttggtgcctggggtgacctggctaaagagtgttttgatatcgtcatcccgcagacgaatacagccagaacttacccgcatgccaatgccgaaatcggcgttcgtaccatgaagcaaataaacgccgccataggccgccagacgaatcgcatgatggcccattgggttatccggtccagccggcactaccgcaggcaactcaattccctgtgctttataacgggcgcggatgtttgccgttggtttccacagcacatagtgccgggccgcgatagcgtggcgcatgtcgtagtccagcacgttattacgtaccgcctgctgcgcggcctgctgcactttgcgggtgatggtggtgtaaatgcgataaccgtcttcataggcactttcgccataacggttatacatctcctggcgcaccatttcgctcaggtacggcgcagagaaagcaatctccggcgcgtgatagttagcgttaatcgcctcagtgcgtgtctgatcgaactgttgttgggtgatatacccttcatccagcatccgcgacagcacgacgttacgccgcgcgacggcacgatccatcgagtagagcgggttgaaggtggaaggcgctttcggcagcccggctatcaccgccatttcgttcagcgtcagttggtcgaccgtttttccgaaatagacttgtgccgcagcaccgacaccataggcgcggtaaccaaggtaaatcttgttcagataaagctcgaggatctcgtctttcgtcagcagctgttcaatgcgaatcgcgaggaagacttccttaatcttacgcatcagcgtgcgttctggactgaggaagaagtttctcgccagctgctgggtaatggtacttgccccttgtgacgcgtgaccggagaacagcgccacgcttgctgcacggaagatccccaccgggtcaacgccgtgatgctcgtagaagcggctgtcttctgtcgcgataaaggctttcaccat

SEQ ID NO: 15953 - DNA, 1062 bp, Homo sapiens
  SIMILAR (55)..(648): 971254mologous to Escherichia coli put. mal G protein (aa 1- 296),accession number X02871,Smith-Waterman Score=987.
atggcaagacaagttattggaggaagaggggagaaaaggcatgatggatctacattatccccggtccaaccgaaatcgcaaaaagctcgtttatttattactcacctgctactgctactttttatcgcagcgattatgttcccgctgctgatggtcgtcgctatctcgctgcgtcagggaaactttgcgaccggcagcctgatcccggagcaaatctcctgggatcactggaaactggcgttaggttttagcgttgaacaggctgatggtcgcattacgccaccgccattcccggtactgctgtggctgtggaactcggtaaaggtcgccgggatttccgcgattggcattgtggcgctctccaccacctgcgcctacgctttcgcccgtatgcgctttccaggcaaagcgacgctgctgaaaggaatgctgattttccagatgttcccggcagtactttcactggtcgcgttgtatgcgttgtttgatcgtctgggtgagtacattccattcattggcctgaatactcacggcggcgtaattttcgcgtatctgggtgggattgcgctgcatgtctggaccatcaaaggctatttcgaaaccatcgacagttcgctggaagaagctgctgcgctggatgcgagaacaaaacataacatcaaacgaatcgaccgattgttaggtaatcgtcacctccacaaagagcgactcgctgtataccgttggcatgctagctttatctgttcgggcaatacgatgcccattgtacttgttgactggtctgatattcgtgagcaaaaacgacttatggtattgcgagcttcagtcgcactacacggtcgttctgttactctttatgagaaagcgttcccgctttcagagcaatgttcaaagaaagctcatgaccaatttctagccgaccttgcgagcattctaccgagtaacaccacaccgctcattgtcagtgatgctggctttaaagtgccatggtataaatccgttgagaagctgggttggtactggttaagtcgagtcatagaaaagtacaatatgcagacctag

SEQ ID NO: 15954 - DNA, 705 bp, Homo sapiens
  SIMILAR (910)..(272): 951254mologous to Escherichia coli similar to fdrA gene of E. coli,accession number U73857,Smith-Waterman Score=1023.
atggctctagaagcatttgaaaatggtgaaaaagtagaagcttcccaagtaactgggactacagaatggatctggcgtccgttgaataacccgaaacatttagcggtcagcagcttctccatggaaaacccgcaaggctttggtctgttgcagcgcggtcgtgatttctcccgctttgaagatctcgatgatcgttacgatctccgtccaagcgcatgggtgactccgaaaggggagtggggtaaaggcagcgttgagctggtggaaattccaaccaacgatgaaaccaacgataacatcgtcgcttactggacgccggatcagctgccggagccgggtaaagagatgaactttaaatacaccatcaccttcagccgtgatgaagacaaactgcatgcgccagataacgcatgggtgcaacaaacgcgtcgttcaacgggggatgtgaagcagtcgaacctgattcgccagcctgacggtactatcgcctttgtggtcgattttaccggcgcagagatgaaaaaactgccagaggataccccggtcacagcgcaaaccagcattggtgataatgggaataggagacctgaagagggggagacaggagaactgccagttagtggagcagtcagaacacaaacgtttctctattactttgctatcttatatgggcacggtttgtggagtcccaaatcaattacaatg

SEQ ID NO: 15955 - DNA, 2376 bp, Homo sapiens
  SIMILAR (781)..(1374): 931254mologous to Homo sapiens PINCH protein,accession number U09284,Smith-Waterman Score=1057.
atgaagtaccgcgatgagaaacgtttatggtgtaaaacacagcagagcataaggcacaaaagaaggagatgcaaacatccccatgccttaaaggtagacatactagaggatccccgccctgttctatccggatatagtcaatatacgaacggtgcctgcgtttgcggtgtttcacgcacccatttttgcaccagcgtcgcaatcagcaacaccatcaccagcccggccaccagacgaatcgccgcaaaaccccagccgaggacaaagcccataaacaccagcgtcgccgggtttaacaccggattgcccatccagaatgccagcgcaccgcccatcgacacctgttggcgacgcattcccgccgcgaccggagccgcacagcaggtacacatcatgcccggcaacgaaaacagcgttcccagcagcgtgccgcgaaagcgcgattgcccaagcgtacgcaacaaccagtcacgcgggatcagcaccctgaatcaacgaaccgaggatcacccccagcaccgccgctttccataccgcgaggaaatagatcatcgcgtaatccaacgccgcctgcccatggggaccggcaagggttgtcccgggttccctgcccaccccgggggccgtatcccgcggggcaggctcatcctttgggttacccggttcccggtaattgccccgcagctccgtgatactcttcggcccggttgcgtgattattgccgtcatcgttgtactgctttttggcaccaaaaagctcggctccatcggttccgatcttgcgggctggattcgcgcgttgcgttcactggcgacaacggtgcagaacgaactgacccaggagttaaaactccaggagtttcaggacagtctgaaaaaggttgaaaaggcgagcctcactaacctgacgcccgaactgaaagcgtcgatggatgaactacgccaggccgcggagtcgatgaagcgttcctacgttgcaaacgatcctgaaaaggcgagcgatgaagcgcacaccatccataacccggtggtgaaagataatgaagctgcgcatgagggccccgcctggttcagcgatccgaccaccgcccgcacgatgctaattatcgtcaatacctggctgggttatccgtacatgatgatcctctgcatgggcttgctgaaagcgattccggacgatttgtatgaagcctcagcaatggatggcgcaggtccgttccagaacttctttaagattacgctgccgctgctgattaaaccgctgacgccgctgatgatcgccagcttcgcctttaactttaacaacttcgtgctgattcaactgttaaccaacggcggcccggatcgtcttggcacgaccacgccagccggttataccgacctgcttgttaactacacctaccgcatcgcttttgaaggcggcgggggtcaggacttcggtctggcggcagcaattgccacgctgatcttcctgctgaggatcccccgacgcaccacggcgctacaaggcatgcgcagcaacctgaatatggaatcttcccgctgggcgcgggccaatcgacgtttaaaagcgatcaatacgctatcgctgacgctgattacccaatcctgcgaaacttatcttattcagaatacgcgcccggaattgatcactgatactttccgcgaattttttgacacgccggtagaaaccgcgcaggacgtccacaagcagctcaaacgcctgcggagagttatcgcctggaccggggaacgggaaacgcctgtcaccatttatagctgggtcgcggcggcaacgcgttatcagcttctcaagcgcggcgttatcagtaacacaaaaatcaacgccaccgaagaagagatcctgcaaggcgaaccggaagtaaaagtagagtcagccgaacgtcatcatgcaatggttaacttctggcgaaccacactttcctgcattctgggcacgcttttctggctgtggacgggctggacttccggcagtggtgcaatggtgatgattgcggtagtgacgtcactggcaatgcgtttgccgaatccacgcatggtggcgatcgactttatctacgggacgctggccgcgctgccatatggaggtggccggccagttgctgtcggtgtcttctacggggggtgctattgtacgagagatggtctaaccagagcccccccacccaacgcggcccccaccgcggcccggtatggccctcggaccacgcccagaacgctccgcaagggaataaccgatgtacgctgcgagaaaagacaccatcagcgtcaagcccgcaacgccggatatcaaacagttttttcagatttggatcggctacggcatccggcactgcgcctttgccatacaacatga

SEQ ID NO: 15956 - DNA, 2581 bp, Homo sapiens
  SIMILAR (659)..(1549): 971254mologous to Homo sapiens PINCH protein,accession number U09284,Smith-Waterman Score=1679.
atggtgttgatggggctggcacaaaatatctggcagtttttgatcctgcgggcgcttcttgggttacttggcggatttgtccccaacgctaatgctcttatcgccacacaagtaccgcgtaataaaagcggctgggcgctgggtacgctctccacaggcggcgttagtggtgcgttgctcggcccaatggctggcggcctgctcgccgatagctacggcttacgtccggtattctttattaccgccagtgtgctcatactctgctttttcgtcaccctgttttgcatcagagaaaaattccagccggtcagcaaaaaagagatgctgcacatgcgggaagtggtgacatcacttaaaaacccgaaactggtactcagcctgtttgtcactacgttaatcatccaggtggcgacgggctcaattgcccccattctgacgctgtatgtccgcgaactggcgggtaacgtcagtaacgtcgcctttatcagtggcatgatcgcctcggtgccaggcgtggcggctctgctaagtgcaccacgactcggcaaacttggcgatcgaatcggaccccgaaagatcctgattacagcgctgatcttttctgtactggctgtgatcccaatacgccattttgagatgcgctctaaagaatctcgtcccagcgcatgggtgactccgaaaggggagtggggtaaaggcagcgttgagctggtggaaattccaaccaacgatgaaaccaacgataacatcgtcgcttactggacgccggatcagctgccggagccgggtaaagagatgaactttaaatacaccatcaccttcagccgtgatgaagacaaactgcatgcgccagataacgcatgggtgcaacaaacgcgtcgttcaacgggggatgtgaagcagtcgaacctgattcgccagcctgacggtactatcgcctttgtggtcgattttaccggcgcagagatgaaaaaactgccagaggataccccggtcacagcgcaaaccagcattggtgataatggtgagatagttgaaagcacggtgcgctataacccggttaccaaaggctggcgtctggtgatgcgtgtgaaagtgaaagatgccaagaaaaccactgaaatgcgtgctgcgctgcgcgtctggaacaagcctggccagaatcaccagcatctgggcaacggcttctacggtcaggtctacggtggttatctcgaaaccatgtttggcggtgcgggggcagaagtgttgtatcgcccgctggacagcaactgggcgtttggtctggatgccaactacgttaaacagcgcgactggcgtagtgcaaaagatatgatgaaattcaccgactacagcgtgaaaaccggacatctgaccgcctactggacgccatctttcgctcaggatgtgttagttaaagccagcgtcgggcagtatctggcaggggataaaggcggcacgctggagatcgccaaacgctttgatagcggcgtggtggtgggtggctatgccacgatcactaatgtttcgaaagaggagtacggcgaaggggacttcaccaaaggcgtgtatgtctcggtaccgttggatctcttctcgtctggcccgacacgcagccgtgcggcgattggctggacgccgctgacgcgtgacggtggtcagcaacttgggcccggttataccgacctgcttgttaactacacctaccgcatcgcttttgaaggcggcgggggtcaggacttcggtctggcggcagcaattgccacgctgatcttcctgctggtggcgattatgttcccgctgctgatggtcgtcgctatctcgctgcgtcagggaaactttgcgaccggcagcctgatcccggagcaaatctcctgggatcactggaaactggcgttaggttttagcgttgaacaggctgatggtcgcattacgccaccgccattcccggtactgctgtggctgtggaactcggtaaaggtcgccgggatttccgcgattggcattgtggcgctctccaccacctgcgcctacgctttcgcccgtatgcgctttccaggcaaagcgacgctgctgaaaggaatgctgattttccagatgttcccggcagtactttcactggtcgcgttgtatgcgttgtttgatcgtctgggtgagtacattccattcattggcctgaatactcacggcggcgtaattttcgcgtatctgggtgggattgcgctgcatgtctggaccatcaaaggctatttcgaaaccatcgacagttcgctggaagaagctgctgcgctggatggtgcgaacaccgtggcatgccttccgccttgtcctgttgccgctgtcagtaccgattctggcggtggtattcatcctgtcgtttatcgctgccattactgaagttccggtcgcgtcgctgttactgcgtgacgtaaacagctacaccctggccgtggggatgcagcaatacctcaacccgcaaaactacctgtggggtgactatgccgccgctgccgtgatgtctgcattaccgatcaccatcgtcttcttgctggctcaaacgctggctggtcaacggccctga

SEQ ID NO: 15957 - DNA, 768 bp, Homo sapiens
  SIMILAR (1)..(537): 1001254mologous to Escherichia coli No definition line found,accession number U00039,Smith-Waterman Score=907.
atgacgcaggaaaacgagatcaaacgtcccatccaggatctggagcacgagccgattaagccgttggataatagcgagaaaggcagcaaagttagccaggcgctggaaaccgtcaccaccactgccgaaaaagtccaacgccaaccggttattgcgcacctgattcgcgcgacagaacgctttaacgatcggctgggtaaccagtttggtgcggctatcacctatttctcatttttgtcgatgataccaattttgatggtgtcgtttgccgcagggggctttgtgctggcctcccatccgatgttgctacaggatatcttcgacaaaattctgcaaaacatcagcgatccgacgctagccgccacgttgaaaaacaccatcaacaccgccgttcagcagcgtacgactgtagggcttgtcggcctggcggtggcactttattccggcatcaactggatgggtaacctgcgtgaagcgattcgtgcccagtcgcgcgatgtctgggaacgctcgccgcaagatcaggagaagttctgggactttggtatcgaggcgggcgtggaaggtcagctcagcccaacctcttcacaaaacaacccgaaagagacgcacaacctgatggtgggcggcacagcggacaacggttttggcatgtcgactctagcaggatcccctgttgttcaggctggtcttagaactcctgaccttgtgactcgccctgtgcttaaggcaatacatatgtttgtgaataagcttgatttgggctag

SEQ ID NO: 15958 - DNA, 2058 bp, Homo sapiens
  SIMILAR (761)..(1093): 1001254mologous to Homo sapiens sperm membrane protein BS- 63,accession number U64675,Smith-Waterman Score=585.
atgaacaggaagaagaaggaggaggaggaagaagaaggaggaggaggaggaagaagaaggaggaggaagaaggaggagcagacgctggagcagggttttaatatcgcccgtaacgcggcgctgctggcagaagtaccacactctgtcccggcggttaccgttaatcgcttgtgtggttcatccatgcaggcactgcatgacgcagcacgaatgatcatgactggcgatgcgcaggcatgtctggttggcggcgtggagcatatgggccatgtgccgatgagtcacggcgtcgattttcaccccggcctgagccgcaatgtcgccaaagcggcgggcatgatgggcttaacggcagaaatgctggcgcgtatgcacggtatcagccgtgaaatgcaggatgcctttgccgcgcggtcacacgcccgcgcctgggccgccacgcagtcggccgcatttaaaaatgaaatcatcccgaccggtggtcacgatgccgacggcgtcctgaagcagtttaattacgacgaagtgattcgcccggaaaccaccgtggaagccctcgccacgctgcgtccggcgtttgatccagtaaacggtatgatgctgccacattgccagcttagcagcatgaggatctttgcgaatcagcgccttgaggatttgatcgtggtcatcacaccagttatcgacggtacgggaatcaatgtgttcgtgcagttttttccagtacgggttatgactacgctgggtccacattttttccacgatagccgccagggcggagttctgcgtcgccagagcgacctgaatgtggaactgcaaatcccactcggaatcacggaagcattgttcgccgcgcgcctgttcctgaatggccatcagtttcatgatgtcctgtttcgttacctgagttgccgcgaattcggcaatattactttcgatgagctggcgagcctgaagcaactcaaacggaccgtaattggcgaattccatattattgtcagccgcctgctgatggcgcggctgcatgatgatggcttcacgaactaccgtacggctgacgttcttttcatcggcaataaagcgttctgcaggcagtttatcacccaccagatagacgccctgttcgatgcgctctttcaggtccagataccagggacctaccagtcgacactgccagaatgcgacaacggcttagcgatggttcaacatttccggaaacaggcaaaaaggtttgtccaccctggggatccccccgctggtgcacggtttatgcgcgacaagctgcgcctgaccgccgtggtagccaatgaactggagatcatggacggtaaatttaccggcaatgtgatcggcgacatcgtagacgcgcagtacaaagcgaaaactctgactcgcctcgcgcaggagtatgaaatcccgctggcgcagaccgtggcgattggcgatggagccaatgacctgccgatgatcaaagcggcagggctggggattgcctaccatgccaagccaaaagtgaatgaaaaggcggaagtcaccatccgtcacgctgacctgatgggggggcagtgcagtgcctgtcatgcctggaacaccatcaccgaggtgcgtcttgctgcgtcgccaatggtggcgcgtaacgagcgtctcagcggctatgccggtagcgccggggtggcaaaagtccagaaactctccgatatcagccttgaagagctgccgcgtttttccaccggatttaaagagttcgaccgcgtactaggcggcggcgtggtgccaggaagtgccattctgattggcggtaaccctggtgcggggaaatccacgctgctactgcaaacgctgtgcaaactggcccagcagatgaatacgctgtatgtcaccggcgaagagtcgctgcaacaatggggctacgtcggtgctaaatcacgtcagcgctggctgttttacgcgtatgacaggatacggaggacggttgtggcgcacgtcttcggtgaacgcactctggccacactggagcgtcttctgagcctgctgtcggcctttgaggtcgtggtatag

SEQ ID NO: 15959 - DNA, 1857 bp, Homo sapiens
  SIMILAR (2047)..(2331): 601254mologous to Rattus sp. reverse transcriptase homolog,accession number S80119,Smith-Waterman Score=275.
atgaccttgtcatgcaactccaccgattttgagaagacagtaacttccgtcccagccttgccagatgttgtctcagattcagatatgtcgctcaatgcgctgagtgtaacgcttgctgataacgtgcagctttccttcaggcgtgattcatacagcggccagccatccgtcatctataccacacctcaaaggccgacagcaggctcagaagacgctccagtgtggccagaggcgttcaccgaagacgtgcgccacaaccgtcctccgtatcctgtcataccgagggctacccgacccgcatgtctggcccgtgaaagaatggcaatgtacatgaggccacagataaagaccattggaaaggctccggccgaagaggcgttgagtaaccccaggatgcaaggaccgcaactttcatctgcatccaccatcccagtcacgccattccactggttatttggcagccatgctgcaggtcattttagccagcatgcgcaccgaacagcgctcactgggcatttttcccatttggcaacaacattaaaaggccttgccttggaaggcaacgcaatcttcacaataactcggttcaccaggccatacggccacaagaacaccacaccacactctccgctgtgttctgctcctcattcccccatattcaattctcgtcgcaaagtgtatggccagcacgggccccaatggtgggcctttattcatagtcaccgcccaggggggtcatcacattccagcatcctgcattgctttgccctggtttgccccggattggttgtgcaacgggacacaccacatccaatcatccgacctgcattgtgccctcccattgcaatagccttctccctgtcactctggttgggaaatcccagcttcccatccggcacacagcatctccagggccccaaaacctttcaacagcaagcatcaccctcctcaaaagtttgtcccaaacgtctgatctgcacggtcattccccagcaacgggttgcatcacatcaccattttcacggccacaaccggtattaccaattgggacttccggtccaacattgcacgctgcaaggtgtcatcagggcaactcattttatcccccgcacagcgcgaaatcaaatttcccacgtctcgtggggcgcaggtccagcacacagtgattcccaaggaaaacaggatctggagacgagccgattaagccgttggataatagcgagaaagccagcaaagttagcaggcgctggaaaccgtcaccaccactgccgaaaaagtccaacgccaacggttattgcgcacctgattcgcgcgacagaacgctttaacgatcggctggtaaccagtttgggggctttgtgctggcctccctccgatgttgctacaggatatcttcgacaaaattctgcaaaacatcagcatccgacgctagccgccacgttgaaaaacaccatcaacaccgccgttcacagccatttggttccggctggggctgatggcatttttctacttcttcgcccgtttgacgctgtttgcgcggcgtggattgccaccgccgaatataaagactaccccggaatgccgggaaaaacgcaccttaaaatacgcctgatgcggcgtgaacgccttattggcatacgattttattcgggcctgctccccggtactaaggcgccctattcgcgcacactggcctttaagcgagtcctacataccgcactttcacttcatcttggtcttggaaaaacctgtacaactggatttgaactatgctccttaaccttattggaatacgcttcaaatgcctttacatattggcctgattggcacataaacagaattaaaaacaaaaattag

SEQ ID NO: 15960 - DNA, 725 bp, Homo sapiens
gcgcgattgcaaagaacctttcaaagactccggcgttttatctggagcgggacggggatggtcgtctttttttagccagatgtcagtgtccacatagacaattactttccggcgtgtccagggagggcgagttatttttatttgcgaaagggaccgaaaaggtccggaattgggtcaatttccctccatccaggaagggtttgtaccagaatcccataatggtggtgtgtgtgttcttatctggttaagagaaagtgaaaaaaacacagcgaaaagaaatcgaaaatgtgaccaatatcacaggtgttcgtcaaattgagttatggcggcgtgatgatttacaacacccacggttagatgaggtcgcggaagaagttcccgttgcgctggtctacaacggcatttcgcatgtggtgatgatggcgtcgcccaaagaccttgagtactttgcgctcggtttttcgctttccgagggcgatttatcgaaagtccgcgcgatatcttcggcatggatgtcggtgttccctgtgcctgtaatggtcttgaagagcgccgccgggcgctggacggggtaccgtagcgggctgtggcgtatgcggcgtggagcaacgttgaatgacatcggaaaaccggtgcagccgctagccgttcacccagacgttgatctcaacaaactggatgatgcattacgtcatctcaacgattttcagccagtgggcaactga

SEQ ID NO: 15961 - DNA, 408 bp, Homo sapiens
  SIMILAR (272)..(388): 641254mologous to Mus musculus tex292,accession number X80433,Smith-Waterman Score=149.
ccagatgggaattggctagctgcatcaggtaccagtgctggagtccatgtctacaacgtaaaacagctaaaggtatttgagtacagcatcccagacaaacagtatacagattggagccggactgtccagaagcagggctttcaccacctttggctccaaagggatactcctatcacacacatcagttttcatcccaagagaccgatgcacatccttctccatgatgcctacatgttctgcatcattgacaagtcattgccccttccaaatgacatcattgctcagctcccaccacccattaaaaagaagaaatttggaacctaaaacagggcactgtctgtgtccttccttgaactgtctaccctgttgcttttcacaaatcatggtaataaaacaagttattcttga

SEQ ID NO: 15962 - DNA, 905 bp, Homo sapiens
  SIMILAR (863)..(1051): 661254mologous to Homo sapiens Human secreted protein, SEQ ID NO: 7083,accession number G03002,Smith-Waterman Score=192.
cttgattcctgatattgtcaggggccttttaacattatctgtagctgtatctccccatgtggaagatggatagcctattctacaggttctcggttttttctctatcggctgaattatgaacatgacaacatacgcctcaaaagggtttccaaaatgccatcattccttcgctctgcccttcagattttgatttctgaaaattcaacaaagctctttgtagcatcaaatcaaggagctctgcatattgatcagctgtcaggaggaagcttcaagcacctgcatgctttccagcctcagtcaggaacagtggaggccatgtgtcttttggcagtcagtccagatgggaattggctagctgcatcaggtaccagtgctggagtccatgtctacaacgtaaaacagctaaagcttcactgcacggtgcctgcttacaatttcccaagtgactgctatggctattgcccccaattacccaacaacctggtcatcgctcatttgggaccagccaggtattttgagtacagcatcccagacaaaaccagtatacagattgggagccggactgtcccagaagcagggcttttcaccacctttggctccaaagggatactcctatcacacacatcagttttcatcccatgagaccgatgcacatccttctccatgatgcctacatgttctgcatcatttgacaagtcattgccccttccaaatgacaaaaccttactctacaatccatttcctcccacgaatgacatcattgctcagctcccaccacccattaaaaagaagaaatttggaacctaaaacagggcactgtctgtgtccttccttgaactgtctaccctgttgcttttcacaaatcatggtaataaaacaagttattcttgaaaaaaaaaaaaaaa

SEQ ID NO: 15963 - DNA, 1057 bp, Homo sapiens
  SIMILAR (901)..(1017): 641254mologous to Mus musculus tex292,accession number X80433,Smith-Waterman Score=149.
gagatggctgcactccagcccgagtgacagagctagactccatctcaaaaaaaaaaaaacaaaaaacagaaaaaaaaccatttggtaggaaaggagtttgaaacaattaaagtatatattttagtggcagatgctgccgtcattctctattcctgtagtaagcagtgtcttaggcctgaggaagtaataacttctgttttatctctctggaccttctttacaggcgggatggttaaataagtagatgaaaaaagtagaaacattaacatctagaagtaatttgcacagtgatcagcaaattatcctggcagtgatttaaaactctaatggtctccttggcttttgccatcatctccagggcaggtctggctgtggacactgtgtgaattcagagatgtaactgttttgtcctcacaggaacagtggaggccatgtgtcttttggcagtcagtccagatgggaattggctagctgcatcaggtaccagtgctggagtccatgtctacaacgtaaaacagctaaaggtatttgagtacagcatcccagacaaacagtatacagattggagccggactgtccagaagcagggctttcaccaccttgggccccaaggggatacccctatcaacacaacatcaggttttcatccccaagagaccgatgcacatccttctccatggatgcctacatgttctgcatcatttgacaagtcattgcccccttcccaaatgacaaaaaccttactcctacaatcccatttccctccccacgaatgaatcagatgtcatccggatgcgcacatttcatgcttttaaaatttctaagagatataagcgcgtctactcttcatggatcttttggatgaaagaacactcgtggcagtagaacggcctttggatgacatcattgctcagctcccaccacccattaaaaagaagaaatttggaacctaaaacagggcactgtctgtgtccttccttgaactgtctaccctgttgcttttcacaaatcatggtaataaaacaagttattcttgaaaaaaaaaaaaaaacaaaaa

SEQ ID NO: 15964 - DNA, 1011 bp, Homo sapiens
  SIMILAR (178)..(288): 1001254mologous to Homo sapiens putative protein-tyrosine kinase,accession number AF116826,Smith-Waterman Score=187.
atgcgccgcacgggatcgctgaacattgcgcgtaaaacaccgatcgtaatgggcatgttgctgtcgatggtgatggtgttctgcaactacgtcaacgttgagtggatgatcatcggctttatggcgctggccttcttcggtaagggcatcggggcgctgggttgggcagtaatggcagataccgcgccaaaagagatcagcggtctttccggtggcctgttcaacatgttcggtaacatttctggcatcgtcacgccaatcgcaattggttatatcgttggcacgactggctcgtttaatggggcgctgatttatgttggtgttcatgccttaatcgcggtactgagctacctggtgctggtgggcgatatcaagcgtatcgagttgaaaccttgttctactggcggagatgtgattcatcgaagctgggggaggcttgttttgattgacctgcgctctaaagctgataaagccatttggttaggctggagtctgggcgggctggtggcaagccagattgcgttaacccatcccgagcgtgttcaggcgctggtcaccgtggcgtcgtcaccttgttttagtgctcgtgacgagtggccggggataaaaccggacgtgctggcgggatttcagcagcaactcagtgatgattttcagcgtacagtggagcggttcctggcgttacaaaccatggggactgaaacggcgcgccaggatgcgcgggcgttgaagaaaaccgttctggcgttaccgatgccggaggttgacgtgcttaatggcgggctggaaatcctgaaaacggtcgatctccgtcagccgctgcaaaacgtgtccatgccgtttttgcgattgtatggctatctcgacggtctggtgccgcgcaaagtggtgccgatgctggataaactttggcctcacagcgaatcatatatcttcgccaaagcggcccatgcgccatttatttcgcatccggccgagttttgtcacctgctggtggcgttgaagcagaag

SEQ ID NO: 15965 - DNA, 631 bp, Homo sapiens
  SIMILAR (517)..(822): 991254mologous to Homo sapiens NDRG4-Bvar,accession number AB044945,Smith-Waterman Score=529.
agcggtctttccggtggcttgttcaacatgttcggtaacatttctggcatcgtcacgccaatcgcaattggttatatcgttggcacgactggctcgtttaatggggcgctgatttatgttggggttcatgccttaatcgcggtactgagctacctggtgctggtgggcgatatcaagcgtatcgagttgaaacctgttgcggggcaataagatggcgacacaatccagtcctgttattactgatatgaaagtcattccggtggccgggcatgacagcatgttgcttaatattgggggggcacataacgcatatttcacccgcaatattgtggtactcaccgataacgccgggcataccggcattggtgaaacgccgggcggagatgtgatttatcagacgcttgtcgatgcctattcccatggttctgggccaggaagttgcgcgactgaataaaatggtcccgcaggtgcataaaggtaatcaggccgccgattttgataccttcggtaaaggtgcctggacctttgaattacgcgttgaggccggggcggggcttgaagcccgtttgcttgacctgctaggtaaggcgctgaatgtttcgggctgcgaactgttagggcatggcagccc

SEQ ID NO: 15966 - DNA, 1120 bp, Homo sapiens
  SIMILAR (273)..(743): 601254mologous to Homo sapiens syld709613 protein,accession number AF159092,Smith-Waterman Score=499.
cggtgcgcgtcaacagcagaaattcgtcctgatcgcgggcggttttccatagcaactgttgtaaacgaatgcggttatcggcagggaattcaggaatgttcaggagtgtatcgggctgcataccgctggcttcgctaatgcagtaaccaaacatttcggtaaatgcgcgattgcactgcacaatatggcgttccggatcgaggacaatcaccggtcggtcgagatggtcaacggcaataatcaattgtcgggtctgttctttttgcgccatttctacgctggcatcccgtaccagcgccaggtaataaactttcccctcggcgctcactttcgatagcgcaaaacgggtccagattttactgccgtcttttttcttcagctgcagctcccgacttatcccctcaacacgcgctttaccgccttcacgggtgtgacgaatgtattcaggatgcgcaggacgcaaatcccgcggaatcagcatatcaatgttattgccaatgacttcttcacgtttgtatccccagagcttctctcgtcttttggcgatatacagagcttcatcggctatttgaatgaggcgctcatagtcaggatgaccattaaacatggcggcaccgatggaaagtgagagggcaatatcttcgccgtttgcggctttcagtttggttttctccacccgactgcgaatacgttctgcggtacgtaacgtttcgttttcagaagcttcagtcaaaacaatgataaattcatcgcccccgtagcggaaaacataatcactactgcggacgttgtcataaaaggcctgagagactttacgcagaatttcatcaccagtgttatggccccacgtatcgttgatctctttgaatttatcaacgtcaataatcagcactgacagcggtgtaccggtccggttggcatgggcaatttcgcgtttgaagatagtcggtaggaaacggcggttaagtaatttcgtcagtacatccataccgacttcgtggcgcgatacttcttcaaacaattcacgcagcaaggtaataatttgcgatacggtatttcttatctgtaataaaaatttcacccgcagacttctgttattcaaatttctggtgttacgcat

SEQ ID NO: 15967 - DNA, 910 bp, Homo sapiens
  SIMILAR (663)..(806): 1001254mologous to Homo sapiens NDRG4-B,accession number AB044944,Smith-Waterman Score=251.
gttctgggctgctaacgaagggggacgcagtgctagtatcgtagtcttcagcgctataggtgtacgatgcaccatgattatcgaccacggcaattttgtctggcatcgcacgagcggtctgctgccagtaatcggccagcgaagcatcgccccataacccttgctgacgatacgccgcacgacgttgttcgttaaacgttaatgtcactttcatgttggactctcgaaacagaacatcaggcccgagatgcgggcctcgtcttttggcgatatacagagcttcatcggctatttgaatgaggcgctcatagtcaggatgaccattaaacatggcggcaccgatggaaagtgagagggcaatatcttcgccgtttgcggctttcagtttggttttctccacccgactgcgaatacgttctgcggtacgtaacgtttcgttttcagaagcttcagtcaaaacaatgataaattcatcgcccccgtagcggaaaacataatcactactgcggacgttgtcataaaaggcatgctcgcccagcggcgtgaggttatattccacatgcgcaggcaccgccggatacgcgatacggttaagaaacccatcatgttctaacgcatgtaagtactgcgcaagcatcttttcactcaccccacagattttgcgccgcaggtcgctaaagcgatgagtaccttcgcgtagcgccaccagaatcaacaccccccaacggctggtgacgtgtttcaacacctcgcgcgacgggcactgttccgcaaagagattaccctctttcagttgttgcgacaggctaacctgactcatttcatacttacctttttgtacgtacttactaaaagtaagtttaggtgttagcgtatttaaacacaagacaaaacgatggagacttcccat

SEQ ID NO: 15968 - DNA, 1737 bp, Homo sapiens
  SIMILAR (418)..(549): 861254mologous to Rattus norvegicus p62 dynactin subunit,accession number AF192493,Smith-Waterman Score=193.
aggatcagatgaggtgatgcagtgtgaaaaagccatgctggatgtgacagagggctacacaaagcacatccctaatgccttttcctccatgaagtcttatccgagctcccatctagaggtaatctacaaacacctctacgcaaataaactagaaaatctagaagaaatggataaattcctcgacacatacactctcccaagactaaaccaggaagaagttgaatctctgaatagaccaataacaggagctgaaattgtggcaataatcaatagcttaccaacaaaaaagagtccaagaccagatggattcacagccgaattctaccagaggtacaaggaggagctgcatataaacagaaccaaagacaaaaaccacatgattatctcagtagatgcagaaaaggcctttgacaaaattcaacaacgcttcacgctaaaaactctcaataaattgggtattgatgggacatatctcaaaatcgacgttgagctgctgcttgagggccatgcactgtacaataaaaatgatcccatcgacaactttctaaaacatacactgccttcagattttacagctccagccactctgttttcaggggatcctctagagtggactgcagacagcagtgaccgctctctcggttcaaaaggtgtgttcacctttgacccaggcttcacttcaaccgcatcctgcgaatctaaaattacttttattgatggtgatgaaggtattttgctgcaccgcggtttcccgatcgatcagctggcgaccgattctaactacctggaagtttgttacatcctgctgaatggtgaaaaaccgactcaggaacagtatgacgaatttaaaactacggtgacccgtcataccatgatccacgagcagattacccgtctgttccatgctttccgtcgcgactcgcatccaatggcagtcatgtgtggtattaccggcgcgctggcggcgttctatcacgactcgctggatgttaacaatcctcgtcaccgtgaaattgccgcgttccgcctgctgtcgaaaatgccgaccatggccgcgatgtgttacaagtattccattggtcagccatttgtttacccgcgcaacgatctctcctacgccggtaacttcctgaatatgatgttctccacgccgtgcgaaccgtatgaagttaatccgattctggaacgtgctatgaccggatgattttactgacggccgaagtatcgcgccacgaagtcggtatggatgtactgacgaaattacttaaccgccgtttcctaccgactatcttcaaacgcgaaattgcccatgccaaccggaccggtacaccgctgtcagtgctgattattgacgttgataaattcaaagagatcaacgatacgtggggccataacactggtgatgaaattctgcgtaaagtctctcaggccttttatgacaacgtccgcagtagtgattatgttttccgctacgggggcgatgaatttatcattgttttgactgaagcttctgaaaacgaaacgttacgtaccgcagaacgtattcgcagtcgggtggagaaaaccaaactgaaagccgcaaacggcgaagatattgccctctcactttccatcggtgccgccatgtttaatggtcatcctgactatgagcgcctcattcaaatagccgatgaagctctgtatatcgccaaaagacgaggtagaaaccgtgttgaactctggaaagccagtctttag

SEQ ID NO: 15969 - DNA, 440 bp, Homo sapiens
  SIMILAR (200)..(48): 361254mologous to Bovine herpesvirus 1 UL36,accession number Z78205,Smith-Waterman Score=79.
cacatgctagtgcatgcgcgacgattagtatgacctggatgatcctctgcctggcagtggcggtggactgtcgcttctttgggattgcttactttaacgatcatccggcgttggctggtgcggtaaatcagaacgccgagcgtgtgtttatcgaactggcgcaaattctgtttaacccgtggattgccgggattctgctgtcggcaattctggcggcggtaatgtcaaccttaagttgccagctgctggtgtgctccagtgcgattaccgaagatttgtacaaagcgtttctgcgtaaacatgccagccagaaagagctggtgtgggtagggcgtgtgatggtgctggtggtggcgctggtggcgattgcgctggcggcaaacccggaaaaccgcgtgctgggcttagtgagctacgcgtgggcaggctttggcgcggcg

SEQ ID NO: 15970 - DNA, 564 bp, Homo sapiens
  SIMILAR (1)..(519): 351254mologous to Escherichia coli O157:H7 suppressor of ftsI,accession number AE005531,Smith-Waterman Score=241.
gttcaggataagaaatttagcgccgacgggcagattgattatcaactggatgtgatgaccgccgccgtgggctggtttggcgatacgttgctgaccaacggtgcaatctacccgcaacacgctgccccgcgtggttggctgcgcctgcgtttgctcaatggctgtaatgcccgttcgctcaatttcgccaccagcgacaatcgcccgctgtatgtgattgccagcgacggtggtctgctacctgaaccagtgaaggtgagcgaactgccggtgctgatgggcgagcgttttgaagtgctggtggaggttaacgataacaaaccctttgacctggtgacgctgccggtcagccagatggggatggcgattgcgccgtttgataagcctcatccggtaatgcggattcagccgattgctattagtgcctccggtgctttgccagacacattaagtagcctgcctgcgttaccttcgctggaagggctgacggtacgcaagctgcaactctctatggacccgatgctcgatatgatggggatgcagatgctaatggagaaatatggc

SEQ ID NO: 15971 - DNA, 1065 bp, Homo sapiens
  SIMILAR (398)..(1168): 891254mologous to Homo sapiens 11-JUN-1998 Human receptor tyrosine kinase cDNA,accession number Z29331_cd1,Smith-Waterman Score=1142.
cttgagggtgtccagaagaaacttacatgtcatttggttaaaacttgtcatggcttcctgaagtttctcaccgttttggattataacgtgcaggcaacgagttgccaaatggaacacgtggaactcgctgcctgcagtcaagagatcttttggctaaaaagtgaaatctctgaaggatgcaaagcgttttccaatcgggaaaaagtggaagcggcgatggcggagctgaattacattcccaaccgcgtggcacaacaactggcgggcaaacagtcgttgctgattggcgttgccacctccagtctggccctgcacgcgccgtcgcaaattgtcgcggcgattaaatctcgcgctgatcacactgggtgccagcgtggtggtgtcgatgacgtgcaggcaagcgagcttggcagccggcagcatcttgagttttacctgcgtcatcgcaccggtgacatcatggctcgtgcgaccaatgacgtcgatcgcgtcgtgtttgccgccggagaaggggtgctgacgctggtggattcactggtgatgggctgcgctgtgttgattatgatgtctacgcaaattagctggcagttgaccttattttccctgttgccgatgccagtgatggcgatcatgattaagcgcaacggcgatgctttgcatgaacgctttaagctggcacaggcggcgttttccagtcttaatgaccgcacccaggaaagcctcaccagtatccgcatgatcaaagcctttggtctggaagatcgccagtcggcgttatttgccgcggatgccgaagataccggcaaaaaaaacatgcgggtggcgcgtattgatgctcgtttcgacccgaccatctatatcgcgattggtatggcgaacttgctggcgattggcggcggtagttggatggtggtgcagggcagtttaacgctgggccagctcaccagttttatgatgtatttaggtctgatgatttggccaatgctggcgctggcatggatgtttaacagacttgcaggcagcgagtgtgcaacgagttggacaaggagagaagcccaagtctaa

SEQ ID NO: 15972 - DNA, 568 bp, Homo sapiens
  SIMILAR (289)..(591): 991254mologous to Homo sapiens ribosomal protein L12,accession number L06505,Smith-Waterman Score=510.
ggaagtagcagcaaatgggtgctcctcagtggacaacaaaatgtttatatattcacagagagatcgatgtcttattgtgatgagtctcgactgtcatatcttcttcggaggatcacccgggaaaacgaccgagaccgaagattggctactgtaaagcagttgaaagaatttattcagcaaccagaaaataagctggtactagttaaacaattggataatatcttggctgctgcacatgatgtgcttaatgaaagtagcaaattgcttcaggagttgagacaggagggagcttgctgtctcggccttctttgtgcttctctgagctatgaggctgagaagatcttcaagtggatttttagcaaatttagctcatctgcaaaagatgaagttaaactcctctacttatgtgccacctacaaagcactagagactgtaggagaaaagaaagccttttcatctgtaatgcagcttgtaatgaccagcctgcagtcaattcttgaaaatgtggatacaccagaattgctttgcaaatgtgttaagtgcattcttttggtggctcaatgttacc

SEQ ID NO: 15973 - DNA, 713 bp, Homo sapiens
  SIMILAR (145)..(465): 561254mologous to Homo sapiens BC85722_1,accession number AC006486,Smith-Waterman Score=273.
ctctggtagattcggctgtgaatccatctggtcccggattttttttggttggtaagctctaattattgccacaatttcagagcctgttattggtctattcagagattcacttctttctggtttagtatccccacagatggggttcaggctgccggacacaactgggtgatgccagggcagtggtcacctgtgccagccctgtgaggtagctggaggatcattgttccttccttctcgggctcggtctggaagtcccagcggggaaccttcagatcatcatcaaagcttccatcaagagtgttgttgtctggattgactgtctcagagccagagactaatcgccctctgactgtcctccagatcttcactgcctccttcaagttttttcccatttcagctaacgtggggttgctatatccctgggtcaaagcaaatcccatgggtacatccactttcaagtggcccagagagaacctgaaatactcggtggactccattaaggccgtcagatggtgtagcctgcatgggagacttatgtgatagtaaatgtaaagggatttaaagcagtggttttcagccccagaggcctgagtgagtttgggcacactctgtgtgatcgggcagaaggctgtgggaagtttagctttgatgtcatgggaaccaacccctagacccatgggcctgctttctacttccagaactttatatagcat

SEQ ID NO: 15974 - DNA, 1305 bp, Homo sapiens
  SIMILAR (120)..(323): 331254mologous to Hylobates syndactylus dopamine receptor D4,accession number AB032904,Smith-Waterman Score=85.
ttagctgaaagcatagggcattatagagcatagtggggacttggggaacctgccactggagaggacttaggaccttttaatggcagaaatgatgactgtgttggcagcagttcatcagtgcccagtactcaagggtccccctgagaagccagtggttgcactgatggggctggcacaggtgaccactgccctggcatcaccagctgtgtccggcagcctgaaccccatctgaaatactcggtggactccattaaggccgtcattggtgtcagcctgcatgggagacagcttattttctgttgctgaataaattctttcaactgctttacagtgaccaatcttcagtcctgtcgtcttcccgggtgatcctccgaagaagatttgacagtcgagactatcacaataagacatcgatctctcttgctctacctttccctgggctcttggggggcctatatccaggtagctccaaagggccccccctggttctttgttttgtacatgatcagatgtggcgctatctccaactgtctttgcacttctgctttgtctatttcgttctttcatagatgtgttgagtttgccatgttcaactagtgcactgtggaactcgtattcgacaagcattggaaaactgttgaaatcaattcctttagatgttatcccacacagctctttctggctggcatgtttacgcagaaacgctttgtacaaatctcggtaatcgcactggagcacaccagcagctggcaacttaaggttgacataccgccgccagaatgccgacagcagagtcccgcaatcacgggtataacactcaataaacttcttgaataagagggcccccttcactggttcagtagcagaccaccgtcgctggcaatcacatacagcgggcgattgtcgcgggcagatctgatgtggatcgccaccatggtgctgattgccgttgtggtttatctccgcgttacgtctggcgggtattgctgtttggtgcgtcttatcaactggctttgaacagatccgcatgatcaaagcctttggtctggaagatcgccagtcggcgttattgccgcggatgccgaagataccggcaaaaaaaacatgcgggtggcgcgtttgatgctcgtttcgacccgaccatagggtggccaagttcccttgggcttcttttttccaaccgaaccccttgggttccctttcctttcttctttcaagttcctcaattcgcacaccttcatccggggaatccttatttggaaaactttccccttttggatttttccttttccggcgtcttcttgg

SEQ ID NO: 15975 - DNA, 759 bp, Homo sapiens
  SIMILAR (1)..(756): 1001254mologous to Escherichia coli polynucleotide phosphorilase,accession number J02638,Smith-Waterman Score=1267.
gttcgtaaattccagtacggccaacacaccgtgactctggaaaccggcatgatggctcgtcaggctactgccgctgttatggttagcatggatgacaccgcggtattcgttaccgttgttggccagaaaaaagccaaaccaggtcaggacttcttcccactgaccgttaactatcaggagcgtacctacgctgctggtcgtatcccgggtagcttcttccgtcgtgaaggccgcccaagcgaaggcgaaaccctgatcgcgcgtctgattgaccgcccgattcgcccgctgttcccggaaggcttcgtcaacgaagttcaggttatcgccaccgtggtttctgttaacccgcaagttaacccggatatcgtcgcgatgattggtgcttccgcagcgctgtctctgtctggtattccgttcaatggcccgattggtgctgcccgcgtaggttacatcaatgaccagtacgtactgaacccgactcaggacgagctgaaagagagcaaactggatctggttgttgccggtactgaagccgctgtactgatggttgaatctgaagctcaactgctgagcgaagaccagatgctgggcgcagtagtgttcggtcatgaacaacagcaggttgttattcagaacatcaatgaactggtgaaagaagccggtaaaccgcgttgggactggcagccggagccggtaaacgaagcgctaaacgcgcgcgttgctgcactggctgaagctcgcctgagcgatgcttaa

SEQ ID NO: 15976 - DNA, 1194 bp, Homo sapiens
  SIMILAR (2007)..(1567): 1001254mologous to Escherichia coli Alkyl hydroperoxide reductase F52a protein (EC 1.6.4.-) ,accession number D90701,Smith- Waterman Score=741.
atgaccgttgttgttaagaaacagtgtttcaggacaggatggagtttaatgcctcacaattgctgtattctttcccgccccccagtgcccagagatgttctccataccatgccacactgccagggatggggaaagggcagcatcgatgattcaagactatattttctgcttcttcagtgcctcttttatgaagttaaaaccagaacgcatgcattctcacgaacgagcacagacatcagacatgctaaaagattgtcggaggcacctaccgatcgggattttaatggcaggtggaatgttcgccgtcctccgaaagaagcatcaaggccagaccttcatagagaggcccaggatatctttgacgtgcatgttgccatcatgggccacgttcctctggctgtttactcggattggccaggttttggtcacatgcttactcatgagcagggaatgcttcgtcaacgaattcaggttatcgccaccgtggtttctgttaacccgcaagttaacccggatatcgtcgcgatgattggtgcttccgcagcgctgtctctgtctggtattccgttcaatggcccgattggtgctgcccgcgtaggttacatcaatgaccagtacgtactgaacccgactcaggacgagctgaaagagagcaaactggatctggttgttgccggtactgaagccgctgtactgatggttgaatctgaagctcaactgctgagcgaagaccagatgctgggcgcagtagtgttcggtcatgaacaacagcaggtcgactctagaggatccccaatcaaagggaacaggacgtgtgataattacattgtgattgaaggacttatagattacgtgaacgatatgattgagaacgtgtcggaagaggctttttgtgtggagaacagaattatgagacactctgatcatcactcgtgcatagtggttcggtgtctgagcctgttcgcgctcgatctcgtgctcgtggtcattgctgtatctgtcgtgaatccgtgtctgctcgaggtcacgcgactgcgtgccgcttcgatcgtctcgcagcctaacctcaacatctcagacacatggggaattggggcaattctatacggcgcatatacgtgttcatgtattgcagatcctcacaaaatgatgagttcagggccgatgtatagccatagttgtgtcgagaaatga

SEQ ID NO: 15977 - DNA, 1521 bp, Homo sapiens
  SIMILAR (409)..(1329): 961254mologous to Escherichia coli K12 putative transport protein,accession number AE000314,Smith-Waterman Score=1526.
atgtctgaccataatccactgacattaaaactgaatctgcgggaaaaaatcgcctatggtatgggcgacgtcggttcgaatttaatgctctgcatcggtactctgtatctcctcaaattttataccgatgaattagggatgcctgcttactatggcgggattatctttctggtggcgaagttttttaccgcgtttaccgatatgctcaccggatttttactcgactcgcggaaaaatattgggcctaaaggcaaatttcgtccctttattttatatgcagcggttccggcggcgttaattgcaacgctccagtttatcgccaccaccttttgtttgccggttaaaacgacgattgccaccgcgctgtttatgatgtttggactttcatacagtctgatgactgatcctttttatgagcaccgcttgcttgacgccgtggtgaagaaaaaccgtgtgcgtttaattccgtatatgttggcgctgtatgtgctggcgtttctcgaccgttcgaatatcggtttggccaaacagacctaccagattgataccgggttgagtaatgaagcttatgcgctgggagcaggcattttctttgtggtatatgcgtttctgggtgttccggcgaatcttttgatgcgcaaactgggggccagaacctggattggtacgacaacactgctgtggggatttctttcggcagccatggcatgggccgatactgaagcgaaatttctgatagttcgcactctgcttcgtgctgcggaggccggatttttccctggtatgatttatctcacctcgcaatggtttccgcagcgtaatcgcgccagcattatggggctgttctatatgggcgcaccgctggcgttaacactgggatcaccgctttccggcgcgctgttggagatgcatggatttatggggcatcccggctggttctggatgtttgtgattgaaggattgttggcagtcggtgctggggtattcacattcttttggcttgatgacacaccggagcaggcacgttttctgagtaaacaagaaaaaacgttgcttatcaatcaactggcaagtgaagaacaacagaaagtgacttctcggctgagcgatgcgctgcgtaatggccgagtctggcaactagcgattatctacctgaccattcaggtggcggtttacggattaattttcttcctgccgacccaggttgcggcattgctgggaacaaaagtgggctttacagcgtcggtggtcaccgccattccgtgggttgcggccttgtttgggacctggcttattccgcgctattccgataaatctgccgccaaacgatatacacgcccccacagagaatgcggatatttttcggcgccttaccatccacctaaaaaggttcgaaacaacgccccccactcagggcctgggccaatatgtttaatacgcttacgggttcgagttcggccaaaccttggcatcgaggtatacaaacacgacagcccacctaacaacgctgctccctcttga

SEQ ID NO: 15978 - DNA, 822 bp, Homo sapiens
  SIMILAR (1715)..(1191): 921254mologous to Escherichia coli yejR,accession number U00008,Smith-Waterman Score=787.
ttagtcataggacgccatttcaccgagccagcccgtaagtttgctctgctgctctttattatccgcgccgagaataaagtccatcgccgattgggtatccagttcactctcgatggtagcggcatacatagccttcactatcgcgctctggagctgggtattttgcagggtatcgagcattttcatatgctccatcacgctgtaaaacgcattggccccacgggtctgtccatcctccatcggtttgaatacatggataaatgaaggtggaccgccgggtagttcgcgaggaatgtaggtccagttccgcgccatccagccgggataaccatcgtcgctgacgtaatatcccagcgcagcaccgctatcatttattttcacaccggcgcgacagttccgggaatcgcacttcacacttcttggcccattcttctccctttttatgtcaaaattcaagacagcggaattcaggggatccttctttctgatctccctcatctgcttaactgcttctttgtttccaaggcacttatcccgttcttgcgtgatgacgtgaaattctccaacggtgacccgttcgatgccgaggcggcggcagaaaacttccgcgcagtgctcgataaccgtcaacgtcacgcctggctggagcgtggcctctttcaagcggtagaagtcgatgtgcaggtaggcattgatgccattggaggctccgggcactgtgacgccatggaccaggagcacgaacagcacgaagtaaggcagcgtggctgtgatccacaccacctttgtgctctcccctttccccatcagtcctgtgtccat

SEQ ID NO: 15979 - DNA, 1865 bp, Homo sapiens
  SIMILAR (877)..(1653): 991254mologous to Escherichia coli MukB,accession number D31701,Smith-Waterman Score=1303.
atgacagacttaatccaacgccctcgtcgcctgcgcaaatctcctgcgctgcgcgctatgtttgaagagacaacacttagccttaacgacctggtgttgccgatctttgttgaagaagaaattgacgactacaaagccgttgaagccatgccaggcgtgatgcgcattccagagaaacatctggcacgcgaaattgaacgcatcgccaacgccggtattcgttccgtgatgacttttggcatctctcaccataccgatgaaaccggcagcgatgcctggcgggaagatggactggtggcgcgtatgtcgcgcatctgcaagcagaccgtgccagaaatgatcgttatgtcagacacctgcttctgtgaatacacttctcacggtcactgcggtgtgctgtgcgagcatggcgtcgacaacgacgcgactctggaaaatttaggcaagcaagccgtggttgcagctgctgcaggtgcagacttcatcgccccttccggcgcgatggacggccagtacgatgtcttcgtccgtaacgaaaactactggggcgaaaagccagcgattaaaaagatcacctttaacgtcatcccggacccgactacccgcgcggtggcgtttgaaactggcgatatcgacctgctgtacggaaacgaagggttattaccgctcgataccttcgcccgctttagccagaatccggcttaccacacccaactgtcacagccgatcgaaaccgtgatgctggcgctcaataccgccaaagcccccaccaacgagctggcagtacgtgaagctcttaattacgcggtaaacaaaaaatcgctgattgataacgcgttgtatggcacccagcaggtcgccgacaccctgtttgccccttctgtgccctacgccaacctcggcctgaaaccgagccagtacgatccgcaaaaagcgaaagcgttgctggaaaaagccggttggacgctgcctgcgggcaaagacatccgcgagaaaaatggtcagccgctgcgcattgaactttcgttcatcggcaccgatgcgttaagcaaatcgatggcggaaatcattcaggctgatatgcgccagattggcgcagatgtctcgctgattggagaagaagagagcagtatctatgctcgtcagcgcgacggccgttttggcatgattttccaccgcacctggggcgcgccatatgatcaaaggccttctcagtcaaagcgcgtacggcaacgctgatttcaggcacagcaggattaaatgaagaagcctacacaaagcaaatggaaccgtgctacgcgagtgcggggcggcagagagattctcacaaaattcgtgctcaccgcaccgttgaaatggctaaagcgttcgaacagcagacgggtcagttttgccggatagcttaccgctggcgcgtcatcgaatttatcgcccgcatggtagctgatacccgcttcggtggtgttagagaaaacaaagcgcatttccgggttgtgcgccagtttcaggaattcatcgtattcactgtagatgaaaatgatcaacacgtcctgaccggtgcggtggtgatgttgcgatcaacgattcgtatgggccgccagttgcaaaatgtcgccgcccaggacgtcagcgccttcagtcaaattgtcgccgtcagcccgaaaatgaagcatgttgtcgaacaggcgcagaaactggcgatgctaagcgcgccgctgctgattacgggtgacacaggtacaggtaaagatctctttgcctacgcctgccatcaggcaagccccagagcgggcaaaccttacctggcgctgaactgtgcgtctataccggaagtttggaacctggctaggatttcagtcagttaa

SEQ ID NO: 15980 - DNA, 1429 bp, Homo sapiens
  SIMILAR (919)..(1167): 1001254mologous to Escherichia coli NikA,accession number X73143,Smith-Waterman Score=424.
atggctcgagtcgactctagaggatccccgcacacgctttccccgctaccggagatcatctatggcgaacaaggcaaacctgcatttgcgccggaaatgccgctatggttcaacttaagccatagcggtgaccgatatcgccctgctgttgagtgatgaaggcgaagtcggctgcgatatcgaagtgattcgcccgcgcgccaactggcgctggctggcgaacgccgtattcagcctcggggaacacgctgagatggacgccgtgcatcctgatcagcaactggaaatgttctggcgcatctggacgcgcaaagaagccatcgttaaacagcgtggcggcagcgcctggcaaatcgtcagcgtagacagcacctatcactcctcgctgtcagtcagccattgtcagcttgaaaaatttaagccttgcgatctgcacccctactccctttacgctcaccgccgacagtgtgcaatggatcgattcagttaactgatccgcccacccgaatgcccatctattgatccagaacaggtaatcagtatgagaaatgcttaaaatcgtcatacttatttccgccccatcctatttaaatccccattggggttaccccatgcttctccacactccgccgcactctatttgcgctgctggcttgtgcgtcttttatcgtccatgccgctgcaccagatgaaatcaccaccggcttggccggtgaatgtcgggccactaaacccgcacctttacacgcttaaccagatgttcgcccagagcatggtttatgagccgattggtgaaatatcaggcagacggttcggtgatcccgtggctggcaaaaagctggactcattcagaagatggtaaaacctggaccttcaccctgcgtgatgacgtgaaattctccaacggtgaaccggtccgatgccgaggcggcggcagaaaacttccgcgcagtgctcgataaccgtcaacgtcacgcctggctggagctggcaaaccagattgttgatgttaaagcactcagtaaaacagagctgcaaattaccctgaaaagcgcctactatcctttcctgcaagaactggccctgccccgtcctttccgttttatcgctccctcgcagtttaaaaaccatgaaaccatgaacggaattaaagcgccgattgggacccgaaccgtggaatttgcaggaatcgaaactgaatcagtaccatggcttcggccggaacgaaaactactggggcgaaaagccagcgattaaaaagatcacctttaacgtcatcccggacccgactacccgcgcggtggcgtttgaaactggcgatatcgacctgctgtacggaaaccaacggttattaccgctcgataccttcgcccgctttagccagaatccagtttaccacacccaactgtcacagatatggaaccagtaa

SEQ ID NO: 15981 - DNA, 1074 bp, Homo sapiens
  SIMILAR (250)..(528): 861254mologous to Escherichia coli K12 putative phosphatase,accession number AE000415,Smith-Waterman Score=395.
atggttcaggtgattcgcaaagatgcccccacccccaggacgagggaaccctcgctatcagataagggcatttgtcccaaaccccaagaagccttgaagttcttctgcgaggtagacgaagaggccatctgtgtggtgtgccgagaattcaggagccacaaacagcacagcgtggtgccattggaggaggtggtgcaggagtacaaggagctcttggagtccaggctgagggtcttgaagaaggaactggaggactgtgaggtgttccggtccacggaaaagaaggagagcaaggagctgctgcgaattttgctcaccaatgcgcatccgcacaacctggcggtaaaacttgagcataccggtctggacgcacaccttgatttattactttccacccacacatttggttatccgaaagaggatcagcggttatggcatgcggtggccgaagctacgggtctgaaagctgaaagaacgctgtttattgatgacagcgaagcgattctcgatgctgccgcgcaatttggagacgccatgaaagagaaacctgctgttgaggttcgactggataaatggctatgggctgcccgtttttataaaacccgcgcgctggcccgtgaaatgattgaaggcggtaaggtgcattacaacgggcagcgcagcaagccgagcaaaatcgtcgagctgaatgccacgctcactctgcgccagggaaatgacgaacgcacggtgattgtaaaggcgattactgaacagcgtcgccctgccagtacagataggaatagaaagccacagtacttggagataatagacatttgggacctcagcacaagcagtgtcaaaatagatgtattggtagacagaaatgccagattgatctcagtactgttgaaattcggtgtgcacacagtagaaatccaggcccagtctacgggcatcatcttccagagtcgtcacccgttcatgcaccctgtgacctcgccaggcacatgtcgcccaagcttaaattgtcttacaggatctccgggtaccgagctagagtgtatcaactctagagtgatcaccgggtactga

SEQ ID NO: 15982 - DNA, 1072 bp, Homo sapiens
  SIMILAR (709)..(945): 911254mologous to Escherichia coli ORF_o133,accession number U18997,Smith-Waterman Score=350.
  misc_feature (1)...(1072): n = a,t,c or g
atgagccgggtcttattttttcatatcagacaggtggtgttgcggcagaggcggctggaggagctccagctgcagcacagcctgcgccttctggagatggcggaggcgcaaaacagacacacggaggtggccaagaccatgcggaacctggagaaccgcctggagaaggcccagatgaaggcgcaggaggccgagcacattaccagcgtgtacctgcagctcaaggcctatctaatggacgagagcctcaacttggagaaccggctggactccatggaggctgaggtgaaccagctgcagtacctagaggagaccttggttcgagagcgcaagaagcgggaacgctacataagtgagtgcaagaagcgcgccgaggagaagaaactggagaacgagcgcatggagcgcaagtcctgccttagcctcccgagtatggcaacaacggtgcctgagagcgcagagcctgaggcagaggcggacggggaggagctggacggcagcgacatgtcagccatcatctatgaaatccccaaggagcctgagaagaggcggcggagcaagcggtcgcgggtgatggatgctgacggcctgctcgagatgttccactgcccatacgagggctgcagccaagtctacgtggccctcagcagcttccagagaaacctgctgttgaggttcgactggataaatggctatgggctgcccgtttttataaaacccgcgcgctggccccgtgaaatgattgaaggcggtaaggtgcattacaacgggcagcgcagcaagccgagcaaaatcgtcgagctgaatgccacgctcactctgcgccagggaaatgacgaacgcacggtgattgtaaaggcgattactgaacagcgtcgccccgccagcgaggcagccttgctgtatgaagagactgcggaaagtgtagagaaacgcgaaaaaattgggnccccgggggcccccctttgtgggggcccccaaaaacccccggggttttttaaaacttaatgccttaaccatgccgcacccggaccgacgcccggacaaaaaagagcgccgggacctgttacga

SEQ ID NO: 15983 - DNA, 415 bp, Homo sapiens
  SIMILAR (2)..(208): 921254mologous to Homo sapiens Human protein kinase H2LAU20 protein sequence,accession number Y58052,Smith-Waterman Score=336.
  misc_feature (1)...(415): n = a,t,c or g
ctttgtggacacaagggggaagaagaatacggtnagcttcccacacattagcaagaaagtcctgctgaagtcatccctgctgtatcaggagaatcaagctcacaatcagatgccggcctcagagctcaaggcttcagaaatacctttccaccctagcattaaaacccaggatcccaaggcagaggagaagtcaccaagaagcaaaaggtgactctgacagcggcaggtccttcctgatccagctgcagatttgagcgtgaagcctcctgggcctttaatgttgcctttatgttacctgtctggccctgcagacattacagttctcaaagcctctcaagacggactaattatagcttaattccacgttaacttgggcaacttgccacctaaactatatactattgtcgacactaaa

SEQ ID NO: 15984 - DNA, 2113 bp, Homo sapiens
  SIMILAR (4283)..(4906): 961254mologous to Escherichia coli MukB,accession number D31701,Smith-Waterman Score=981.
atgaacacccctctgcagtctgcacatacacaccttaccctggtcgagttcatagcctacttggtgtctgactccccctttcctgctgcttcaaccttgtctctgcccacgtgcaactttgatccctgccccactaaactgggtgctggcacaatgcctcccgcagcggcgggcggtcagcgccggcctcatgcagctcctcccgccgcctatccgcaccggaacaaagtaagggccgcggaggctcgtacttcacgagcagtcaggcgcgagtacgaggcaggcgacgaagcttctggtcgacggggtcgtggggggagaatgaaaagcgtgcagaatgcaagagctgaccggggaatgtgggtcagagagaggcgggctgtggtgcgcggacaagaaaatacagttgtagtttttgcagcagctgcatccccggaatccgacttcctccaaatcgtgcttcgtgatattgccagagaaatggtaccagaatacaaatctgatcttcagcccaggactcaaatggatgctaaaaagccaaggaaatgtgatttgactcccttcctggttttgaaagcaagaaagaaacaaaagttcacctctgcgaagcacctctgggtacagcgcaaaggcaaaggtgtggaggatcatgctgattggcagggccaaatctgggtgggtgtggagggaaaatcagcagaagggcaaggccttaatctaacaggtgcatttaacagaagtccagaaaacaaagtatctccccaaggccctgcactgaatgcattagaaattgactccagctatctggacccccaggctcttgcccttcctcaaggatggcagggcctcctctttccacctctactagggacagagctggttggaagtaaactttcggttcagatccagaagccaccttccaatatcaagaactccagaatgacccaagtctttcataagaacaccagtgttacttcactcccctttgtggacaccaaggggaagaagaatacggtaagcttcccacacattagcaagaaagtcctgctgaagtcatccctgctgtatcaggtgagtgcagacggactggaccctgagaaggcaggtgaaagacctggttttagtccaaagccagttttagaaaggcccaggatagtggggaaaagcacagtagctgctgaagaggagaatcaagctcacaatcagatgccggcctcagagctcaaggcttcagaaatacctttccaccctagcattaaaacccaggatcccaaggcagaggagaagtcaccaaagaagcaaaaggtgactctgacagcggcagaggccctaaagctttttaagaaccagctgtctccatatgaacaaagtgaaatcctgggctacgccggagctgtggttcctgggtcttgaagccaagaagctcgacacggctcctgagaaatttagcaagacgagttttgatgatgagcatggcttctatctgaaggtcctgcatgatcacattgcctaccgctatgaagttctggagacaatcgggaaggggtcctttggacaggtggccaagtgcttggatcacaaaaacaatgagctggtggccctgaaaatcatcaggaacaagaagaggtttcaccagcaggccctgatggagctgaagatcctggaagctctcagaaagaaggacaaagacaacacctacaatgtggtgcatatgaaggactttttctactttcgcaatcacttctgcatcacctttgagctcctgggaatcaacttgtatgagttgatgaagaataacaactttcaaggcttcagtctgtccatagttcggcgcttcactctctctgttttgaagtgcttgcagatgctttcggtagagaaaatcattcactgtgatctcaagcccgaaaatatagtgctataccaaaagggccaagcctctgttaaagtcattgactttggatcaagctgttatgaacaccagaaaggtcacctgccttctaggctgcgctcagctgtcaccactaccagtatgattttgaacaaggtgcttcgcttctctgagcccaagttgcctcatctacaatttgagaaagttgtatccaaatactag

SEQ ID NO: 15985 - DNA, 1327 bp, Homo sapiens
  SIMILAR (506)..(1285): 961254mologous to Escherichia coli Threonine--tRNA ligase (EC 6.1.1.3),accession number D90814,Smith-Waterman Score=1391.
tttcgtgtgggtcaccactgcaaataaggatataaaatgcctgttataactcttcctgatggcagccaacgccattacgatcacgctgtaagccccatggatgttgcgctggacattggtccaggtctggcgaaaaagcccttggttattcggcaaggggccgccggtttaatggcgaaactggttgatgcttgcgatctgattgaaaacgacgcacaactgtcgatcattaccgccaaagacgaagaaggtctggagatcattcgtcactcctgtgcgcacctgttagggcacgcgattaaacaactttggccgcataccaaaatggcaatcggcccggttattgacaacggtttttattacgacgttgatcttgaccgcacgttaacccaggaagatgtcgaagcactcgagaagcggatgcatgagcttgctgagaaaaactacgacgtcattaagaagaaagtcagctggcacgaagcgcgtgaaactttcgccaaccgtggggagagctacacagtcgtccattgttgaagaaaacagcgccgatgatgacaagccaggtctgtacttccatgaagaatatgtcgatatgtgccgcggtccgcacgtaccgaacatgcgtttctgccatcatttcaaactaatgaaaacggcaggggcttactggcgtggcgacagcaacaacaaaatgttgcaacgtatttacggtacggcgtggccagacaaaaaagcacttaacgcttacctgcagcgcctggaagaagccgcgaaacgcgaccaccgtaaaatcggtaaacagctcgacctgtaccatatgcaggaagaagcgccgggtatggtattctggcacaacgacggctggaccatcttccgtgaactggaagtgtttgttcgttctaaactgaaagagtaccagtatcaggaagttaaaggtccgttcatgatggaccgtgtcctgtgggaaaaaaccggtcactgggacaactacaaagatgcaatgttcaccacatcttctgagaaccgtgaatactgcattaagccgatgaactgcccgggtcacgtacaaattttcaaccaggggctgaagtcttatcgcgatctgccgctgcgtatggccgagtttggtagctgccaccgtaacgagccgtcaggttcgctgcatggcctgatgcgcgtgcgtggatttacccaggatgacgcgcatatcttctgtactgaagaacaaattcgcgatgaagttaacggatgtatccgtttagtctatgatatgtacagcacttttcggcttcgagaagatcgtcgtcaaactctccactcgtcctga

SEQ ID NO: 15986 - DNA, 3223 bp, Homo sapiens
  SIMILAR (1999)..(1481): 1001254mologous to Escherichia coli similar to,accession number D90863,Smith-Waterman Score=892.
ttaatcccgatgcttaaagagatgatccgccacgctggcaacagcggcacccgcgaagtggttctcgggatggcgcaccgtggtcgtctgaacgtgctggtgaacgtgctgggtaaaaaaccgcaagacttgttcgacgagttcgccggtaaacataaagaacacctcggcacgggtgacgtgaaataccacatgggcttctcgtctgacttccagaccgatggcggcctggtgcacctggcgctggcgtttaacccgtctcaccttgagattgtaagcccggtagttatcggttctgttcgtgcccgtctggacagacttgatgagccgagcagcaacaaagtgctgccaatcaccatccacggtgacgccgcagtgaccgggcagggcgtggttcaggaaaccctgaacatgtcgaaagcgcgtggttatgaagttggcggtacggtacgtatcgttatcaacaaccaggttggtttcaccacctctaatccgctggatgcccgttctacgccgtactgtactgatatcggtaagatggttcaggccccgattttccacgttaacgcggacgatccggaagccgttgcctttgtgacccgtctgtatccacaatgccatcagcgggatgtttcccggcagcgcaaatcactacgcgctcaccgttaacctgcgcttcaatgccagacccgaccagcgcccgctgtgattcggcggtgggaatggcgagttcagcaacctgtgcttcgcgtacgatggcttgcgccagtggatgcgtcgcgccttgctcgaccgccgccgccagtgtcagcagttcagattcactaatacccgttgccggatgaatcgcggtaacgcgcggtttaccgacggtcagcgtaccggttttatcaaacgccacctgagtaacacgacccagctgttccagcgccgctccgcctttaatcaacgccccacgacgcgctgccgccgccagcccggaggtaatcgccgcaggcgttgagataactaacgcacacgggcagccaatcagcagcagcgtcagccctttataaatccactcctgccagctggcggcaaacagcagcggtggcaccagcgtcaccagcagagcgacggccataatcgcgggcgtatagatacggctgaaacggtcgataaaccgctcaatgggagcgcgacgctcttcggcttcttcgatcagtttcagaatccggtcaatggcgctggctcccggttctgacagcacttccaacgtcaccagacggtctacgctggtggcaccagcagggactttatcgcccgttgcgcgctccaccggaatggattcgccggtcagggcgctttcatcaaaactggcaaacggtgagagcagtttaccgtcggcaggcaaacgcccacctgcggcgacttcaatcacatcgccagggcgcaggctgttaatcgccacctcttcccgctcacccttacgcaggcgcgtggcggtttctggtttcagcgccattaacgcgctaacgccctgacgcgcgcggctggcggcccagccttccagtcgttcaccaatcaaaaacagcagcaacaccatcgcagcttcagccgttgcgccaataaacagtgcaccaatagcggctacgctcattaaggtttcaatggcgaagtagctgccggatttgatcaaccgtaatgcctgatcgagcaatcgggtacagcccaaccagcgtggtcgcgataaacgccagttgcccgaacggatgattgaatttttcgtgggatgagctaaggctttcagcttttttagatacataagccgcgtttcaagaaatcgaacttgcctttcaagatcctcaatgcgtcggtcttttgacagctccaatgctgatgccgctttttctggatcaactgatattgcaatgtttcttttggtgccaatcttgagcgcgcgtaaaccagcttctccgcgctcttcatagaccttcagccacctggctacagaaccactaccagcaagcataaagtgagcagcagcctgattaagggacatgtgctgctcgatcacagctttcacgaccttaatacgcaactctggatcagcactaacgcctttaggtttgggaattaaacctttttctccatgtttttcatagagggcaacccatgtcctgacctgggttcgggggacaccaaaacgtgccgagatgatcttaaagcagcgattaaggtcaagcgataccgctcttacagaggagaggtagggcaaaccgcccctaatgttctccaaagagatttcaaggctacgcggccaaacgagaagtgggttaccgatgttactgaatttgcagtcaatgggcgcaagctgtatttgtctccagtaatagatctcttcaacaacgaagttatttcttacagcctttcggaaagaccagtgatgaacatggttgagaatatgctcgatcaggcattcaaaaagcttaatcctcacgagcatcctgttctgcactctgaccagggatggcagtatcgtatgagaagatatcaaaatatcctcagctacagccggttcacggcgcgcggctgaaacaggtccgaccctggcgctgggcacttgtccggcgagggcttcacgcaccggaacatctttgccatgcagctctgaaaactcatcaatgtaagtcatgctggtgaagtgcgtccattcgcgttcgaacggatacaccgggatctgaatcagatctttacgctcgaccagatagttgaacagacgcaattccatcggtgaaatcacatcttcggcgtcatgcagaataaaaccagcaaaagcgaaattggcgctacgctcaaattgggtgatggcgtccagcacgttgttcagacagtcggctttgctggtggggccaggacgcgcgcagactaccttatgcacattcgggaagcgagcgcacacttcgtcaacatcacgctgagtatcggggtcgttggggtaggtgccaacaaagatatgatagttttcgtagtcgagcgtggtcgccgccagctcggccatattgccgatgacgcccgtttcattccacgccggaaccataatcgctaacggtttttcatctggtttatacagttcgcggtaactcattcgcgggtagcggcgataaacactcaacttgcgtttaatgcggcgtacccagtagacgacatcaataaaaaaatcgtccagcccgctgatgaacat

SEQ ID NO: 15987 - DNA, 1341 bp, Homo sapiens
  SIMILAR (2032)..(2841): 901254mologous to Escherichia coli K12 2,3-dihydroxybenzoate- AMP ligase,accession number AE000165,Smith-Waterman Score=1240.
atggcgtcatcctgggtaaatccacgcacgcgcatcaggccatgcagcgaactgacggctcgttacggtggcagctaccaaactcggccatacgcagcggcgatcgcgataagacttcagcccctggttgaaaatttgtacgtgacccggcagttcatcggcttaatgcagtattcacggttctcagaagatgtggtgacattgcatctttgtagttgtcccagtgaccggttttttcccacaggacaggtccatcatgaacggacctttaacttcctgatactggtactctttcagttagaacgaacaaacacttccagttcacggaagatggtccagccgtcgtgtgccagaataccatacccggcgcttcttcctgcatatggtacaggtcggctgtttaccgattttacggtggtcgcgtttcgcggcttcttccaggcgtgcagcaagctcatgatccgcttctcgagtgcttcgacatcttcctgggttaacgtgcggtcaaatcaacgtcgtaataaaaaccgttgtcataaccgggccgattgccatttggggcccaccaagtgtttgtccaccaataatgcctttgttggcttaatggcctcattggctaaggtgtctgaacctgctggtgaagggtattctcaccccgtgtgtggctttgcggcggtactcgaatggctgttgcggctccagttggtattgccggtccgccgccctatgcgtctgacctgccagcctgcccaagtggtcaagcaagtttctagatgtctacgtaataaccccgttgctcaggatgaagtctctggtaactgccgctggttttaccgatcggttcaagctgtaccctgcctcggagtaatcgccgcaggcgttgagataactaacgcacacgggcagccaatcagagcagcgtcagccctttataaagggccagtactactgttcttgccgatggtgtcgaactgcacgtacgcgcgaggatcgatcatcttcaaaatgttgtccgcaggttgtctttcacgatccagtgaccaaggggtgacgcggcgaaagatcaaccccgtgggcttggttctcacgccaggttgtctccataccgccaatcggtggctagagacgagcggtatgcgcgtgggtaatcatttccgttcggctgtgttgccgtatctccggcgattgatcgcggcgtttcagcctccgatgccactcgattatcctgcttcaactggtcatgatcgatcgtcctgtcgccgagcttctcgtgcgacgcatgactgggatcgccaactatggttccggatcgtcgcggcaatgtatcatctgaagccatga

SEQ ID NO: 15988 - DNA, 426 bp, Homo sapiens; identical to SEQ ID NO: 1247
  SIMILAR (113)..(424): 711254mologous to Homo sapiens TGF beta inducible nuclear protein TINP1,accession number AF077615,Smith-Waterman Score=354.

SEQ ID NO: 15989 - DNA, 432 bp, Homo sapiens
  SIMILAR (431)..(264): 981254mologous to Mus musculus LNR42,accession number AF238866,Smith-Waterman Score=288.
  misc_feature (1)...(432): n = a,t,c or g
tcacatttacttcaatgacagtacctttggtaataacacccaaagttgtatacagtggggatgagggattcttctttacaccaagtattggtaggcaaaaggtggctttcagttcaggatgtgttacatgggctttcttgaaacgcaagcnnnnnnnnnnnnnnnnnnnnnnnnnnnnnnnnnnnnnnnnnnnnnnnnnnnnnnnnnnnnnnnnnnnnnnnnnnnnnnnnnnnnnnnnnnnnnnnnnnnnnnnnnnnnnnnattggcctgatgaatctttcatatttaggtggttttcttgtaaagccatctccaacaaagcacactttagtaaccattctcttccatgccttcttctttctctttcctgttcgaataacttttaatacttctgtttctacctgggcacgtactttaggcagagggacttcc

SEQ ID NO: 15990 - DNA, 2308 bp, Homo sapiens
  SIMILAR (1716)..(2129): 711254mologous to Thermotoga maritima translation elongation factor G,accession number AE001799,Smith-Waterman Score=525.
tttttttttgatgaagtaggatatttgtatatttgctttttttcaatcatatcagttttatgaacatggggtcaaagcgtatttcaaaataaagaccatttataaaactggacccactttaatcgtttacaatttaataaatctctctcattgcaagacatgtatggctgttttgtagtattcagaaacatcacagtaatggcagtttcttcaattggtgtgtagtcctcaataattatatatgaaattgctggtcaaaccagtaagactgcatttatacatcccatcattgttcaggattgtttggtaacctggggcatattttcccccaaataactttgccctcccttgcgtcaacaaggcccaaattcgctcacatttacttcaaatggacagtacctttggtaataacacccatagttggtatacagtgggggatgagggattcttctttacacccaaagttattgggtagggcaaaaagggtggctttttcagttcaggatgtgttaacatggggctttccttgaaaacgcaaagcccattggccctgatgaaatctttccatatttaaggtggttttcttgtaaagccatctccaacaaagcacactttaagtaaccattctcttccatggcttcttctttctccttcctggttcgaataactttttaatacttctgtttctcactgggcacgtactttagggcagaggggacttcccatttaaaccgccttatcttttcttttctgtttaatcatattggaaagtactttagctcgaagattggtcccttctctgtccaagcagatacggcaggtactgctccctggtggtgtcttttcaaccaatcctttttgtttgggtgtttcctcttttcaatgcatcttgatagtctttttcatttgtattttcctcagcatgacgctgtttatggtaaagcttagccttcagaccaatcattttctttgccttctttgaacggttcatgagcctctcgactttccttctttctctttttctcatggtaatccaaacggtatccatagcgtttacggtgtaattcaatatattcattctgtggcatggtgacggccgcagagccgccaggagcagcccctggagtgcgaaaacgctctcaattttcgggtctcaaagacccacaagcccacaccacgcaggccgggacaggaaagagtcaccctttaaaacggccgagtgaagagcaagaaccacgcagcggttccgagcctctgttttccgcttttagctaggaggacggaagttgctggcaggcggcatttggccggtacaccgccggaagtgtggaggtgtggctgcccgaggcggtagagcggagaaagcctattttcttttcgtttagatacattgccttttgcctaggctggcgtcgagacttgaggcgcgttgcagactttggcgcggctcgcgcctcctgcttcaagagcccagcggtgagagctggcctgcggcacgcggtctaatgccagacagtaacagtttggaggaacaagatgttgaccaacttgaggatatttgcaatgagtcatcagacaatacccagcgtgcatattaataatatatgctgctataaaataagagcgagtttaaaaagattaaagccacatgtgccgcttgggaagaaattgcagttctctaccagggttaataggaaatgatatcaaatcccttcattccatcatcaatcctcccattagctaaaatccgtaatattggaattatggctcatattgatgcaggcaaaactaccaccacagaaagaatattgtactattccggatatacaagatcactgggagatgttgatgatggagacacagtgacagatttcatggcccaagagcgagaaagaggcattactattcaatcagctgctgctacatttgaatggaaaggttatagagtcaatctaattgatacaccaggtcatgtggactttaccttggaggttgagcggtgcctaagagtgttggatggtgcagtggctgtatttgatgcctctgctggtgtagaggcccagactctcacagtatggaggcaagctgataaacacaatatacctcgaatctgtttttttaaacaagatggacaaaactggagcaagctttaagtatgaagttattactataagtagccttcagaagagtggtatcacaaagttgtgtttcttttgtgtccttaagcttgtctcacaagaaagatgccaggcctctaaatgtaataagatagagggtcaaaggttcaatcaataaaaatattttattc

SEQ ID NO: 15991 - DNA, 2904 bp, Homo sapiens
  SIMILAR (966)..(1016): 941254mologous to Escherichia coli multidrug resistance-like ATP-binding protein Mdl,accession number U82664,Smith-Waterman Score=85.
atgccccagaacaacgcggcaggagagatcgataatgacgtcggattaccgtgtgtcaccaataaaaaagtcccgaccagcgatgtcaaaatagcgcagaaaaccagaatgcccgggcgcgatttacgcaccagtgagaaccaggcgacgataatcgtcgcgaacttcgcggaggaacgtgggaaaacggcaattcgggcgataaaagctggccttccacggtccggtaccgtacaacatgcgcaaaagctgaacggcgaagtggaaaaagtgttgcttcgtcttggatttaccttaacggacgttcccgacagccatctgtgctgcggttcagcgggaacatatgcgttaacgcatcccgatctggcacgccagctgcgggataacaaaatgaatgcgctggaaagcggcaaaccggaaatgatcgtcaccgccaacattggttgccagacgcatctggcgagcgccggtcgtacctctaacaagcccttgaaaaggaataacaaaatgaaaactaaagtcattcttagccagcaaatggcgagtgcaattattgccgcaggtcaggaagaggcgcagaaaaataactggtctgtttccattgctgttgccgatgacggcggtcatctgctggcgttaagtcgcatggacgattgcgcgccgattgcggcttatatctcccaggagaaagcgcgtaccgccgcgctggggcgtcgtgaaactaagggctatgaagagatggtgaacaacggacgtaccgcgttcgtgactgcgccgttattaacgtcgctggaaggcggcgtaccggttgttgtggatgggcaaattattggtgccgtgggcgtttctggtttaaccggagcacaggatgcgcagatcttcgcggagcggatcagcggccggagcgtttggcggactctgcgtggacttggagctcacagcgtcttgcgacttgaaagcggattcagaggacaggacagaacacttgggcaaccgccagcagagaaaaatccccacgactatcgccatacaaccagcaatcatcatcccggcacgccagccgtaatgcagcgcagccgctgccatcacaatgggaatgagtgcgccgccgacgttatgcgccgtcggacagtaccgtattgttgtggaaatcggattggcgatagctcaaccgagcgcatccaccgcgttcatcaacaccacggcagcaaccgatttaggcaatcctggccacagaccatgtacggtcagaaaatcagctttgttgttcgtttcggtttgcaggcgacattcatctcgttcgttacgatttcgatcgtgttgactctggcaaaatccgccacagccgtaaataatcaccccaggaccggttgcatacggcgtcagacagcccatgataccgatagacagcaccagcaggatacacagttgttccattggtacgcccggaatacctttaccgacggccagaataaccggcagcatggttgcggtgtgcgcagacaggctggcaaacaggtagtgtgcaaagtagaacaccagaaccagtacaatcaccgttgcgtttgttttggtgcgaatcaggtagtcaaaagcactcagagaggctttggcaccttcgccagtggcgatgatgatctgcttgtacggaaccgtcgtacagtcacccgctgcgaacacgcctttcacgttggtttcgcatttcgcatcaatgataatctcgcccatgcggttacgttcgactgcgccttcgagccagttggtgttcggcagcagaccaatctggacgaaaataccggccagttcgatgttgtgaatatcgccgctgacacgatctcgatattccagaccaacgactttgctgccgtcgcctttcacttccgtggtttgcgcattcagaataatgtcgacgtttttcaggctgcgcagtttgtcctgcagaacctggtcggctttcatttctggcgcaaattccagcagcgttacgtgctcaacgatacccgccagcggcccgtcgcagtgcgggcagtaggtcacgcctttggtgcgatactgatcttcgcccggaacgttcatgttgcgccattttgcaccggtcgccacgataatgctgcgtgctttcagtaccacaaagcactgtggccgttaggtaaagagttacgcaacctgcaagaagaagacatcaaagtggtgctggcgattgccaacgattcccatctgatggccgatctgccgtggattgcagagtctattcagctacggaatatttacaccgacccgctgaacgtattgcaggccgagttgctgcaccgctcccgccaggcagaaaaagaaggccaggaaccggatcctcgcgtcgaacaagcgttaatggtcactattgccgggattgcggcagaagtccaggctaaacctctttttagctggaaagccctgggttgggcactgctctacttttggtttttctctactctgctacaggccattatttacatcagtggttatagtggcactaacggcattcgcgactcgctgttattcagttcgctgtggttgatcccggtattcctctttccgaagcggattaaaattattgccgcagtaatcggcgtggtgctatgggcggcctctctggcggcgctgtgctactacgtcatctacggtcaggagttctcgcagagcgttctgtttgtgatgttcgaaaccaacaccaacgaagccagcgagtatttaagccagtatttcagcctgaaaattgtgcttatcgcgtctggcctatacggcggtggcagttctgctgtggacacgcctgcgcccggtctatattccaaagccgtggcgttatgttgtctcttttgccctgctttatggcttgattctgcatccgatcgccatgaatactga

SEQ ID NO: 15992 - DNA, 1743 bp, Homo sapiens
  SIMILAR (445)..(777): 931254mologous to Escherichia coli polynucleotide phosphorilase,accession number J02638,Smith-Waterman Score=507.
atgaatgtagctggaagccattatcctcagcaaactgacacaggaacagaaaaccaaacattacatgttctcacttataagtcggagctgaatgatgagaacacatggacacatagggggcggggaacagcacaaactggggcttttgataggcagaggcttggagggagagcattaaggaagaataggtttttaacttctttgcgttgggatcaaacttcctcctttagctcggagaagtttgatcatctgaatccttcttctcttaactcgtcaaagttattctccgtccagctttgttccgttgctggtgaggagttgcgttcctttggaggaggagaggccattatttacatcagtggttatagtggcactaacggcattcgcgactcgctgttattcagttcgctgtggttgatcccggtattcctctttccgaagcggattaaaattattgccgcagtaatcggcgtggtgctatgggcggcctctctggcggcgctgtgctactacgtcatctacggtcaggagttctcgcagagcgttctgtttgtgatgttcgaaaccaacaccaacgaagccagcgagtatttaagccagtatttcagcctgaaaattgtgcttatcgcgctggcctatacggcggtggcagttctgctgtggacacgcctgcgcccggtctatattccaaagccgtggcgttatgttgtctcttttgccctgctttatggcttgattctgcatccgatcgccatgaatacgtttatcaaaaacaagccgtttgagaaaacgttggataaccctgcctcgcgtatggagcctgccgcaccgtggcaattccttgaccggctttatcaatatcgcagtgtgttcgtatcgatcatgattggcgtggtgaatctgccgattattcattactccgtggagtggtggaacaccctgcatcagggatcaacgcggatgcagcaaagtatcgatccggcgatgcgttcgccgctgcgctggtcgatttttggcttcctgctcctgtctgccacgctgacgctgatgcggatgcgtaatttgattttgctgatggaaaaacgccgtccgtggatattgtcttacctctttgacatcacggaaggtgaagcgatattcatgaatatcgacgctatcgccggacttcatgcgcacatcacgctcaacgctatagttctggctaaaggcaatgccaacaattgtcactgccagcccaaggtggttttcgtgccgcgtgaaatacgtagcgcagcttccgcaattgccagcaccgcaatccagcaggccattgccaggccgagcaccgtcatcgccacaactttgctttcgaacagccacggcaacagcagcgacagcaccagcgtagagatgaaggcgataatcaataaattgcggatcttacgcgggcgatcccgcccccagcgcaccagaggaccgacaccaagcagtagcgcaaacggcaccatcagccaggtaaacatggtgttgaagaacggttcgccaatcgaaatactgcccagtcccagttgcttatgcaccaacggcagcagcgtccccagcaacaccaccagcatcgcagcgaccagcaaaacattgttcgctaacagcaaagattcccgcgaccacagcgcattgtttacgcgtgagcgaactttgtgtccacgcgcggcaaacagcagcagcgaacccgccaatcaccagcaccataaaggcgaagattaa

SEQ ID NO: 15993 - DNA, 433 bp, Homo sapiens
  SIMILAR (6)..(431): 1001254mologous to Escherichia coli Hypothetical protein 7.6,accession number D90732,Smith-Waterman Score=738.
gtccggtggtttccggcgcgtcagcctgggaagaagatcgctggaaagtgattcgcattggtgatgtggtgtttgatgtggttaaaccttgtagccgctgtattttcaccaccgtcagcccagaaaaagggcaaaaacatccggcaggcgaaccattaaaaacattgcaatctttccgcactgcccaggataacggcgatgtcgattttggtcagaatttaattgcccgtaatagcggcgtgattcgcgttggcgatgaggtggaaattctggcaacggctccggcaaaaatttacggcgcagctgccgctgatgataccgccaacatcacgcaacaaccggacgcaaatgtagatattgactggcagggacaggcatttcgtggaaataaccaacaggtgttgctggagcaattagaaaatcagggaattcg

SEQ ID NO: 15994 - DNA, 825 bp, Homo sapiens
  SIMILAR (441)..(7): 901254mologous to Bacteriophage N15 gp4,accession number AF064539,Smith-Waterman Score=681.
atgaacgtggtagagcacctccgggccagcttcccagtggagcaatggtattggagaggtggacaacgtggggaggctgagggagctagatcttcgaaggcagagaacaacacgcgagaaagaagctccggaaactatcaatcaatacaaggctgccgttcggcggccttttttattcctagcaacagcactcgcacaaagcgaggtgagagtatgtatcgcatggacaaactaaccactggtgctgcctatggcgcttcagccgggagcatcctaaacggcatgttgaatgcctacagccccgagcagtggaacgctatcggcgtgctgacaaccgccgcagcaggagccgagatgaacccaacgttgaggaataagctggtgggtgccattgttggcggatcaggggcaatcactattgctgcagtaatgctgggcaatgcggatggactcgaaggtcggcgttattacgcctatcaggatgtggtcggcgtctggaccgtttgcgatgggcacactggtaccgacattcgccgcggtcaccgatataccgacaaagagtgtgacaacctgcttaaggcagatctgcgaaaggtggcaagcgccatcgacccgctgatcaaggttcgcatccctgagccaacccgcgccgcgctttactccttcacctataacgttggctctggtgcttttgccagctcgacgctgctgaagaagctgaactccggtgatgttccgggtgcgtgtaaagaactgcagcgctggacttatgctggcggcaaagcagtgaaggggctgatcacccggcgcgagattgagcgttga

SEQ ID NO: 15995 - DNA, 2187 bp, Homo sapiens
  SIMILAR (943)..(1275): 981254mologous to Escherichia coli ORF_o492,accession number U14003,Smith-Waterman Score=564.
atgaaacctgcaggcatcttagctgaacgagagatgagacctgcaggcaaatcggcaaatgcaccgaagaacatcaggcgattgtgcgtaagtggctggaagagcgcaaactggatgaggcctggaaagatgcacgatcgagtaggcgggataaggtgtttacgccgcatccggcatggaaaacgcgtactttgttatcaatctggggccagcaaatgctggcctgattttttcttgagggaagactatgatgcgcaaaatgctgctggcggcagcactttcagtgacgagttctcatgcctgcagccactctgtaagctgacaacactcaatatgcaacgaatcattttaatcatcattggctggctggcggtagtgctgggtacgctgggcgtggtattaccggtattaccgacgacgccgtttatcctgctggcggcctggtgctttgcccgttcttccccgcgctttcacgcctggttgctgtaccgctcatggtttggcagctatctacgtttctggcagaaacatcatgcgatgccgcgcggcgtcaaaccgcgggcgattttgcttattttgctcacgtttgccatttctctgtggttcgtccagatgccatgggtgcgcatcatgttgctgctgtcgccgctctttccagatgcggaggaaacgctgatcggtagctcagcctgtcgatgtagagtgatatccggcgcaatcggcgctgtggttagcagcgccgtgttttggcgttatgtggggacggctccttcgcgggttgccttcgcgtggaatttgagctcgtcctggcgcttcggatgcggtttcgagcttgcgcgcggagacgtgttagtgcaagctgcgacgttagaaggggctgaaatttatgacgacgttagcctggaagatgcgccgtacttctcagcgctgtatggcccgtcacgccacgccatcgtggtgccagatctgtcacaggtaactgaacacctggaaggcttgaccgattgcccggaagatctctatctgatcgaaggagatccgcagtcattcgatgacagcgtgttcagcgttgatgagctggaaaaagcggtagtggtgaaaatcgccgatcgtcagtggcgttattcacgtttcccggaagtgccgctgtttggtcgtgctgcgcgtgaaagccgtattgaaagcctccatgccgagcgtgaagtgctttccgaacgcttcgccacgctctcctttgatgtacagaaaactcagcgtctgcatcaggcgttcagccgctttatcggcagtcatctggcggttgcgtttgagtctgacccggaagcagaaatccgtcaactgaacagccgtcgcgtcgaactggagcgggcgttaagtaatcatgaaaatgataaccagcagcagcgtattcagtttgagcaggcgaaagagggcgttacggcgctgaaccgcattctgccgcgtctcaacctgttggctgatgacagcctggcggatcgcgtcgatgaaatccgcgaacgtctggatgaagcccaggaagccgcgcgttttgttcagcagtttggcaatcaactggcgaaactggaaccgattgtttcggtattgcagagcgacccggaacagttcgaacagttaaaagaagattacgcgtactatctgcgtccggggcgtattggcgaagtgtcggtcatcggtctggtattcctgattttcgccattatctctggcggctgggtggcagaaagtccgacctgggcaccgtactttgactttaccggcgccggttacccagacatttttaccgctgaaatccattatttcacctcgcgggagagtagcttccaccaaagatatagagcatttttgcctcctttcgcgccacaagaaattaactgtagcgggaaaggatgggtttggctatgtggcaagcgtgattttagcgcagacgcggcactcgtcggtaaagagcgcagtgacctgtgccacgttaccaatttcaaccgccgccgaagcatgatacttagtgtgatcggcgaccagcagaatatttctcgcgtgcgccatcatcgttttcaccacgttagcttcgtttacatcaaactccatcaacgcgccatcgctctcaatcgccccaacgcttgttaccagataatcagcacgaaaatcagccacaaaggacgccgctga

SEQ ID NO: 15996 - DNA, 4963 bp, Homo sapiens
  SIMILAR (511)..(1284): 921254mologous to Escherichia coli NikA,accession number X73143,Smith-Waterman Score=1204.
atgtcggcgtgtatgtcggcaacggcaaatttattcagtcaccgcgcacaggtcaggaaattcaaatcacttctctcagtgaagactactggcagcgccactatgttggcgctcgtcgggtaatgaccccaaaaacacttcgctaaaactttaccctgttgttacggcaacagggtaagttcatcttttgtctcaccttttaatttgctaccctatccatacgcacaataaggctattgtacgtatgcaaattaataataaaggagagtagcaatgtcattcgaattacctgcactaccatatgctaaagatgctctggcaccgcacatttctgcggaaaccatcgagtatcgacctcggcaagcaacatcagagtcatgtcactaacctgaacaacctgattaaaggtaccgcgtttgaaggtaaatcactggaagagattattcgcagctctgaaggtggcgtattcaacaacgcagctcaggtctggaaccatactttctactggaactgcctggcaccgaacgccggtggcgaaccgactggaaaagtcgctgaagctatcgccgcatcttttggcagctttgccgatttcaaagcgcagtttactgatgcagcgatcaaaaactttggttctggctggacctggctggtgaaaaacagcgatggcaaactggctatcttttcaacggccaacgcggcagcaaaatgcgtattttttattcgccgggtcattcagtttttgtgcaacgtccagcagctgttgccattttttcggctcatcaagccccgtttttgccagcacatctttgcgatcccagatcccgccaatccaggcgctgacagaaacaccggtccatgcgctcccattttgggtacgcacaatacgcagtacgccatcgtaaaacgcgctttcaccaacgttgctgatgactgtggcaaccgctttgcgatcgataagctgctctttgtccatcactttggcgtagtcatggctgcaacatgttcgccgatctcccacttcgaacgtgactgctccatgcaacgccgccaccagaaagtggtcgaagaagcgccagcaccgggcattaccccggaactgcgtcgctacatcggcgaacgttgcgctaaagcgtgtgttgatatcggctatcgcggtgcaggtactttcgagttcctgttcgaaaacggcgagttctatttcatcgaaatgaacacccgtattcaggtagaacacccggttacagaaatgatcaccggcgttgacctgatcaaagaacagctgcgtatcgctgccggtcaaccgctgtcgatcaagcaagaagaagttcacgttcgcggccatgcggtggaatgtcgtatcaacgccgaagatccgaacaccttcctgccaagtccgggcaaaatcacccgtttccacgcacctggcggttttggcgtacgttgggagtctcatatctacgcgggctacaccgtaccgccgtactatgactcaatgatcggtaagctgatttgctacggtgaaaaccgtgacgtggcgattgcccgcatgaagaatgcgctgcaggagctgatcatcgacggtatcaaaaccaacgttgatctgcagatccgcatcatgaatgacgagaacttccagcatgagctctgcagacaggccatattcgtccaaatccggctttttattcatcctgttaaatcgatgcgcggcattggtcttacacatgctctggcagatgtcagtggtctggccttcgatcgcatctttatgatcacggaacctgacggtacgtttattaccgctcgccagtttccccagatggtacggtttactccttcacctgtgcatgatggcttgcatctcaccgcaccagatggcagtagcgcatatgttcgttttggctgatttcggccacacaagacgcaccaaccgaagtttggggcacaacattttaccggcgcgaattgcgccagacgcgatcaacaaatggctaagtggatttttctcccgcgaagtgcaattacgctgggtggggccacaaatgacccggcgcgtgaaacgccacaacactgtacctctgtcatttgctgatggctatccttaccttcttgctaacgaagcctcgttacgtgatctccaacaacgttgtccggccagtgtaaaaatggagcaattccgccccaatctggtggtttccggcgcgtcagcctgggaagaagatcgctggaaagtgattcgcattggtgatgtggtgtttgatgtggttaaaccttgtagccgctgtattttcaccaccgtcagcccagaaaggagcgcaaaaacatccgtcaggcgaaccattaaaaacattgcaatctttccgcactgcccaggataacggcgggggggaaggcgaggcacgcgcagcaaatactggcgcaactcatcgcggtaggcatcggtcgccgtcggctgtaaggtaccgagatcgattgaatatgtatgttcttcgtcgtatggatctgttgtaccgggtaaaaacgctttgggccgcgctgcgcggtaatcattacacctggcctgccatcgatatcaccctccccggcaatcgccattttcatctgattggcagtattcatatgggtagccacgatatggctcccctgcccacccgtttgctcaaaaagctcaaaaacgccgatgcgctgatcgtcgaggcggatgtttccaccagcgatacgccttttgctaatttgcctgcctgcgaggcgctggaagagcgcattagcgaggagcaactccaaaacctgcagcacattagccaggagatgggcatttctccctcactcttttctacccaaccgctgtggcaaatcgcgatggttcttcaggcgacgcaggcacaaaaactggggctgcgggcagaatacggtatcgattaccagctattgcaggcggcgaagcaacaacataaacccgtgattgaactggaaggggctgaaaaccagattgccatgttgctccagctccctgacaaaggactggcgctgctggacgatacgctgacccactggcataccaacgcacggttgctgcaacaaatgatgagctggtggctggagtgtgaaggaggggagagagaaagaatatttccagtctccaagaggatggggaagaagcttgatgccgtctttggggataatcatacggcctccttgacggaaaccgaagaatacagaaaatcgcaggtgcatttctgcatctgtgacaagcgagaaagaagctccggaaactatcaatcaatacaaggctgccgttcggcggccttttttattcctagcaacagcactcgcacaaagcgaggtgagagtatgtatcgcatggacaaactaaccactggtgctgcctatggcgcttcagccgggagcatcctaaacggcatgttgaatgcctacagccccgagcagtggaacgctatcggcgtgctgacaaccgccgcagcaggagccgagatgaacccaacgttgaggaataagctggtgggtgccattgttggcggatcaggggcaatcactattgctgcagtaatgctgggcaatgcggatggactcgaaggtcggcgttattacgcctatcaggatgtggtcggcgtctggaccgtttgcgatgggcacactggtaccgacattcgccgcggtcaccgatataccgacaaagagtgtgacaacctgcttaaggcagatctgcgaaaggccattatttacatcagtggttatagtggcactaacggcattcgcgactcgctgttattcagttcgctgtggttgatcccggtattcctctttccgaagcggattaaaattattgccgcagtaatcggcgtggcgttcagccgctttatcgccagtcatctggcggttgcgtttgagtctgacccggaagcagaaatccgtcaactgaacagccgtcgcgtcgaactggagcgggcgttaagtaatcatgaaaatgataaccagcagcagcgtattcagtttgagcaggcgaaagagggcgttacggcgctgaaccgcattctgccgcgtctcaacctgttggctgatgacagcctggcggatcgcgtcgatgaaatccgcgaacgtctggatgaagcccaggaagccgcgcgttttgttcagcagtttggcaatcaactggcgaaactggaaccgattgtttcggtattgcagagcgacccggaacagttcgaacagttaaaagaagattacgcgtactctcagcagatgcagcgcgatgcccgtcagccaggcgtttgccctgacggaagtggtgcagcgtcgtgcgcactttagctattctgactcggcagaaatgcttagcggtaacagcgatctcaacgaaaaactgcgtgaacgtctggaacaggcggaagcggagcgtacccgcgctcgcgaagcgttgcgcggtcacgcagcgcagttgagtcagtacaaccaggtgctggcttcgctgaaaagttcttacgacaccaaaaaagagctactcaacgatctgcaacgtgaattgcaggatatcggcgtgcgtgctgatagcggggcagaagagcgggcgcgtattcgccgtgacgagctgcatgcgcaactgagcaataaccgttcacgccgcaatcaactggaaaaagcgcttaccttctgcgaagcggagatggacaacctgacccgcaaactgcgcaagctggagcgggattactttgagatgcgcgagcaggtagtgaccgccaaagcgggctggtgtgcggtgatgcgcatggtgaaaagatacggcgttgagcgccgcttacaccggcgtgagctggcttatctcttcgctgatgatttgcgtttcatgtcggataaagcggttagtgcgctgcgtttggcggggcgggatacgaacattgcgccgagtgcttggcatgtcggaagattcgaagatgtcgcactctag

SEQ ID NO: 15997 - DNA, 1056 bp, Homo sapiens
  SIMILAR (316)..(753): 951254mologous to Escherichia coli (UDP-N-acetylmuramate: L- alanine ligase) (AA 1-491),accession number X52644,Smith-Waterman Score=736.
atgaaatctaacaatgcgctcatcgtcatcctcggcaccgtcaccctggatgctgtaggcataggcttggttatgccggtactgccgggcctcttgcgggatatcgtccattccgacagcatcgccagtcactatggcgtgctgctagcgctatatgcgttgatgcaatttctatgcgcacccgttctcggagcactgtccgaccgctttggccgccgcccagtcctgctcgcttcgctacttggagccactatcgactacgcgatcatggcgaccacacccgtcctgtggatctacccactactgcgttgcggtgctacgggaagaggcattgacgacgaggctattttgcgggcgcttgaaagcttccaggggactggtcgccgttttgatttcctcggtgaattcccgctggagccagtgaatggtaaaagcggtacggcaatgctggtcgatgactacggccaccacccgacggaagtggacgccaccattaaagcggcgcgcgcaggctggccggataaaaacctggtaatgctgtttcagccgcaccgttttacccgtacgcgcgacctgtatgatgatttcgccaatgtgctgacgcaggttgataccctgttgatgctggaagtgtatccggctggcgaagcgccaattccgggagcggacagccgttcgctgtgtcgcacaattcgtggacgtgggaaaattgatcccattctggtgccggatccggcgcgggagctggtggccctgggcctcagtaaccttatcggaggcatcttccagtgcttccccgtgagttgctctatgtctcggagcctggtacaggagagcaccgggggcaactcgcaggttgctggagccatctcttcccttttcatcctcctcatcattgtcaaacttggggaactcttccatgacctgcccaagacaagctgtgaccgtctccgggagctgcatgtgtcagaggttttcaccgtcatcaccgaaacgcgcgaggcagctgcggtaaagctcatcagcgtggtcgtgaagcgattcacaagatgttga

SEQ ID NO: 15998 - DNA, 1999 bp, Homo sapiens
  SIMILAR (1391)..(1987): 1001254mologous to Homo sapiens Human protein kinase H2LAU20 protein sequence,accession number Y58052,Smith-Waterman Score=1046.
cacgccgtaagtcggcatcaataaataacactttttgatcggactgggcgatcaccgctgccagagttgaactgacaaacgttttaccactgtctggcgtcgcaccggtgatcattagaatgttattctccgtctccatcatagcgaaatgcagactggttcgtagcgcacgtacggcttccacagcagaatccgccgggttatccaccgccaggaaggggatatttttagtacgatggcgctgctgattagaaaataaatttttcttacgcagacgggtgcgtttatccagccactcggacattgggatagtggcataaacgctgatgccgtgctcttccagttgttccggggcttctacaccacgacgcaacatcgcacgcgccagcacggcacccacagaaataaacaggccaagaataaaaccaagcaccacgttcaacgcttttttcggtttcactggctgcggctgagtgactgccgggtcgataatccgcacgttaccaatggcactggatttcgaaatacgaatagaggacggcaacgaaagcggttcgcaagggcggaagttttcacgcggcagcatatcttcgcgcaggatcacggcttcagcgttgttgcccagatccagagagatgttgtcgcggtttacttttttcaccacgccggtgatgatttcaccttcgtgttcacggaactgatcaaccaccatcgcacgttcggcttcacgcactttctgcacgataacctgttttgccgtctgggtagtgatacggtcaaaggtaacagactcaatctgatcttcaacgtaatcgcccaggttcaggctttcatcttcataacgtgcggcttcaagggtgatttccttggtcggctgggtgacttcatcaacaactaaccagcgacggaaagtgtcaaaatcaccgcttttgcgatcgatctgtacgcggacgtcgatctcttgttcatattttttctttgttcgtgtcgccagcgcgctttccaatgcttcgaaaatcttctcgcgaggtagcgccttttcattggatacggcttcaacccggatgctcacttctttactgaagtgcgttacaaagggaccaaaactgttgccgtcacaccagactacgctgaaatcgccaaactgtgcgatctgtggctggcaccgaaacagggcaccgatgcggcaatggcgctggcgatgggccacgtaatgctgcgtgaattccacctcgacaacccaagccagtatttcaccgactatgtgcgtcgctacaccgacatgccgatgctggtgatgctggaagaacgcgacggttactacgctgcaggtcgtatgctgcgcgctgctgatctggttgatgcgctgtttcctgaccccgacgaaatgacagtatcgtgacaataatacccagcaccgcagagatcgccccggcaagaaataccgaagagtaaccaaacgtggtcgccaccattcccggagcggcccggagacgccgagggcgatatcctgaaacgcggcgtaaccgcccagtgcggtgccgcgaacttgtgaggggacgcgtttaaccacctccacgcccagcgcaggaaagataagcgaacatccggctccggttaacgccgcgcccgctaatgcgacccatgcacctggggcttgccagagcagcaacaagcccaccgtttctacaagcagagagacaatcgccactttcacgccgccaaaacggtccggcatccagccaaacatgacgcgcatcacgacaaatgcgccgccaaacgcggtaagagtaaagcccgccatcgcccatcctttgctggcaaagtagagcgaaacgaaagtcccgataacagcaaaaccaacgccttgtagtgccagacctaaccctggtttccagataagcccgacaacgctccacagcgatggacgttctcccgccagggccggtactttgcgcactgtgccgttacaggcccacgccagtacgggtaagaccat

SEQ ID NO: 15999 - DNA, 2976 bp, Homo sapiens
  SIMILAR (1714)..(620): 971254mologous to Escherichia coli No definition line found,accession number U00039,Smith-Waterman Score=1737.
atgctgctggttttggatagtttgatagtacaaggagtgagccaacaggattgcagtcttgcgtatcgcgtgcgcatggacagtcagtcagtgcgccgccaggccatcgttcagtcggcgctggtgtgcgactgtagaggctggagaaatggaaatttggttccaaaaactagggaccaggtaaaagattcctcggaattccctaagggcgaaaaaaggccgccaacgggccggaaaaaaacaggtgttctggttgaacccgcgtatatcaccagttcatcggcaggcacagaaccaccagcgacaaccaccaaacttccaacaaacacacgcttaacaacgaaccacggcaaattcaccaacaactcctcaaggcaactccacaaacttccaaacctcaacaccaccaccattcaccgggaccctaagacccaaaaaatacttcctccaaacaccaaactgaggatggaggtggaaggcttcaactttgcagctctgtatgagctgccactaaaagtgacgatgatctaccagtatatccagagccgcttctaccgctcacctgaggtgctcctgggcacaccctacgacctggccattgacatgtggtccctgggctgcatccttgtggagatgcacaccggagagcccctcttcagtggctccaatgaggtgtgcccccaggaaggggtcgaccagatgaaccgcattgtggaggtgctgggcatcccaccggccgccatgctggaccaggcgcccaaggctcgcaagtactttgaacggctgcctgggggtggctggaccctacgaaggacgaaagaactcaggaaggattaccagggccccgggacacggcggctgaaggaggtgctgggcgtgcagacgggcggggccgggtcgcgtgggcgggtgcagcgggccacagcccgccgacctaccctccgcttcaggacctggtgctgcgatgctggactctttgactgtcgcttcgagcgtggttttagtgacgtcaaaggtgatatccagcgtatctgcgcggtagtgctcctctttcatcgtcacgttcatttcacgaccgatactggtggcgagcgacataacatgcgcttcacgcagcgggtcgattggcgggttagtcacctgggcaaactgctggcggaagtagtcgtaaataatgcgcggctgactggagagcacggcgaatggggtatcatcgcccatcgaaccgaccgcttcctgaccgttttcgcccagtacgcgaattacggagtccagctcttccgcgctgtagttaaactgtttctggtagctggcaagcgtgtcgtcgtccagttcgcggctacccacttcttcatcgggcagatcttcaaacgaattattcgatttccctgctatattcgcaatgatggtagcattaattttggtgaaaatttcacaagtggagtcggtctcaggctggatgcatttggacgtggcgtgatttttttttccgataatgtgcaagttaacgactatgttcatatcgcctcaattgagagcgttacgataggtcgggatacgcttattgcaactgcggttgcggttgctacggaagagggcattgacgacaaggctattttgcgggcgcttgaaagcttccaggggactgttcgccgttttgatttcctcgtggaattcccgctggagccagtgaatggtaaaagcggtacggcaatgctggtcgatgactacggccaccacccgacggaagtggacgccaccattaaagcggcgcgcgcaggctggccggataaaaacctggtaatgctgtttcagccgcaccgttttacccgtacgcgcgacctgtatgatgatttcgccaatgttgataccctgttgatgctggaagtgtatccggctgcgaagcgccaattccgggagcggacagccgttcgctgtgtcgcacaattcgtggacgtgggaaaattgatcccattctggggtctttgtgttggtatttatgccaccaattctgccgagacattcctccatcgggtggtgcaactgctcaacgacagcgttgagcatactctgcaggatgcgattaccatccgggatgaggattttactgccacgccatcacctgctgatgaagtggcctatatccagctttccggtggcaccaccggcacaccgaaactgatcccgcgcactcataacgactactactacagcgtgcgtcgtagcgtcgagatttgtcagttcacacaacagacacgctacctgtgcgcgatcccggcggctcataactacgccatgagttcgccaggatcgctgggcgtctttcttgccggaggaacggttgttctggcggccgatcccagcgccacgctctgtttcccattgattgaaaaacatcaggttaacgttaccgcgctggtgccacccgcagtcagcctgtggttgcaggcgctgatcgaaggcgaaagccgggcgcagcttgcctcgctgaaactgttacaggtcggcggcgcacgtctttctgccacccttgcggcgcgtattcccgctgagattggctgtcagttgcagcaggtgtttggcatggcggaagggctggtgaactacacccgacttgatgatagcgcggagaaaattatccatacccagggttacccaatgtgtccggatgacgaagtatgggttgccgatgccgaaggaaatccactgccgcaaggggaagtcggacgcctgatgacgcgcgggccgtacaccttccgcggctattacaaaaggtccagtgttctcggcaaaggctcggactgttccttcggggtgtttctgccggggcttctgcctagtgcgtcatctgtacgccgggactctaatgtgtctatccggaatgtcgtttcgttgatcaacagttcccggtggaaaagtgggttcacgtggcacgacaacgtgctccaactggacggctcctttccgctaacttag

SEQ ID NO: 16000 - DNA, 1923 bp, Homo sapiens
  SIMILAR (394)..(53): 481254mologous to Escherichia coli Threonine--tRNA ligase (EC 6.1.1.3),accession number D90813,Smith-Waterman Score=221.
atgatttccccggtggtcatggcggcaatcatggcggcggttgccggaattatggtgccgctctcggttgatgaattaatgccgctcgccaaagagattgaccctaataataaccccagctatggcgtactatgtggaatgtcagtgattgggattcagtttagtgctgctacaaacggcgggaattggttaaaaacaacatcagaagttgtccagcgcatggacaacttctgccagcttcacgaaagccttattctaccttttcggctgtctcttctctcgtactgtttaagtatttgttccgcgcttcaagcagcaagctggctgacagaccgttataacggctatcgagagcgcgatgtgttgaccgcgggttatggtcgtcagtttttgaatggcccggtacacagtttccgctttgaattcggtccaggtgtgcgttacgacaaatataccgacaatgccagtgaaacccagccgctgggctatgcctccggggcttatgcatggcagttgactgacaacgctaaatttacgcagggtgtttcggtctttggcgcggaagacacaacgctgaactccgaaagcgcattgagcgttgctattaatgactatgtgaactggacgcggacaattgtggaggcgcccaaaaaaaatatttggtttttaaaagagaaaatggggggggggtttaacacgggggaagatacccgcggggaaaaaattccctcccgaggaaaccccggtccaagaaaatttgtaaaaggttggccgagaaaccaggattgcttccgtaccgtcgaatggccaccaatactgggtggccgaggtgccaaccgcttaatacccgatgatgcgcaaacgctgatgaaactgtggcgtgaagcgaaggcgctgcatagcgatccgtttgagccatgggcttctatcattgaagacgccgataaagcgaaaagctctaagcaggcgcgtggacgcggtggatttgttcgttcttcctggcaggaggtgaacgaactgatcgccgcatctaacgtttacaccatcaaaaactacggcccggaccgtgttgctggtttctcgccaattccggcaatgtcgatggtttcttacgcatcgggtgcacgctatctctcgctgattggcggtacttgcttaagcttctacgactggtactgcgacttgcctcctgcgtctccgcaaacctggggcgagcaaactgacgtaccggaatctgctgactggtacaactccagctacatcatcgcctgggggtcaaacgtgccgcagacgcgtaccccggatgctcacttctttactgaagtgcgttacaaagggaccaaaactgttgccgtcacaccagactacgctgaaatcgccaaactgtgcgatctgtggctggcaccgaaacagggcaccgatgcggcaatggcgctggcgatgggccacccccctgaacgagaatcaggtcgttaccggttaatcccggtgccagcatctggctacccgcccgatccggcaccagaatgggatcaatttccccacgtccacgaattgtgcgacacagcgaacggctgtccgctcccggaattggcttcgccagccggatacacttccagcatcaacagggtatcaacctgcgtcagcacattggcgaaatcatcatacaggtcgcgcgtacgggtaaaacgcctgcggcgccgctttaatggtggcgtccacttccgtcgggtggtggccgtagtcatcgaccagcattgccgtaccgcttttaccattcactggctccagcgggaattcaccgaggaaatcaaaacggcgaccagtcccctggaagctttcaagcgcccgcaaaatagcctcgtcgtcaatgccctcttccgtagcaaccgcaacgcagctgcggcgttcagcgcgttatga

SEQ ID NO: 16001 - DNA, 209 bp, Homo sapiens
  SIMILAR (102)..(209): 971254mologous to Escherichia coli leucine-specific binding protein,accession number J05516,Smith-Waterman Score=164.
gtctcatttatgatcatcgccgcgctgatgatgatgggcattgataccggctggctgctggtagctgcgggattcgtcggcgcaatcgtcattgccagcgccgcccggggcgtaactctaagcgcctgattgcactcatctctgcaatcggtatgtccatcttcctgcaaaactacgtcagcctgaccgaaggttcccgcgacgtggcg

SEQ ID NO: 16002 - DNA, 660 bp, Homo sapiens
  SIMILAR (316)..(585): 861254mologous to Escherichia coli leucine-specific binding protein,accession number J05516,Smith-Waterman Score=367.
  misc_feature (1)...(660): n = a,t,c or g
atgcccaaaatcttcaatttcctgccactcatcggcacctgcaattactgcacatacgaaagatatatctcaacgctctctgtgttttatgatcataaaatacgcactcaagagaaaccctatgaccaggatccggcaaaccagggcatcgttgatgcgctgaaagcagacaagaaagatccgtccggcctaatgtctggatcacctacgcgcggtgcaatctctgcgactgcccttgagcgtaccggcagcgatgagacctggcgctgccatcggctacaccatggtttacggcattatcggcatgatcaacttgcccacggcgaggtttatatgattggcagctacgtctcatttatgatcatcgccgcgctgatgatgatgggcattgataccggctggctgctggtagctgcgggattcgtcggcgcaatcgtcattgccangctacggctggagtatcgaacgggtgcttaccgcccggtgcgtaactctaagcgcctgattgcactcatctctgcaatcggtatgtccatcttcctgcaaaactacgtcagcctgaccgaaggttcgcgcggtcttgccacagagatgttccttgagaaaggggacaatggtacagaggatggcagagcaagagaaatatctgagatcatctag

SEQ ID NO: 16003 - DNA, 3306 bp, Homo sapiens
  SIMILAR (829)..(1788): 1001254mologous to Escherichia coli K12 frv operon protein,accession number AE000465,Smith-Waterman Score=1673.
atgacccaccccaactggacacacgtgaccccggtaacaataataccaactggaaaacggcctgacgctggcgtcagcgccggattaagctgcgccgaagcaattgttgccagcgcgaatcacttttgcgaagagttttcccgttccagcagcagctacctgcaagaacgtgccctggacgtacgcgacgtctgcttccagttactccagcaaatctacggtgagcaacgcttcccggcaccgggcaaactgacgcagcccgccatttgtatggctgatgaactgacccccagccagttcctcgaactggataaaaatcacctcaaaggattgttgctcaaaagcggcggcaccacctcacatacggtgatccttgcccgttcgttcaacattccaacgctggttggtgtggatattgatgcccttactccgtggcagcaacaaacgatttatatcgacggcaacgccggggcgattgtggttgagccaggggaagccgtagctcgttattatcagcaagaagcccgcgtacaggacgccctgcgtgagcaacagcgtgtctggctgacccaacaagcccgtaccgctgacggtatccgcattgaaattgccgctaacatcgctcactccgtggaagcgcaggccgcattcggcaatggcttccacgacctagtacgggtattctaccacgtttccggctggtcagcgctcagtatcagcttccccaagtctgggggtcttgttgtggccacggataccacccccggtttccaggccccggaacctgcgtggccgccctttatatccgggttaaactctagaagcgccgtcccgggttctgatgggaaccaccatcatctgaaatttaccgcgcccgtgctctgccggcgcaaccggatatccgcccaccttgcagactttaaatgctatcagtggaaccttctgccattaaaggtggttaagccctggaactctccttgcgccagacgtaaggcgcacatcaacagcttaagctgcccacgcgataaggtatcttccaccggcgcaccgtcggcgcgaatgcgtaagccagacctccaggaaggcattagagcagttccccgagaggatccccagtggaactaccaggcaaattccccagttcattcgctgccagcagagcttcgttttcccaggcaatcagaagcgatcaaaccgtacatcatcggcaactcccgcaccgcggatcagggtactaacatccagaccccggcgcagatggcgaagtatcaccagttctccggttgcatcaactgtggtttgtgctacgccgcgtgcccgcagtttggcctgaacccagagttcatcggtccggctgccattacgctggcgcatcgttataacgaagatagccgcgaccacggtaagaaggagcgtatggcgcagttgaacagccagaacggcgtatggagctgtactttcgtggtggatgagtttggctcggtggaagggattgtgacattaagtgacgtcactgaaaccattgccgattggtgtttccacaaccttcaggtcatggtggttattgagcaactgacgcagctcttccacagcatcgttcaatttttccgtattggcaaaaaccggctgcggattaccttcgtacagcgcatgaacaaggctcagcagtatttgctgcatcatgtgctgggtaaaagctccccctaccctccgcagaaggccgatcgggaagacttcttccaggtcgccgtgcggacgcgggataacgtgtacagataccagctcgccgatacgctgtgccgctgcggcacctgcatcggtcgcggctttacaggctgcaacatcaccacgaaccatggcagtacacaggccgccgccaatctgcttaacaccaaccagcttgacgcgcgcagctttcaccatcgccgccagctcgataatttcctgcacgctacaaccacgagagagatcgtgcatcggcgcggcaagtccttgtatcagtggcccgacggcacgatatccgccgagtcgttgtgcgattttgtaaccaatatttccggcttccagcgactcgacaatgtagcggcgaaagcagcaaaccttatccgtcgcgaccgtccgttaacccgtgaagagctgtttcgcgtagtgcccagtgtattcagtgaggacaaacacgagtcccgtagtgagcgttatacctatatacccaccatctcctgctcgacagcctacagcgagaagcttccaccattctttgcctgtcagacccgcgtgctgacggacctcactctgctctttgtgctcctcacttccttgcttgtacagcttgacactagaagagaaaagcggaaagagcagaaaagtcaacctggtcctgcaaactacatcagcctgaccgaaggttcgcgcgacgttgcgctgccgagcctgtttaacggtcagtgggtggtggggcatagcgaaaacttctctgcctctatgaccaccatgcaggcggtgatctggattgttaccttcctcgccatgctggcgctgacgattttcattcgctattcccgcatgggtcgcgcgtgtcgtgcctgcgcggaagatctgaaaatggcgagtctgcttggcattaacaccgaccgggtgattgcgctgacctttgtgattggcgcggcgatggcggcggtggcgggtgtgctgctcggtcagttctacggcgtcattaacccctacatcggctttatggccgggatgaaagcctttaccgcggcggtgctcggtgggattggcagcattccgggagcgatgattggcggcctgattctggggattgcggaggcgctctcttctgcctatctgagtacggaatataaagatgtggtctcattcgccctgctgattctggtgctgctggtgatgccgaccggtagagaaagtatgaaaccgatgcatattgcaatggcgctgctctctgccgcgatgttctttgtgctggcgggcgtctttatgggcgtgcaactggagctggatggcaccaaactggtggtcgacacggcttcggatgtccgttggcagtgggtgtttatcggcacggcggtggtctttttcttccagcttttgcgaccggctttccagaaagggttgaaaagcgtttccggaccgaagtttattctgcccgccattgatggctccacggtgaagcagaaactgttcctcgtggcgctgttggtgcttgcggtggcgtggcgtttatggttcacgcgggaggtggatttgcacctgaccatgatctacttatcctcggtctcgggctga

SEQ ID NO: 16004 - DNA, 5072 bp, Homo sapiens
  SIMILAR (694)..(1590): 751254mologous to multiple sclerosis associated retrovirus polyprotein,accession number AF009668,Smith-Waterman Score=1186.
gtatctcctttgccgtcttaatttttatcttgctcattactcgctatgcgaaaggatttatgtccaacgtcgccgtattactggggattgtatttggctttttactttcgtggatgatgaatgaagtcaatttatccgggctacatgatgcttcatggtttgcgattgttacgccgatgtcgtttggatccggcaaaccaggcatcgttgatgcgctgaaagcagacaagaaagatccgtccgggccttatgtctggatcacctacgcggcggtgcaatctctggcgactgcccttgagcgtaccggcagcgatgagccgctggcgctggtgaaagatttaaaagctaacggtgcaaacaccgtgattgggccgctgaactgggatgaaaaaggcgatcttaagggatttgattttggtgtcttccagtggcacgccgacggttcatccacggcagccaatacctacgcgctgatagccatcggctacaccatggtttacggcattatcggcatgatcaacttcgcccacggcgaggtttatatgattggcagctacgtctcatttatgatcatcgccgcgctgatgatgatgggcattgataccggctggctgctggtagctgcgggattcgtcggcgcaatcgtcattgccagcgcctacggctggagtatcgaacgggtggcttaccgcccggtgcgtaactctaagcgcctgattgcactcatctctgcaatcgccattaaccccaggaatccgcacatgcgtattgaagaagatctgaagttaggttttaaagacgttctcatccgccctaaacgctccactcttaaaagccgttccgatgttgaactggaacgtcaattcaccttcaaacattcaggtcagagctggtccggcgtgccgattatcgccgcaaatatggacaccgtaggcacattttctatggcctctgcgctggcttcttttgatattttgactgctgtgcataaacactattctgtcgaagagtggcaagcgtttatcaacaattcttccgctgatgtgctgaaacatgtgatggtttctaccggtacgtctgatgcggatttcgaaaaaactaaacagattctcgacctgaacccggcattaaacttcgtttgtattgacgtggcgaatggttattccgaacacttcgtgcagttcgttgcgaaagcgcgtgaagcgtggccgaccaaaaccattgtgctggccaccaatatggtcggttgctatagcggtaaaccgctgaatacgcaaaatattgatagtctggcggcggaaggtattcgctttaattccgcctacacctgttcaccggtttgtacgcctgcacgggccggactatttaccggtatctacgctaaccagtccggcccgtggaccaacaacgtcgcgccaggcaaaaacatctccactatggggcgctactttaaggatgccggctatcacacctgttacatcggcaaatggcatctcgacggtcatgactatttcggcactggcgagtgtccgccggagtgggacgctgattactggttcgatggggcgaactatcttagcgaactgacggaaaaagagattagcctgtggcgcaatggcctaaacagcgtcgaagatttacaggcgaaccatatcgacgaaaccttcacctgggcgcatcgtatcagcaatcgggcggtggattttctgcaacagcctgcgcgcgcagacgagcctttcctgatggtggtttcgtatgatgagccgcatcacccgttcacctgtccggtggagtatttagagaaatacgctgatttttactacgagctgggcgagaaagcacaggatgacctggctaacaaaccggaacatcaccgcttatgggcgcaggcgatgccatcgccagtcggtgatgacgggctttatcaccatccgctctattttgcctgtaatgactttgttgatgaccaaatcggacgggtcatcaatgccttaacgccagagcaacgtgaaaatacgtgggttatttatacctccgatcacggcgaaatgatgggcgcacataagctgatcagtaaaggggcggcgatgtatgacgacatcacccgcattccgctgatcatccgttcgccgcaaggggagcggcgacaggtcgatacgccagtcagtcatatcgatttactgccgacaatgatggcgctggcagatattgaaaaaccagagattctgccgggggaaaatatccttgccgtgaaagagccacgcggcgtgatggtggaatttaaccgctacgagattgagcatgacagctttggcggttttattccggttcaactaaataaacagccattggcggaagagtacgatatttactggtatgctggtgaagatgacgttagcaaaagctatgcttgtctgacaccggaactggtggcgcagtttggtttaaaagaagacgtggcgaaaaatctgcaatggagccacgatggtaaatgcctgaagcccggtcaactggaaggcgtggaaattaaggctgatttaagccagtccgcattagtcatttcactaccgcaggcttacctcgaatatacctggcccgactgggatccaccttctcgttgggatgatggcatctccgggatcattgcggactacagcatcactgcgcaaacacgacacgaagaaaatggcggcgatgacagtaacgagatcagcggcaacgggacggtcggggttaacctggggccatggcgtatgcgcgctgactggcagaccaactatcaacatacgcgcagtaatgatgatgacgatgaatttggcggcgatgacacacaaaaaaaatgggagtggagtcgctattatgcgatctacggtaccagtcacctgaaagctcgtttgcccggcgcttaccaacgcactgacatccgcatggttcaaagactgatgatcggccagcggtacacatttttccggttgtacgccacacatcttcagcgtggcaaaaaagcgcggcggatgcccaatccccgccatcgccactacatgttcaagctgagcaacgtcacaacgcgtaccgggtgttgcgccagaatggcttttaccgcatcagaacgaacgggagaaatgtttattggttttgattacggtacagcaaactgttcagtggcggtcatgcgtgacggtaaaccgcatttgctaaaaatggaaaacgacagcacgctgctgccttcaatgctttgcgcgccaacgcgtgaagcggtaagcgaatggctgtaccgccatcatgatgttccggcagacgacgatgaaacgcaggcgctgttacgtcgggcgattcgttataaccgcgaagaagatatcgatgttacggcgaaaagcgtgcagttcggtctttcctcactggcacagtacattgatgatccagaagaagtgtggtttgtgaaatcaccaaaatcgttcctcggtgccagcggcttaaaaccgcagcaggtagcgctgtttgaggatctggtctgcgcaatgatgttgcacattcgccagcaggcgcaggcacagctgccagaagcgattactcaggcggtgattggtcgtccgatcaacttccaggggctgggcggtgatgaagcaaacacccaggcgcaagggattctggaacgcgcggcgaagcgtgccggattcacggacgtggtattccagtacgagccggtcgcggctgggctggattacgaagccaccttgcacgaagaaaaacgggtgctggtggtggatatcggcggtggtacgactgactgttcattgctgctgatggggccgcagtggcgttcgcgtctcgatcgtgaagccagcctgctgggtcacagtggttgccgtattggcggtaacgatctggatatcgcgctggcgtttaaaaacctgatgccactgctgggtatgggtggcgaaaccgaaaaaggcatcgccctgccgatcctgccgtggtggaatgcggttgccatcaacgacgtacctgcgcagagtgatttctacagtagtgccaacggtcgtctgcttaacgatctggtacgcgatgcccgcgaaccggaaaaagtggccctgttacagaaagtctggcgtcagcgtttaagctatcgcctggtgcgtagcgcagaagagtgcaaaattgctctttcaagcgtagcggaaacccgcgcctcactgccgtttatcagcaatgaactggctacgctgattagccagcgagggctggaaagcgccctcagccagccactgacgcggattctggaacaggcgcaactggcctggataacgcccaggaaaaaccggacgtatctacctgaccggcgctttaacgataactgcgaaggcgtcagctttcagagaagcaccaccaaccggcgcgccgtcgatatccggctgagcaaacagttctgcagcgttagacgcgtttacagagccgccgtactgaatgatcacttgttcagcgatgttagcgtcaactttagcgatgtggtcacggatgaatttgtgaacagcctgtgcctgagccggagttgcagatttgccagtaccgattgcccatacaggttcgtaagcgataaccgcaccttcgaatgccgcagcaccctgagttttcagtaccgcgtcgatctgacgtgcgcaaacttcttcagttttgcccgcttcattttcagcttcggtttcaccgatgcacagaaccggagtcaggccctgctctttcagcaccgcgaattttttcgcgatcagttcgtcagattctttgtggtaagtacgacgttcagagtgaccgatgatgatgtactgtgcgccgatgtctttcagcatagcagcagaggtttcaccggtgaatgcgccggacaggttcaggtccacgttttgcgcacccagcatgatgtggctgccttcagcttcgcgcttcgccatatcgatatacatttccggtggtgcgattgcaaccgcacagccagcaacacctgccagctctttacgcaggttagaaaccagctcgtgaaccatgtggcggctgccgttcagtttccagttacccatcactaa

SEQ ID NO: 16005 - DNA, 941 bp, Homo sapiens
  SIMILAR (619)..(266): 991254mologous to Escherichia coli leucine-specific binding protein,accession number J05516,Smith-Waterman Score=585.
ttaataccaaaaaatttcactcccagcagacctcgccattttcagatcttccgcgcaggcacgacacgcgcgacccatgcgggaatagcgaatgaaaatcgtcagcgccagcatggcgaggaaggtaacaatccagatcaccgcctgcatggtggtaatagaggcagagaagttttcgctatgccccaccacccactgaccgttaaacaagggttcggagccccccgttcgcgccgaaccttcggcaaggcttaagttattttgccagaaagatggacataccgattgcagagatgagtgcaatcaggcgcttagagttacgcaccgggcggtaagccacccgttcgatactccagccgtaggcgctggcaatgacgattgcgccgacgaatcccgcagctaccagcagccagccggtatcaatgcccatcatcatcagcgcggcgatgatcataaatgagacgtagctgccaatcatataaacgcgtccgtgggcgaagttgatcatgccgataatgccgtaaaccatggtgtagccgatggctatcagcgcgtaggtactgcccagcgtgacgccgttaaacatctgctgcaagaaatacaaaaactgctcagacataaggtaacctttctaaacccgcccgcattttacgggcggtgggatgatcacttggctgccgtggatgaaccgtcggcgtgccactggaagacacccaaatcaaatcccttaagatcggctttttcatcccagttcaacggccccaatcacgggagtctgcaccgttgtctattaaattctttaccagcgccatcggctcatcgctgccggtacgctcaagggcagtcgccagagattgaccgccgcgtaggtgatccagacataaggcccggacggatctttcttgtctgctttcagcgcatcaacgatgccctggtttgcc

SEQ ID NO: 16006 - DNA, 1854 bp, Homo sapiens
  SIMILAR (694)..(1590): 751254mologous to multiple sclerosis associated retrovirus polyprotein,accession number AF009668,Smith-Waterman Score=1186.
atgcgccacttcccagggcgcgcaaccagcggccttgcgggtagtccgctgattcaaaaccggttctccgcgcacgtcagcctcgctggtcagcgccagttgctcgacacgctgcgtttacgccaggcatcgatggaatcaaataatttgacgatggtttttgggtcagcattgggaagtctggcggcgtcagccctttaccgagatcgtggcataaagttgcgaaacgacatcgactgcggactcagcatcgccgccattgagagcgtcattaaggttgaatacccgtatcgatttccggatgccacttggcaggggccggaacgcaaacagcgtcaggtgttccagttcacccgcatggtcatctcgcgcatcaacgccagagtttcatcggcaatacgaaaaccgagtgctggccgatttcttccgtaccgcctcaccattggtgagcgtgatgaaccgacatcggcgctggatccggagatgatcaacgagtactggacgtatggtggaactggcgaacgaaggaatgaccatgatggtggtgacccacgaatgggctttgccgtaaagtggcgaatcggcaggcggcgcggtaaaaccgttaagcgtgagttgattatcgcggacaatgtgcacggcgaaagcggtctcgacgcccggcattaccggaaccgacattcgcaccgcaaaactgtacggcgtccagcacaagacgtgatatccaggctcatagactccggcggtgaccgacagccacaacacgacccctgcacggacagcatcaactgccgagttaaacgcagctttacgtaccgtgttaccaccgcagctcagaccatctggcacttttaccgcgtaatcggcgaccacgatgcactctccgccatcccgccatcaacgctgtatccggcatttttaactgaacggcaagcgtttcgttaccactgttacagtattcgcaatgaccgcatccttcaattacgccgttttgtcaccaaaatcgccattcttaacatgaagatcgatgcgttagtgtaccgtatcaaaattggacgttgcatcgacgccataatcgcgcttaccttagttgtaaatattccagggtgtgatcatcataatcgacaagtcactgacatcgttacgatatccggaaatacgccagttcaccccacggttaagcattcaaacgcgccttccaactgtttgcttttctccgggtcagattcggatttccgtagaagccatacagttgccccagatttggtgcctataagatgtcccgtaggaagcaatgaagcgataaccttcgatgaattccaaccggcgctggtttgccagagttacgggtatcgagcaacggtgaaccgggagaataatacgcgtcataattgtacggttatcatagccatagccgcgcacaaagccgctccaggcatcagatccaatccaggataccatgttgcatttgttggtcattctcgttggcctcctccaatctgtgacaatttctcagtccttccttgttttcatgaccttgacagttctgaggagtactggacctgcaagaggagcgtagaccagaatggcgagaatgccgaagcgaggatacctccaataatcaccgttacaacccccgccagtgcaggctggcgtaggcaagggtcccagggaactgccaaagttgccgccgacctgaaagatagttgcgccaggccatgccgcccgccggaagccatacgggccacgcgagaaattccggatgaaagaccgatgaaccggtaccgaccagcgccgccgccagagaactgcgccaaaactgcccgccagcgcaagcagcaccagaccgcttag

SEQ ID NO: 16007 - DNA, 332 bp, Homo sapiens
  SIMILAR (325)..(179): 641254mologous to Escherichia coli tRNA nucleotidyltransferase,accession number M12788,Smith-Waterman Score =149.
atgcgccacttcccagggcgcgcaaccagcggccttgcgggtagtccgctgattcaaaaccggttctccgcgcacgtcagcctcgctggtcagcgccagttgctcgacacgctgcgtttacgccaggcatcgatggaatcaaataatttgacgatggtttttgggtcagcattgggaagtctggcggcgtcagccctttaccgagatcgtggcataaagttgcgaaacgacatcgactgcggactcagcatcgccgccattgagagcgtcattaaggttgaatacccgtatcgatttccggatgccacttggcaggggccggaacgcaaaca

SEQ ID NO: 16008 - DNA, 1830 bp, Homo sapiens
  SIMILAR (436)..(1281): 991254mologous to Escherichia coli similar to ~start codon is not identified yet,accession number D90870,Smith-Waterman Score= 1451.
atgctcgcctgtgccgcgggtccgctgggttcgtttgtagtctggcgtcgtatgtcttatttcggtgatacgctggctcatgcctcattacttggcgtcgcgtttggtttgttgctggacgtgaatccattctatgcggtgattgccgttacgctgctgctggcgggcggtctggtatggctggagaagcgtccacagctggcgatcgacacgttattagggattatggcgcacagtgccctgtcgctgggcctggtggtcgtgagtctgatgtctaatattcgtgttgatttgatggcttacctgttcggtgatttgctggcagtgacgccagaagatctcatctctattgcgattggcgtggtcatcgtggtggctattttgttctggcaatggcgcaatttgctgtcaatgacgataagcccggatctggcaggcgatttcgtccccttctttgaaaatctgaccaccgcagctattgccctgctgttctttatgcacggcgcgaagttgtcgcgtgaggcgattattgctggcggtggtcactggcgactgcatttgtgggtaatgtgcagcaccttcgtgctgtttccgattctgggtgtactgtttgcctggtggaaaccggtaaatgtcgacccgatgctctactccggttttctctacttgtgcattctcccggctaccgtgcagtctgcaatcgccttcacgtcaatggcgggcggtaacgtcgcggcagcggtttgttctgcgtcggcatccagcctgctggggattttcctttcaccattgctggttggtctggtgatgaatgttcacggtgcagggggcagccttgagcaggtcggtaaaattatgctgcaactgctgctgccgtttgtgttggggcatctttcccggccgtggattggtgactgggtgtcgcgcaataaaaaatggattgcgaaaactgaccagacgtccattctgttggtggtttatacagcgttcagcgaagccgtcgttaatggtatctggcataaagttggctggggatcattgctgtttatcgtggtggtcagctgcgttcttctggctatcgtgattgtagttaacgtctttatggcacgccgactgagcttcaataaggcagatgaaattactatcgtcttttgtggttcgaaaaagagtctggcaaatggcatcccgatggcaaacattctgttccccacatcggtgatcggtatgatggtgctgcccctgatgattttccatcagatccaattgatggtctgtgcgctcaccgagcttcctgccgggaactcatctttgcgggcaaacgtccgcaggtcgatgtccgtttcgaaactttatgccacgatctcggtaaagcgtgacgccgccagaactctggccgcgtcatcatggtcatggcccggcggtgttaagttagtggaacaactatgccagcgtctgcgcgtgccaaatgaaattcgcgatttagccagactggtggctgagtttcacgatctcatccacaccttcccaatgctgaacccaaaaaccatcgtcaaattatttgattccatcgatgcctggcgtaaaccgcagcgtgtcgagcaactggcgctgaccagcgaggctgacgtgcgcggcagaaccggttttgaatcagcggactacccgcaaggccgctggttgcgcgaagcctgggaagtggcgcagtcagtgccgacaaaagccgtcgttgaagcgggatttaaaggtgtggagattcgcgaggagctgacccgacggcggattgcggcggtagccagctggaaggaacaacgttgcccaaagcctgaatga

SEQ ID NO: 16009 - DNA, 1608 bp, Homo sapiens
  SIMILAR (352)..(1782): 951254mologous to Homo sapiens putative p150,accession number U93563,Smith-Waterman Score=2344.
atgattgatgtcttagggccggagaaacgcagacggcgtaccacacaggaaaagatcgcaattgttcagcagagctttgaaccggggatgacggtctccctcgttgcccggcaacatggtgtagcagccagccagttatttctctggcgtaagcaataccaggaaggaagtcttactgctgtcgccgccggagaacaggttgttcctgcctctgaacttgctgccgccatgaagcagattaaagaactccagcgcctgctcggcaagaaaacgatggaaaatgaactcctcaaagaagccgttgaatatggacgggcaaaaaagtggatagcgcacgcgcccttattgcccggggatggggaacgaaccgatgactggatggatggccgccgcagtcgtcacactgatgatacggatgtgcttctccgtatacaccatgttatcggagagctgccaacgtatggttatcgtcgggtatgggcgctgcttcgcagacaggcagaacttgatggtatgcctgcgatcaatgccaaacgtgtttaccggatcatgcgccagaatgcgctgttgcttgagcgaaaacctgctgtaccgccatcgaaacgggcacatacaggcagagtggccgtgaaagaaagcaatcagcgatggtgctctgacgggttcgagttctgctgtgataacggagagagactgcgtgtcacgttcgcgctggactgctgtgatcgtgaggcactgcactgggcggtcactaccggcggcttcaacagtgaaacagtacaggacgtcatgctgggagcggtggaacgccgcttcggcaacgatcttccgtcgtctccagtggagtggctgacggataatggttcatgctaccgggctaatgaaacacgccagttcgcccggatgttgggacttgaaccgaagaacacggcggtgcggagtccggagagtaacggaatagcagagagcttcgtgaaaacgataaagcgtgactacatcagtatcatgcccaaaccagacgggttaacggcagcaaagaaccttgcagaggcgttcgagcattataacgaatggcatccgcataggctgacgccgccagaactctggccgcgtcatcatggtcatggcccggcgggtgttaagttagtggaacaactatgccagcgtctgcgcgtgccaaatgaaattcgcgatttagccagactggtggctgagtttcacgatctcatccacaccttcccaatgctgaacccaaaaaccatcgtcaaattatttgattccatcgatgcctggcgtaaaccgcagcgtgtcgagcaactggcgctgaccagcgaggctgacgtgcgcggcagaaccggttttgaatcagcggactacccgcaaggccgctggttgcgcgaacgctgggaagtggcgcagtcagtgccgacaaaagccgtcgttgaagcgggatttaaaggtgtggagattcgcgaggagctgacccggcggcggattgcggcggtagcagctggaaggaacaacgttgcccaaagcctgaatgagtattgggcattttgccggatgcggcgtaaacgctttatccggcctacattcgtgctcccgtag

SEQ ID NO: 16010 - DNA, 867 bp, Homo sapiens
  SIMILAR (777)..(1): 1001254mologous to Homo sapiens ornithine-delta- aminotransferase,accession number M23204,Smith-Waterman Score=1354.
tcattcaggctttgggcaacgttgttccttccagctggctaccgccgcaatccgccgtcgggtcagctcctcgcgaatctccacacctttaaatcccgcttcaacgacggcttttgtcggcactgactgcgccacttcccaggcttcgcgcaaccagcggccttgcgggtagtccgctgattcaaaaccggttctgccgcgcacgtcagcctcgctggtcagcgccagttgctcgacacgctgcggtttacgccaggcatcgatggaatcaaataatttgacgatggtttttgggttcagcattgggaaggtgtggatgagatcgtgaaactcagccaccagtctggctaaatcgcgaatttcatttggcacgcgcagacgctggcatagttgttccactaacttaacacccgccgggccatgaccatgatgacgcggccagagttctggcggcgtcagccctgcggactcagcatcgccgccattgagagcgtcattaaggtatgaatacccgtatcgatttccggatgccacttgggcaggggccggaacgccaaacagtgcgtcgctggactctacaggatctctaaggattttgcgccctggttttttaccattatcgatcagcagaacccggcgtctgcctgactggcttttgtgctgttctacgaagccatcaatggtttccatgacacagccaacgccgtggcaaccgttatctatacccgcgcgatgcgttctcagctcgccgtggttatggcggcggtattcaactttttgggtgttttgctgggtggtctgagtgttgcctatgccattgtgcatatgctgccgacggatctgctgcttaatatgggatcgtctcat

SEQ ID NO: 16011 - DNA, 819 bp, Homo sapiens
  SIMILAR (283)..(816): 961254mologous to Escherichia coli tRNA nucleotidyltransferase,accession number M12788,Smith-Waterman Score =915.
atggaacatggaagtgcccgggtcctgctagcagaaatcgggcaacaaacatcatccagctgtcacaagcacaagagtcaacctccaagggtccccgcactacactttgcgaccgccaagcggatcaacgcgcggccgcacgttcgtgtgaccgccgtggccatccctttattgtttgttccctcttggctctcgcttacccttatgttccgctcgtttttggggatttgctcggttcccgttgaccccggaacctgtatgcccttgtttccgattcgagcctcggtacccatgtcgcgattgctgagtccgcagctcgatgtccgtttcgcaactttatgccacgatctcggtaaagggctgacgccgccagaactctggccgcgtcatcatggtcatggcccggcgggtgttaagttagtggaacaactatgccagcgtctgcgcgtgccaaatgaaattcgcgatttagccagactggtggctgagtttcacgatctcatccacaccttcccaatgctgaacccaaaaaccatcgtcaaattatttgattccatcgatgcctggcgtaaaccgcagcgtgtcgagcaactggcgctgaccagcgaggctgacgtgcgcggcagaaccggttttgaatcagcggactacccgcaaggccgctggttgcgcgaagcctgggaagtggcgcagtcagtgccgacaaaagccgtcgttgaagcgggatttaaaggtgtggagattcgcgaggagctgacccgacggcggattgcggcggtagccagctggaaggaacaacgttgcccaaagcctgaatga

SEQ ID NO: 16012 - DNA, 3192 bp, Homo sapiens
  SIMILAR (439)..(1107): 931254mologous to Escherichia coli chorismate mutase/prephenate dehydratase,accession number M10431,Smith- Waterman Score=1078.
tcacgatggtttaagttcgcggaaacggttgtcatccgggaaaatgtcgaagccagggatggattccagtttgtcgagcgtaccgccagtatgaccgaggccgcgaccagagatcatcggaatatagccgccgcaggctgcgaccatcggccccaacatcagcgaagtcacatcgccgacgccaccggtggagtgtttatcaacaatcgggccattcagatgcaggcttttccagtcgagaacggttcctgaatctcgcatcgccatggtcagcgagacacgctcaggcattgtcatatcgtggaagaaaatggtcatcgcgagggcggcaatctgcccttcggagatagtgttgtcgcgaataccgttgataaagaaacgaatttcttcatcgctcagcgcatgaccatcacgttttttacgaataatttcgtcgccgtgacccagcgctttcagcaggcttgccagcaggctggaagcgccaaagcggtagtgacgcgcatctgcccagtcagcaccgaacagttcatctgcaatggcgagatatttctgcgcatcctctttctccatgagatctttagcgaactcaacgatcaaaatagcgtttttggccgacaagccaattgtcgttagcaagcccaccataaagtagacgtcatttttttgattaaagagtgtcgccgccagcagcacgccgacaatccctaacggcactaccaacataaccgagacaggaattgaccagctttcatagagtgcagcaaggcacaggaaaacaaccacaaaggaaattgctaccagagcgggagcctggtttcccgataagcgttcctgatacgacatacccgtccagtcataaccaatgcccgcaggtaattttgacgcaaggttttccatcaacgccatggcatcgccggaactggttcctggcgcggcttccccctgaatctccattgacggcagaccgttgtagcgttccagtcgcggagagccatacacccaatgtgaagtggtaaaggccgagaatggcaccatttcgccgttggcgctgcggacataaagtttatcgacatcttctggcagcatacggaatttggcatccgcttgaacacccgccgggccatgaccatgatgacgcggccagagttctggcggcgtcagccctttaccgagatcgtggcataaagttgcgaaacggacatcgacctgcggactcagcatcgccgccattgagagcgtcattaaggtatgaatacccgtatcgatttccggatgccacttggcaggggccggaacgccaaacagtgcgtcaatttccgggaataaaacgcgcagtgcgccgcaatcgcgcagtacctggaagaacacctgtggattgcggatggtgagggcgctttccgtctctttccatacccgttcaggcgtcaggtgttccagttcacccgcatgggtcatctcgcgcatcaacgccagagtttcatcggcaatacgaaaaccgaggtgggcataacgcgcagcaaaacgcgccacgcgcaatacgcgtaacggatcttcgccaaaagcgggggaaacatggcgcaacagacgattttgcagatcgcccagaccgttgtacggctcgataactcttacaaaagcggcatgggtattgaccagaaaatcgtgaaagatactgccactaataaaggcaaagcgaagcagactctgaactttaaagcctggctggtcggcgcagctgatgcgccagatctgggtaatttcgaagcaaataccaccttccagattacttaccgcaagaatggtttcatcgttatcctgcaagctatattcttcagcccactgcaggaccttgcgagccttgaaccttttttcacactcggcgctttcaaatttatccatgccattgccgacccattctggctcatccatttccgcatcatcgtaaatgctatccagccattgccggtaagcatcagggaaaaataaggatgctccattaagctcctcaatatgttgctgcgtccgccacatgactctaacgttgctataaatatgctcatgtcgtccgtaaccctcgccatcaggcagcaaaatggtggcaacaggaatctcaaaaccagcgggacgatatttgcgatgatggcgatgtaaacggcccaatcgttggaaaagcaaatctgcaggacaatgcttcccttcgatcatccctttaatcgatcctttcacccaaaatgccatatacatatggatcaggatggcgtggatcaggatgatacccgcagccgcgtggatcagcaggctgtagcgaacaacctgcatcgggaagtactgcgcaaagtacggacgccagataatcaccccggtcaccagcagcacgaaaatcatgctcatgatcgaccagaacatcatcttttgcccggcgttgtacttaccgacatccgccactttatgctcattgcctttcaatacttcgacaatgttcaacagccacggaatatctttcttatccgggatgttgtgatgcacaaaacgcacaaacataaacatcagtgcgacgaaaatcgcaatgccgaagaacgggtgcaaaatgcgtcccatagcgccaccaggaagaagcaaatcaccacggtccagtgacaggcgcgatgggcgagtacgaccctgttcatcaaccggtgcgttcagtttgttaacgataacgccggtgatgttggtgtttttggcaccgccgaagctgttgcgggtcagttcgatacgctctttcagctgttccggggtgtcagtgccctgagacataacgaagacgatttccgcattcagcgttttagcgatttcgtagttcagagactgggcaaactggtgcttacgtgtcgggaccagaccttcaaccagaacgacttcagcgtctttggtgttagcgtggtagtttgcgacgatctcttccatcagcacatctttctgattgctggaaagcagaccttcaacgtagctcattttcagcggttcagcggccgtcgtggtggaagagttcgcacgcacgatagtcgtagtctgatcgggcgcatcgccaccggtacgcggctgagcgataggtttgaaaacgctcagacgaacgcctttgcgttccattgcacggatcacgccaaggctgacgctggtcagaccgacgctggttccggtagggatcagcat

SEQ ID NO: 16013 - DNA, 1016 bp, Homo sapiens
  SIMILAR (777)..(1): 1001254mologous to Homo sapiens ornithine-delta- aminotransferase,accession number M23204,Smith-Waterman Score=1354.
acgctctcaatggcggcgatgctggtccgcaggtcgatgtccgtttcgcaactttatgccacgatctcggaatagtgtcggatgcttggcgttgtcaacgattgcgtaggccgaaaaggcgttcacgccgcatccggcaatcaacgcctgatgcgacgcttgcggtcttatcaggcctacaactgtcgttgacatgtagccggataaggcgttacgccgcatccggcaaaatgcccaatactcattcaggctttgggcaacgtgttccttccagctggctaccgccgcaatccgccgtcgggtcagctcctgcgaatctccacacctttaaatcccgcttcaacgacggcttttgtcggcctgactgcgccacttcccaggcttcgcgcaaccagcggccttgcgggtatccgctgattcaaaaccggttctgccgcgcacgtcagcctcgctggtgcctgttctctttcctgatgtctaaaggccgtgacctgcagctgcgggtggtgcagacaacccggcaggtgttgatgataaagatctgtctgaaaacgttacggcatggcggcttctttccactccggagaaataaccacgcaccgaacaccggcaccctggcggatggttgtgatgtctcccgcccggtcaatggcgcacgacttagcgcaaacagcgtggcgtggtgccctcgtccgttacctgacacgctggcgacaatgacgccgcaggcttatacagtattcaatacgacgccgaaaaatcgctctggcataacgttgagaacgtcaactggacgctcagttcttccatatgggaatgggattccgtcgccggacattatgggctggtataacaaacgcccaagtctgtgggtggaccgcgtaacaagtgggattcgttccggtgcctttcctatccaggcaccacctgagaaagttgtcatttgggtcgcacttggaagttacatctgtgaagtttctgtcattcgtccagattgtgtgtgtagcatgtgctga

SEQ ID NO: 16014 - DNA, 2859 bp, Homo sapiens
  SIMILAR (215)..(274): 301254mologous to Homo sapiens Human normal pancreas tissue derived protein 11,accession number Y59903,Smith-Waterman Score=39.
atgaaggttttagagaagaggaacaatgcttcctctgagcctgaagaaaagaatgaaataagggctgcaagggaacatgcaggtttcacactacaggagcttgtctgtcttggtgcaagtgggagaaaagtacaaggtgaagcagcaaatgctgaggaagaagttgcagcaggtgaactggataatatagctaagataacaaatgaaggtagctacactgaacaacagattttcaatgaagggtacatgtggctttccacattaatgaaaataaaagaaaataaaatatcctgttcctgggccacacaatctcatttccagggctcaatagatgcgggtgaactggaacacctgacgcctgaacgggtatggaaagagacggaaagcgccctcaccacccgcaatccacaggtgttcttccaggtactgcgcgattgcggcgcactgcgcgttttattcccggaaattgacgcactgtttggcgttccggcccctgccaagtggcatccggaaatcgatacgggtattcataccttaatgacgctctcaatggcggcgatgctgagtccgcaggtcgatgtccgtttcgcaactttatgccacgatctcggtaaagggctgacgccgccagaactctggccgcgtcatcatggtcatggcccggcgggtgttaagttagtggaacaactatgccagcgtctgcgcgtgccaaatgaaattcgcgatttagccagactggtggctgagtttcacgatctcatccacaccttcccaatgctgaacccaaaaaccatcgtcaaattatttgattccatcgatgcctggcgtaaaccgcagcgtgtcgagcaactggcgctgaccagcgaggctgacgtgcgcggcagaaccggttttgaatcagcggactacccgcaaggccgctggttgcgcgaagcctgggaagtggcgcagtcagtgccgacaaaagccgtcgttgaagcgggatttaaaggtgtggagattcgcgaggagctgacccgacggcggattgcggctgcatccgacactattcctcaattaaatgaacacgacatacaccgcaggcggcacaataaagcgataaatggcgaacgggatcaacgaaatgcgcttaatcaattgcaggaaggttttaatcgctatcagcgccaccacaaaagcggtgatcaacccaacggcaaacatcgggatatcgccgcttgtcaggaagccccagctttagtagagatcgagcgccgttgcgcccatcatcatcggcaccgccagcaggaacgaaaatctgaacagcatgctgcacgctttggtattgcgaatggcgatctggtgcgtgtctggaacaaacgtggtcagattttgacaggcgcggtggtgactgacgggatcaaaaaaggcgtggtatgcgtgcatgaaggtgcatggccagatctggaaaatggcttgtgtaaaaacggcagtgcgaacgtgttaacggcggatatccccagctcgcagctggcaaatgcctgtgccggtaactcagcgttggtgtatatcgaaaaatatacgggcaatgcaccgaagttaacggcgtttgatcagccagctgttcaggctaataccagacctttacggcttgcgcgcaatcagcaccgcgcgtttaggtgccggataaccttccaccgttttacccggatcatgtgggtcgaggaaatcggccagcgattcggtaaccatccattcgggcgagtccgaatccaggactcactttgcgtctgtggtgctctacgctacatttctgctacattcaacgtttggcggaaacgcgcggtcacatgcgttcggtcttttggctcggattttactggaagccccccgctaagagcgcccaaaggagagtctattcgtcgcctacttgccttacgtgaagcgggaatcattcatattctcgccctcggtgaagactacaaaatggaaattaatgagtcgcgcaccgtcctgaaaacggaagacaacagctactcgtttgacgtttttattgatgcccgcggacaacgtccgcttaaagtgaaagatatccctttccctgggctacgcgagcaattacagaaaacaggggatgaaatccctgatgttggcgaagattatacgttacagcaacccgaagatattcgtgggcgcgtagcgttcggcgcgttgccctggttgatgcacgaccagcctttcgttcagggacttacggcatgtgcagaaattgctgctgcctgcggtcctttcgataaagatcgcattgaaggcggcattgtggtgcggatggcgaaagagggcgaaacgctggtgctgctcgacggtactgaagcgaagctgaatgctgacactctggtcatcgccgaccacaacaaggcgctggcgatgggcggcatcttcggtggcgaacactctggcgtgaatgacgaaacacaaaacgtgctgctggaatgcgcgttctttagcccgctgtctatcaccggtcgtgctcgtcgtcatggcctgcataccgatgcgtctcaccgttatgagcgtggcgttgatccggcactgcagcacaaagcgatggaacgtgcgacccgtctgctgatcgacatctgcggtggtgaggctggcccggtaattgatatcaccaacgaagcaacgctgccgaagcgtgcaaccatcactctacgtcgtagcaaactggatcgcctgatcggccatcatattgcggatgagcaggtaactgacattctgcgtcgtctcggctgcgaagtgaccgaaggcaaagacgaatggcaggcagttgcgccgagctggcgtttcgatatggagattgaagaagaagacgtttga

SEQ ID NO: 16015 - DNA, 688 bp, Homo sapiens
  SIMILAR (404)..(297): 411254mologous to Human immunodeficiency virus type 1 tat protein,accession number AF055729,Smith-Waterman Score=66.
caggttcgtaaggttttggtgaaaaggttaaatcgtagaagctagtatatttttataattttgtaacaatggcttttttcatgggggagcggggttaagtattatagtcctaacaagtccagtaattttttataaatcttcagattataaacagcccctaaaaactttacaacgtttacacagttttttaaaaagagactgtatacacttgatttgctttcaaaataaataaggtccagctaagtcttaggaaggttaacgtcggttaggaatgctgaatcatgataaggtttggttttctacagattctgttccggtgcctttcctatccaggcaccacctgaagaaagttgtcatttgaggtcgcacttgggaagttacatctgtgaaagtttctgtcattccgtccagatcgtgtgtgtgtagcatgtgctgaggaagcacgtgctgggctgtgcctcagacagtgcatcaccgggcacccagaggcttgcctggctattcctgttctggtgtgtgtggagtgttggggaggaacagatgcagatcaacctgtggctgttttcccgtctaggttctcacaggtatctcctgacagaggtacttaacaatggctctgctggaaatttctataaataaaatgtccaaaatggtaaaaaaaaaaaaaaaaaaaaaaagggcggccgct

SEQ ID NO: 16016 - DNA, 606 bp, Homo sapiens
  SIMILAR (337)..(606): 1001254mologous to Escherichia coli K12 putative flavoprotein,accession number AE000360,Smith-Waterman Score=457.
atgaatcgcccaacgctcttcttcaccgatctcgcctttcatgtcgaccggttcacccagtacgttcatgatacggcccagagtcgctttacctaccgggacttcaatcgggtgttcgaggtcttttacatccagaccgcgacgcagaccgtcggaggaacccattgcgatggtacgtacgataccgccgccgagctgctgctgaacttccagcaccagacgctcattacctatgttgagaaatacatactaacaaatgacagacaatgtcatcacaggaggatattttacacatttcttgaatctttagcttacctcacctcgaaagccatagagatctgccaggtgacttcgttagatattccaaccgtaagcgtgcgcaaatcccactggggaaatgcgctaacggcgacgctgcaaacagaaaaacgcccgctatgcctttccctggcgcgtcaggcgggagcagcgaaaaacgccacgttgccctctggaatgcaacaactgaacattgtcccgggtgcgcttccggactggctggttagcacagaggatctgaaaaatgttacccgcgacccattagctgaggccagacgggtgctggtg

SEQ ID NO: 16017 - DNA, 579 bp, Homo sapiens
  SIMILAR (40)..(570): 961254mologous to Escherichia coli K12 putative flavodoxin,accession number AE000355,Smith-Waterman Score=923.
gaaggcgttgctggataccctgctgcgtcgttatgtcgaatctcaggtttatcagggcgtggttgaaaacctggccagcgagcaggccgcccgtatggtggcgatgaaagccgcgaccgacaatggcggcagcctgattaaagagctgcagttggtatacaacaaagctcgtcaggccagcattactcaggaactcaccgagatcgtctcggggggccgccgcggtttaaacaggttatttcgtagaggatttaaagatggctacctggaaagattgtccaggtaatcggccgccgtagttgacgtccgaattccctcaggatgccgtaccgcgcgtgtacgatgctcttgaggtgcaaaatggtaatgagccgtctggggctggaagttcagcagcagcttcggcggcggtatcgtaccgtacctcgcaatggggttcctccgaacgtctgcgttcgcggtcttggatgtaaaagacctcgaccacccgattgaagtcccggtaggtaaagcgactctgggccgtatcatgaacgtactgggtgacccggtcgacatgaaaggcgagatccccgggtt

SEQ ID NO: 16018 - DNA, 919 bp, Homo sapiens
  SIMILAR (626)..(1096): 971254mologous to Escherichia coli acriflavine resistance protein,accession number M94248,Smith-Waterman Score=757.
tgatgctgcactctactgcgttggcatttactgccacggtgccggatctgctgaaaatagcccgcgatattaacgccgccacgtatacaaccttttaccgccttcggcattgccgcggtgctctatttaatcatctcttatgtcctgatcagcctctttcgcagagcggaaaaaacgctggttgcagcatgtgaaaccttcttcaacgcactgagaatacgatgtccgagaataaatttaaccgttatcgatttgcacaaacgctacggcgaacatgcagcgtctgaaaggggtatcactgcaagcgaatgccggagatgtaataagcatcatcggatcgtcgggatcggggaaaagtacctttctgcgctgcattagcttccaggaaaatcagaggggaggctccatggtggtcacagtccagacgatcaatctggtgcgcgacaaagacggtcaactcaaagtcgccgataaaaatcaactgcgcttactgcgcacacgcctgacgatggtattccagcacttcaatctctggagccatatgacggtgctggaaaacgtcatggaagcgccgattcaggtgttgggcctgagcaaacaggaagcgcgcgagcgggcggtgaagtatctggcaaaagtcgggatagacgaagaacctgcagagacacgagtacgttcacctacgcccgcaaacacagaaccgcgacgcagaccgtcggaggaacccattgcgatggtacgtacgatacccgccgccgagctgctgctgaacttccagcaccagacgctcattaccattttgcacctcaagagcatcgtacacgcgcggtacggcatcctgagggaattcgacgtcaactacggcgccgattacctggacaatctttccagtagccatcttaaatcctctacgaaataa

SEQ ID NO: 16019 - DNA, 696 bp, Homo sapiens
  SIMILAR (646)..(473): 811254mologous to Escherichia coli O157:H7 transcriptional regulatory protein,accession number AE005499,Smith-Waterman Score= 245.
atgtatttacgccttaatgaagtggcaacgaatcttgtggtactgggatatatagaacaagaacaaagcaaatggttatcccaggataacgccatgctggttacccacaatggacgtcttttaaaaaccgtcaaacttaataataatctgctggaagtgacaaattccgggcaggaccctctgcgtaacgcgctggcaataaaagatggcagccgctggacgcgcgatattctctggagtgaagacaaccattttcgctctgcgaccctgagttctactttttcctttgctggattagagacgctgaatattgcgggtcgcaatgtgctgtgtaatgtctggcaggaagaggtgacttccacgcggccagaaaaacagtggcaaaacacattctgggtcgattcggctactggccagtcgtatttcattgccagcgtactttacgtaatgacaccccatgcctttgcgcaaggaacggtgactatttatctgcctggcgaacaacagacactttccgttggccccgtggaaaatgttgtccagttggtgacacaaccgcacaggacaggcaagcttgcatgctgttgtcactctagaggatcccgcgggatttctatgctgacttatgcgcatcaagaatttgcacggcaatccacgttgccataccaccgcttccgcctgtgtcagttagtttga

SEQ ID NO: 16020 - DNA, 714 bp, Homo sapiens
  SIMILAR (305)..(81): 291254mologous to Kluyveromyces marxianus reverse transcriptase,accession number AF209927,Smith-Waterman Score=63.
tcgagcgcgactctagaggatccaggcgttgcttattccactatgtatttacgccttaatgaagggcaacgaatctttgtggtactgggatatatagaacaagaacaaagcaaatggttatcccaggataacgccatgctggttacccacaatggacgtcttttaaaaaccgtcaaacttaataataatctgctggaagtgacaaattccgggcaggaccctctgcgtaacgcgctggcaataaaagatggcagccgctggacgcgcgatattctctggagtgaagacaaccattttcgctctgcgaccctgagttctactttttcctttgctggattagagacgctgaatattgcgggtcgcaatgtgctgtgtaatgtctggcaggaagaggtgacttccacgcggccagaaaaacagtggcaaaacacattctgggtcgattcggctactggccaggttcgtcaaagtcggcaaatgttaggcgcaggggttattcccgtagaaatgacgtttcttaaacccgcaccatgaataaattacagtcgtatttcattgccagcgtactttacgtaatgacaccccatgcctttgcgcaaggaacggtgactatttatctgcctggcgaacaacagacactttccgttggccccgtggaaaatgttgtccagttggtgacacaaccgcaactgcgcgatcgcctctggtggcctg

SEQ ID NO: 16021 - DNA, 900 bp, Homo sapiens
  SIMILAR (447)..(677): 421254mologous to Escherichia coli No definition line found,accession number U00006,Smith-Waterman Score=153.
agtacctgttcttcccgctcccacctccacctaattcaggcatccccaatccttccaaactatgtggccactgcagtagcagcacgcatcatagcagatgttcaaggaatctctgatacttgtgtgattgcgcagccttcaccaccacaccctggagctttgaggaccttagtattcaccacagatgaaccggagactcctcagcccccaggtgcagcaggattccagctggtccagaagaaacaagtgcagctgcataacgtactttatgtaatgacaccccatgcctttgcgcaaggaacggtgactatttatctgcctggcgaacaacagacactttccgttgcccccttgaaaaatgttgtccagttggtgacacaacagcatctgcgcgatcgcctctggtggcctggtgccttcctgaccgactttgcggcgaaagttaaagcgcttaaagacttcccaaccatgtcatggcacagcgtgcttccggggaagcagaagccgacgacgatgtggcggcaacgattaaatccgtgcgccagcagttactcaatctcaatatcactggtcgcttaccggtcaaactggaccctgattttgtacgagtggatgagaacagcaatcccccgttggtcggggactatacgctctataccgtacagcgtccgggtaccgagcaagggtcgttcaaggtgaagcgggcccgagctagagttcgtcaaacccgggcccctttatttggaccaaagtccccagctcctgagcacatggagtcagaactcgaatttgagcttatcggcccaagcaaatcaacaagtgggaatcctagagggcttcgttctgaaaggccagttctcttctgcctgtacccagagatgcccactgctgctgccaggg

SEQ ID NO: 16022 - DNA, 1062 bp, Homo sapiens
  SIMILAR (354)..(4): 1001254mologous to Homo sapiens lipoxygenase,accession number J03600,Smith-Waterman Score=634.
tcagatggccacactgttcggaatccggtctggggacaagtagtaatatggcagctgcttcttcttgttgcgctcagcaatcacgctgacaatggcctcgaggttcttgcggaatcgggccatggcttccttcacaggcttctcgataaaatgctcttctgggtacatgcccaggaacagctcgttttcctggaactggctcagcgcccacactgcacccagatgccagcaggagcggccgcggtcgggcagcgtgtccacgatctgctcaatggtcaccacgcccttggcagtcggtggcggggctcgcatggttgggggcgcattggggatccaggagcaccagtcgtactgcggagacgaccgccagcaagcgtgggcacccccgaagccctgctgcccagctgccccctgggccccgtcctccccgtgccccccaactccagcgggccctgcagtccgtccatcctctttccccgcggccagcgcccttggctggccgaagttgaccgcggcgtgctgggcggaggcggtgaagatcaccacggtcaggtactccgacagctgctcccggctcttgaccgacttggggaagcctgtccagtctatgctattaaaggacataagaaaggtatacaattggcagtaaacaatttccttcagctcttcatggatgtccaggaaaatgacaacccgcacacaatcagacgtgaatgatttctgctccagtgtcttcaggctctggacctcctgctccaagctgagctgccgctccaggctgcactctaccatctccgtggtcaccgggagcttctcgggcagctctgtgcagcgccggatcaacacagggttgcagccattcaggaactggtagccaaacatcaggtcttcctgccagtgattcatgacccgctcagaaatagtgttgctgatcttgacaaagattttctcaaagtcggcgaagtcattccaagaagactggaacatgtgcatgaagcggttgatgaacaggttctccatcctgcagaccaggagagaggtcaccttgcgcacactagccat

SEQ ID NO: 16023 - DNA, 1598 bp, Homo sapiens
  SIMILAR (2995)..(3522): 821254mologous to Homo sapiens dJ287G14.2 (PUTATIVE novel seven transmembrane domain protein),accession number AL033377,Smith -Waterman Score=715.
  misc_feature (1)...(1598): n = a,t,c or g
atgggcctgagccctctacatggactggcgatgttgcgagaggtacggtcggcacacagtacatacaacgtggattctagtcggattgcagcggcacccctgccaccccctgcaatcgtcttccaggctgcaaacagcgagtggggaggtgaacacatcagcttttcctccctccacaccaccaggaaatttcgcaaaccacttggctctcggcggcctggcctcgccacacctgtgcccacagtctctctccgctgcagccccctgtgccattctccaggccccacgtacctctgcctgggcccagtaagacctggtcagatggcccccggctgcaaagccttcctgggccccatcagagaggacgcccaggaggtgaggagcgcctctggccagccgccccacctgggaggcgaggagcgcctctgcctggccgccccatctgggaggatctgccactgtgaaggagatgatgagagccccctgatcaccccctgccactgcacaggaagcctccacttcgtgcaccaggcctgcctgcagcagtggatcaagagctccgacacgcgctgctgcgagctctgcaagtatgagttcatcatggagaccaagctgaagccactgagaaaatgggagaagttgcagatgacgtccagcgagcgcaggaagatcatgtgcttcagtgacattccacgtcattgccgtcccatgtgtggtctggtccttgtatgtgctcattgaccgtactgctgaggagatcaagcaggggcaggcaacaggaatcctagaatggcccttttggactaaattggtggttgtggccatcggcttcaccggaggacttctttttatgtatgttcagtgtaaagtgtatgtgcaattgtggaagagactcaaggcctataatagagtgatctatgttcaaaactgtccagaaacaagcaaaaaaaatatttttgaaaaatctccactcacagagcccaactttgaaaataaacatggatatggaatctgtcattccgacacaaactcttcttgttgcacagagcctgaagacactggagcagaaatcattcacgtctgattgtgtgcgggttgtcattttcctggacatccatgaagagctgaaggaaattgtttactgccaattgtatacctttcttatgtcctttaatagcatagactggacaggtgactatttatagtggcttctctttttctaaaccctccttagtctcctagaaaaccttcctgtgggccaggcatgcctgggtcctgcctctgcctggcagctctgtgggaaagtggaagaccccatgatgacatcatggggagccagcagagttcctgcccatggtcttgagctgaatgagagaataaaatgccaatcccaagggaagaggaaggagcaaggggtgcccagggncctgataccccagccgcctccagcttgcagtggtccccagcctggagcagagcatttggggagtgtctaagccatgacgagaagattccctctgcatcacggcgaacccccaggagatggtatttgaaaacagacccccaaacacagactcctgcctgccctcttgccgatg

SEQ ID NO: 16024 - DNA, 1194 bp, Homo sapiens
  SIMILAR (4)..(954): 991254mologous to Homo sapiens death associated protein 4,accession number AF081567,Smith-Waterman Score=1624.
atgggtcagaaaggcctggttaaaatctttgcttggatgcatacttactattcttatccgcatctgaccacttttcagcatccgttatcggaagtcctgagcaaatgctggatctatttcaatctttaccttgccccctttcgtatgccggtttttttctttatatccggctatttgattcgccgctatatcgacagcgtaccgtggggaaattgtctcgataaacggatctggaacatcttctgggtgctggcgctttggggcgtggtgcagtggctggcgttaagtgcgctgaaccagtggctggcacctgagcgcgatttaagcaatgcctccaatgccgcttatgccgattccaccggtgagttcctgcacgggatgatcaccgccagcaccagcttgtggtatctgtatgcgttaattgtctatttcgtggtatgtaaaatttttagccgtctggcgctgccactattcgccttgtttgtactgctgagtgtggcggttaatttcgttcccacgccgtggtggggaatgaacagtgtgatccgcaatttgccttattacagccttggcgcatggtttggcgcaacaataatgacctgtgttaaagaggtgccgttgcgccgccatctgctgatggcttctttgcttaccgttctggcggtcggtgcctggttgtttactatctcgctgctgttgtcgctggtatcgattgtggtgatcatgaagctgttttatcaatacgagcaacgattcggtatgcgctccaccagcctgctgaatgtgattggctccaacaccattgctatctacaccgtcagcaaaaaccacgcaatgatagtcattgaggatttgaaggtcagcaacatgtcaaagtcagcagcggattgtattctcccaccatggctgaaatcagataaactgggggttttatttaatattgtcggcctggcgaaccccggtgctgaatacgccgcaacgcgacataatgctggtgcctggttcgttgacttactggcagagcgtttgcgcgctccgctgcgcgaagaggctaaattctttggttatacttcgcgagtcactcttggaggcgaagatgtccgcctgttagtcccgactacatttatgaatctcagcggcaaagccgttgcggcgatggccagttttttccgcattaatccggacgaaattctg

SEQ ID NO: 16025 - DNA, 717 bp, Homo sapiens
  SIMILAR (871)..(1047): 891254mologous to Homo sapiens death associated protein 4,accession number AF081567,Smith-Waterman Score=272.
tcatgcccgcaggtccatctccgtgctgtaacgctgcatggaagccgcgtctgcaaccggtttgcccgcctgttccaggttcagcagtttaaccgtaaccgcctgctgataaccctgcggcttaacagagatttgataacgaccacgatactgctcgtcttcgtccagacggttccattgtacccaatcggtggtcagtgtctgaccagcatcatcacgttgggtgatggtgtagtttttcgcctgcagcacgctaaccacctgcggccacagagtattgccacgaccattttccaccagcaatgaagcggtatcgccgtgaactgggtacgcgcgccagaaaccagtgccagcgctgggctggtggacgaatgtcagcgccagcaccgcaccgccgataatattacccagcatcaccgggagcagattggcggtaataaaatggctgaccgtcagtgccggaaaattgtctgcgctactgtgcgccagctgccagaaggggggaggggcgaaatggcgaatggcaatggcgaacggaatcacaaacaaattggcgatacagtgctcacccccccacagcactatcgaaaaatttaccagccaatcgcagcacgttcttgcataaggtgtgtctgcggttcgtagcatggtttccagcggataaggtcgccggccattaccagccttggggtaaaacggctcgatgacttccaccat

SEQ ID NO: 16026 - DNA, 1782 bp, Homo sapiens
  SIMILAR (1433)..(1630): 871254mologous to Escherichia coli f161,accession number M87049,Smith-Waterman Score=289.
atggcaggtattcgctcaaccttaattaaggagaaaaacatgattaccaattatgaagccactgttgtaactaccgatgacattgttcacgaggtgaatctggaaggaaagcgcattggctacgtaattaaaacagaaaataaagaaaccccattcactgtggttgatatcgatggtccatcaggcaacgtaaaaacacttgatgaaggtctctcgctgctgttgtcgctggtatcgattgtggtgatcatgaagctgttttatcaatacgagcaacgattcggtatgcgctccaccagcctgctgaatgtgattggctccaacaccattgctatctacaccacccatcgcattctggttgaaatattcagcttaactctgcttgcgcaaatgaacgcagcacgctggtcgccgcaagtcgaactgacactcctgctggtttatccctttgtcagtttgttcatctgtactgttgcgggcttgctgaatctgacaaccgttatgcctgaacaatatcgttatacgctgcccgtcaaagcgggtgagcagcgtctgctgggcgagttaaccggcgcaccctgtgcaacgctggtagcggaaattgccgaacgtcacgccggtccggtggtactcattgcaccagatatgcaaaatgctctgcgtttgcatgatgaaatcagcaagtttaccgatcaaatggtgatgaatctggcggactgggaaactcttccctacgacagttttttcgcttcatcaggacaattatctccttgtggcctttcaacccttttaccagctaacggacgatgcagcggtgggcgtactgattgttccggtgaatacgcttatgcagcgcgtttgcccacacagttttctccacggtcatgcgctggtgatgaaaaaaggtcagcgcctgtcacgagatgcattacgaacccaactggacagcgccggttatcgccatgttgaccaggtgatggagcacggcgaatacgccacgcgcggcgcgttgctggatctcttcccgatggggagtgagctgccttatcgtcttgcaatcggggtgaatgtggcgcaggcggaagtgttgaatctggagtccggagctaaacaggttttacaagaaacctttggctaccaacagtttcgccccggccaggaagaaattatcgacactgtgctttccggccgcgattgcctcgtcgtcatgcccactggtggcggaaaatccctttgctatcaaatccctgccttattgctaaacggccttaccgtggttgtttcaccgctgatttcgttgatgaaagatcaggtggatcaactgcaagccaacggcgtggcggcggcgtgccttaactcgacgcaaacccgcgaacagcaacttgaagtgatgacgagaccgcgcattggggatggaactggagcgttacgaaaaagagtcgcacagctggcctttaaaaatcagccaatgatggtgggcaactgggcgcaaagcattttgcacggcggggtcattgcgtcggcgctggatgtcgccgccggtctggtgtgcgtgggaagtaccttaacccgccacgaaaccatcagtgaagatgaactacgccagcggtatcgcggatggggaccattgatcttcgcgttgattatctgcgcccaggcaggggcgagcgttttactgctactagtagcctgttgcgtgcaggcaataaagtcgccgtcgcccgcgttgaattacacaatgaagaacagctttatattgccagtgccaccgccacctatatg

SEQ ID NO: 16027 - DNA, 1434 bp, Homo sapiens
  SIMILAR (1816)..(2682): 951254mologous to Homo sapiens putative p150,accession number U93564,Smith-Waterman Score=1490.
atgaagctgttttatcaatacgagcaccgattcggtatgcgctccaccagcttgctgaatgtgattggctccaacaccattgctatctacaccacccatcgcattgtggttgaaatattcagcttaactctgcttgcgcaaatgaacgcagcacgctggtcgccgcaagtcgaactgacactcctgctggtttatccctttgtcagtttgttcatctgtactgttgcgggcttgctggtaagaaaactttcacagcgtgcattcagcgatctgttgttctccccgccttcactgcccgctgccgtcagttactcccgttaagccatcgccccagccggggcgattcaatttgctaaaccatgtcgattacggataatgaacagcattgcttatcagagatatgcccccatatgttgaggcatatcctaacgagaatctgacaaccgttatgcctgaacaatatcgttatacgctgcccgtcaaagcgggtgagcagcgtttgctgggcgagttaaccggcgcagcctgtgcaacgctggtagcggaaattgccgaacgtcacgccggtccggtggtactcattgcaccagatatgcaaaatgctctgcgtttgcatgatgaaatcagccagtttaccgatcaaatggtgatgaatctggcggactgggaaacatcttccctacgacagtttttcgcctcatcaggacattatctcctcgcgcctttccaccctttaccagctaccgacgaatccaggggggggtactgattgttccggtgaatacgcttatgcagcgcgtttgcccacacagttttctccacggtcatgcgctggtgatgaaaaaaggtcagcgcctgtcccgagatgcattacgaacccaactggaccgcgcccgttatcgccatgttgaccagccagcgcacgctggcggcaaagtgctggagatgatcgtggtggggatcgccacctggctggggttcttgctcttcgggctgaactattcgctgctgctggcagtgctggtcggcttctcggttcttattccgtacattggcgcatttgtggtgaccattccggtggttggcgtggcgctattccagtttggcgcaggtactgaattctggagctgcttcgcggtgtatctgattattcaggcgctggacggcaacctgttagtgccggtgttgttctccgaagcggttaacctgcatccgctgcatcaccgggagcagattggcggtaataaaatggctgaccgtcagtgccggaaaattgtctgcgctactgtgcgccagctgccagaaggggggaggggcgaaatggcgaatggcaatggcgaacggaatcacaaacaaattggcgatacagtgctcaaagccactgggagcaaacagggtgatgggcaaaatcatggcgacgattttgtcgcgtaa

SEQ ID NO: 16028 - DNA, 940 bp, Homo sapiens
  SIMILAR (1)..(201): 891254mologous to Homo sapiens fibroblast tropomyosin,accession number M12125,Smith-Waterman Score=293.
atggaccagaccgtcaagtccctgatggcctcagaggaggagtattccaccaaagaagagaaatatgaaaaggagatgaaactgctggaggagaaactgaaggaggctgagaccagagcagagtttgtcgaaaggtctgtggcaaagttggagaaaaccaccgatgacctagaagagacgttggccagtgccaaggaggaaacgtggagattcatcagacctgggaccagaccctactggaactcagcaacctgtttcttacttcctggtcacaaaatggctgccgaagtccataagctaaatcctaatgtgagtgaacatgatcaagaaagatggcatgatgcttttgggaacggtggtgcagataatcactcaaagctccaagcaagcaccagaagaggaggacccttgagtcaggagctgctgcaatccctggcagctagcctagcagcaggaggtctgacggcgcttagtgctgaattcactatcggcaaaggtgagttgatggctcatgatgtcctctggggatgcgctccggatgaatatgatgatctcatatcaggaacttgttcgcaccttcccaaggggaaaacgcacgacgtgctgaccggaagtgatgacggtcgccacagcaacacgtctctggcgtggggagctggcgtgcagtttaacccgaccgaatccgtggccattgatattgcttatgaaggccccggcagtggcgactggcgcactgacggtttcatcgtgggcgggcttttttgtggggtgaatatggcagtaaagatttcaggtgtactgaaagacggcacaggaaaaccggtacagaactgcacaatccagctgaaagcaaaacgtaacagcaccacggtggtggtgaacacgctggcctcagaaaatccggatgaagccgggcgttacagcatggacgttgagtacg

SEQ ID NO: 16029 - DNA, 1383 bp, Homo sapiens
  SIMILAR (922)..(1380): 831254mologous to Escherichia coli Tail fiber protein GP37,accession number D90774,Smith-Waterman Score=554.
atgcgtaatgtgtgtattgccgttgctgtctttgccgcacttgcggtgacagtcactccggcccgtgcggaaggtggacatggtacgtttacggtgggcttatttccaagtgaaaccgggtacattgccgtcgttgttcgggcggggataccggtgtgagtcatctgaaagggattaacgtgaagtaccgttatgagctgacggacagtgtgggggtgatggcttccctggggttcgccgcgtcgaaaaagagcagcacagtgatgaccggggaggatacgtttcactatgagagcctgcgtggacgttatgtgagcgtgatggccggaccggttttacaaatcagtaagcaggtcagtgcgtacgccatggccggagtggctcacagtcggtggtccggcagtacaatggattaccgtaagacggaaatcactcccgggtatatgaaagagacgaccactgccagggacgaaagtgcaatgcggcatacctcagtggcgtggagtgcaggtatacagattaatccggcagcgtccgtcgttgttgatattgcttatgaaggctccggcagtggcgactggcgtactgacggattcatcgttgggatttcaggagtcctgaaagacggcacaggaaaaccggtacagaactgcaccattcagctgaaagccagacgtaacagcaccacggtggtggtgaacacggtgggctcagagaatccggatgaagccgggcgttacagcatggatgtggagtacggtcagtacagtgtcatcctgcaggttgacggttttccaccatcgcacgccgggaccatcaccgtgtatgaagattcacaaccggggacgctgaatgattttctctgtgccatgacggaggatgatgcccggccggaggtgctgcgtcgtcttgaactgatgggtggaagaggtggcgcgtaacgcgtccgtggtggcacagagtacggcagacgcgaagaaatcagccggcgatgccagtgcatcagctgctcaggtcgcggcccttgtgactgatgcaactgactcagcacgcgccgccagcacgtccgccggacaggctgcatcgtcagctcaggaagcgtcctccggcgcagaagcggcatcagcaaaggccactgaagcggaaaaaagtgccgcagccgcagagtcctcaaaaaacgcggcggccaccagtgccggtgcggcgaaaacgtcagaaacgaatgctgcagcgtcacaacaatcagccgccacgtctgcctccaccgcggccacgaaagcgtcagaggccgccacttcagcacgagatgcggtggcctcaaaagaggcagcaaaatcatcagaaacgaacgcatcatcaagtgccgattatgcagcatcatag

SEQ ID NO: 16030 - DNA, 405 bp, Homo sapiens
  SIMILAR (185)..(403): 1001254mologous to synthetic construct lac repressor,accession number A14595,Smith-Waterman Score=349.
gttcgcgggctttcccggtcaagctttaaatcgggggcctcccttaagggttccgatttagtgctttacggcacctcgaccccaaaaaaacttgatttggtggactcttgttccaaactggaacaacactcaaccctatctcgggctattcttttgatttataagggattttgccgatttcggaaccaccatcaaacaggattttcgcctgctggggcaaaccagcgtggaccgcttgctgcaactctctcagggccaggcggtgaagggcaatcagctgttgcccgtctcactggtgaaaagaaaaaccaccctggcgcccaatacgcaaaccgcctctccccgcgcgttggccgattcattaatgcagctggcacgacaggtttcccgactggaaagcgggca

SEQ ID NO: 16031 - DNA, 390 bp, Homo sapiens
  SIMILAR (34)..(276): 651254mologous to Homo sapiens similar to a C.elegans protein encoded in cosmid T26A5,accession number D87682,Smith-Waterman Score=245.
atggggtccaagagttgggtaacacagaaggggccagctaaagcacaaagcagtcaagtgggcagagtgaaacaagctacagccactgacactggaagaaccagagacagccatatggaaagacccaaatgctctaagggatatctgtgtttgccttacatggcattgcagcagcatcatcttctctccgatgtcaccgttcgggggtttgttgctggagctactaacatcctttttcgacaacagaaacacctcagtgatgccattgtggaagtacgtttatgtggttccgatttagtgctttacggcacctcgaccccaaaaaacttgatttgggtgatggttcacgtagtgggccatcgccctgatagacggtttttcgccctttga

SEQ ID NO: 16032 - DNA, 414 bp, Homo sapiens
  SIMILAR (2542)..(4878): 911254mologous to Homo sapiens putative p150,accession number U93563,Smith-Waterman Score=3632.
tcaaagggcgaaaaaccgtctatcagggcgatggcccactacgtgaaccatcacccaaatcaagttttttgggggtcgagggtgccgtaaagcactaaatcggaaccctaaagggagcccccgatttaaagcaggagttgggagagcccaggcagcatgagctggcatttccaagcctgcgggggatggaggaacttcttgggccaccaagggtgcagggatgcctgggtccacagctgcagctgggtgactgtagctgtgccttctccactgcagcaaatgtctttgcagctgctgctccagatgggctgttgcttccatcaaaaggatcttttcaatcaagataataatgaaagcaatgctgtcttggaattcagcattgaatgtatctatagctacctgattttcactcat

SEQ ID NO: 16033 - DNA, 390 bp, Homo sapiens
  SIMILAR (288)..(365): 921254mologous to unidentified cloning vector lacZ alpha peptide,accession number U13869,Smith-Waterman Score=124.
ggggcttccgaggcgatcaggcagcatcagtcttcagccactaagccaagaagatctgggaaggagtcagtcagagagcctcgggccagagttccaggggctctggcagtggctgtcagactttcaaacttaacaccagtgatttgccaggggcttttgggccatcagccacagactgaaggctgtacttttggcttccctacttttgagattttgggacttggaatgacttctttgctcttcagcatgaagacagcctattgtggaactttaccttatgatcatggttccgatttagtgctttacggcacctcgaccccaaaaaacttgatttgggtgatggttcacgtagtgggccttcgccctgatagacggtttttcgccctttga

SEQ ID NO: 16034 - DNA, 1611 bp, Homo sapiens
  SIMILAR (24)..(653): 961254mologous to Escherichia coli Periplasmic oligopeptide- binding protein precursor,accession number D90771,Smith-Waterman Score=1075.
atgcatgccagctgcagtggggcaggcagctctaggcgccgacacaggcactggctctctgcaaggctgcgactggaccaggtgtactataggtggcttccactgtgggcaccagggaatgcagtggcacccagaagcttgaagatgccaggaaccacagagccccaagagggtgtcacatccctggcttggggtgctcctaggtctggaatccctgaagggctgcagctcttctctccttctttattctcttcttgtcacctgcaacgtgaaaggggcggggctcctacctgtcctggatcctgcaggctccatggagcaggcagccccagcggcacctcccacacggcagccggcgtcatggcagctgctccagacaggccacctctgccatcacttccaaaaaggcatgcaagcttggcactggccgtcgttttacaacgtcgtgactgggaaaaccctggcgttacccaacttaatcgccttgcagcacatccccctttcgccagctggcgtaatagcgaagaggcccgcaccgatcgcccttcccaacagttgcgcagcctgaatggcgaatggcgcctgatgcgcggcgcattaagcgcggcgggtgtggtggttacgcgcagcgtgaccgctacacttgccagcgccctagcgcccgctcctttcgctttcttcccttcctttctcgccacgttcgccggctttccccgtcaagctctaaatcgggggctccctttagggttccgatttagtgctttacggcacctcgaccccaaaaaacttgatttgggtgatggttcacaaacgctggtgaaagtaaaagatgctgaagatcagttgggtgcacgagtgggttacatcgaactggatctcaacagcggtaagatccttgagagttttcgccccgaagaacgttttccaatgatgagcacttttaaagttctgctatgtggcgcggtattatcccgtattgacgccgggcaagagcaactcggtcgccgcatacactattctcagaatgacttggttgagtactcaccagtcacagaaaagcatcttacggatggcatgacagtaagagaattatgcagtgctgccataaccatgagtgataacactgcggccaacttacttctgacaacgatcggaggaccgaaggagctaaccgcttttttgcacaacatgggggatcatgtaactcgccttgatcgttgggaaccggagctgaatgaagccataccaaacgacgagcgtgacaccacgatgcctgtagcaatggcaacaacgttgcgcaaactattaactggcgaactacttactctagcttcccggcaacaattaatagactggatggaggcggataaagttgcaggaccacttctgcgctcggcccttccggctggctggtttattgctgataaatctggagccggtgagcgtgggtctcgcggtatcattgcagcactggggccagatgtggcgataagtcgtgtcttaccgggttggactcaagacgatagttaccggataaggcgcagcggtcgggctgaacggggggttcgtgcacacagcccagcttggagcgaacgacctacaccgaactga

SEQ ID NO: 16035 - DNA, 768 bp, Homo sapiens
  SIMILAR (757)..(1386): 1001254mologous to Escherichia coli glutamate synthase, small subunit,accession number U18997,Smith-Waterman Score=1134.
ttatgccggtactgccgggcttcttgcgggatatcgtccattccgacagcatcgccagtcactatggcgtgctgctagcgctatatgcgttgatgcaatttctatgcgcacccgttctcggagcactgtccgaccgctttggccgccgcccagtcctgctcgcttcgctacttggagccatgtcagctgtccttgctccaggatgctgtttttgacaacggatgttttattgcctttgatgttcattaagaagcttggcgcaaatgttgcctttttatcctcgaagaagcctctgtttgtcatgtagcttgtgataaccacattgttgcctttggcttgcggcacccaggctttacactttatgcttccggctcgtatgttgtcccaactggagcggataacaatttcacacaggaaacagctatgaccatgattacgaattcgagctcggtacccctgggtggtgagaactacgacatcatcgcagagtttaacggccaaccggcttccggtctggggatcaagctggcgaccggtgcaaacgcgctggataccgctggacccccaaaaacttgatttgggtgatggttcacgtagtgggccatcgccctgatagacggtttttcgccctttgacgttgaagtccacgttctttaatagtggattcagcacatccctgaagagtaactgcggcccggagtgcactgtccagtccaccgcgccactatttgggatcttgatgcgaattaccagcacctggttctccat

SEQ ID NO: 16036 - DNA, 674 bp, Homo sapiens
  SIMILAR (499)..(672): 561254mologous to Homo sapiens PRO2221,accession number AF116695,Smith-Waterman Score=142.
atgggccctaaatccaatcataagtgtccttatatgagagagaaagagggagatttgatacagacacacagtagaaacggccatgagaagacagaggcagagatcagagtgatgcagccacaaaccaaggaatgccggcagccaccagcagctgaaacagtcaagaaagggattctcctccagaaccttctgaagggcatttctgaaagaaacacagcagccccagtcagggactgtgggcgcagctttagcagacttaaacgttcctgcctgctggctctgaagacagcagcagatctcccagtacagcattcgagctatgctaagggacagactgcctcctcaagtaggtacctgacccatgtgcctcctcatggggagacacctcccagcagagatcgacagacatctcatacaggagagctccagctgacatctggcaggtgctcctctgggatgaagcttccagaggaaggaacaggcagcaatgtttgctgttctgcagcccctgctgttgatacccaggatcacaactcctcgccagcaagggaacaaaactggacggagaatgagtttgacgaagtaggcttcagaaagtgggtaataacaaactcctccaagctaaaggagcatgttccaacccaacgcaagaaagctaagaaccttgaaaaaag

SEQ ID NO: 16037 - DNA, 1837 bp, Homo sapiens
  SIMILAR (715)..(1335): 871254mologous to Escherichia coli K12 putative transport protein,accession number AE000360,Smith-Waterman Score=882.
tttcgtcccaggcagcttgtggcggcgaagccatcggtgttcgctgatgtccagtctatggagtcagttggtaccggtggcggcgcggaggcagaaggcggtgtccgtagtaggggcctctgccccaccaggatgttaccgggcttggccgccgccgcggcccacagatgtagctggtcctccctgtgccggctccgtctgcgatgcagggcggcggcctgtaatcccagcgaccgccaggagtggcagaatttagtgacatttggaagcttttacaaacgtggttccctgtactcatccatatattggtaccctgagtcaagaaaagctgtactccacaaatgttcacaaagaaggacagggatcacacacactcagagaggaaaaagtaccatcctttgtaacagcagaaggtgtaggcgcaaaactcatatctccacttaagcaagaacctctccaagtaagagttaaagcagtccttaagaaaagggagtatggatcaaagtacactcagaataatttcatcactggagtcagagcgataaatgagttctgcctcaaatccagtgatctagaacaacttcgaaaaatcagacgacgaagtccccatcaagatactgagtcttttactgtatacttgagatcagatgtggacgcaaaatctttggaagtttggggaagccctgaagctcttgccagagagaaaaaattgcgtaaggacgcagaaatagaatacagagaaaggctatttagaaaccaaaaaatattaagagaatacagagatttcttgggaaataccaagccacgctccagaacagcatcagtgttttttaagggaccaggaaaagtggtgatggttgcaatttgcatcaatggattaaactgcttctttaaatttcttgcctggatttataccggttcagcaagtatgttctcagaagctatacactcattatctgatacttgtaatcagggtttactagcattgggcatcagtaagtctgttcaaacaccagatccttctcatccgtacggattttcaaatatgcgctatatttcttcgctaattagtggtgttggtattttcatgatgggtgcaggactatcttggtaccatggagtcatgggattgcttcatcctcaaccaatagaatcccttctatgggcatattgtattttagcaggatcattagtatctgaaggagcaacacttcttgttgctgtaaatgaacttcgtaggaatgctcgggctaaaggaatgtcattttacaagtatgtaatggaaagtcgtgatcctagtacaaatgtgatattattggaggatactgctgcagtcttgggagttataatagcagccacttgcatgggccttacttctataacaggcaatccactgtatgacagcctaggttctttgggtgtgggcaccttattaggcatggtctcagcattcctcatctacactaacacagaagcactcttagggcggtccatccagccagaacaagtacaacggctcactgaactcctggagaatgacccatcagtaagggcaattcatgatgttaaagccacagatctgggattaggtaaagtaagatttaaggcagaagtagattttgatgggcgagttgttacaagatcatatttggaaaaacaagattttgaccaaatgttacaagaaattcaagaagtgaaaactcctgaagaactagagacctttatgcttaaacatggagaaaatattattgatactttaggagctgaagtagatagacttgagaaggaactgaaaaaacgaaatcctgaagttcgacatgtagatttggagatactg

SEQ ID NO: 16038 - DNA, 1065 bp, Homo sapiens
  SIMILAR (400)..(891): 991254mologous to Escherichia coli Paraquat-inducible protein A,accession number D90826,Smith-Waterman Score=863.
atgcctcctgatggggagatacctcccagcagggatcaacagacacctcatacaggagagctccagctgacatctggcaggtgctcctctgggatgaagcttccagaggaaggaacaggcagcaatgtttgctgttctgcagcccctgctgttgatacccaggtcgaatcaaggtccaagtacggcatcacatctggaattaagatccttgttccagtgacgtgtcaaaccttacgtcccaaccgaagagaaaaagatccttttcagcttgccaaggcactggaaaagctccagcatcttatggcagcccttaaatcaccaaaagaagaattaacacatataatgtgggtagagttaacaaacaacaggcgcgatacaatctgccatccaaaggctacaagaaaggtggtgcgtgaacggttcacaaggcccttgaacccttccagagtcgtcaattccaccccccggagcgaagtacccgcgggacagccccgaggcgcacgtaaacctttgtttgtccaaacggttcggcttctacggagccagcggctagcgcgggacactccaccctggcggtcgctgggattacaggccgccgccctgcatcgcagacggagccggcacagggaggaccagctacatctgtgggccgcggcggcggccaagcccggtaacatcctgactggacatcagcgaacaccgatggcttcgccgccacaagctgcctgggtgacccggaaacggcaacgtcatttagcgacgcctgccgtggagggtttactagcattgggcatcagtaagtctgttcaaacaccagatccttctcatccaaattcctctctctctgacgttccagaacaatttttcccaactgccatcctcattggctttccagcaggtcatggcatcagcaggtcagcagctgccgcagtcccaagtaagcggctttcccgttcaagctttaatcgggggctccctttagggttccgatttagtgctttacggcacctggaccccaaaaaacttgatttgggtaatggttcacgtagtgggccatcgccttga

SEQ ID NO: 16039 - DNA, 1660 bp, Homo sapiens
  SIMILAR (647)..(868): 941254mologous to Cloning vector pEH1 lac repressor,accession number AJ007659,Smith-Waterman Score=339.
ttaaagaggagcaaaggggtttccatatgggttatgaagaactggccgcacacccgtcactcgagggaggttcccctcaccagcgatgtcaaacacgaggcctgggctcttggccagggtgctgggcaagccatccaaggtagcctcaaagatgcactggtagttctgcatgatctgcggggtgaaggacaccgtggcaaaggcatgggaatgactggcaatgcacatcttgctgggttccacttcaaaaatgtcgacgacccccccaaagggcttcacctcatagaagttgatgatgttagtctggttgggagtcaacagagtgatggagcctgtcctgtccttgcacttgatctccacattcatagtgtagccctcggccttgacatttaatgtcacagggtggactttcttttccacattgcagatcaaattaaagttcacatctccttcctgggaccccaaaaaacttgatttgggtgatggttcacgtagtgggccatcgccctgatagacggtttttcgccctttgacgtttggagtccacgttctttaatagtggactcttgttccaaactggaacaacactcaaccctattctcgggctattcttttgatttataagggattttgccgatttcggacaccaccatccaaacaggattttcgcttgttggggcaaaccagcgtggaccgcttgctgcaactctctcagggccaggcggtgaagggcaatcagctgttgcctgtctcactggtgaaaagaaaaacccctctggcgcccaatacgcaaaccgcctctccccgcgcgttggccgattcattaatgcagctggcacgacaggtttcccgactggaaagcgggcagagaagaggttgccgctctttagagttaccagttatcctgctctgctttttccccaatccttgcgctcccaccaactattgcttctctgatgatggtgaatgtacagatggctttttgggtgtggatgtcccttctgctcgtcagttctcccttttaacagaacaggaccactcagctgcgagtttgatctcagactgctgtgctagcaatcagcgagactccgtgggcgtaggaccctccgagccaggtgcgggatataatctcgtggtgcgccgttttccaagcccgtcggaaaagcgcagtattcaggtgggagtgacccgattttccaggtcccgtccgtcacccctttctttgagtaggaaagggaactccctgaccccttgcgcttcccgaattcatatcaaaaagttggaaggagagacttaccgataccactgtgctattcctgaaagcaagaagacaatccttatgtttacaaataggtggggatcctctagagtcgacctgcaggcattttgtgtgctgagtgtggctaaagaaagccagctatatacttatctccacgcaataatgagaaccctcaagagtagcatcgcaagaggggcccgtactttccagagcacttctgacggaaccgtgaaaagcagaccttcaaaaatcattttcctgccccgcttgcatgaccggttccgatttagtgctttacggcacctcgaccccaaaaaacttgatttgggtgatggttcacgtagtgcccatcgccctgatagacggtttttcgccctttga

SEQ ID NO: 16040 - DNA, 1080 bp, Homo sapiens
  SIMILAR (511)..(1323): 901254mologous to Escherichia coli ATH1 protein,accession number D90769,Smith-Waterman Score=1283.
gcagcatagtagtagtaggcggccgctctagaggatccaagcttacgtacgcgtgcatgcgacgtcatagctcttctatagtgtcacctaaattcaattcactggccgtcgttttacaacgtcgtgactgggaaaaccctggcgttacccaacttaatcgccttgcagcacatccccctttcgccagctggcgtaatagcgaatgaggcccgcaccgatcgcccttcccaacagttgcgcagcctgaatggcgaatgggacgcgccctgatagcggacgcattaagcgcggcgggtgtgagtggttacgcgcagcggtgaccgctacacttgccagcggccctagcgcccgctcctttcgctttcttcccttcctttctcgccacgttcgccggctttcccccgtcaagctttaaatcgggggctccctttagggttccgatttagtgctttacggcacctcgacccccaaaaaacttgattagggtgatggttcacgtagtgggccatcgccctgatagacggtttttcgccctttgacgttggaagtccacgttcttaataagtggactcttggtccaaactggaacaaaaactcaaccctatctcggtctattcttttgatttataaggggattttgccgatttcggccctattggttaaaaaaatgagctgatttaacaaaaatttaacgccgaattttaacaaaatattaacgcttacaatttaaggtggcactttttcggggaaaatgtgcgcgggaacccctatttggttatttttctaaatacattcaaaatatgtatcccgctcatgagaacaataacccctgataaatgcttcaataatattgaaaaaaggaagagtatgaagtattcaacatttcccgtgtcgcccttattccctttttttgcggcattttgccttcctggttttggctcacccagaaacgctggtgaaagtaaaagatgctgaagatcagttgggtgcacgagtgggttaccatcgaactggatctcaacagcggtaagaaccttgagagttttcgccccgaagaacgttttccaatgatgagcactt

SEQ ID NO: 16041 - DNA, 625 bp, Homo sapiens
  SIMILAR (373)..(537): 381254mologous to Homo sapiens ubiquitin-specific processing protease,accession number AF229438,Smith-Waterman Score=100.
  misc_feature (1)...(625): n = a,t,c or g
nggttctgtatccctacttccattaccctcggctcctcccactcctcgggggctccgtgctttccgcgggtctgtccgggggctccggnccatcggcgcngtgagttgatggcttccggagaactggcatagctgcagaatatgagtagtgtcccaagaagagtgctttgcctttgnacaaaggatcagaataaagttatttgccatacagtaaccagagacctccaactaggggcccccaaactgtatcctgcctgtagaacctgccaggtaaaggtatatttttgctttttaatttagccagaagcaatttttaaaagaaaatatgtctcctctnaagatacatggtcctatcagaattccgaagtatgcagactgggattacaaagtggaaagaaaggatcctttgaaattgtagaaaaagagaataaagtcagcctagtagttcactacaatactggaggaactccaaggatatttcagctaagtcataacattaaaaatgtggtgcttcgacccagtggagcgaaacaagccgcctaatgntaactctgcagataacagcttcttgtctattgacaagtaccaagtaaggatgcngaggaatgaaggttgntctagatnc

SEQ ID NO: 16042 - DNA, 443 bp, Homo sapiens
  SIMILAR (288)..(250): 611254mologous to Homo sapiens Human secreted protein sequence encoded by gene 8 SEQ ID NO:110,accession number B25721,Smith-Waterman Score=48.
cgcatacttggaattctgataggaccatgtatcttcagaggagacatattttctttaaaaattgcttctggctacaggcaggatacagtttgggggcccctagttggaggtctctggttactgtatggcaaataattttcagtgacttttaccgaaaaaccctatgtaatagcaattcacctttattctgatccttgtgccaaaggcaaagcactcttcttgggacactactcatattctgcagctatgccagttctccggaagccatcaactcagctgcgccgagggtccggagcccccggacagacccgcggaaagcacggagcccccgaggagtgggaggagccgagggcaatggaagtagggatacagaacccaaaggagggaggccgctagctacccctagtcagggagagcggctgatggcgggaactgtgacgaaa

SEQ ID NO: 16043 - DNA, 1606 bp, Homo sapiens
  SIMILAR (1)..(438): 971254mologous to Escherichia coli alpha-glucan phosphorylase,accession number U18997,Smith-Waterman Score=751.
gtgatctggtgccagctggtggaacagtgggtgatggcgtccctgctgcaagaccgtgagtgccggggccctgcaggggaagaggccttagtgtacagctcagggaagggaaggaggttggacccctgttccagagctctccctgggcctgctaccctctctgctggctacctaacccctgcttttcctgacctagagctgaccactgatcaggacttgctgctgatgcaggaaggcatgccgatgcgcaaggtgaggtccaaaagctggaagaagctaagatacttcagacttcagaatgacggcatgacagtctggcatgcacggcaggccaggggcagtgccaagcccagcttctcaatctctgatgtggagacaatacgtaatggccatgattccgagttgctgcgtagcctggcagaggagctccccctggagcagggcttcaccattgtcttccatggccgccgctccaacctggacctgatggccaacagtgttgaggaggcccagatatggatgcgagggctccagctgttggtggatcttgtcaccagcatggaccatcaggagcgcctggaccagtatcggcaggatggagtcagggtggggagagattattctagaagctgtgtggagaatggattggcaccggggagagagactggcaggaaagagaggggagagatgtcagtggacgaaggtgcacacacaactgcacacacaaacagatacattagtgcttttgccttgactcatacctggatggctgagcgattggtttcaacgtggagacaaaaatcaggatgggtcctcattctccatttgaaacgatatagcttcaatgtggctctctcgcttaacaataagattgggcagcaagtcatcattccaagatacctgaccctgtcatctcattgcactgaaaatacaaaaccaccttttacccttggttggagtgcacatatggcaatgaaattcaccttcaaatccaagagctccttggctttatgccttgattcagacagtgaggatgagctaaaacgttctgtggccctcagccagagactttgtgaaatgttaggcaacgaacagcagcaggaagacctggaaaaacctgtgcctactacactggcacaagtggatagagaaaagatctatcagtggatcaatgagctgtccagtcctgagactagggaaaatgctttgctggagctaagtaagaagcgagaatctgttcctgagcattgcacccatgctgtggcattcatttggtactattgcagcacttttacagccagaagcaatttttaaagaaaatatgtctcctctgaagatacatggtcctatcagaattcgaagtatgcagactgggattacaaagtggaaagaaggatcctttgaaattgtagaaaaagagaataaagtcagcctagtagttcactacaatactggaggaattccaaggatatttcagacattccgttatttccacaaagggaccatgaataacgtaacagccatggtggcagatagaagctataaaaaatgggttccccttcaccaaggtttatctactgtggctgctgaatgtccagttggttaa

SEQ ID NO: 16044 - DNA, 376 bp, Homo sapiens; identical to SEQ ID NO: 4246
  SIMILAR (1228)..(1566): 841254mologous to Escherichia coli K12 orf, hypothetical protein,accession number AE000165,Smith-Waterman Score=503.
  misc_feature (1)...(376): n = a,t,c or g

SEQ ID NO: 16045 - DNA, 612 bp, Homo sapiens; identical to SEQ ID NO: 15275
  SIMILAR (46)..(609): 681254mologous to Mus musculus surfeit 3 protein,accession number M14689,Smith-Waterman Score=608.

SEQ ID NO: 16046 - DNA, 910 bp, Homo sapiens
  SIMILAR (468)..(1409): 801254mologous to Homo sapiens cytokeratin 18,accession number X12881,Smith-Waterman Score=1216.
ggcacgaggcccaagatgccgaaaggaaagaaggccaagggaaagaaggtggctccggccccagctgtcgtgaagaagcaggaggctaagaaagtggtgaatcccctgtttgagaaaagggcctaagaattttggcattggacaggacatccagcccaaaagagacctcacccgctttgtgaaatggccccgctatatcaggttgcagcggcagagagccatcctctataagcggctgaaagtgcctcctgcgattaaccagttcacccaggccctgggaccgccaaacagctactcagctgcttaagctggcccacaagtacagaccagagacaaagcaagagaagaagcagagactttttggcccgggccgaggaagaaggctgcttggccaaaggggacgttcccaacgaagagaccacctgtcccttcgagcaggagttaacaccgtcaccaccttggtggagaacaagaaagctcagctggtggtgattgcacacgacgtggatcccatcgagctggttgtcttcttgcctgccctggtgtcgtaaaatgggggtcccttactgcattatcaagggaaaggcaagtctgggacgtatagtccacaggaagacctgcaccactgtcgccttcacacaggtgaactcggaagacaaaggcagctttggctaagctggtggaagctatcaggtccaattacaatgccagatacgatgagatccgccgtcactggggtggcaatgtcctgggtcctaagtctgtggctcgtatcgccaagctcgaaaaggcaaaggctaaagaccttgccactaaactgggttaaatgtacactgttgagttttctgtccataaaaataattgaaataatacaaattttccttcaaaaaaaagcggccgcgtcgacgtg

SEQ ID NO: 16047 - DNA, 799 bp, Homo sapiens
  SIMILAR (370)..(708): 1001254mologous to Escherichia coli CG Site No. 18232; alternate gene name hypF,accession number U29579,Smith-Waterman Score=574.
gcgcttatcagcgtttgtgccgccgcctgcgcgccagtcagcgccatatccatgccgcgcacggaaattccggtattgacgcaactgcgcaacgcatcgcccaccagcagccagccgttaccggcgtattgcaccggcatactgtgcaagccaccttctggcaccagatgcgcaccatactccagtgattccgtgtttttgataagcgggcgcacttggtcatcctcagcgtttttccccattcacgtccgttttttacatagtcggccagttcccaggctgctacgctttcaggtcacttttagaggatccccgttaacctcacgtcattggcaacatgaccgccagcggtttcgccgggcgatgtttgcgcgccagttgcttaccacgcccgccgcgccgattgtgctggtggataaaaaatacgttcctgagctttgtgatgatatcgcccctgaccttaacgaagtcggggtaatgttgcctgcgaacccgctccagcatttgctgttacaggaactgcaatgcccgctggtgatgacctccggcaacctgagcggtaaaccaccagctatcagcaacgaacaggcgctggcggatttgcagggcattgccgacggattcttgatacataaccgcgacatcgtgcagcggatggatgattcggtggtgcgcgaaagcggcgaaatgctgcgccgttcgcggggagatccccacagtgatgatactgacgggcttcattacttccacagggaaacagatctggagacctgtgaagacaaagttactcacccgtcat

SEQ ID NO: 16048 - DNA, 804 bp, Homo sapiens
  SIMILAR (740)..(654): 341254mologous to Gallus gallus JAC protein,accession number AF239161,Smith-Waterman Score=52.
atgcaccagactactgcaaaaacaccccacactagctacccgaacaactacgaagaacacaaccgacgagcgaacagaagcaaaaactacgaccgcatacgacatacgacaataatacttaaaagaactaaccctgcccagacgatcacgaatctactaaaaagccgattcaatagatacaactacgtacagccaagatcatgtaggagcatcttcatccatattcctggtgaaagagatctaaatctctgcatagcaccaaaccccccggcaattttccccaccagtataggatatttgggtccagatctcaataacctcccaacttatgctccatttatcaccacgaacctcactggaccggcacctacaaccacacaccctgtgggaaatttagggaccaccggcaaccccgagcctggaggatgcggtattctgattgtctggtgctgtgtcaactgggcctgcctctgggatagtgttgtggctgccccacgagaaccctatatgccagccggacttctacgccatcgccgtcattacagacatcgccgtgaagatttaattgctgtgccagctgccagacaaacggacgaaaaccgacgccctgcactttgccacgaatacgcagttggacaccgcaagattaagacaaatgtcgaacacactgaaccatacatcctcccgttgatcacccattcccagcccctcaatcgaggggcttttttttgcccaggcgtcagatttctggttgtatctgtgctggattttgagaagagattagcatttgcatccacagactga

SEQ ID NO: 16049 - DNA, 1323 bp, Homo sapiens
  SIMILAR (850)..(1320): 971254mologous to Escherichia coli acriflavine resistance protein,accession number M94248,Smith-Waterman Score=757.
atgcacatcatcacaccatcagcttcagagaatggcagccatttatttgtcccgtgcaaacaggcaagaatactgccaatccagaattggggcgttccagcaaggcgaaagcacgagaagcagagccactcctgggtggaggatgtaggcggaattgacgcaagcgaggcgccccctcttttccggtactggctccgcgagcctgagcgaggtttacccatggttgtccttgatttcggagggagcaagtgtactggtagtggaacgggtgacccatgtgggaaaggcctctatgcatccagtgaatgtatctacccagacaaaaagaactgttctgccatcaaaggaattcccggaattattcgtagaatacgagcggggcggtatcgccgacctgtgactgccggatgcgacgctgtcgtgtccggcagggcgggttacgcaattcatgatggcgggaataactcaatggcaaaaaacacatcttgcggtgtccaactgcgtattcgtggcaaagtgcagggcgtcggttttcgtccgtttgtctggcagctggcacagcaattaaatcttcacggcgatgtctgtaatgacggcgatggcgtagaagtccggctgcgggaagacccggaaacgtttcttgttcaattgtatcagcactgcccgccgctggcgcgtattgatagcgtcgagcagcacaggcggcaccatgaatacgcaaattgttcccgatgccgctacttgccctgcttgccttgccgaaatgaataccccaggcgaacggcgttatcgttatccgtttatcaactgtacccactgcggcccgcgtttcaccagacactagaggaggagagctggtcgattccgttctccgttatgctggtcgttccgctggggattatcgatgcgttgctggctgccaccttccgtggcctgaccaatgacgtttacttccaggtaggcctgctcacccccattgggttgtcggcgaagaacgcgatccttatcgtcgaattcgccaaagacttgatggataaagaaggtaaaggtctgattgaagcgacgcttgatgcggtgcggatgcgtttacgtccgatcctgatgacctcgctggcgtttatcctcggcgttatgccgctggttatcagtactggtgctggttccggcgcgcagaacgcagtaggtaccggtgtaatgggcgggatggtgaccgcaacggtactggcaatcttcttcgttccggtattctttgtggtgaatcgccgccgctttagccgcaagaatgaagatatcgagcacagccatactgtcgatcatcattga

SEQ ID NO: 16050 - DNA, 1359 bp, Homo sapiens; identical to SEQ ID NO: 15767
  SIMILAR (1200)..(886): 1001254mologous to Homo sapiens actin filament associated protein,accession number AF188700,Smith-Waterman Score=527.

SEQ ID NO: 16051 - DNA, 1527 bp, Homo sapiens
  SIMILAR (532)..(1476): 621254mologous to Homo sapiens putative p150,accession number U93572,Smith-Waterman Score=1033.
atggtgaatctggcgctgtggctgaaaaagcaccgcttccgcctcgaccaggtgcagaacttctatccgtcgccgctggcgaactcaaccaccatgtattacaccgggaaaaacccgctggcgaagattggttataagagcgaagacgtcttcgtaccgaagggcgacaaacagcgtcgtttgcataaagcgttgttgcgttaccacgatccggcaaactggccgttaatccgccaggcgctggaagcgatgggcaaaaagcatctgattggcagccgtcgcgattgcttagtgcctgcgccaaccattgaagagatgcgtgaagctcgtcgccagaaccgcaatacccgtccggcgttgacgaaacatacgccgatggcgacccagcgtcagacgcctgctacggcaaaaaaagcgtcgtctacgcaatctcgtccggtgaatgctggtgcgaagaaacggcctaaagcggcggaactgcaatgcccgctggtgatgacctccggcaacctgagcggtaaaccaccagctatcagcaacgaacaggcgctggcggatttgcagggcattgccgacggattcttgatacataaccgcgacatcgtgcagcggatggatgattcggtggtgcgcgaaagcggcgaaatgctgcgccgttcgcggggcttccttcccacagggagaggattgaggatagattataaacagaagatgagagggaccagaagagcaggctgtaacttcaaccagagtggccagggaagaccctcactgaaaaggggcatcgagcagacagatataaagaaggcaaagaagcaggccacaggactggctggggaaagcatgctccaggacgacgcgttttatgcggtgatcacccacgcggcggggccgcagggcgctctgccgctgaccccgcagatgctgatggaatctcccagcggcaacctgttcggcatgacgcagaacgccgggatgggctgggacgccaacaagctcaccggcaaagaggtgctgattatcggcactcaggatcacgtcatccggctctacgccgtcctgctcgcgcaggcactggcggaagcgcgcccggcgctcggacgcctgccaccattcaaggttctcgcccaccgtctggccggtcacgcagccgaaaaagggcaggcatgggtagccaatgcaattactgaagaatatctgcgccaggggggcggcgaattgcccctggttccaggcaaggactggaacaatcagcagaatatctatcaccgttggttgaaaggtgaaacgaaaacgcaaagagaaaaaattcagaagctgatcccagcaattctggcaatccttccgcgcgagctgcgtcaccgactctgcatcttcgatacccctggaacgcccgtgcattacctggcggcgcaggaagcgttaagtacggcaattgatgcgcatgatgatgcagtccaagccgtttaccggaaagcgcatttcagcggcggcggttcttccgacgattctgtcattgttcattaa

SEQ ID NO: 16052 - DNA, 2313 bp, Homo sapiens
  SIMILAR (659)..(351): 621254mologous to Homo sapiens Human secreted protein sequence encoded by gene 27 SEQ ID NO:306,accession number Y91633,Smith-Waterman Score=316.
atgaacgtggacgctggtgttgattatcgtctgcgtacactcactcaggcgcatctgtggctttcgccacttcacgatgaaacccgggcgcaaatggataaactatggttggcgctggcgggggggaaacgagaaaattcaccgacgttagaaatcaaccatcggccattagcaacaatgggcgtcgagaaccagacgctggcggtctcttattactacgctgtgcgtcgacgcccgcagtcagcatgactatattgcgctctcacgtctctttcatacggtcatgttgtttgatgtaccagttatgacgcggttgatggagagcgaagcgcggcgctttattgcgctggtggatgagttttacgagcgccatgtcaaattagtggtgagtgcagaagtgccgctgtatgaaatttatcagggcgatcggctgaagtttgagttccagcgttgcctgtcacgtctgcaagagatgcaaagcgaagagtatctgaagcgcgagcatttggcggctaaaccagaaaccgtaaaacgcgactggtatgttgttgacgcgaccggtaaaactctgggccgtctggctactgaactggctcgtcgcctgcgcggtaagcacaaagcggaatacactccgcacgtagataccggtgattacatcatcgttctgaacgctgacaaagttgctgtaaccggcaacaagcgtactgacaaagtgtactatcaccacaccggccacatcggtggtatcaaacaagcgacctttgaagagatgattgctcgccgtcctgagcgtgtgattgataatcgcagaggatccctccggcaggcgggttacgcaattcatgatggcgggaataactcaatggcaaaaaacacatcttgcggtgtccaactgcgtattcgtggcaaagtgcagggcgtcggttttcgtccgtttgtctggcagctggcacagcaattaaatcttcacggcgatgtctgtaatgacggcgatggcgtagaagtccggctgcgggaagacccggaaacgtttcttgttcaattgtatcagcactgcccgccgctggcgcgtattgatagcgtcgagcgtgagccgtttatctggtcacaactgcccaccgagttcactatacgccagagcacaggcggcaccatgaatacgcaaattgttcccgatgccgctacttgccctgcttgccttgccgaaatgaataccccaggcgaacggcgttatcgttatccgtttatcaactgtacccactgcggcccgcgtttcaccattattcgcgccatgccttacgaccgcccgtttaccgtgatggcggcgtttccgctatgtccggcctgtgacaaagagtaccgtgacccgctcgatcgtcgcttccacgcccagccggtggcctgcccggagtgtggcccgcatcttgaatgggtaagtcatggtgaacatgcggaacaagaggcggcattacaggcagctatcgcacagttaaaaatgggcaaaattgtcgccatcaaagggattggcggatttcatcttgcctgcgatgcacgtaacagtaacgcggtggcgacacttcgggcgcgcaaacatcgcccggcgaaaccgctggcggtcatgttgccagtggctgacggtttaccagacgctgcgcgccagttgcttaccacgcccgccggcgccggattgtgctggtggataaaaaatacgttcctgagctttgtgatgatatcgcccctgaccttaacgaagtcggggtaatgttgcctgcgaacccgctccagcatttgctgttacaggaactgcaatgcccgctggtgatgacctccggcaacctgagcggtaaaccaccagctatcagcaacgaacaggcgctggcggatttgcagggcattgccgacggattcttgatacataaccgcgacatcgtgcagcggatggatgattcggtggtgcgcgaaagcggcgaaatgctgcgccgttcgcgggggtatgtgccggatgcgctggctttgcctccgggctttaaaaatgttccgcctgtgctgtgtctcggcgcggatctgaaaaataccttctgcctggtgcgcggtgaacaagcggtgttgagtcagcatctgggggaattaagtgacgatggggtccaaatgcagtggggccaaaggttatgccggatggggacccaggttttgccccctaccttcaacatcgaaaaaaaagtacaatcagctcggtaccgacatgggattaactcgaaactcagtcacaacatgcctgcctgtgtgagtgaacatgtctacctgcaatgctaa

SEQ ID NO: 16053 - DNA, 184 bp, Homo sapiens
  SIMILAR (486)..(316): 781254mologous to Homo sapiens Amino acid sequence of a human secreted protein,accession number Y10853,Smith-Waterman Score=216.
atgggacgaggagaggactctgttctgcaggacccagctcagtgtggcagggggctggctgtcagcagcacagaggagccgcaggaactggcctttttgggcttccaggccacactcacaggccacacggagtcggacggtcctctgtgcgctcacaccctttctggagaagtccacatggcag

SEQ ID NO: 16054 - DNA, 416 bp, Homo sapiens
  SIMILAR (187)..(414): 861254mologous to Homo sapiens Human sialoadhesin family 4 (SAF-1) related polypeptide,accession number W81024,Smith-Waterman Score=342.
acgtccgaattccgcacgagagggaaacgtcatatatctggaagttcagaaaggccagttcctgcggctcctctgtgctgctgacagccagccccctgccacgctgagctgggtcctgcaggacagagtcctctcctcgtcccacccctggggccccagaaccctggggctggagctgcgtgggatcctccagagaacctgagagtgatggtttcccaagcaaacaggacagtcctggaaaacctcgggaacggcacatccctcccggtcctggagggccaaagcctgcgcctggtctgtgtcacccacagcagccccccagccaggctgagctggacccggtggggacagaccgtgggcccctcccagccctcagaccccggggtcctggagctgccacccattcacatggagca

SEQ ID NO: 16055 - DNA, 570 bp, Homo sapiens; identical to SEQ ID NO: 207
  SIMILAR (516)..(424): 1001254mologous to Homo sapiens Amino acid sequence of a human secreted protein,accession number Y10853,Smith-Waterman Score =158.

SEQ ID NO: 16056 - DNA, 1974 bp, Homo sapiens
  SIMILAR (506)..(129): 611254mologous to Homo sapiens TFAR19,accession number AF014955,Smith-Waterman Score=299.
atgctgctgctgcccctgctgctgcccgtgctgggggcgggtgagtgggtcggtggctgggggtcccaggcaggggctggggctgccgctgagcctctgcatctccccagggtccctgaacaaggatcccagttacagtcttcaagtgcagaggcaggtgccggtgccggaggcctgtgtgtcatcgtgtcttgcaacctctcctacccccgggatggctgggacgagtctactgctgcttatggctactggttcaaaggatggaccagcccaaagacgggtgctcctgtggccactaacaaccagagtcgagaggtggaaatgagcacccgggaccgattccagctcactggggatcccggcaaagggagctgctccttggtgatcagagacgcgcagagggaggatgaggcatggtacttctttcgggtggagagaggaagccccctgactcagaagcctgatgtctacatccccgagaccctggagcccgggcagccggtgacggtcatctgtgtgtttaactgggctttcaagaaatgtccagccccttctttctcctggacgggggctgccctctcccctagaagaaccagaccaagcacctcccacttctcagtgctcagcttcacgcccagcccccaggaccacgacaccgacctcacctgccatgtggacttctccagaaagggtgtgagcgcacagaggaccgtccgactccgtgtggcctccctggaactccagggaaacgtcatatatctggaagttcagaaaggccagttcctgcggctcctctgtgctgctgacagccagccccctgccacgctgagctgggtcctgcaggacagagtcctctcctcgtcccacccctggggccccagaaccctggggctggagctgcgtggggtaagggccggggattcagggcgctacacctgccgagcggagaacaggcttggctcccagcagcaagccctggacctctctgtgcagtatcctccagagaacctgagagtgatggtttcccaagcaaacaggacagtcctggaaaacctcgggaacggcacatccctcccggtcctggagggccaaagcctgcgcctggtctgtgtcacccacagcagccccccagccaggctgagctggacccggtggggacagaccgtgggcccctcccagccctcagaccccggggtcctggagctgccacccattcaaatggagcacgaaggagagttcacctgccacgctcagcaccctctgggctcccagcacgtctctctcagcctctccgtgcactaccctccacagctgctgggcccctcctgctcctgggaggctgagggtctgcactgcagctgctcctcccaggccagcccggccccctctctgcgctggtggcttggggaggagctgctggaggggaacagcagtcagggctccttcgaggtcacccccagctcagccgggccctgggccaacagctccctgagcctccatggagggctcagctccggcctcaggctccgctgtaaggcctggaacgtccacggggcccagagtggctctgtcttccagctgctaccagggaagctggagcatgggggaggacttggcctgggggctgccctgggagctggcgtcgctgccctgctcgctttctgttcctgccttgtcgtcttcagggtgaagatctgcaggaaggaagctcgcaagagggcagcagctgagcaggacgtgccctccaccctgggacccatctcccagggtcaccagcatgaatgctcggcaggcagctcccaagaccacccgcccccaggtgcagccacctacaccccggggaagggggaagagcaggagctccactatgcctccctcagcttccagggcctgaggctctgggagctgcggaccaggaggcccccagcaccaccgagtactcggagatcaagatccacacaggacagcccctga

SEQ ID NO: 16057 - DNA, 1578 bp, Homo sapiens
  SIMILAR (2045)..(1350): 731254mologous to Homo sapiens SH3-containing Grb-2-like 1,accession number X99656,Smith-Waterman Score=870.
ttgttacgcagctcctatgcactagtaacggccgacgggcgctggaattcgcccttttcccgggtcgacgatttcgtcctgtggccacaaaccaccagagtcgagaggtggaaatgagcacccggggccgattccagctcactggggatcccgccaaggggaactgctccttggtgatcagagacgcgcagatgcaggatgagtcacagtacttctttcgggtggagagaggaagctatgtgagatataatttcatgaacgatgggttctttctaaaagtaacaggtatggaatggggtgggaacccctgcctctcacactggggagggaccctggggacagcctatgggctgagcagagagggctctcagggacccctgcagcacaagaatctcccaccacggtctctgtcccagccctgactcagaagcctgatgtctacatccccgagaccctggagcccgggcagccggtgacggtcatctgtgtgtttaactgggcctttgaggaatgtccacccccttctttctcctggacgggggctgccctctcctcccaaggaaccaaaccaacgacctcccacttctcagtgctcagcttcacgcccagaccccaggaccacaacaccgacctcacctgccatgtggacttctccagaaagggtgtgagcgtacagaggaccgtccgactccgtgtggcctatgcccccagagaccttgttatcagcatttcacgtgacaacacgccagccctggagccccagccccagggaaatgtcccatacctggcaagcccaaaaaggccagttcctgcggctcctctgtgctgctgacagccagccccctgccacactgagctgggtcctgcagaacagagtcctctcctcgtcccatccctggggccctagacccctggggctggagctgcccggggtgaaggctggggattcagggcgctacacctgccgagcggagaacaggcttggctcccaacagcgagccctggacctctctgtgcagaatcctccagagaacctgagagtgatggtttcccaagcaaacaggacagtcctggaaaaccttgggaacggaacgtctctcccagtactggagggccaaagcctgtgcctggtctgtgtcacacacagacagccccccagccaggctgagctggacccagaggggacaggttctgagcccctcccagccctcagaccccgggggtcctggagctggctcgtgggttcaagtggagcacgaaggagagttcacctgccacgctcggcacccactggggctccccgcaggactctcctaccctctccgtgcactactccccgaagctgctgggcccctcctgctcctgggaggctgagggtctgcactgcagctgctcctcccaggccagcccggccccctctctgcgctggtggcttggggaggagctgctggaggggaacagcagcccagggactccttcgagggtcacccccagctcagccggggccctgggcccaaacagcttcccctgagccctccatggagggcctcaactccgggcctcaagcctcccgctgtg

SEQ ID NO: 16058 - DNA, 1029 bp, Homo sapiens
  SIMILAR (90)..(530): 611254mologous to Homo sapiens Human PRO940 protein sequence,accession number Y41724,Smith-Waterman Score=388.
tcgggccccggcctagtgcgggcgtacgtgcgcaggaattcgtccttttcccggatcgacgatttcgatctgcgcctcctattctgtagatgttactgccactgctgctgtcctcgctgctgggggggtcccaggctatggatgggagattctggatacgagtgcaggagtcagtgatggtgccggagggcctgtgcatctctgtgccctgctctttctcctacccccgacaagactggacagggtctaccccagcttatggctactggttcaaagcagtgactgagacaaccaagggtgcttcttgtggccccaaaccccccagagtcgagaggtggaaatgagcacccggggccgattccagctcactggggatcccgccaaggggaactgctccttggtgatcagagacgtgcagatgcaggatgagtcacagtacttctttcgggtggagagaggaagctatgtgagatataatttcatgaacgatcgggttctttctaaaagtaacagccctgactcagaagcctgatgtctacatccccgagaccctggagcccgggcagccggtgacggtcatctgtgtgtttaactgggcctttgaggaatgtccacccccttctttctcctggacgggggctgccctctcctcccaaggaaccaaaccaacgacctcccacttctcagtgctcagcttcacgcccagaccccaggaccacaacaccgacctcacctgccatgtggacttctccagaaagggtgtgagcgcacagaggaccgtccgactccgtgtggcctatgcccccagagacctttggtatcagcatttttacggtgacaaacacgccagatcctccagagaacctgagagtgatggtttcccaagcaaacaggacagtcctggaaaaccttgggaacggcacgtctctcccagtactggagggccaaagcctgtgcctggtctgtgtcacacacagcagccccccagccaggctgagctggacccagaggggacaggttctgagcccc

SEQ ID NO: 16059 - DNA, 1001 bp, Homo sapiens
  SIMILAR (309)..(701): 951254mologous to Homo sapiens Human NIP2b protein,accession number Y70847,Smith-Waterman Score=643.
gcggtgtggaaaaagtatgtcggcaagtcagctggtttcccagtgcaggacgcgctgacagctcgagtgagcggactgcccaggacttcggaactagacgagttctgtagaaatcctgtcaaagaatatgaagaaaaacagagaaagattctgcaatagagagagagaatttgtatataaatttaaagtaggaagtcagtgcttagaactgagagtgccactcaaatttcctgttcaagagaatgccagtcatttgcatggacgtctgatgctgctgcacagtttaccgtgcttttattagaaaaagacttaaaagaagctctgactcagtttatagaagaaagaatccctcagcgagttatgatagagatgctgaagcatccctggcagctgtgaaatcaggtgaagtagatttacatcagctggcgagtacatgggccaaagcttatgctgagaccacgttagagcatgcaaggcctgaagaacccagctgggatgaagattttgcagatgtgtaccatgacttaattcattctcctgcctctgaaactctcttaaatttggaacataattactttgttagtatctcagaactgattggtgaaagagatgtggagctgaaaaaattacgagagagacaaggtattgaaatggaaaaagtcatgcaggaattgggaaaatcactgacagatcaagatgtaaattcactggctgctcagcattttgaatcccagcaagacctagaaaataaatggtcgaatgaattaaaacaatcaactgccatccaaaaacaagagtatcaagaatgggtaataaaacttcaccaagacctaaaaaaccccaacaacagctcccttagtgaggaaattaaagttcagccaagtcagttcagagaatctgtagaagcaattggaaggatttatgaggaacagagaaagttagaagaaagttttaccattcacttatgagcccagttgaagaccatgcataatttgagattg

SEQ ID NO: 16060 - DNA, 648 bp, Homo sapiens
  SIMILAR (66)..(647): 701254mologous to Homo sapiens bK445C9.5 (novel protein, ortholog of mouse tuftelin-interacting protein 10 (similar to worm C07E3.1A)),accession number Z95115,Smith-Waterman Score=617.
cttcgactgctgcccccaggacttacggcctgtgctctttttgtctcttcctttagtgactggccatgtcattgtcccacttataccgggatggggaaggccgcattgatgatgatgatgacgagcgggagaactttgagatcactgactgggatctccagaatgagttcaaccccaaccgacagcgccactggcagaccaaggaagaaaaaggatcgctgcagagaaaagagttctttaccgacctggtggggctttgtttctgtgcctacagggcccgtgactactctgcgccagtcaacttcatcagcgcagggctcaagaaaggggcagcggaggaggcagagttggaagattctgatggctttcttagatttttcttcattttgtttttccattaactaagctttgatttttcttttttgcagggtggcaattttaagcccagccagaaaggttttgcaggaggaaccaaatctttcatggacttcggcagctgggaaagacacacaaaaggaatctgattcacatacatgaattgctgtgatcgtaagactctcttttttttttgctgaaattcctcaggtatcattaacccaattgaagccaagcagagaaagggaaaaggtgctgtgggggcttatggat

SEQ ID NO: 16061 - DNA, 450 bp, Homo sapiens
  SIMILAR (376)..(450): 921254mologous to Homo sapiens bK445C9.5 (novel protein, ortholog of mouse tuftelin-interacting protein 10 (similar to worm C07E3.1A)),accession number Z95115,Smith-Waterman Score=130.
tttcgtgtaggagcggcgtcttctcgcgcggttggagattctgaatttggtacgctggaccctcggacagacagcaagagagagacaagcccgaggcctgacttctagcactcctgagtttgagccctatgagcagtggaacctagggaccaccaaggatccagatataattctttcctcagtaatagaaaaaagaatctgggatctaagaagatacctactcattttctaagtgactggccatgtcattgtcccacttataccgggatggggaaggccgcattgatgatgatgatgacgaagcgaggagaactttgagatcactgactgggatctccagaatgagttcaaccccaaccgacagcgccacttggcaggaccaaggaagaatccacctacggggtgtgggcagagcgagactcggatgatgagaggcccagctttggaggg

SEQ ID NO: 16062 - DNA, 361 bp, Homo sapiens
  SIMILAR (27)..(179): 841254mologous to Homo sapiens Human membrane channel protein -5 (MECHP-5),accession number Y70455,Smith-Waterman Score=207.
ggcagacttgagtctcctttctgtccatgggctcgggccactgtatcaggtccacccgtggctccaaaatggtctcctggtccgtgatagcaaagatccaggaaatatggtgcgaggaagatgagaggaagatggcgcgagagttcctggccgagttcatgagcacatatgtcatgatgaacatacatatgatagttgagaaaaatacttgatctgaaggtcccagcaaggagccgactcacagaagaatgcagttttcacatcatgatgatttaatcttccttgacctgagcaattgacaaccccaattctccagaacctcacccgccacaatccccttaaaaaccctggcccagaaccc

SEQ ID NO: 16063 - DNA, 481 bp, Homo sapiens
  SIMILAR (64)..(225): 851254mologous to Homo sapiens Human membrane channel protein -5 (MECHP-5),accession number Y70455,Smith-Waterman Score=218.
ttaactcagctgtgagttgaagagccgatgggcagcaggcaaacttgagtctcctttctgtccctgggctcgggccactgtctcaggtccacccgtggctccaaaatggtctcctggtccgtgatagcaaagatccaggaaatatggtgcgaggaagatgagaggaagatggtgcgagagttcttggccgagttcatgagcacatatgtcatgatggtgagtgggtgggcagcacgaagtgggtggggctccaccagggctgtccatgaaccccctccccatgctgaccccatgggtcacattgtccattccttgcctctgagctgggagcctggggaagcagtgaggaaagtaaggagtgggggctttctcatcaagtctttttggacagaaagggctcataatatgtgggggtcaaatgaaaccatgcactggggtatccggggcacggctggaaatggggagaagggaaacccagagt

SEQ ID NO: 16064 - DNA, 604 bp, Homo sapiens
  SIMILAR (35)..(241): 681254mologous to Homo sapiens Human membrane channel protein -5 (MECHP-5),accession number Y70455,Smith-Waterman Score=210.
ggcacgagggcagacttgagtctcctttctgtccatgggctcgggccactgtatcaggtccacccgtggctccaaaatggtctcctggtccgtgatagcaaagatccaggaaatatggtgcgaggaagatgagaggaagatggcgcgagagttcctggccgagttcatgagcacatatgtcatgatgaacatacatatgatagttgagaaagacacatattctgatcatgaagaaataaacacaagttaaatatgactaagcagaaagatggaaggaccaggaatggtgatgctaacttggaaccacgatgcaggctctaaactcctctacaatcatcctcccttgtgagaaaaatacttgatctgaaggtcccagcaaggagccgactcacagaagaatgaagttttcacatcatgatgatttaatcttccttgacctgagcaattgacaaccccaattctccagaacctcacccgccacaatccccttaaaaaccctggcccagaacccctcaagcagacagatgtgaagcttgaggattccttcatctctttgcccaatggcattgtgattattaaactctttttctgctgcaaaaaaaaa

SEQ ID NO: 16065 - DNA, 1046 bp, Homo sapiens
  SIMILAR (1105)..(1662): 801254mologous to Homo sapiens glyceraldehyde-3-phosphate dehydrogenase,accession number X01677,Smith-Waterman Score=763.
cgggtcagaaactgagccttcgcagaatcgaagccttgaaacaaccgcccacccacgcgttcgtgctgtgggtagagtgcctcactgttgccatgccctggcctgtgaccccaaagttctggctcgggcagataggcagacagacagatggacagacatagactactgagctctactttccagcctgctctctcccaccctactttttcccagaggcttgttggcaccgtggattgcactttcagctccccacctgtccgtctgcaaagtggcctcattggtgtgccatttttactggtccagtcccaactacaaggggcatggcttggccatctaccccagttcctctccatgtccccatggctctcaagtgtctccaattccagctgtcccagctgccccgggcaagaggaggtgtgtgtggcaagtctgctgggttacctattaactcagctgtgagttgaagagccgatgggcagcaggcagacttgagtctcctttctgtccatgagctcgggccactgtatcaggtccacccgtggctccaaaatggtctcctggtccgtgatagcaaagatccaggaaatatgatgcgaggaagatgagaggaagatggcgcgagagttcctggccgagttcatgagcacatatgtcatgatggtgagtgggcgggcagcacgaagtgggtgggctctgccagggccttccatgaccccctccccattctgaccccatgggtcacattgtccattccttgcctctgagctgggagcctctgttcccgtgaaaaataaagattccttcttctgcttcttggcaactgcttccatatagacagtgatctggacgacacttccattgacacggaaagacaaaaaggctttcgcatccgcctcccgccagccaggaagccactgcggcctgcggcttcccgccaccacggcccgctccttcctccggggacacggggagctggctgaaggcgtaaaggagcgagcagaagcctcaggccagacacagagccaccacgcgcggtagcgccgcat

SEQ ID NO: 16066 - DNA, 309 bp, Homo sapiens
  SIMILAR (193)..(306): 841254mologous to Homo sapiens ribosomal protein S20,accession number L06498,Smith-Waterman Score=158.
tcctggacctgaggcctggccccgccatcactcactgggatccgctgatgggaagccttcctcatgattaccatgacgacaagttgccaggttggagggccttgcactgattcggactggctggagctggtttgagccagctccagcagggaggggctcaccaaattcgccaaattcaccaaattcaccaaaattcaccaaatctgaatcactctaacgagctacagcataaaatcacttgaaaaggtgtgtgctgacttgatcagaggcacaaaggaaaagaatctcaaagtgaaaggaccggtttga

SEQ ID NO: 16067 - DNA, 1216 bp, Homo sapiens
  SIMILAR (77)..(907): 581254mologous to Homo sapiens glyceraldehyde 3-phosphate dehydrogenase (EC 1.2.1.12),accession number J02642,Smith-Waterman Score=661.
atggcagatctccagtcagtacctggaagttccaagaggaagatttcgggtcaacataaagaagaaatctgtaacagccagagctgcttggtaatagaacctcctcctgaaaagcaagagactccatctgtgggagtccatggctcagtgtcctccatgctagaaccggactccccctgcctcacgtgccacacccaatccccacattcgtcctgtttcacctcctggaaatttctggcatccatccctccatttccagccccctcaccacgcagccattctaagctgctcttcgcctccctgcctgtgctcaggccatctccatccccttgccaggactcagctgaagatggctccatgaagacgactgtgcctaactcatcccagcgtctagttcaggcctggcgtatcaccggtactaatacatgtttgcgggctgagtacaagtgtgggcctgtggcacacatccctccttcctgttgggaaagtcggtccttgctcagtactgaatgggttccacgactgggctcggggcgggacccttctgagacagtgtctgtgaatgatgttttggcccgagctgcagccaagggtctgctggatgggattgagttgggtaaatcatcaaaacgggagaagaagaagaaaaaatcaaaaacatcattgacaaaaggtgccactactgataatggcatccaaatgaaaattgcttgagttcctgaatcgagaaactaaagccagtgctaatctatcagagactgtaacaaaaccacctcttccccagaaaaatactgctcaagtgggggcttcctcacagaccagaaaacccaacaagctggccccccatcctgcagtgcctgcatttgtgaagaacacttgtccctccagaccgcgtgaacggcagacacacttcttaagacctcggccagaagacagaatggttgctctgaaacccatcaagattgttctgcctccagtctttatgccattttcaagtccccaagggatcagatctcggatgccaactcaacatttgtactgtcgttgggttgcacccaaggcacttgtgcccacctgccttcccacacactcactatccagaaaagaggaaaagcctaaaagaatggacacacctttcctcccttactccaggcctccctcgggcgaatggcttttgattgtcttgtggttttttaataggagccaaagaagcagg

SEQ ID NO: 16068 - DNA, 206 bp, Homo sapiens
  SIMILAR (347)..(297): 641254mologous to Homo sapiens gamma-glutamyltransferase 1,accession number AJ006854,Smith-Waterman Score=65.
gagcagcagcaagatttattgcaaagagcgaaagaacaaagcttccacagtgtggcagggagaccgagtgggttgccgctgctggctggggcagcctgcttttattctcttatctggcctgattggtgcgtttacaatccctgagctaggcacaaaggttctcgacttcccgaccagagtagctagatacagagtgtcaattggtg

SEQ ID NO: 16069 - DNA, 389 bp, Homo sapiens
  SIMILAR (203)..(268): 951254mologous to Homo sapiens Human secreted protein, SEQ ID NO: 7678,accession number G03597,Smith-Waterman Score=109.
cagtcagcaggatgtgggtcgggccggataagagaataaaagcaggctgcccagccagcagtggcaaccctctcaggtccgcttccacattgtggaagctttgtcctttcgctctttgcaataaatcttgttgctgctcactctttgggtccacactgcctttatgagctgtaacactcaccgcgaaggtccacggcttcactccgcgagggtccgcggcttcattcttgaagtcagtgagaccaagaacccaccaattccggacacaatactgctgctgatctgacaggagacagaactcagatggtaatgctcgcgtgcccactgcccacagcctcctgctgtgccatcctgttcctagaggccacgaaccagtaccagtctgcagc

SEQ ID NO: 16070 - DNA, 355 bp, Homo sapiens; identical to SEQ ID NO: 5787
  SIMILAR (321)..(151): 331254mologous to Xenopus laevis alpha-globin,accession number M15381,Smith-Waterman Score=59.

SEQ ID NO: 16071 - DNA, 472 bp, Homo sapiens
  SIMILAR (471)..(367): 481254mologous to Homo sapiens Extended human secreted protein sequence, SEQ ID NO. 491,accession number Y36106,Smith- Waterman Score=97.
tttactagcaagatttattgcaaagagcgaaagaacaaagcttccacagtgtggaagtgggacccgagcgggttgcccaactaaattcttaattctgaattataaactaaaaaattaaatcaaagctatgtatatataaaaacacttacatataggtatatatgtaaacacatgctacttacacattgcttttttaatagttcttttgtgatcaacactcctataatctcatggtagcaccaccaagtgtagtttactatcagaggtcttacctggattgctattttgagaatttttagataccttttgttatattccaaaagttgttgatcaatgagattaaacccacaagcaacagcataacgttgcaatcattccacacgtatcttcagcacagatgtcaacattttgctgaagaaccatgccaactatctctgatgatccatggcatatggcaagcatgagggctgtg

SEQ ID NO: 16072 - DNA, 553 bp, Homo sapiens
  SIMILAR (99)..(182): 851254mologous to Homo sapiens Human secreted protein, SEQ ID NO: 7678,accession number G03597,Smith-Waterman Score=121.
cttcactcctgagccagcgagaccacgaaccccaccagaaggaagaaactccgaacacatccgaacatcagaaggaaaaaactccggacacgccgcctttaagaactgtaacactcaccgtgagggtccacggcttcattcttgaagtcagtgagaccaagaacccaccaattccagacacaaaactgagaggcggaggttgcaagggttcggtctcgctggctttaggagtgaagctgcagaccttcgccgtgagtgttacagctcataaaggcagtgtggacccaaagagtgagcagcagcaagatttattgcaaagagcgaaagatcaaagcttccgcagtgtggaaggggacccgagcggcccttgggtggttgatgggactgggtgctgtggagtgggggcggcactcgttggggaggctcgggccacacaggagcccacggagcagcggggaggctcaggcatggcgggctgcaggtcccgagccctgccccatgcgaaggcagctaaggcctggcgagaaattgagcacagcagctgctggcccag

SEQ ID NO: 16073 - DNA, 800 bp, Homo sapiens
  SIMILAR (1100)..(2047): 941254mologous to Homo sapiens neuronal nicotinic acetylocholine receptor alpha-7 subunit,accession number X70297,Smith-Waterman Score=1578.
ctgagggacacctttaccaggtccccttcctaaccctccagtcccaaatccaagattctttaaccacactctaaaagttcttcagactcaggacttaaacatagccacgccaccttgggccttcaaatgacaagggatctagcaattgtggcttcatcagccttccaataccaggtttaagggttttttaaacccagctcttcttaaaatcctccaatctcagtacccagtgttttagccatgctcgggtggctaaattacatccaggaatggtgccagggcctttagccatttgtctctcctcacactccagggcccatatggcccaggttctgacagtttgccttactcccttggcctggggcaagcccctacctgaataccctgtgtcaatgagtgtaccttggagagctatcccactcaggcccccagtgcctcctatttgcctaagggactctgcccacagaaaagaaggggagagatgttcatgtaacctcaaaatacttaggcttggttttgatgctagagaggaaaaaggacttggagagagagaaggaatggctggtccagaggcttttgtccactccctctcactggaagttggttgatctccagggaatccccaaggttagcctgcttaggggaagggctaggggtacctggaatgtaggatctcccccatgcctggcctaccaccctaatgtgtccggaattggtgggttcttggtcttgctgacttcaagaatgaagccgtggaccctcacggtgagtgttacaattcttaaaaaaaaaaaaaaaaa

SEQ ID NO: 16074 - DNA, 2943 bp, Homo sapiens
  SIMILAR (721)..(1032): 811254mologous to Mus musculus dynamin,accession number L29457,Smith-Waterman Score=405.
ctgggccagcagctgctgtgctcattttctcgccgggccttagctgccttcccgcagggcagggctcgggacctgcagctcgccatgcctgagcctcccccaaccccgtgggctcctgtgcggctggagcctcgcctacgagcaccgccccctgctccaaggcgcccagtcccatcgaccacccaagggcaatcagcaggatgtgggtggggccagataagagaataaaagcaggctgcgggagccagcagtggcaacccgcttgggtccccttctacactgtggaagctttgttcttttgctctttgcaataaatcttgctactgctcactctttgcgtccacactgcctttatgagctgtaacactcactgcgaaggtctgcagcttcactcctgaagccagccagactacgaacccaccgggaggaacgaacaactccagatgcgccaccttaagagctgtaacactcaccgcgaaggtcccgcagcttcactcctgagccagcaagaccacgaacccaccagaaggaagaaactccgaacacatcttgaacatcaggaagggaacaaactctggacatgccgcctttaagaactgtgacactcaccacgagggtccgtggcttcattcttgaagtcagtgagaccaagaacccaccaattccagacacattttggcaaccacaaagggactatcacctattgccaagcggtgagactatcgccaagtggtgagaccatcgtctatcgctgagcagcaaaacaatcgcctatcgccaagcaaatcgaagccatcaagctacagatggtcttacaaatggaaccttcaatgagctcaactaacaacttctaccgaggacccctggaccgacccgctggccctttcactggcctaaagagttcccctctggaggacactacaactgcagggccccttcttcacttctatccagcaggaagtagctagagcagtcatcggccaaattcccaacagcagttggggtgtcctgtttagaggggggattgagaggtggcagtgtgctggcagccctcgcagccctcgctcactcttggctcctcctcggccttggcgcccactctggccatgcttaaggagcccttcagcctgccactgcactgtgggaacactggccaaggccagagccagctcactcagcttgtggggaagtgtggagggagaggcgcaggcgggaactggggctcgatgcggcgcttgcgggccagcgtgagttccggtggttggtggcttggcgggccccagactcggagcggctggcctgccctgctggccccaggcagtgaggggcttagcacccaggccagcagctgtggatggtgcgctgagtctcccagcagtgctggcccaccccaccagcactgcactcgatttctcgccgggccttagctgccttcccgcggggcaaggcgcgggacctgcagcccaccatgcctgagtctcccctgctgccgccgtgggctcctgtgcgaccccagcctccctgaccagcgccgccccctgctccacggagcccagtcccatcgaccacccaaagggctgaggattgcaggcacacggcacgggactggcgcaggactggcaggcagctccacctgcagctctcctgcgggatccactgggggaagccagctgggcttctgagtctggtggggacggtagagaacctttatgtctagctaagggattgtaaatacaccaatcagcactctgtatctagctcaaggattgtaaatacaccaatcagcaccctgtgtctagctcagggtttgtcaatgcaccaatcggcactctgtatctagttaatctggtggggagttggagaatctttatgtctagctaagggattgtaaatacaccaatcagcactctgtatctagctcaaggtttgtaaacacaccaatcagaaccctgtgtctagctcagggtttgtgaatgcaccaatcagcactctgtatctagttaatctggtggggacttggagaatctttatgtctagctaagggattgtgaatgcaccaatcggcactctgtatctagctcaaggtttgtaaatggaccaatcagcactctatgtctagctcagggtttgtgaatgcaccagtcgacattctgtatctagctaatctagtggggacgtggagaacttttgtgtctaactcagggattgtaaatgcaccaatcagaaccctgtaaaaatggaccaatagctctctgtaaaacagactgactttctgtaaaatggaccaaccaatcagcaggatgtgggtggggccagataagagaagaaaagcaggctgcctgagccagcagtggcaacccgcttgggtccccttccacactgtggaagctttgttctttcgctctttgcaataaatcttgctgctgctcactctttgggtccacactgcctttatgagctgtaacactcaccgcgaaggtctgcagcttcactcctgaagccagcgagaccacgaacccaccagaaggaagaaactctgaacacatctgaacatcagaaggaacaaactctggacacgctgtctttaagaactgtaacactcaccgcgagggtccgcggcttcattcttgaagtcagtgagaccaagaacccaccaattccggacacaggaggatcgcttgagcccaggaattcaagaccagcctgggcaacccagcaacactccatctctacagaagttgtaaaattagctgggcgtgatggggcgcatctgtagtcctagctacttatcctagccttggcgagaggatcacttgagcccaggaggttaaggctgcagtgagccatgattgcaccactgcactccagccggggtaacaaagtcagaccgtgtctctaaaaataaataaataaataaaaataaaataaataatgacaaccaat

SEQ ID NO: 16075 - DNA, 258 bp, Homo sapiens
  SIMILAR (21)..(110): 1001254mologous to Homo sapiens protein x 0001,accession number AF117230,Smith-Waterman Score=154.
  misc_feature (1)...(258): n = a,t,c or g
agcaggacgctgcgcacaacatgggcaaccacctgccgctcctgcctgcagagagtgaggaagaagatgaaatggaagttgaagaccaggatagtaaagaagccaaaaaaaccaaacatcataaattttnacaccagtctnccgacatcacatacatacctaggtgcggaatttaattcagaaagatagaacctttgctgttcttgcatacagcantgtacaggaaagggnagcacagttttggacaacagcagggnt

SEQ ID NO: 16076 - DNA, 431 bp, Homo sapiens
  SIMILAR (1)..(237): 971254mologous to Mus musculus piL,accession number AF229032,Smith-Waterman Score=409.
cagctacgtgaatgggatgaaaatctaaaagatgattctcttccttcaaatccaatagatttttcttacagagtagctgcttgtcttcctattgatgatgtattgagaattcagctccttaaaattggcagtgctatccagcgacttcgctgtgaattagacattatgaataaatgtacttccctttgctgtaaacaatgtcaagaaacagaaataacaaccaaaaatgaaatattcaggtatgcctggactgttgcccagtgtaagatctgtgcaagccatattggatggaagtttacggccaccaaaaaagacatgtcacctcaaaaattttggggcttaacgcgatctgctctgttgcccacgatcccagacactgaagatgaaataagtccagacaaagtaatactttgcttgtaaacagatgtgag

SEQ ID NO: 16077 - DNA, 1045 bp, Homo sapiens
  SIMILAR (241)..(435): 961254mologous to Homo sapiens Human secreted protein encoded by gene 17,accession number Y76140,Smith-Waterman Score=325.
  misc_feature (1)...(1045): n = a,t,c or g
gggaagcacagtttggaacaacagcagagatatatgcctatcgagaagaacaggattttggaattgagatagtgaaagtgaaagcaattggaagacaaaggttcaaagtccttgagctaagaacacagtcagatggaatccagcaagctaaagtgcaaattcttcccgaatgtgtgttgccttcaaccatgtctgcagttcaattagaatccctcaataagtgccagatatttccttcaaaacctgtctcaagagaagaccaatgttcatataaatggtggcagaaataccagaagagaaagtttcattgtgcaaatctaacttcatggcctcgctggctgtactccttatatgatgctgagaccttaatggacagaatcaagaaacagctacgtgaatgggatgaaaatctaaaagatgattctcttccttcaaaatccaatagatttttcttacagagtagctgcttgtcttcctattgatgatgtattgagaattcagctccttaaaattggcagtgctatccagcgacttcgctgtgaattagacattatgaataaatgtacttccctttgctgtaaacaaatgtcaagaaacagaaataacaacccaaaaatggaaatattcagttttatcccttatgtggggccgatgggaggcttatgtggaatcctcatggatatgtgcatgagacacttactgtgtataaggcttgccaacttgaatctgataggccggccttctacagaacacagctggtttcctgggtatgcctggactgttgcccagtgtaagatctgtgcaagcccatattgggatgggaagtttacggccaccaaaaaagacatgtcacctcaaaaattttggggcttaacgcgatctgctctggtgcccacgatcccagacactgaagatgaaataagtccagacaaagtaatactttggcctggaaacagatgtgatagagataaggtagttanctacaaatgggtanatccaagatctgccttgggaattatgccccggaacaaccnaagtaacatac

SEQ ID NO: 16078 - DNA, 3462 bp, Homo sapiens
  SIMILAR (532)..(1161): 621254mologous to Homo sapiens putative p150,accession number U93572,Smith-Waterman Score=707.
ttaattagcattctggctgcaagtgctttgcaaaacaatacgttggtgttgaacgctgttgtccataagtaaagtctgagaaaatacattctgggtcacatcagaatctttgtcatccagaaacagcatgggaaaattacttttatgctttccaaagagatcttttattttattcataatgtctaattcacagcgaagtcgctggatagcactgccaattttaaggagctgaattctcaatacatcatcaataggaagacaagcagctactcctaggtatgtttcatacctagtcatatgatcttgcaagtgccggagtaagatcaccggctgtgcgtcccggttcctaacaggccacagaccagtgctggttcgtgggccaggatttggggacccctgattgggtagcttctccttgggaccccaaacatgaaggtgttgatgactgtccctcccagtgccatggcattgctgacctatccttctagggatggctccactgattgcatctggagaactataatttagaatcagtggcagccctgagctgcttttcctgcaactagatgatcccatctcctccacctcttctacctgagacagcaagatcaacctctcctcttcctcctcctcctcggcctgctcaactgtgtgtttttcaattttgtttttaaaccctgggcctatgacaccaacagacattatcaggcatatcactgtatcatctcccagggaggaggtggcctcaggaccagcagacaattttgtctgagctgccaagtgcttctgagtcattgcatctttgctgctctccaccctgaggaacttggttaagtaaaacccatctgactgtgttcttagctcaaggactttgaacctttgtcttccaattgctttcactttcactatctcaattccaaaatcctgttcttctcgataggcatatatctctgctgttgttccaaactgtgcttccctttcctgtacattgctgtatgcaagaacagcaaaggttctatctttctgaattaaattccgcaccatactgacttcttgagggtgaaaaagctgaagaggtaatgtctgtccgggaatcaggatcatcatcacttgtggaagaactggaatcacctgacagctgtcgtcatcgtgcaaagtcctgccatgaaattcttccatatcagcacctaggtatgtatgtgatgtcggcagactggtgtcaaaatttatgatgtttggttttttggcttctttactatcctggtcttcaacttccatttcatcttcttcctcactctctgggctcggggcaacagagcagcgaagaaagcgccgcgactccatcgctggccgagggccgacgtgaagcagctttccggtgcggccctgctgggctggctcgccaggcttggcgcccccacgcccgcctcccaggcccagctgcaccgctagcggctccgagcctcgccccactcccgacaggcaggagcggcaggtggttgcccatgttgtgcgcagcgtcctgctgatctccttcgccggccatgtctgtttacccgcaaaggaggctgggacagggcggtgccgaagactccgagggagggcccgtgtcgcgcggctgccgcgcaccggggccacagcgccccctggcggccccaggggagcagacggcggcgcgtacccaagccatttgtttaatttggtaactttatcctgaaagaagatatcatactgagttgttcctaacatttcctcttgcttgcgtgcagtatcaatggataaggagctctgtaactttggttggggtatttcaatgtcttcctccctggacttgtattcttggtcttgcacataagggtttacaaaggccaggatatgtgaagttttgtccttcctgtctgcttctgctcctgggacatcatgctcgtcccacttcttcatgtcattgtgttccttgcccttccagtgtctagaggctgcccagattctttggttcatggccttcttctcagtcttcaaagcagcaatatcccatctctgtgacccttcttccatcctcacagctccctttcgctctgtgatcccaggtggcaaaggttctctgattttaaggtgctgggctctgtggagctccttgccacacttccctgagctggtaccgttatctggcccttggtatatgtgtttcaggagcaacacaaagtagcccattggcctccttggtggattgggaactccttcctcccttcttgccctgtgcaactcatagtcattctttgggaacccgtaaccatcatcacttcctccatgaagcttttctcctagagcctccacagccacgggatcagaacaaacatgcttttccaagatatccgttccaatagggatttttagcccaatttctttccttggcatttggaattcactgcgtgcagcatgggggagtgttgatatctttggaattcgaatttgttcactgctgctgccatctcctccgtcgctgaatggcttaatttctattatataatcttcatcgaaaggcaaagaaagctccaccgatgttttatttgtttcaatgacagatgtgctgctttgtctgttccatctgtacaagaccttccttggggtgtagttgaggaggtgtagggtgtctggctcttccagtaccactctctcaagggtggtgatatccccttgatcattttttattgcatctatttgattcttctctcttttcttctttattagtcttgctagcagtctatcaattttgttgatcttttcaaaaaaccagctcctggattcactgattttttgaatggttttttgtgtctctatctccttcagttctgctctgatcttagttatttcttgccttctgctagcttttgaatgtgtttgctcttgcttctctagttcttttaattgtgatgttagggtgtcaattttagatctttcctgctttctcttgtgggcatttagtgctataaatttccctctacacactgctttgaatgtgtcccagagattctggtatgttgtgtctttgttctcgttggtttcaaagaacatctttatttctgccttcatttcgttatgtacccagtagtcattcaggagcgggttgttcagttgccatgtagttgagcggttttgagtgagtttcttaatcctgagttctagtttgatcgcactgtggtctgagagacagtttgttgtaatttctattcttttacatttgctgaggagtgctttacttccacctatgaggtcaattatggaataagtgcgatgtggtgctgagaagaatgtatattctgttgatttggggtggagagttctgtagatgtctattaggtctgcttggtgcagagctgagttcaattcctggatatccttgttaactttctgtctcgttgatctgtctgatgttgacagtggggtgttaaagtctcccgtcat

SEQ ID NO: 16079 - DNA, 1159 bp, Homo sapiens
  SIMILAR (117)..(1): 711254mologous to Homo sapiens Human secreted protein, SEQ ID NO: 7420,accession number G03339,Smith-Waterman Score=136.
ttagtctatcattgctttgtaaacattctccggttttacattactacagaatatggtccagatataaagttctactgtgtcataagacagctgattttcagaattacgtgatttattcataatgtctaattcacagcgaagtcgctggatagcactgccaattttaaggagctgaattctcaatacatcatcaataggaagacaagcagctactccatctgactgtgttcttagctcaaggactttgaaaccctttgtccttccaattgcctttccactttccactatcctcaattccaaaaatccctgttccttcctcgataggcatatatcctctgctgttgttcccaaactgtgcttccctttcctgtacattgctgtatgcaaagaacagcaaaggttctatcttcctgaaattaaattcccgcaccataactggacttcttgaagggtgaaaaagctgaagaggtaatgtctgtccgggaatcaggatacttcatcacttgtggaagaactggaatcacctgacagctgtcgtcatcatgcaaagtcctgcccatgaaattcttccatatcagcacctaggtatgtatgtgatgtcggcagactggtgtcaaaatttatgatgtttggtttttttggcttctttactatcctggtcttcaacttccatttcatcttcttcctcactctctgggctcggggcaacagagcagcgaagaaagcgccgcgactccatcgctggccgagggccgacgtgaagcagctttccggtgcggccctgctgggctggctcgccaggcttggcgcccccacgcccgcctcccaggcccagctgcaccgctagcggctccgagcctcgccccactcccgacaggcaggagcggcaggtggttgcccatgttgtgcgcagcgtcctgctgatctccttcgccggccatgtctgtttacccgcaaaggaggctgggacagggcggtgccgaagactccgagggagggtccgtgtcgcgcggctgccgcgcaccggggccacagcgccccctggcggccccaggggagcagacggcggcgcgtacccaagcatctgtgtatcttttactcccccattctcctcctctcctctccgctcttcacattcatcacctgctccctccttcat

SEQ ID NO: 16080 - DNA, 1185 bp, Homo sapiens
  SIMILAR (707)..(486): 351254mologous to Human papillomavirus type 76 E4 protein,accession number Y15174,Smith-Waterman Score=103.
ctacttggtcatgatgagatgccctgttttgtattgctggatttgtttgctaatattttcagagactcttgtgcctatgtctatgttaatgaaggcttggtttgaagtctccttctcttgtagcgtcttcttcatgttttgatagcagggttttactagcttcaaccatgagctcacatctatgcatggctgtgtggtcttcttcccttcttctccaccagcaacggatggtgtttcatcactcttaaaacatttacccctccagtgagtagaaactgatattgtgctgtcttcgctgacctctcgcctgcttcttgtggttctgagcacctctagataacttcccagccacttggattggttcttccgtaaactgtttcttaagcgtcctgtgcccattttcccctcacttgttgctttgttggtgccacacagcggatgttctctgcatctggtaaacattagcgcctccgccccctgcccatggcctgtgctcccaaacgctctgtccaaagctgccacttctctcccgttcagttcacatctctggggagagacaaggaagctcgtgacactagaacgaggtctggtaggtttgcctctggaattccgagtgacctgggacaagtcattctgtccagtgagaagacaagtatttagaagcgtcttctccaggaccccagaaggctccctcgccctcggcccattctgctccaagacgcaggcaggcattccccgcagagctgtgctgccttgctgaggttcattatctggccggcagctgagcctgcgatcccccagcagctttctaaatgtggcagggatcggtatagaggtctctcttccgacaccacaggccgtctgctgccttcccacggaccccgtgctccgactgccctcgctgcagtgcgggaaccatggaggactgctggcttgtcctgggcagtcctgagctgcgttaaaaaagtctgcatgaacggccttttcattggctgccaagtccatcaagagcccggtgctgcctcccgcgctcggagactcccgccgggcccgtgccacctcgtccaggtccacgtagggcccggcgccctcggggaacatctcgtccaccgccggcttcatctcggggccgcggcgctctaggctcacttccggcctcagagccgcttccggcgcgcgccacat

SEQ ID NO: 16081 - DNA, 482 bp, Homo sapiens
  SIMILAR (297)..(148): 961254mologous to Homo sapiens Human secreted protein clone pl87_1 protein sequence SEQ ID NO:28,accession number Y53011,Smith- Waterman Score=262.
tttttttgacattgctttcttttaattggagtgaggacaaaacctgatcccgttcagagatgaacagaatcatctaggtcgttaagaacagtcttatctttctggttaaccaggtcctaaattcaagggatttccacgtgttctttaaaaccacctgaaactgtcctgcgcaggctcacactgcggctctgtaccaagggcttggccccgcctgcagccagagggcatctcactggatgtcatcatcatcaaaaagatcttcaaaatcgttaaaaaagtctgcatgaacggccttttcattggctgccaagtccatcaagagccccggtgctgcctcccgcctggggaatggaaaggcaaggttatgtcaggtgcgttttccgaaagaacaggtgataagtgcattgcagggccactacccccacaaaaaaagaagatgggtgaggggaaacaggctcaagttggagtcaacattttagttc

SEQ ID NO: 16082 - DNA, 1656 bp, Homo sapiens
  SIMILAR (232)..(354): 971254mologous to Homo sapiens Human secreted protein, SEQ ID NO: 6994,accession number G02913,Smith-Waterman Score=221.
aattgacgccctcatggaccgttgaggatctttcgggtcgacccacgcgtccggaagaagctagtcaaaaggaaatagaagaatgggaaagaaaacttctagctcaagcagctccaacttgtatggagaccatgtgggaaattccagctattgggcatttcctttgtttagctcagcaaattctaaatttgccagaaatagtcttttacgaattggaaccgttgtcttctgatgcctcagtgtaatgcttttctatcgaaaataatgacttctctattaagtcctccccatcgcagacctaccttacatcgaagacctactttgccttataggacctgggaagcagcgctgaaggcagaaagtacaacagtggtacactgctgtagggcaaactgaaaatcctgataactgtgctgaaaaactggggttgtgtcctcagttttttaaagttcttgggagaagttaatccattgggaaggaaaaaccttttcacggaactacctttttaccaaaaagtgtgggctactttaaggggtctttgtggactttgtgtatggaaacacaaaagggaagttccaagatgctgttacttgggacagcctatcccatggaatgcaggggaagttattcttggggttatggattatttgggagaatgcttatggtaccattttccacagttctgtggtgcagatgtacggatttataaacagagaccctttcaggccccagaatttccaattccacccattaaaatacaaagagtacctcggattaaattggagaaattgaagtgtgactatgttagtacaagtaatcggagaacatagatgtagcagagatagcctgccctcttccttcaagaaagagcaggaaaataattttgatcccagcttgctgtccctgcctaaaatgatccttggataatccatgaccatcctctgttgaaaatgggagtaaaaatcccaacctatgaaattagaattccgcagggccttgtgaaattaaaaaaactgattgttgtaaagaaaatttagagaaacccaaggagtcccaggggaagttactggcctttggagagcctctcagtcccaggtgaaaataaggtttatagaaaatcaggaaaaataccggtgaagcttccagaataaagattgaacccagtcccattaaaagaaaatactctaaaatcttgcccaaatacatgtaaatggaagtcacagtgatcatccagaaaattaactgcccacaaagttggtaagggatattctattagagccagtcacttacagagcaaaaaagaaacttcaaacttaactaaaatgagggcaaaaaagaagaaaaagaaaaaaaagaaattgaaagatgttttgaatgaaaacttacagagaaagcgtgaaggtcttcattctcttgcattcaagtcttacaaacctgagatccagaataagttattgatcatcaaaaaaaaagcaaaacacaagaagcacaaatctggaaaaaaatccgtctctaaaaaagcaatcacaaagaagaggaaaactgtcataaagtcacctactgtaccagagtttcagcttatttgcactaatcttgatgaactcagggaattaatcacaaaaatcgagaatgaactcaaagatctggaaaaaaaaa

SEQ ID NO: 16083 - DNA, 408 bp, Homo sapiens
  SIMILAR (94)..(3804): 991254mologous to Homo sapiens Ras-GRF2,accession number AF023130,Smith-Waterman Score=6407.
  misc_feature (1)...(408): n = a,t,c or g
aagatagaagacaacaacacacttgtgttcattgaggatgttaaagccaacaagcaccaaattaaacaggctgtgaagaagctgtatgacattgatgtggccaaggtcaacaccctgattcggcctgatggagagaagaaggcatatgttcgactggctcctgattacgatgctttggatgttgccaacaaaattgggatcatctaaactgagtccagctgcctaattctgannnnnnnnnnnnnnnnnnnnnnncaccatannnnnnnnnnnnnnnnnnnnnnnnnnnnnnnnnnnnnnnnnnnnnnnnnnntnnnnnnnnnnnccttttnnnnnnnnnnntttttacnnnnnnnnnnnnnnaaaaaannnnnnnnnnnnggggggcccaaaaataaaatccggggg

SEQ ID NO: 16084 - DNA, 666 bp, Homo sapiens
  SIMILAR (97)..(231): 841254mologous to Homo sapiens mariner transposase,accession number U52077,Smith-Waterman Score=207.
tcaacgtccaaaggcgaaaaacccgctattagggcgatggcccacttcctggaacctcacccaatcaattttttgggggcgagggcccgaaaagctgacctctcgccaacctagtaccacttcttcaagcatctcgacaactttttgcaggggaaatgcttccacaaccagcaggatgcagaaaatgctttccaacagtttttcaaatcccaaagcacgaatttttacgctggatctagtttcgtgactgaagtttaatttctgctccaccctcttcttcttctttgtgatcttggggataactgtccaagattcaccctggtgggtcgaagaagacctgaatgcagttctttggttttttcccggatgaggatattctcctttttggttgggctctggcctgctttccctccgccctgtcggggccttgtgttttcgtttctcgtgtggcggctcaggttgggctctctccgcgccctctggtgccttgttagcctccactatggttcctccggcatttggtttgttcgccctgggcccttcaccctcccgtggagtaagttcctgggtgcgggcctgtacgccatccagttggggtgccttctcctcgcgccccccgcgtgtcgagtgagcgcttcgtggcttcgcccgcagaggccacagcat

SEQ ID NO: 16085 - DNA, 1020 bp, Homo sapiens
  SIMILAR (367)..(510): 1001254mologous to Homo sapiens Ras guanine nucleotide exchange factor 2,accession number AF181250,Smith-Waterman Score= 260.
  misc_feature (1)...(1020): n = a,t,c or g
aaaaatcacggcagttcacattaaatttgggcccccccaaaatttctttagaggggcgcccccccnntgtttgnnnnnnnnnnnnnnnctttccttgtgngtattttgggatggtgacannnnnnnnnnnnnnnnnnnntcagaattagccagccagactcagtttagatgatcccaattttgttggcaacatccaaagcatcataatcaggacccagaagaatatgtgccttcttctctctatcagtcctaaccagggtgttgaccttggccacatcaatgtcacagagctttttcacagcctgtttgatctggtgcttgttggctttaacatccacaatgaacacaggtgtgctgttgtcttctgtcttcttcatgggagactcagtggtcagcagaaacttgatgatgacatagtggccaagcttgtttctcctgggggtcctaagccagtttctggaattctttacgtaaaaggcatggttacatgttatgaaagcgcggaagaacggctgttttctttgtgtgactaaagccttgggattcgtgggcatatcaccagcgaggggatttctgctttaaatattctcacagttttcaaacattttcagcaccttagcaggaaactcagaggccactgaacctgctaaggataaacttaatactggttgatgccggagcccaggtgaagtcctgtgctccagagagcctttaagaatggcccaggaactgctaacgaacgtacagtacagtggtggttcaaaaagctttgcaaaggagatgagagccttgaagatgaggagcatagtggctgaccatcggaaatttacaacaaccaattgagagcaatcttcaaagctgatcctcttacaattacacgggaagaagttttccctcatccactatattcacctgacctctcgccaaccagctaccacttcttccagcatcttgacaactttttgcagggaaaatgcttccactaccagcaggatgcagaacatgctttccaagagtttg

SEQ ID NO: 16086 - DNA, 666 bp, Homo sapiens
  SIMILAR (193)..(663): 981254mologous to Escherichia coli Respiratory nitrate reductase 1 beta chain (EC 1.7.99.4),accession number D90758,Smith- Waterman Score=796.
atgcaccgaagctgcggcagcgacgcttatgcgttgttgggggagcgttctgtaagcctgcgaaggtgtgctgtgaggcatgctggaggtatcagaagtgcgaatgctgacataagtaacgataaagcgggtgaaaagcccgctcgccggaagaccaagggttcctgtccaacgttaatcggggcagggttagtccaatctctgtctccgattcagtctgcagcagacgcgggtgagttgggtagcaacggcattctgccagacgtcgaaagcttgcgtattccggtacagtatctggcgaatttgctgaccgccggtgataccaaaccggtactgcgcgcactgaaacgtatgctggcgatgcgtcattacaaacgtgctgaaaccgttgacggtaaagttgatacccgtgcgctggaagaggtcggtctgaccgaagcccaggcacaggagatgtaccgttatctggcgattgctaactacgaagatcgctttgtggtgccgagtagtcatcgtgaactggcacgggaagccttcccggagaaaaatggctgcggctttacctttggtgatggctgccacggttcagataccaaattcaatctgttcaacagccgtcgtatcgatgccatcgatgtgaccagcaaaacggagccgcatccatga

SEQ ID NO: 16087 - DNA, 1980 bp, Homo sapiens
  SIMILAR (450)..(268): 981254mologous to Homo sapiens Human 5' EST secreted protein SEQ ID NO:430,accession number Y12399,Smith-Waterman Score=314.
atggaaacattgcgtatttttggtcgtggtgaagctgaaattgaaagtattcgttctgcttcggaagatttccgccaacggacaatggaagtgctacggctggcgtttttatcctccggcattctcgaattttttacctcgctgtcaattgctctggtggcggtctactttggtttttcctatctcggcgagctggattttggtcactacgataccggtgtgacgctggctgcgggttttctggccctgatccttgcgccagagtttttccagccattacgcgatctcggtgccaccctccataaaccgaaattttctgaagcattgcgaaccggccttatttttggtgccgtcgaaaccctgacgccgctgatcggctggggaatgggcatgttagccagccggtttgtccttgaatggaaccactggattgcgtttgtgctgctgatattcctcggcgggcgaatgattattgagggttttcgtggcgcagatgatgaagatgaagagccgcgccgtcgacacggtttctggctactggtaaccaccgcgattgccaccagcctggatgccatggctgtgggtgttggtcttgctttcctgcaggtcaacattatcgcgaccgcattggccattggttgtgcaaccttgattatgtcaacattagggatgatggttggtcgctttatcggctcaattattgggaaaaaagcggaaattctcggcgggctggtgctgatcggcatcggcgtcaagatctctggagcacatcaccgtaacaccaagtacaggaatattaacctgtttcccatcgactacgcctttcggcctcgccttaggggaacccttggtcttccggcgagcgggcttttcacccgctttatcgttaccaaatccagcattttcagcgtcacgccattggtccagccaaagccatcctgtaatggatattcgccaccgccgccccccgttccgcatcgccgggagtttcagcggcgtgttattgccgagaagattttttgccagcaccatcgcgctaagttgaatcggctggaggaacggcaatacctgaccgttaatttccgcgcaatcgcccagcgcgtaaatatcggtattactggtttgcagataactatcgacgcaaacgccgcgattaatcgtcagcccggcgcgtcgtgccagggccggtttccgggcgcagtccggtgtggcggcaattaccgcatccacttcgatattgcgctggcggtccagcgttggcctgaatgccagaatccgttttttccagcccctgtaactgagatttcaacagcagatgaacgcccatctccgttaaccggatgtctgcaacggcttgttactttcgggtcggtcatcttcggcatcatcaatatgatcatgcgtctggcacctattggtcgcttcggggcaatggcgtttaccatcggtaaatacggcgtcggcacactggtgcaactggggcagctgattatctgtttctacattacctgtatcctgtttgtggtgctggtattgggttcaatcgctaaagcgactggtttcagtatcttcaaatttatccgctacatccgtgaagaactgctgattgtactggggacttcatcttccgagtcggcgctgcgccgtatgctcgacaagatggagaaactcggctgccgtaaatcggtggtggggctggtcatcccgacaggctactcgtttaaccttgatggcacatcgatatacctgacaatggcggcggtgtttatcgcccaggccactaacagtcagatggatatcgtccacccaatcacgctgttaatcgtgttgctgctttcttctaaaggggcggcaggggtaacgggtagtggctttagcgtgctggccgcgacgctctctgcgggtgggccaattgccggtagcgggtctggcgctgatcctcggtattcgaccgctttatgtcagaagctcgtgcgctga

SEQ ID NO: 16088 - DNA, 1154 bp, Homo sapiens
  SIMILAR (623)..(228): 311254mologous to porcine adenovirus 3 163R*,accession number AF247039,Smith-Waterman Score=102.
gagagagagtaactgcatggaaggccttgaagactgggcttgggcctgctgtacccacatgactgcttctgccacgttctactggccaagctctatgggcagctcagacacaagggaagagactctgctgcttcctgggagaagctgcaagaccacattgcgaaggaacatgttgttgctgctcccatgttaccttcgtcagtgacctgagatgcagactggatctagggaatggtgtttcctgtgtgatgccttccaggagtatctgcaccacgggcagtgccaggccgaggacagagggcctaatggaggacactctacaactccatcctgctgctgggggggcttgggggcgcctccacgagggtcttcagaggaaaggcatgtgtgtgggtctgtggcctgccagcaggagagctgggggaggccggcatcttgaggctgttggcagcaagtgcaggcagaggcctcgggccagaggggaggtggcagggctcaggtgccctgtgcttcctcggagaaggcacttgggatgaaggcttagtcctgcctggtaaacctggaggcctgtgaacactggggttagccccaacaagggaggaggttcccgctgcgtcactaagaacagcctgctgctacactcaccctgacagctgctccgctcccagtgaaccccaccccgagaaggctcatcggggccacggacctccctcagcgctgcattcagaatccctcaggaggttgtaaacttcctgatttctggacccatcaccagagcccaacgtcacggtaacaccaagtacaggaatattaacctgtttcccatcgactacgcctttcggcctcgccttaggggtcgactcaccctgccccgattaacgttggacaggaacccttggtcttccggcgagcgggcttttcacccgctttatcgttacttatggggtgacccccgcactggacactgggttgatgtgactgcggagctgtggcccgccaaggtcaatgctgtgacacagaacgcagcagaaatgctgatcccaccccagacacaggcgaagtcagaccccacctccctcccccaagagtggccgcatctcacagccatcgagcttacaggacagaagaagacttctgcaaacacctactgctaa

SEQ ID NO: 16089 - DNA, 313 bp, Homo sapiens
  SIMILAR (1)..(117): 871254mologous to Homo sapiens Human secreted protein, SEQ ID NO: 5576,accession number G01495,Smith-Waterman Score=176.
atggtctacgggacttccgaagctatcgggcagcgtcagtcttcagccgctaagctgagaaggagtcagtcagagagccttcggccagagttccaggggctctgggagtggctgccagtccgtgaccggcaccggagttttgggtctacggataaaacgtgtctcctttgtctctaccagaaaatgaaaggaactgaaattaaaagaagggagagattgaagtgtggcgccaagattgaaaggagaaagaggctgagggttagggaggttggagaagagagtaaaaagaggccgcttactggatttgaaattg

SEQ ID NO: 16090 - DNA, 290 bp, Homo sapiens
  SIMILAR (1690)..(2337): 871254mologous to Homo sapiens RIP protein kinase,accession number U50062,Smith-Waterman Score=953.
cttggtcccacacccatgaggctggcctgggcttcctgttgagaggtctcaaaagctacactgcagtcttgcagagtgagcgggaggtataaagatagtatagtcaaatcatcaagactgtttgctggcagccactcccagagcccctggaactctggcccaaggctctctgactgactccttctgggcttagcgtctgaaaactgacactgcccgatcgcctcagaagccccgtagaccaccacggacaccgagctttgggtaactctcacagtggaaggtaagtccat

SEQ ID NO: 16091 - DNA, 251 bp, Homo sapiens
  SIMILAR (70)..(249): 811254mologous to Homo sapiens organic anion transporter 8 (OATP8),accession number AJ251506,Smith-Waterman Score=232.
atggtctatggggcttctgaggtgatcaggcagcatcagtcttcagccgctacgccaagaaggagtcagtcagagagccttgggccagagttccaggggctctgggagtggctgccaggaaatttgcttgtgattgtatttgtaagttactttggatctaaactacacagaccgaagttaattggaattggttgtctccttatgggaactggaagtattttgacatctttaccacatttcttcatgggata

SEQ ID NO: 16092 - DNA, 1136 bp, Homo sapiens
  SIMILAR (793)..(1362): 671254mologous to Homo sapiens repressor transcriptional factor,accession number U35376,Smith-Waterman Score=704.
gactgaaagcctccttctctctctcactgaccttcacttcgagactggcccctgatccttccctggtgatctatgccatttttcccagtggaggtgttgtagctgacaaaattcagttctcagtcgagatgtgctttgacaatcaggggacagacttaacttccactgtgagagttacccgaagctcggcatccgtgatggtctacggagcttccgaggcaatcgggcagcgtcagtcttcagctgctaagccgagaaggagtcagtcagacagccttgggccagagttccaggggctctgggagcggctgccagggcctagggctgtgaagcgtctcagggttatatttgatgaaaaagagcctaaacgctatctgatttgggataaagaaaaaggagcattaaccttgactatgcctttggctccagccacctttttaagagtaaattgctgggcagctgtggaagtttatgacggcaatggtgtagattttctaggggaaggggcaccaggttgtttttcaggccaggtgcatgtggatgcagcaagccagcagcttgtgtggcaggctctccaagaaggtgctgctgtcaggctggatgttggattgagtgtgagtatgcataccagataccatgatattgaatcttccattgcttattataaaggaaattggattcctggttttctgaaagtgttgatgcaggagcagggtactgatgggggtggagctggtgggctctgttcctgccaatgctctgactacagtggtactgtggtgggggaagaggtagtgggatgcactcacgccagccgtagtggcacagcatggtacatcagcacattggcaccggtggggaaggcaagcacccatgcacacatgctccagcaaagcaatgtagggggtgctgttgggcaagtgtttgcagacagagtgccgggggaaggctgcagtgggggcagggcacaggcaggcttgtgtgggtccacagggccatctctgctggagcactctgccagtcatgtgcagtccaccaatgcaggagctatatatgggcctccaggaagtattggggactacacttcaaggaggcccaaccttattgggaacccaggagagcccattagaccatga

SEQ ID NO: 16093 - DNA, 364 bp, Homo sapiens
  SIMILAR (31)..(270): 321254mologous to Arabidopsis thaliana contains similarity to protein kinase~gene_id:MBB18.10,accession number AB005231,Smith- Waterman Score=85.
ggcacgagacaggcccttgaaaagaaggtaatgtggagcgggtagcctccgtattgattaagaaggggacgggcttaccttccactgtgagagttaccggaagctcggcgtccgtgatggtctacggggcttccgaggcgatcgggcagcatcagtcttcagccgctaagccgagaaggagtcagtcagagagccttgggccagagttccaggggctctgggagtggctgccagcaaagtctgcaaatgttgagagtgtcttcagtcacagaactgactccccggagggctcgctgccttgcttttctctggtccttgttcatcgcatacctccaggcaacttcagcctcacctttgccctaag

SEQ ID NO: 16094 - DNA, 748 bp, Homo sapiens
  SIMILAR (700)..(602): 931254mologous to Homo sapiens Human secreted protein, SEQ ID NO: 5576,accession number G01495,Smith-Waterman Score=149.
tcacatgatcaccggcctttccccagatgcagcatggccctgttgtgaacggaatgattgtgaacggaatgatggccaaggagctttatgcttctgcaccgccagctcacacgatggtccgtgtattgccccgtggaaaaccgggggtggaaagctgtctccacgttctgctgccgaagcagcaagctgattcacacatctccccttctctctgctctgcttctctttcatctgaggagcaatggagtccagttggtaagcatgggagtccggttccaccaattcggatgttttttcagacttctgtaggaacacctctgggctcttcttgtacccattgacatcacccccttcagcccttcctttttctctcttgtacctagcctcactgtgtgcctcctccatgccaggcactgtttcctggtgccatggatacagcagggagcaagaaagagcaccattcttgtccttggccagctggatccctcgtgggccctcaacttcctcccaaaggcttcctgctccactcctcacttcacccctgccactctcctccaggccacatggactccttctgtgtcctggcagccactccacagcgcccctggaactctggcccaaggctctctgactgactccttctcggcttagcggctgaagactgacgctgcccgatcgcctctgaagctccacagaccatcacggacaccgagctttgggtaactctcacagtggagggtaagtccat

SEQ ID NO: 16095 - DNA, 444 bp, Homo sapiens
  SIMILAR (31)..(135): 1001254mologous to Chimeric - Homo sapiens Alpha-actinin actin-binding domain-GFP fusion product,accession number W85036,Smith-Waterman Score=201.
ctaaacatccaagttgaggagaaggatagccagtgagatccccaggtggggaagctgctccagcactgcccagccaggatcaagatgaccgtcaccttcaacaaccacaggaagccacagctctccaagttccaccagctctacagtgaagacacacaacagcaaatcatcagggagactttccacttggtatttaagagagatgaaaatgtttgtaagtttcttggcaccatctggagcctcacgactgggaaactcaacagaggccaggctcctctctttggcatatttcatactgttgagctccatcttgaaatccgttcctcctgccagggcatcgttcacttctgactcacctgcttttccagctgtccctgctcgggacccttcgtcaactctcctttctacttgcctcttgaatctgggcattctaaatggccccat

SEQ ID NO: 16096 - DNA, 422 bp, Homo sapiens
  SIMILAR (226)..(339): 311254mologous to Equus caballus aggrecan core protein,accession number AF040637,Smith-Waterman Score=63.
acatcactcatgtctttatttagggtaggccactgtcctctaattccatactgattcttctgggtactctggtgagccactcaaaaaacaatttctgccaaacctttgggaaagtatcagtggtttggtggccaaattcctcatcaaatagtgcaaactggtttcctccaagctgtgacttcaactaggtccaaaagaaaagcaaagtcgtgtcctgggttcctttttccaagttccgagttgtgggaagatgggttgtggcagctccgggagcagacacataggatttcctccttcctcagctctcaggagggccgctggatccaaggcaggggtcaggtatttccgagatgaagtgaactgaatagggcggctacccgaaaggcagtcctcagcattattccaggaaacatcagggcagt

SEQ ID NO: 16097 - DNA, 1374 bp, Homo sapiens
  SIMILAR (1234)..(1446): 601254mologous to Homo sapiens low-Mr GTP-binding protein Rab31,accession number U59877,Smith-Waterman Score=181.
agcggccgccctttttttttttttttttttttttcagggtttaaagctattttctggcaataacaatttctaacttctaattaccctttttccggcttgaaaatctaaagttggattgaagaagagaaatgacaacatctcccttttacttatccaagctgtgaatttaaaaatacctttcgtttttgtttgtttgtgcctatcaactttgacccatagctcccagaataattttgatattttctgaataaattgacactagactttatacatcactcatgtctttatttagggtaggccactgtcctctaattccatactgattcttctgggtacctctggtgagccactcaaaaaacaatttctgccaaacctttgggaaagtatcagtggtttggtggccaaattcctcatcaaatagtgcaaactggtttcctccaagctgtgacttctgcagagacaagaaatgtccttgttaagtaacactgtcctcaaattttctatgtgtatcatagcctacttcctcctgaatactacctttctccaaatcaagactcaaaataatatgttttctttttaatttctatcctaaatcccatatagaaggaaggatgcaagacgtggtctccatgggagacagagtataatcaccaactaggtccaaaagaaaagcaaagtcgtgtcctgggttcctttttccaagttccgagttgtgggaagatgggttgtggcagctccgggagcagacacataggatttcctccttcctcagctctcaggagggccgctggatccaaggcaggggtcaggtatttccgagatgaagtgaactgaatagggcggctacccgaaaggcagtcctcagcattattccaggaaacatccagggcagaacctttgcagcttcaaagcacagtaaagttgaaagcagtcccaccttggcaattgtgtataaaacgacaatgtgcagatacaggaaaagtcccaggtccgaagccacctaggaacgatgaccccaggacagaagtgtgcccaaacaaatgcctggggtaggtcattttaaaaggaacaatgtttacaagccctttctagcgtgaaaaacagagaaaagagacccagctctttccacccaatctgctggagcgccgtttcgttttcagttgggcgagagggagacatgtggcctctcgccccttttcctgactctgagaatgtggccggagccggggcgctcctgctccgcctcgccgccctcccggggctgtcctgggccctccggccgccgcctcccgctccagttcgcagctgggcgacaagtggctggtaaggaggccaggggcgggagcctgggcgcggaattccaccacgctggag

SEQ ID NO: 16098 - DNA, 515 bp, Homo sapiens
  SIMILAR (71)..(448): 641254mologous to Homo sapiens death effector domain- associated factor,accession number AF179286,Smith-Waterman Score= 371.
  misc_feature (1)...(515): n = a,t,c or g
actccccggacggcgtttctcctccgagcggcgccggtttcgngttggggggggcggggtacagccatccatgaccatgggcgacaagaagagcccgaccaggccaaaaagacaagcgaaacctgccgcagacgaagggttttgggattgtagcgtctgcaccttcagaaacagtgctgaagcctttaaatgcagcatctgcgactgtgaggaaaggcacctccaccagaaaacctcggatcaattctcagctggtggcacaacaagtggcacaacagtatgccaccccaccaccccctaaaaaggagaagaaggagaaagttgaaaaagcaggacaaaagaggaaacctgagaaaagaccaaggaaatttagtccttagttgttaccaagaaaaataccaacaagaaaaccaaaccaaagtctgacattctgaaagatcctcctagttgaagcaaacagcatacagtctgcaaatgctacaacaaagaccagcgaaacaaatcacacctcaagg

SEQ ID NO: 16099 - DNA, 1065 bp, Homo sapiens
  SIMILAR (446)..(844): 851254mologous to Homo sapiens dJ914P20.3 (molybdopterin synthase sulfurylase (MOCS3)),accession number AL034553,Smith- Waterman Score=586.
ttagtggctaagctcatccgaaagcattgtcaaagccagaatatccgtggcagtatcttgaaggcttctgtgatcctggtgggcacctggttggaaaattttccatgcaaaggttaccttaaatgaccgagcacccagcatccatttgtggcacatgtagcttgatcctgttatttttcctatggggatattcaggatcatagattggcccactagactgatttcaaggctttcagtgatattttcatgtttgccagacagggccactgtgaagagctgcacaggccatgactgatcaaccctggtgtgaacagcacccactagagtcttctcagcttcagagaagagtctggctttttcttcagcttctggagggcctgagactctgggcgttcctggaagaggctcctgtccccaccaaggcctatgtgtgacacctgggcccttggctcttacccgcgtctgtgttttgctgtctctcccccgttttcctgctccctgcctcttccctcccttttcccccactctccactcctcggaaggccaaaaagacaagcgaaacctgccgcagacgaagggttttgggattgtagcgtctgcaccttcagaaacagtgctgaagcctttaaatgcagcatctgcgatgtgaggaaaggcacctccaccaggtacttgaagatctgtgttacctgggtagttgtggtcatttgacaagtttttattgagcacacagccatttgcgctcttggtgtacagtggtataaagacagaccaggtccctgttcttacggagcttaaaatactggatctggtccctattcggcaccaatccctgttctgcagtgctgccctctccagggaagcctcgctatgtcctgaggccccttgggggatgaggactgggggcatctttgacggggcccgggtgtggagcagcaagagtctttctggggaagcggcttgctcccaggcagccattgtgggggcctgtttgctctggtcatccatttctcctgggcacatgctggcttcctgtttatgcttcctgttgtgcagcgtggccat

SEQ ID NO: 16100 - DNA, 384 bp, Homo sapiens
  SIMILAR (2)..(340): 1001254mologous to Homo sapiens muscle specific gene M9,accession number AB019392,Smith-Waterman Score=597.
cggggacctgctggagacctgccatttccaggccttctggcaagccctggatgaaaacatggacctcttggaaggtataactggctttgaagactctgtccgaaagtttatctgccatgttgtgggtatcacttaccagcacattgaccgctggctgctggccgagatgctcggggatctgtcggacagccagctaaaggtgtggatgagcaaatacggctggagtgccgacgagtcggggcagatcttcatctgtagccaagaagagagcattaaacccaagaacattgtggagaagattgactttgacagtgtgtccagcatcatggcctcctcccagtaacttcaggtgtttaataaagatgtgttgactcagtaataaag

SEQ ID NO: 16101 - DNA, 985 bp, Homo sapiens
  SIMILAR (745)..(960): 841254mologous to Homo sapiens deoxy-5'- nucleotidase,accession number AF154829,Smith-Waterman Score=327.
tcaacaagatggtgaattgactagtgggtagatccacaggacgggtgtggtcgccatgatcgcgtagtcgatagtggctccaagtagcgaagcgagcaggactgggcggcggccaaagcggtcggacagtgctccgagaacgggtgcgcatagaaattgcatcaacgcatatagcgctagcagcacgccatagtgactggcgatgctgtcggaatggacgatatcccgcaagaggcccggcagtaccggcataaccaagcctatgcctacagcatccagggtgacggtgccgaggatgacgatgagcgcattgttagatttcatacacggtgcctgatttccaacaacctttctaggctctttattgcacctggtaagtgaagacgtctgggtttgaaactctgctcttgaaccactacttccattcatctctccattgtcactcttacaaaacctgttctctctcattaaaaaacttccctgttccagcactggttgtggaaggtgaccatagtcatagtgatgttttagtagttgagagtgaatgtgggcaagttgctcaacaatatccacaggtataattctgagaacctggcctccctggggagccagtggaagtttccatgatgaggaagttgtgtgacatgggggttcggaaaaggttggcaggcccaggggggagggttaaagggactgtgggtctcccatcccccctttttcgcctgccccggaactcccgggcttggaaaggagaattatcctggatgttggcgtgcgccgtggccggtgcctggcgactgggcttctctccgcctcctgggggcttggcggggatttcgctagcctcctgggtcgcgctccttcgctttgcttctcttggcgcagcatcttcctctgggtctcctcgagttggttgtgataccaattgtgccaactgtgtgacctccaccccctcggagaaggactcatttgggggaattttcat

SEQ ID NO: 16102 - DNA, 885 bp, Homo sapiens
  SIMILAR (643)..(2): 981254mologous to Homo sapiens deoxynucleotide carrier,accession number AJ251857,Smith-Waterman Score=1100.
tcatgttgttactctaggaccctggcttttcttatctgtggctccactatccctttgacgtaatcttttgcatttttccagccagctttgcatctggggctggccacatgacctgagctcgtaatcaaaatgtaagcagaaatctggtgttggggcctctggaaaagcttttgcaaatgctttcttgaggtaggcactgttcctgctgtttccaacaacctttctaggctctttattgcacctggtaagtgaagacgtctgggtttgaaactctgctcttgaaccactacttccattcatctctccattgtcactcttacaaaacctgttctctctcattaaaaaacttccctgttccagcactggttgtggaaggtgaccatagtcatagtgatgttttagtagttgagagtgaatgtgggcaagttgctcaacaatatccacaggtataattctgagaacctggcctccctggggagcacccagatcccgctgaaggcctttaccaacccatgccacaccagcttcaccctgtgcaagcacatggtcatccaagcgcatcaagaaaagcagctgatccaacagattttgtacctgggagatctgctggagacttgacacttccaggccttctggcaagccctggatgaaaacatgacccttttggaaagtataactggctttgaaggtttctagcttgtgggctttgctgattcccaacttttggtgaacaccaaaatctgttccttcagctgtcacttctggagactgaattctcctctgcttccattctttcccttctataattgcccctttttcccctccaaaataagttcccacataggtgcctttgatcccatctgcttttttgcaatcctgccccat

SEQ ID NO: 16103 - DNA, 534 bp, Homo sapiens
  SIMILAR (349)..(480): 771254mologous to Homo sapiens ribosomal protein S24,accession number M31520,Smith-Waterman Score=161.
ctatcgaatgtcctcttcatccaaaccaaactcttctttgctccctacacacactctttgctttactcctttgggtcttggtttatggcgtttctttgctgtggaaccaaatgctgcttttctgtccaggttcagctcaattgccagcacctccaggaagttttccttgattctagccgtttgagtcagtacaaaacacttaacttttctgagctttgttttcttcgtcagcaaaattagagccataacagtaacgatttcatagggttgttgagaagactgaatgaaaaaaacgtatttaaagctcttagaatagcctccctggctgtctgaggatagaccgccatcatgaatgacatggtaactatctgaactagaaagttcatgaccaaccaacgacttcagaggaaacaaatggtcattgacgtccttcaccccgggaaggcaacagtaccgtacttgatattgattgagcagctgcggtttgccaggcactgtgcttggtatgggggagacagcgatgaaactagtcat

SEQ ID NO: 16104 - DNA, 685 bp, Homo sapiens
  SIMILAR (58)..(255): 291254mologous to Lycopersicon esculentum extensin (class II),accession number X55687,Smith-Waterman Score=73.
gactcccgggtcgactactactactaaatttccgacagcgtcgacagatagatcgcccctccatgaacgacacccgtaacctatcccgcacctagaaaagttccatgccccaacccgacgtacgttcagaggaaaccaaatgggtcattgatgtcctttcaccccccgggaaggccgaccagtgcccctaagcacaggaaattccgggaaaaacctagcccaaaatgtaccaagacccacacccggatgtcatcctttgtattttggattccagaacttcattttggctcgcgtggcaagaccaaactggcttttggcaatgattttatgacttccctgggatttattgcaaaggaaaaatggaaccccaaacataggactttgcaaggacatgggcctggtatggaggaaggaaaaagacctccaaaggaaagccaacggaaagggaacggcaaggaaccggattggaaggaaagttccaggggggacttgcaaaaggcccattttttggtgcttgggcaaaaagaagaaatgaagtgtctagcagttgagctgggagattggattcacagcccgaaggagttaaaaggtgctgcaatgatgttagctgtggcccactgtggattttttgcaaagaacatttaataaactaaaaacttcaaaaaaaaaaaaaaaaaaactcgga

SEQ ID NO: 16105 - DNA, 521 bp, Homo sapiens
  SIMILAR (414)..(262): 431254mologous to Homo sapiens keratin associated protein 16.1,accession number AJ406952,Smith-Waterman Score=91.
tcacatccctttggtctgaactagttgcctggccccgtttagctgttctctgtctggtaacacagtctcgggcaggtccacatctttggtggtcacctggccattgtcgccatgccctcgtctgtcaatgtaaggattttggtctttatcctgtaggtaatgctttgattctagcttctctgatggtacctcatcatattttatgcttgtttgagataatgcatgcaaaaacacattgcacttgtaataccctgagacgccggagtcccccacacagctgtcctcaggacagccacaccgagagcagccacctgagatgccggagtcccccacgcagccgtcctcaggacagtcatgccaagagcagccacctgagacgccggagttgcccatgtagccatgcctggcacaaccgtctcagaaacacatgattaaggggtaacaaaacaacaaacaccatgagaacaaaatgtgaaccatgttgtgaagaaacagtcaaaaactagaaaggatagcaagac

SEQ ID NO: 16106 - DNA, 669 bp, Homo sapiens
  SIMILAR (250)..(669): 441254mologous to Homo sapiens protein translocase,accession number AJ005895,Smith-Waterman Score=185.
ccctccgcacttcagaaatgggctcatccagcgtccccatgactgccgggtgggagaaaccaaagcgctgggatggggctcgattggccaatgagagtgcgtccttggcgtgacatgcggtatagcgacccaatcgctgcccggtaataggcggaaagctccgacgccggtgtgcgtagaaaagagttcgtgtgacaggacctgggggagggctcacattaaccccgtccttcccttcctgcttgcagcccatggcgaattgtggatgattgcggttctcttaaaagttggaaacgtgtctgccagtggcttcagccctgccctaacgcccttccttcctgccttggaagtcccctgagatgtgaattctcaggatttcccaggaactaattaggcctcggttccactacaggtagcttcgcagtgtgggggggcctgttctccaccattgactgtggcctggtgcggcgccctggccccagccccttccaccctgttctgcctgctctcacctctgtttctctgcctccaactcccccaggtggcccactggccatggtgggctcagcaatgatgggggggtggtcgggggagtgggaaatactccacctggcctcttccactcatccttacccaagtctcccttctccagcgcccccattcctggag

SEQ ID NO: 16107 - DNA, 484 bp, Homo sapiens
  SIMILAR (1)..(567): 891254mologous to Escherichia coli acriflavine resistance protein,accession number M94248,Smith-Waterman Score=861.
tttgagactttccagtatttcgacctttaccttttccaggttcagaatcagagccactgccactatccacttgtaacagggcaaaacgagaagcggtggtgggaacagaactaagtactgctgaggccatcgtaaagatttttcttttaaaatacttctgtcaagaataatttacttgtaatcctagcactttgggagagtcgaggtgggcagatcacaaggtcaggagttccagaccaggctggccaacaaggcgaaacaccatctgtactcattcatgaatgaaagccaaatttcacccataggctgttaaccgatgctccgaaacttattcgcaaagtacatagagaaaaaaattgcgctgggcgaaacctaactcggccagagaagcggcttcaaaaccgggcctcccgggccgccggctcggccctcctctcccacactccccccgccgccgcctctcccgcggctccccaggcggccg

SEQ ID NO: 16108 - DNA, 497 bp, Homo sapiens
  SIMILAR (180)..(296): 1001254mologous to Homo sapiens hypothetical protein,accession number AL133654,Smith-Waterman Score=183.
tttttttttggttgattataatgtatttatgttaagatgggggggtttttacacctaattttgaggaaataatatctaattttttggtttggggattatttttagatcatgaggctggagatggagtcctgaagccagaaggaggcatgctttcagaagaattaaaatgggcatccagacctgtaaaactgtgtcgaaaagaattacgtcaaatttccgccttggaactatcattgcgacgttccagtcttggagttggcattggatcaatggctgctgattccatcgaagtatcttttccttttgtcctttcctctgttgctgtggatttgatcatctcacataggacccaaactgtcaccctgtgctcaaagactcaaggcttcctttctctcattgctagcccctagggagtagagtttcttggtctccttgctaaaaaccagttcttttcatttcccacaatgatccaggattccaatagctctaagacagat

SEQ ID NO: 16109 - DNA, 893 bp, Homo sapiens
  SIMILAR (196)..(960): 981254mologous to Escherichia coli acriflavine resistance protein,accession number M94248,Smith-Waterman Score=1232.
tttttgggtgataataatgtatttatgttaagatgttttgattaaaatacctaattttgaggaaatagtatctaattttttggtttggggattatttttagatcaagaggctggagatggagtcctgaagccagaaggaggaggcatgctttcagaagaattaaaatgggcatccagacctgtaaaactgtgtcgaaaagaattacgtcaaatttccgccttggaactatcattgcgacgttccagtcttggagttggcattggatcaatggctgctgattccatcgaagtatctgtggaacaggtactatggatacacaggggaacaagatagtatctgttctcaggatgattaccatctactgggaaagcagacaacacagataattgtgttacctcatttgcttcactctgttgctgttccttcttttttcttcttttctctctttttttctcatttggtagttgacttgccttccctaaagtttgaggactttcccagtaatttcggacctttacccttttccccaggttcagaatcagagcccactgcccactatcccacttgtaacaggggcaaaacggagaagcgggtggtgggaacagaacttaagtactgctgaggcccatcgtaaagatttttcttttaaaatacttctgtcaagaataatttctcattcatgaatgaaagccaaatttcacccataggctgttaaccgatggctccgaaacttattcgcaaagtacatagagaaagaaattgcgctgggcgaaacctaactcgggcagagaagcggcttcaaaccccgggcctccccgtgccgccggctcggccctcctctccctcctccccaccgacgccgcctctcccagcggctaccccgggcggccgc

SEQ ID NO: 16110 - DNA, 491 bp, Homo sapiens; identical to SEQ ID NO: 5805
  SIMILAR (13)..(447): 931254mologous to Homo sapiens ribosomal protein L7,accession number L16558,Smith-Waterman Score=670.
  misc_feature (1)...(491): n = a,t,c or g

SEQ ID NO: 16111 - DNA, 829 bp, Homo sapiens
  SIMILAR (823)..(413): 951254mologous to Homo sapiens putative p150,accession number U93564,Smith-Waterman Score=672.
tcaattcatcaaactcattctccatccagttttgttcctttgctggcgaggagttgtgctcctttggaggagaagaggcattctggtttttggaattttcagcctttttgcgctgctttttcctcatcttcagggatttatctacctttggtctttgatgctggtgaccttcagatggggtttttgtgtggttgtcctttttgttgacgttgaggctactgctttcaagctcgagcatcccagattgacttgagaatgctgtgctgccagcaagaatttcaagccagtagatcttagcttgttgggctccatcggggtgggatctgctgagcaagaccacttggcatcctggcttcagccccccttccagggtagtgaacagttctgtctcactggagttccaggtgccactgttgtttcctgacttcttaatgatcgccattctaactgatgtgagatggtatctcattgtggttttgatttgcatttctctgatggccagtgatgatgagcattttttcatgtgtcttttggctgcataaatgtcttcttttgagaagtgtctgttcatatcctttgcccgctttttgatggggttgtttgtttttttcttgtaaatttgtttgagttcactgtagattctagatatcagccatttgtcagatgagtaggttgcaaaaattttctcccattctgtaggttgcctgttcactctgatggtagtttcttttgctgtgcagaagctctttagtttaattagatcccatttgtcaattttggcttttgttgccattgcttttggtgttttagacatgaagtccttgaccat

SEQ ID NO: 16112 - DNA, 887 bp, Homo sapiens
  SIMILAR (59)..(553): 561254mologous to Mus musculus ribosomal protein L7,accession number M29015,Smith-Waterman Score=350.
gaattccgccagaaacccttaagaaaaagcgaaggaatttcgcagagctgaagagaagaagaaggaggttcctgctgtgccagaaacccttaagaaaaagcgaaggaatttcgcagagctgaagatcaagcgcctgagaaagaagtttgcccaaaagatgcttcgaaaggcaaggaggaagcttatctatgaaaaagcaaagcacttatcacaaggaatataggcagatgtacagaacctgaaattcgaatggccgaggatggcaagaaaagcgtggcaacttcgtatgtacctgccagaacccaaattggcgtttgtcatcagaattcagagggtatcaatgggagtgagccccaaaggttccgaaaggtgttgcaagcttcttcggcctttcgtcaaaatcttcaatgggaaccttttgtgaaagctcaacaaaggcttccgattaaccatgctgaaggattgtaggagccatatattggcatggggggtaccccaatcttgaagtcagtaaatgaactaatctacaagcgttggttatggcaaaatccattaggaagcgaattgcttttgacagattacgctttgattgctcgatctcttggtaaatacggcatcgtctgcatggaggagttgaatcatgagatctatactgttggaaaacgcttcaaagaggcaaataacttcctgtggcccttcaaattgtcttctccaccaaggtggaaatgaagaaaaagaccacccattttgtagaaggtggagatgctggcaacagggaagaccagatcaacaggcttcatagaagaaatgaactaacgcgtctaacatggatatttttctaagctggttcggtaaataaccagtacctggtctcaaattgaaaaaaa

SEQ ID NO: 16113 - DNA, 1200 bp, Homo sapiens
  SIMILAR (330)..(298): 811254mologous to Canis familiaris dopamine receptor D4,accession number AB044887,Smith-Waterman Score=48.
tcattgcttggctgtgaactcgagggcagagcaggtggaattcatttttgtgctccggggcctgacagctagaaggggcttgggaatcatttgtgtagtgattttcagaataatgtcagggcctaaaactgtaacagcaaaatgcagcacctgctcccccagctcctccttctggggttggcgggtcaggacccgtggagggagggagcccagtgaccccaggggccacggcacccacggcagccacggcacccgtgctttccacagcaggccccagcagctttcggcctgcgctttgctgtcaaacttgtctgtcgcagttgtcccgggcagtaggtcttcccctgggggcagtcggctgcgtgctgccctcctgctgcgacttaggatctcacccgagggccaggagattggcttggtctgtgcaccatcgacccgagggccagaaggttggcttggtctgtgcacaattgacccgagggccagaaggtgggcttggtctgtgcaccatcgacccgagggccagaaggtgggcttggtctgtgcaccatcgacccgagggccagaaggtgggcttggtctgtgcacaatcgacctgagggcgagaaggttggcttggtcttgcaactgccgtggactctggaagccgagggagagagctaccagccttgcagacagatgggccttgccccagttccccgcagattctgggaagagggagccatcgcccatgcctgtgcccaggtcagggggacaaagggagccctcgaatctgatagttgtttctgacctgtcctccggccagctccatcgcgtggccaccacattcctcgcattgcggtcggcaccgtagtacaggtggctagcccctgtgaacacgaccatcttggccttccgcagcacatgccctcggcagggggagctgcccggggcagcctggctcttcttcaagacggccgcgctgttcaccggcacggggccctcggtgtcactggtgtcacagctggagatgggcgagttttccagggtccggtgccggaacactggagactgtggactcgatgtccctgacttgggctcgatggccagccccagggtgactccgcccgccagcgctttcttcaggctctccttgacctccgtcagctccagctccaggctgacacgctccgcctccttctgccggcactcctcctccag

SEQ ID NO: 16114 - DNA, 1480 bp, Homo sapiens
  SIMILAR (574)..(1233): 911254mologous to Escherichia coli HYDA,accession number D14422,Smith-Waterman Score=1016.
atgaacgagtgcagaggagtggaaattaccacagtttgttctgaagactggatacagcggcaccttcctggagcagtggtaccccttaaaggtgaagggaacgtgggtgttgcaacagaggaccattatcaagaagactcttttgggtttggtctgagaggcactgggaaacctcttaaacttgaaaaatcacgaccaggtgcagtgactcatacatctcccagtgatggcctgacccagtatgtgcctgacagcctgacagccatgccagctgcagcagttgtcatttgggtcatcagacctggctgtggggtacagcagcagattgggtttttgaggcacagcaacattgatgacattaggccacggacaattattagggctgtggctcctgtaaaacttcatggcattagaataaaaatggctagttttactagtgctacaagacttacggatgaacaggtaattactgctcctgctgatagtgggatagttatacctagattttctgataattgggtggctggtgggaagactcacctaacacataaggactcacataaacttaaagttaaggggtggaaaaaggcatttcatgcaaatggacaccaaaagcaagcaggagtagctattcttacatcggacaaaacaaactttaaagcaacagcagttaaaaaagataaagagggacattatataatggtaaaaggccttgaccaacaggaaaatatcacaatcctaaacatatatgcacctaacactggagctcccaaatttatgaaacaattactaatagatgtaagaaatgagatagacagcaacacaataatagcaggggacttcaatactccactgacagcactagacaggtcatcaattcagaaagtcaacaaagaaacaatggatttaaactataccttggaacaaatggacttaaaggatatatacagaacactccatccaacaactgcagaatacacaatctattcaacagtgcatggaacattctccaagatagactatatgacaggtcacaaaacgagcctcaataaatttaagaaaagtgaaattatatcaagcagtctgtcagaccacagtggaataaaactggaaatcgactccaaaaggaaccatcaaaaccatgcaaatacatggaaattaaataacctgttcctgaataatcgttgggtcaacaacgaaatcaagatggaaattatacaattatttgaactgaacaacaataatgacacaacttatcaaaacctctgggatacagcaaaggtggtgctaagaggaaagttcatagccctaaatgcctacatcaaaaagactgaaagagcaaaaaagacaatctacagtcacacctcagggatctagaaacaagaacaaaccaaacccaaacccagcagaagaaaggaaataatcaagatcagagcagaactaaatgaaattacaacaaaaaaaaccatacaaaaaaaaa

SEQ ID NO: 16115 - DNA, 511 bp, Homo sapiens
  SIMILAR (212)..(358): 421254mologous to Chlamydomonas reinhardtii vegetative cell wall protein gp1,accession number AF309494,Smith-Waterman Score=91.
attccacccattttatagatgagggaactgagcttcagagaggctgggtgggccaggttcacctgggtagctgtaaacccaaggacggatggaagtggagcagcatggctttcacagcgtgcccagtgtactcagagtgaccccagagtctgagaagtccctgagcatctgtctccctcgactccaagtcaggaataccgtgggcttcctgccctcaccccacacctcaagaccatcccactgcctgcctgcttgccccctgccatctcgcactcagccctgggtgcctgtgaagcctggccccactgcctgccgggggttcctgcagcactcccctactccaggctccccatctccctgaagcttccagggtagcagctggtgggacactgatctgtgagctctggaatgtctgcttagaattctgagaggcaggaactgctctgtctttgtaactactcaaggccaactgtcacatgaaggaatgaataaagagtttttactgacttgt

SEQ ID NO: 16116 - DNA, 681 bp, Homo sapiens
  SIMILAR (1)..(474): 1001254mologous to Escherichia coli ORF_f413,accession number U28377,Smith-Waterman Score=830.
cgcggagccgtgggacgagggcggcgatggcgtcccatgtagagtgccgtcctctgggagtgtttgagtgtgaactctgtaccttgacagctccgtacagctatgtgggacagaagccccccaacacccagtcgatggtcctcctggaggaaagctatgtcatgaaggatcccttcacctccgacaaggacagattcctggtcctcggctcgtgctgcagtttgtgcagcaggctggtgtgtgtgggcccggtgggaatgcagtttattctactccaagagattctgcctcccttgtgtccgggagaacatcaatgcttttcctcaggaaattcggcaagacttggagaaaaggaaagctccatcaaagaggacccccagccagcccggttctcggacgtgagtgcaactggggctaggtcatcgggcggcaccctgcacagagctcctaggaccagcctgcgccaaggatgctgctgagctgggagccgccatgcctggccttgtttctggaccactgggagcagcactgcagcccaggggagctggagtccagcttggagcagccacaggcccagggagctgtagcaagagggtagtccaaaggcagatgccagacaagacacagccaggaacccggccaggtccccccacatgcccctcagggcccaggcctgagtgt

SEQ ID NO: 16117 - DNA, 1005 bp, Homo sapiens
  SIMILAR (606)..(481): 831254mologous to Homo sapiens Human secreted protein sequence encoded by gene 27 SEQ ID NO:307,accession number Y91634,Smith-Waterman Score=167.
atgcttcaagatgttccatctttagacaccgccagaaacaaacaaacaacccagtatgtcatctttgaaatgatccaacgaatcgaatgccgttgctctaagtacagtggagcgcacggccagacgcgacgcccctcagcacggaacccagcctcgcggactaccccgaagctcagagccacatcccgcgcagaggaccgcggcgaccggaaaagcaaggcagaggcggaaaaccaccgcgagcgctggggcgagagagggcaggcggaggctcgcggggaccaccagcatccccggaccctctcagccgtccctgttcacaggcaccgcccccaggagcctcggcaggggcctaggacgccccggcgtgcagaagagaagcgggatcagatggcgtcccatgtagagtgccgtcctctgggagtgtttgagtgtgaactctgtaccttgacagctccgtacagctatgtgggacagaagccccccaacacccagtcgatggtcctcctggaggaaagctatgtcatgaaggatcccttcacctccgacaaggacagattcctggtcctcggctcgtgctgcagtttgtgcagcaggctggtgtgtgtgggcccggtgggacggatggaagtggagcagcatggctttcacagcgtgcccagtgtactcagagtgaccccagagtctgagaagtccctgagcatctgccacaggttgacacacacaaaggggagctgtatcaatagccagggggacgagatgggccagggtgggaggagcctccgcagtgtggcatgggagtatctgaggctcatggaggagctggtggtccaggagaagctgggaaaggaagactgcaaaggaaattcggcaagacttggagaaaaggaaagctccatcaaagaggacccccagccagcccggttctcggacggcccaggcctgagtgagtgctgctcagatgtgactgagagggatgacctccttcagcagggcagctcctaa

SEQ ID NO: 16118 - DNA, 494 bp, Homo sapiens
  SIMILAR (863)..(1678): 1001254mologous to Escherichia coli CG Site No. 18232; alternate gene name hypF,accession number U29579,Smith-Waterman Score=1473.
cagcccttctgacaggccagttggagcggagtggctccatggtagtctgtggcatttaccatggcgcccttggaaaccaggaggtcgatgagggatgcctgcccacagacagcagccacatggagaggggtgtgccccctgtcgtctcttggagaatggagtgacaactgagggatcattcaacctcccagagacgagtttctcacagtcatcgcagaagcagagagggtgacacatcttttggacggtatctttatcatggtcctcttggctcagaagtctctccacttctttctggttacctgatgcaatgtgcttaaacaggcagtcggtgggagacgaagtcatctgagagagtaagctcattctctgcttaaggaacagcctgtctccaaatccctcagactcagggggtttagcagagaggcttccttgccgaatatatacaatggcagcttcgaatgaggtcaggcagtatcccagttcggacgggt

SEQ ID NO: 16119 - DNA, 928 bp, Homo sapiens
  SIMILAR (108)..(1): 1001254mologous to Homo sapiens Human sialoadhesin family 4 (SAF-1) related polypeptide,accession number W81024,Smith-Waterman Score=183.
  misc_feature (1)...(928): n = a,t,c or g
tcagtcgcttttgatagagtgtgggctccctctgctgcttgcaggagacaccaggactccgggcatttggggttccttggagatcagcgcagaggaggtggccgcgaagatctgcagcttcactcctgagcctggtgcttcctggacgtgctcattccccaagacccactctggctccaggtcccctggaagcacagcagcctcccccagggggctctgccctcgcccagcactcacggactgcccctgcgggcacctcagcggcctgcctgtggccagtgtctgagcagggagctgcccccatgtgccaggtgaccagaccaccaggaagtcaggcaccgtgttcccaacccagtgcacacgcccataaacatctgacaacgggctcctcgagcccagcggaggcatcagctctgcccagggcttaaacaggcagtcggtgggagacgaagtcatctgagagagtaagctcattctctgcttaaggaacagcctgtctccaaatccctcagactctgagacggaggacgggctgacgtcaggtggggagaaggcttcctggaagtggaggctttgacggttgctccattttttcctgatcttaaccagtgacatactccttgcggtcagtttcagccacatcatctaatgaagcaacacagcttggtaccacctgaagcaattccattatttttgaattctgttcagcacagtctacagccgtgcgctgccgcttgttcagcacctgaactgacgctccgtggagcagaagcagctctaccacgaagacgtgcttttcaatcacagcctcgtgcagcgctgtgttgcccttattgttagaagcgttaatggaggccccgtgcccgtgtttggcctgcagctcggccagcntctgtctcntcagcgcctcaagctcatcgtccgccat

SEQ ID NO: 16120 - DNA, 582 bp, Homo sapiens
  SIMILAR (111)..(404): 941254mologous to Homo sapiens Human sialoadhesin family 4 (SAF-1) polypeptide,accession number W81023,Smith-Waterman Score= 501.
ttattttgcataacaagtttatttttttaaaaaggcaatatagacaataaacaaagtaaataatcagatcttaacttctgtcctagacttgttccgttaagttctagtctgtgagcacttgtagttcaataatcgtcatcttcatcagagtccattacttttcttctgttgaatttcactgttgttgtcttttctgtttgttggcttacttttttaaggattttctattaaaccttgttctgataccttctcacttagttgtccatatcttgccatctgtataaggtaattctctactgctttagttttttcaggctttacaagtgctaagttacttaacctggcccgggccgactgatccagaaacttgggctaagatactgtttctcatttctgcttgccctgtgctttgcttcctgttgggccgcatcaccaggatccccgtgtttggcctgcagctcggccagcctctgtctcctcagcgcctcaagctcctcgtccgccatggctcggcgtcagcgctggagcagccgcggtcactctcgcagcccttcgtcgcagtcgtttctcttgttttttttg

SEQ ID NO: 16121 - DNA, 788 bp, Homo sapiens
  SIMILAR (509)..(703): 901254mologous to Homo sapiens Human secreted protein clone dd119_4 protein sequence SEQ ID NO:108,accession number Y53051,Smith-Waterman Score=295.
tcttcactgtctccctgcaggaggtaggaagctctgtgaggacagaaattcacctgtgttttcccagagtccgcccgcccggcgccctctagggtggaaggctgcgggcgtcctaccagtgccaggactgccagagcgggaggagcgcggcgcgggccagccgggactgctggacagcggggtccaggctagaggcgagcgagcggtcagtgacggctgtggaggagggaggcgctgggcgtcagcgcgggacccgagcctctggaccactggacccttgctttgtctcagtcgcactgaggtgagggggctgcactcggccgagcagcgaggaccgtgcccagctcagagagagccctcagagtgtccgggctggattgcggccgcggtgcgggagaagtcggaggagggagtgacaggtgaccgggctggcagggcaactgccattatttgtccttcctattgacaggtccacctcctaacaaattacccattgctctcgtccccaggtgatcagtttgaaattcagctaacccagcagctatggtccctcatccccaatgaggatgtgagaaggttcatgtctcatgttatctggaccttgaaaatggaatgttcagaaacacatgtgcaagggacctgtgccaagctcatgtcacgaacaggcctcctgatgaagcttctcagcgagcagcaggaagcaatctgctggttaatttgcagccaccagtggggcttctctgctgtaaaggagataaaggacatggaaaggaatggctttggagtcc

SEQ ID NO: 16122 - DNA, 2261 bp, Homo sapiens
  SIMILAR (742)..(1884): 731254mologous to Homo sapiens Human sialoadhesin family 4 (SAF-1) polypeptide,accession number W81023,Smith-Waterman Score= 1442.
acacctcagccttaaatgacagaagaagaatgtcaagtgggaaagtgacgttggttttcagtttgtggattctgaatccacacaaacacaggattgtattttgaaaacctgaattaattattgtctttacctctataaaacaaaaaattataatcaaaattattagtatgacagtcacagatattgcgaagatgagtttgttcttatagtcatatcctggaacttctttcatgagctcacttgacttgtgctctttctgttcattctgttccatgttctcattaatataatttgtttttttgttggtccgtatcccattctacattcaatgcctttgcttcctgctgctcgcggagaagcttcatcaggaggcctgttcgtgacatgagcttggcacaggtccccttgcacatgtggtttctggaacattccattttcaaggtccaggataaaatgagacatgaaacttctcccatcctcaattgggatgaggggacaaaacctgctggggttagctgaatttcaagctgatcacctggggacgagagcaatgggtaattgaagcttttgggctcaggggacaagtcaatgcccacattgttgtattcccattttgtctcagtttgtttaacagttggttctaagttgaatgcagtcccagcggaaactgcctgaggtagggcttttgcagggctagaggcagaaggcacgcccatggagaagggtttcagcacagaggagactgctgccttatgctcttgggtgaatgaaggcttggtgtagatggtgtttcccactaccttctcaggcccctgcactatgtgaggctgttccagctcccttggggctggaccctcaagcctttttcctttggcagcattgtccacaaatgcctgggcatcctgttctttcctagtgctgtgctttcccacctttttgaagtgcctttcctggatgctccttgggcccatgaggactctgttcactctctgcaggtttttgcctacactttgaatctttgccaggcggttttcatcactctcgtcattggtgtctagctgctcactcccaaagcctgacaagttgatgccactgctgtctgagggcgcctccgactcaatagtcagctcagtgctcatgtgctgcttccgggcttgtaacatcttcatgaatgctccttctggattccctacagatgcttcttcagtggagcctttgtgcttggcccttagcagcacagctggggctgtggtcccgtgcgaggtgtgctgggggggtgtgtaggtggctggtggtggcagcttgtgccagagtgacacaggcttccgtgggcctggcagtgagtcactgggcagaggcatgagcacgtccatgtagctgagcaggaagaagcccaactggccgtccagcatgccctggtaccagttctcgttgatctggttgatgagcgtgaagacgtcgccctcatggaagcccagctccccatggttctcaggctggaagtcatacagcaccttgcagcttggctggtctaggggcggcatgctcctgctaggagtacagatggacttgttggaagattggaaaggggatgaagctgcgatcttggggactgtggtgcaggggaagcccccgttggactgctcaggctctccgaggtcaaagggctcccagaacttgggcttatactcccgcttggggcgtgaggaagcttcccgcatcctgcgcttgagcttctctgccagctcgtccaggatctgcatggcctgccagtggtcgttcagctgcgcctccgccagggcccggagttgactcatctgctcaatgtcggtctccaggaggttgtgcatgctggtttctgctacctccttggagtcctcaaacttctccagcgcctggcgcagctcctcatcggggatcttgccctgccgcttctctatgtccagggagtccttcacctctgccaggtgcttcatggactcgccggcatccagcagtgcatcactgaagttggactcgttgcccagctccttctggtggcggatcaggcactcgctcaggagcccctccgactgcgggtagccggggttcttcacctggccaaccagtgtctttgaggtggttgatggcactggaaaaagacgaacacaacggagaaatccagcaccttgtttcttatggatcttcttgtgattccatacactgattgtaactgaatcagacttttcaatataccttttcttatacacagagaagtacat

SEQ ID NO: 16123 - DNA, 404 bp, Homo sapiens
  SIMILAR (331)..(8): 501254mologous to Homo sapiens neuronal thread protein AD7c- NTP,accession number AF010144,Smith-Waterman Score=230.
ccacgcgtccgctctgcaaacaaatcaaaaaattatctgggcgtgatggtgcatatctgtagtctcagccacgcacgaggctgatggaggattgcttgtgtgtgggaggtcaaggctgcagtgagctatgatcatgccactgtactctggcctgggcaacagaataagactttgtcttaaaaataaataaattaggccacgtgcggtggctcacgcctgtaatcccagcactttgggaggccgaggagggcggatcatgaggtcaggagatcgagaccatcctggctaacacggtgaaaccccatctctactaaaaaaaaaaaaaaggggcggccgttttaaaggaacaaagtttatgtccgcgggctggcagaggaaaagtttttttatgggggccccaaaat

SEQ ID NO: 16124 - DNA, 503 bp, Homo sapiens
caaacactgtatgattttatctgtaatttttcagtaagtacttctaaaacagaatactgtctttaaaaaataaccacaatttggccgggcgtggtggttcacgcctgtaatcccagcactttgggaggccgaggcaggcggatcacgaggtcaggagatcgagaccatcctggccaacatggtgaaaccctgtctctactaaaaatataaaaattagccgggcttgatggtgggtgcctgtattcccagctacttgggggactgagggcaggagaatctgagggcaggaggaatcgcttgaacccaggagggcaggagggttggcaggtggagccgagaccatgccattgcactccagcttgggcaactctgtctcaaaaaaaaaagaaaaagactagcctgggcaacatggcgaaaccctgtctctacaaacaagtattagccgggtatggtagcaggcgcctgtagtcccagccactcaggaggctgaggtgggaggattg

SEQ ID NO: 16125 - DNA, 522 bp, Homo sapiens
  SIMILAR (522)..(271): 721254mologous to Homo sapiens Secreted protein encoded by gene 94 clone HPMBQ32,accession number W88627,Smith-Waterman Score= 298.
aaggtagttaaatttatccatcttttctttcaggtgggactccaattattctggttataccactgcttagagacaactagtggaactgaatgtgagtatcacttcaagcaattaagaaaaagagagagttattttggtcggttttacaaagaagtctgaataagaaggactgtttgggtttttgtttcttagaaatttccatagttctgccggccttggtggctcacgcctgtaatcccagcactttgggaggccgaggcgggaggatcatgaggtcaggagatcgagaccatggccaacacagtgaaaccccgtctctactaaaaacacaaaaaaattagccaggcgtggtggcgggcgcctgcagtcccagccactggggaggctgaggcaggagaacggcatgaacccggggggcggagcttgaggcgagcagagatcccaccactgcactccagcctgcgtgacagagtgagacttagtctcaataaataaataaataaataaataaataaataaaat

SEQ ID NO: 16126 - DNA, 1185 bp, Homo sapiens
  SIMILAR (759)..(1199): 831254mologous to Homo sapiens Human PRO940 protein sequence,accession number Y41724,Smith-Waterman Score=631.
atggtctcgatccccgacctcatgatccgcctgcctcggcctcccaaagtgctgggattacggcgtgagccatcgtctgcgcttctatttcgatcaccaagatgtggctcggaatgcggggcttacttcttccatgaattggccaaggagaagcgcaagcttggaccaggagttgctaccttgtgcggagaacgtgtggtgcataagaaaaccgagcctctgctcttcgaaaatgtatattctggccagggcgaggccagccagcgcacaactgcagggggcgccgttcccacagcagccctgcaaaggagtgtgcctgagaaacttccgcctcccctgcacccagccctgtttaggcacgaggctgaatcaatggggtcatcccgcttcaagccagtgcctcttcccagctcccatggggaccaccgaagccagctccggatggaaaacgtggacgtgaaggaggaatggcaggacgaagatttcccaggacctctggcagccccgtgcaaatgttctgcccggaatggaatatttcccagggtagccaaggagccagtgccctgggtcaaactcgggcagcacgggctgcggcttcaagaagtgatctgggccggagacacccccgtggccaccgccaagaacatgcccggggacagcgcggatcatttggggacggcacgacggaggacggcagcgccgccaacgggcgcctgggcggacagtgatcatcggggagcaagagcaccgtatagacctgcacatatccggccttacatgaaagtggtcacccacggagggggttcgcagtgcccctctctgatgcacggggatgttaagccgtcaactcgcttcggtggacggactgtgggcaaggcgtgcatgggtactacggcgaaggctcaacgccatcatcgtcttcgcagcctgcttccttccagacagcagcctcccgactaccactacatcatggagaacctcttccttccgccaggacagcagacaacacctggaccagtggggctgaccagccagcggcaggagtggaggcaggcagggtcggcaccgcaggtgtcctaccctggacccctccatgttgggtccctgccttctgtgccccgtgagcagtacgtcatcagcagcttagagctcctggtggctgaggactacatgatctgtacctga

SEQ ID NO: 16127 - DNA, 703 bp, Homo sapiens
  SIMILAR (253)..(5): 331254mologous to Homo sapiens Human secreted protein clone ye21_1 protein sequence SEQ ID NO:60,accession number Y73419,Smith- Waterman Score=71.
gcgaggatgagagggggcgcagcctcagccccgcgctggggagcccaccgctaaccctgcaccccacccacccctgcacaaaagagctggcgggcgctggccacgtcgccctgggtgaccttcctcggatgcagaatccgcccctgcgagcatcctcttcctcctaggctctgaaggcccggggagcgtgagcgatgcccagctgcacccgggcagggctcgcctttgtttgccatgtaaggaggagaggctgtctcagctgcagaggggtcatccctgcttcaagccagtgcctcttcccagctcccatggggaccaccgaagccacgctccggatggaaaacgtggacgtgaaggaggaatggcaggactaagatcttcccaggccactcccagaagagacgggggtggaactgcttggcagcccggtggaagacacatcctctacttccaacacgctaaatttcaacggagcgcatcgcaagaggaagacgctggtggccccagagatcaacatttctctggatcatagtgaggggtccctgctgttcgatgacttcttggatacccttgatgacctggatattaacgtggatgacatcgagacccccgatgagaccgactcgctggagttcctggggaatggcaacgaactggagtgggaagacgacacccccgtggccaccgccaagaacatgcccgg

SEQ ID NO: 16128 - DNA, 8349 bp, Homo sapiens
  SIMILAR (591)..(1001): 221254mologous to Saccharomyces bayanus BIK1 homolog,accession number U13062,Smith-Waterman Score=111.
  misc_feature (1)...(8349): n = a,t,c or g
ggcagacagcagatgctctcagatttggtggtgagttttggccttggcatggttggcatggagtcagcacaggaagccgggaggtatgaaggggcatccacctgggtgaaactgtcttgccaagccaaagccccgaggcctgccctgaagcagctgtagtggaggagaggcctgggattccttagagtcacctttttacgaatgtaccgccactctgttagctcacaaggaaaataaggaaaagccaggcctcccacctcttgactcttgtgagagtgaagacaacatggggcatttagaaaatatatttttagtgtatgataatgtgggctggcccacacagcaatgagcccaaagaccccctcgctttgggaattattcatggccctgctcatcacagcctctgatatgcatgactgtaacctaggctgagccaagaatggagctcatgccagaaatggtcctaagcatgcacatggccccctggaatatcaaaatcctggggagaaagaaatcatctttgccttgggcagtgaagctggaatggcacatatctatctgttgccacatctcctgcctagtggagaagccttggaaggcaacagacactgagcaagcagcagggaggagaatgtcctggaagggcaggactctacccaagtccctaacatccccagactcttctcttccataaactctctaattactctgctgtttaaatcctggttttggtcaagccagtcaggttgcataaagaatatgaatacagtatgcatcaaagttgcttcccagaacaggaagcaaaacaaacaaacaaacaaacaaaatactgatatcagtacccagggtgcccaattaggtcacacccagtggctgcattgcagcccctgagctcctgctgcaccgtgtgtcctgctgcccgagtgggccccaccctgggttctgaagatgcccttcttaatggagagctcccgatggagggctccaggactgatgctctccctaaggaagggaggcctcagatttggagagggacaccaacaggaccagaggaggactgaggggcactggcaccaataagtggaagggaacagcgtggtaacaaaaaagagccatgccacttgcatgctggagggagtctttttgtgtcagcctaaagcttaggctggtgtccatgtggaacatgacatctttccagtatccctgatccaggaaactgcagtgagacccaggtgacccagctctgtgtcatttggagcccattaaaaagtgaggcagccacatggcggggacattgaccccactccagaccacactcccatctccatacataggatagaaactgttcatcaggaaggaaaaccaaacagaaatttgtggtctaggggaggggtctgcattcagcatggccatgctgggctggagtggctgtggggtgtccagatagatgggcatgtagactagtgctttctcaacctttaatgcatgcacaaatcatcgagatcttgttaaaatgtagatcctgggtgggcacggtggctcacgcctataattccagcactttgggaggcaaaggtgggaggatcgcttgagcccaggagtttgagaccagcctggtgaatgtggcaaaaccctgtctctactaaaaatacaaaaaattagccaggcatggtggcatgcacctgtagtcacagctactagggaggctgaggtgggagaactgcttgaacccaggagttcgaggctgcagtgagctatgatgctaccactgcacaccgcactccagcctgacagagcaagactgtctctaaaaaaaaaaaaaaaaaaaaaatgaaaaggcccatataaggcctatgtcaagttaacactccctgaaagtaacactctactctttgtggacctcacaagcagttacaagcataaacgtttttatatacatacacgctcacattttatgctataaggcaggggtccccgagccccaaccagtgcctaccaggtactggtctgtggcctgttaggaactgggccccacagctggaagtgagtggcaggtgagcgagacaagcttcaactatatttacaagcactccctaatgctcgcattactgcctgagttccacctcctgtcagatcagcggcagcattagattctcttaggagtgcgaaccctattgtgaactgcgcatgtgagggatctaggctgcatgatccttatgagaatctaatgcctgatgatctgtcactatctcccatcacccccagatgggaccatctagttgcaggaaaacaagctcagggctcccactgattctatagtatggtgagttgtataattattttattatataatgtaataataacagaaataaagtggacaataaatgtaatatgctggactcatccttacaccatccccaaccctgtctgtggaaaaactgtcttccatgaagctcatccctggtgccaaaaagggtgaggaccactggtgcaagaacgaacagtggatgaaagcatggataacagagaggctgaatctgaatccctgctccatcacttcctagctgtgtgactttgggcaagttactcaacctttctgggcctcagtttccaattttgtaaaatgaggatactaacaatagtacctacctcatacggttgtgttagcatgttgaccttatgtgatgtaaagtgctaacatggctgggcgtggtggctcacgccggtaatcccagaactttgggaggccgaagcaggtgcatcacctgaggtcaggagatcaagaccatcctggctaacacagtgaaaccctgtctctactaaaaatacgaaaaaaaattagccgggcgtggtggcacgtgcctgttagtcccagttactcgggaggctgaggcaggaaaatggaagtgaacctgggaaggtggagcttgcagtgagccaagataacgccactgcactccaagcctgggagacagagcaagactccatctcaaaaaaaaaaaaaaaaaaaggtctaacaacatagctggcccataataagtgccagcggtatgtgcctactttatttacatacacataccacaccataaaaactccatccttgcaaattgactcctactatatagattgttctgcaacttacttttcctgtgtcttagcattctttctgtgtgctagcatgtagatcaccatagtctccataaagactatcaagatcaatgttttaacttgggttatttccaaatattctccattacgaacaactctgcaatgggcatctttgtacatgaagatttttgtagcatccctagatgtggaattgccaagttaaagggtaattttttttattttgaaagattcagctgggtgcggtagctcatgcctataatcccagcgctttgggaggctgaggcaggcagactgctttgagctcaggagttcgagaccagtctgggcaacaaggcgaaaccccatttctacaaaaaaaatacaaaaattgggccaggtgtggtggctcatgcctgtagtcccagctattcaggaggctgaggctgcagtgagctgagatcatgctactgcactccagtctgggcaacagagcaaggctcaagaaagaaaagaaagaaaggaaagaaagagagaaagagtgagaaagagagagcgagagagaaagagagcaagagagagcgagagggcgacaaagagagagagagagagagagagagagagagagacaggcacagtggcacatgcctgtagtccaagctactcaggaggctgagacaggaggaacacttgagcccaggagttcgagtctagcctgggcaacatcatgagaccttgtctttaaaaacttttttttttttttaaacaaagggcaggggcatagcaaagagctattaaatattgacgacagatttggtcagatcagggctgaaaggactgtcttactgtgtcattatttagaagtccacactgaagtaggcaggggtgaaatgacgtgtctgggacttgctttagaatacttcagcaaaggaaagaagaaaacgaaaaggggtagatgaagaaaccgtggataaatcctgataactattcactttgggtgatggatgtatttgaggtcaatgaattattatctctgctttgaaaatgttcataatagggccgggcacggtggttcacgcctgtaatcccagcactctgggaggccgaggcaggtggaccatgaagtcaggagattgagactatcctggctaacatggtgaaaccccgtttctattaaaatacaaaaaactagctgggcatggtggtgcacacctgtagtcccagctacttggaaggctgaggcaggggaatcgcttgaacccaggaggcggaggttgcagtgaggcaagatcgcgccactgcactccagcctttccagcctggcaacacagcaagacccttgtctaaaaaaaaaaaaagaaaaaaaaaaagaaaaaaaaatgttcctaataaaaaaggacaggactgcacagaattgtgagctacacagggatgggagcccagtgctgagtgtgtatttggagagtgcatgagtgagctacatctagcaaagcaccctggtcgcctcagctgagagccctgactggttgagaggcatcagcagaaggagacagggaggtaattctaggcgggaggaaaggcactgagtcctgggacagtgtggtgccctgtcctccctctgcccctcacagatgagctcccaccaagccaccacactcccctctgctaagaccccaccccagcatcccaagggccctggcaggaggcacatacccaggatgtggggcagagggactggtacacacgctggtaccattcgcacacagagatatcgcctcctttagcggtcattgccttctgacagcggtggaagtctgtgaagaaaggggttcaagtcagcccagatcaagagttggaacacatttttttttttttttgaggtagggtctcaatctgtcactcaggctggagtgcagtggtgcgatctcagctcactgcaacctctacctcctcctgggttcaagtgattctcctgcctcagcctctcaagtagctgggattacaggcacctgccaccatgcccagctaatttttgtatttttagtagagacagggtttcgccatgttggccaggctggtcttgatctgcccacctcggcctcccaaagtgctaggattacaggcgtgagccactgcacccagcaaaattacatttataaagatgtttacagccacaccatttgtaagaactccaaaatggaaatcacacaagtgtacaggcatagaataaattgtagaaaactggacagcaatgaaaatgagcaagctatatgccacagcatgtatggatctgagaaggtactgaatgaaaaaatccaaacacaaaagaatacacacagtatgtataaagttcacaaagaggtgaatctaaacacggtggtagccgggcatggtggctcaggcctgtaatcccagcactttgggaagctaaggcaggtggatcacttgagggtaggagttcgagaccagcctggacaacatggtgaagccctgtctctattaaaaatacaaaaaagtggctggacctagtggctcactcctgtaatcccagcactttgggaggccgaggcaggtggatcatgaggtcaggagatcgagaccatcctggtgaaacctagtgaaaccccgtctctactaaaaatccaaataaaaaattagccaggcgtggtggcgggcgcctgtagtcccagctactcgggaggctgaggcaggagaatggcgtgaacccgggaggtggagcttggcagtgagctgagatagtgccactgcagtccagcctgggcgaaagagcgagactctgtctcaaaaaaaaaaaccaaaaaacaaaaacattaaggattttggccgggcactgtggctcacgcctgtaatctcagcactttgggaggccgaggcaggcagatcatgaggtcaggagatcgagaccagcctggccaacatggtgaaatcctgtctctactgaaaaaaatacaaaaaattagccgggcatggtggcacgcgcctgtagtcccagctactcaggaagctgaggcaggagaattgcttaaacccgggaggcggaggttgcagtgagccaaggttgtaccactgcactccagcctgggcaacagagcgagactctgtctcaaataaataaataaaattggccaggcgcggtggctcacgcctgtaatcccagcactttgggaggccgaggcgggcggatcacgaggtcaggagatcgagaccatcccggctaaaaacggtgaaaccccgtcttctactaaaaatacaaaaaaaaaaaattagccgggcgtggtggcacgtgcctatagtcccagccacttgggaggctgaggcaggagaattgcttgaacccgggaagtggaggtccccctggaactnagtgcagtgagccgagattgcgccactgcagtccgcagtccggcctgggcgacaaagcgagactccgtctcaaaaaaaaaaaaaaaaaaaaattagctgggtgtggtggcgagcgcctgtattcccagctactcaggaggctgaggcaggagaatcacttgaacccgggaggcagaggttgcaatgagctgagatcgtgccattgcactccaacttgggcaacaagaaacagactccatcaataacataacaacataacatatataaaataaaataaaataataaacatggtggtaaaaaacaaagatgtgaggccgggcacagtggctcacgcctgtaattccagcactttgggaggctgaggtgggtggatcacctgaggtcaggagttcaagatcagcctgatcaacatggtgaaaccttgtctttactaaaaaaaaaaaaaaatacaaaaaattagctgggcatggtggcgggtgcctgtaatcccagctactagtgaggctgagacaggagaattgcttgaacccagcaggcagaagaggttgcagtgagccgagatcgtgacattgcactccagcctgggcaacgaaaacaaaaaactcagtctcaaaaacaaaaaccaaaaccaaaaacaaagatgtgataacccccagttagtggcgtcacttctctactggggagagcggggtgctgtgttccagacaggacataaagaaggtggggaggccaggcgcggtggctcacgcctgtaatcccagcactttgggaggccgaggcgggtggatcacctgaggtcaggagatcaagaccatcctggctaacatggtgaacccccccgtctctactaaaaaaatacaaataaaaaaaaaaaaaaaattagctgggcatggtggtgcgcacctgtacaatcccagctactcgggaggctgaggcaggagaatggcgtgaacctgggaggcggagcttgcagtgagccgagatcaagtcattgcactccagcctgggagacagagcgagagagcgagactccgtctcaaaaaaaaaaaaaagaaggcagggagatgagagtgtgggcaatgtctgcttttctctccaggttatggttgcacaaggggttcactttagaattattcatttagctgtacatgtttgttatgtgctttctgtacatgttacagtacgcacacacatacagcttaaaaaaaaatcattgtaggggccaggcacggtggctcacacctataatcccaacactttgagaagctgaggcaggaagagcgcatgaagccaagagtttgagaccagcctgggcaacaaactgagacctcttctctacaaaaaaattagccaagtacagtagtgtgggcctgtggtcccagctactcgagaggctgaggtagggggacctcttgagcccaggaggttgaggctgcagtgagctatgattgcaccactgcactccagcctaggtgacaaagtgagaccccatctctggaaaaaaacaaaaccaaaccataataataataaaaaatttaaattaaaaaaaaaatcattgcaggaactaaagtttgtaaccctagcctggacctgaacagcaggtgatgagaggcatgggccttccagagtaaggatgttcagaataaaagggaggaggctggggtggatgggtcccctaggaagaggcaagcggtgagtgactcgaggtatgtggccagggaaaggtcctgcttacccaggtagttctgccagcagtttctagtctggttctggttggggaagcggctgtcaaaaggggcggtcttgtagttcttgattttggtctccatgtcttccgccatggtgctgaatcctggaggc

SEQ ID NO: 16129 - DNA, 1317 bp, Homo sapiens
  SIMILAR (282)..(2234): 971254mologous to Homo sapiens dJ68D18.2.4 (CD44 antigen (homing function and Indian blood group system)),accession number AL133330,Smith-Waterman Score=3361.
atggtaactcaggcctataatcctagcactttggaaggcccagatagatgctcggccagcctggagcccggtccagaaaaggccgcacgtggagccacgtgtcgcgcattgagccgccgcgggacgcatcaggcccagctgcgcggaggggctggcggcctcaaccgcaaggagaggccgcaggtggggacggcgggagggagagaagggactgaaggcgccgagcaggaggaaggttttgcgcgcactcccttcttccctaagtggaaccggcagtggcaacaacgaggccgaaggcgaagtccctgctcccaccgccggcacggtgacccttttcccagggtcacccccgaaccaacaaagcacacacacacccgagatgcgccccaggccgcagcgccaaccccccttcagatgtcccggagacaggcgagcagcggtccccagggctcccgtcgccaccgcttctcccgcacccctcagcctcctcgggccggcgacgcgcgcagccccaggcctgctccccgctcgccaagcgcaccgccccgcgcctcagccaccttgaccgagtcgcccacgcgcgggggcggctccgagcgcccatttcccatccccgaggccgaggctggccaggcaggtgctgatggggagcctcgcgcctgcgcgagccaccctcgccgcgaactctgcacagcccacgccctggcccagcctcggcgcctcccctccgcccactgccgcagaaccgcaccccctccccctcggcagcttccacaacggctccgcctcaaccgtcggaagcttctcgcctgccggcttgaaaggccaagccgaagccccaccctccctccgcgccccgccgtgggggaagcccacccaggcactctgctcaacctgcctgcggcaggaggcgtccgcgtagtgtcggtggagccgccccctatgccgccgagcgtcgcaactctgcgcctcagggaccgccgcagcgcctccggcgaacggcggaaggcgggaagcgcccgtccaatccgcgccagcggagtcacccccgccagcgaggagactcgctgccttgactggggccctggtcccgggacaggcgagcaggaagggatggaagggacggaagcgcgggcgggaccaggagaagcccatccccgcgctatgcgtccccagagccactgggacccgcggctccagccagccctgcaggggcgagctggaccgggggaccagggcgccgggccgacgactcctggagggcgtcggtgttcggcgctcagtcttctgcgtgttttccccgtgctcgcgttctga

SEQ ID NO: 16130 - DNA, 514 bp, Homo sapiens
  SIMILAR (1612)..(1848): 961254mologous to Homo sapiens cell surface glycoprotein CD44,accession number L05424,Smith-Waterman Score=432.
  misc_feature (1)...(514): n = a,t,c or g
gtcccaagttctcagagatctcagtgctgatctgggacgatgccnnnnnnnnnnnnnnnnnnnnnnngaagctggtgctggagttcaccttcaccaagccagtgctttctgtgcgcatgcgccatgacaagatcgtgatcgtgctgaagaaccgcatctatgtgtactccttccccgacaatccccgaaagctgtttgagtttgatacccgggacaaccccaaggggctctgtgacctctgccccagcctggagaagcaactgctagtgttcccgggacacaagtgtgggagtctgcaacttgtggacctggcgagcacaaagcctggcacctcgtctgctccattcacgatcaatgcacatcagagtgacatagcctgtgtgtctctaaaccagccaggcactgtagtggcctcagcctcccagaagggtacccttattcgcctctttgacacacaatccaaggagaaactggtggagctgcgccgaggcactgaccctgccaccctgtgtat

SEQ ID NO: 16131 - DNA, 537 bp, Homo sapiens
  SIMILAR (223)..(486): 1001254mologous to Homo sapiens aquaporin,accession number D63412,Smith-Waterman Score=466.
ggctagacatggaagtctggtggaattccaactctgtcattggtgagtgggaacagccccttggttgggggtactgcatggggcaaaggcctgcaggttggacctgaaaggattttagggccatgtgaggctcagcttcatcatcagtaagggggacagcactgggcaaaggcctggaggcagaccctaggtcctgagatgcctgagaggactggagcctgtggctgtggcagcctctgaccttttaccaccccccctcccccagccatctgcgtagatgggaccttccacaaatatgtcttcactcctgatggaaactgcaacagagaggctttcgacgtgtaccttgacatctgtgatgatgatgacttttaaggaccctgggggctgtgctagggacctgcagtggcagaactgcagagctgatccttggcagtggggcgtgcttggtagccaccagccagcaagcattaatggggctggtgcccactttccactcagcagagctatgtctaaataaagagctcacttcccccc

SEQ ID NO: 16132 - DNA, 1083 bp, Homo sapiens
  SIMILAR (392)..(246): 261254mologous to Homo sapiens Human secreted protein, SEQ ID NO: 4380,accession number G00299,Smith-Waterman Score=67.
acttggaggggagattccaggactcttctcatctttatcccatttgtatgcagaggtgggccatgggcccccagcttcctacctgggcattctttaaggcagtctggattccttccatcccccaggctgcggggcaatgggcagaagagctgggctgggcattggctcccacctccactgacaccctggtccctgtccagaccacgagcaggtgggcagcatgggcttggtggaggatcctgtgtcaccagggctgccccttaccctaaaccttggccccgacaacccacccacctgcccagcagtgctgatctgggacgatgcccgggagggcaaggactgagagggatagtcctccctgggcatcccgccaccccctcacggccatcctgtgttgtgtgatacccacaggatcgtgatcgtgctgaagaaccgccagctctgtccattctgagatgctgcctcctcttcagccgcccaccccaccccccatcttcacaccctagggctctgtgagcttccttgtggactcttggccccttccctccataccaccccaacctcagactcctccctcctaccccaggacctggcgagcacaaagcctggcacctcgtctgctccattcacgatcaatgcacatcagagtgacatagcctgtgtgtctctaaaccagccaggcactgtagtggcctcagcctcccagaagggtacccttattcgccgggtatgcatggtgggctggtgaccccataccacatgacatgtgggcatcactgctgatctgtcttctagcattaacttcagccacgactcctccttcctcttccccaccctaccgtgtccctgtccccctgcccatttaccatacctgggcttagccagtgctgcctgcaggctggctcgcgtgggcaaggtggggcctatgattgggcagtacgtggactctcagtggagcctggcgagcttcactgagatgcctgagaggactggagcctgtggctgtggcagcctctgaccttttaccaccccccctcccccagccatctgcgtagatgggaccttccacaaatatgtcttcac

SEQ ID NO: 16133 - DNA, 517 bp, Homo sapiens
  SIMILAR (11)..(286): 311254mologous to Arabidopsis thaliana putative protein,accession number AL035356,Smith-Waterman Score=142.
ccaaccttggcacgaggcgaggccatgtaggccgtgcttaggcctctgtggacacactgctttggacggttcctgagctctcagggggacgaggaacaccacgatgccccggggcttcacctggctgcgctatcttgggatcttccttggcgtggccttggggaatgagcctttggagatgtggcccttgacgcagaatgaggagtgcactgtcacgggttttctgcgggacaagctgcaggacaggagccgacttcagtacatgaaacactacttccccatcaactacaagatcagagtgccttacgagggggtgttcagaatcgccaacgtcaccaggctgcagagggcccaggtgagcgagcgggagctgcggtatctgtgggtcttggtgagcctcagtgccactgagtcggtgcaggacgtgctgctcgagggccacccatcctggaagtacctgcaggaggtgcagacgctgctgctgaatgtccagcagggcctcacggatgtggaggtg

SEQ ID NO: 16134 - DNA, 633 bp, Homo sapiens
  SIMILAR (191)..(517): 301254mologous to Homo sapiens LYST-interacting protein LIP8,accession number AF141344,Smith-Waterman Score=102.
atgcccttgggatatggtgtggcactgagctttccagatgtggtgacattgatcacagataggtggcacccaccagaaatgtacagcccggatccacgagtgtatttgatcaaattcattcagatgtctttgggtcataatgggaaaatgcacgtccagaacccagccaaggtgacttgcgagcggcatcagtcgtctccccacgtcttcctcccaggaagggacaaggtggcctgggttactttggccgtggggctgggcatgcacatggaactgcaggccaaggggcttcagagtcagaaacactacttccccatcaactacaagatcagtgtgccttacgagggggtgttcagaatcgccaacgtcaccaggctgcagagggcccaggtgagcgagcgggagctgcggtatctgtgggtcttggtgagcctcagtgccactgagtcggtgcaggacgtgctgctcgagggccacccatcctggaagtacctgcaggaggtggagacgctgctgctgaatgtccagcagggcctcacgggcagaatgcacgaggccagcaaagtggaatttcccaattacggcatgaaagagagtttcttctcaggcccttcccccaggccccacaattaa

SEQ ID NO: 16135 - DNA, 777 bp, Homo sapiens
  SIMILAR (394)..(906): 671254mologous to Mus musculus Pro-Pol-dUTPase polyprotein,accession number Y12713,Smith-Waterman Score=553.
ttaaagcaggaggccgcagaagacgctcggcagttctggcctccgagcacaggcggcgctgtgagtcgtctttgcggaagccgcggaggcctcgctgatgacttccggtgttggcggtggcgccgcgcagtcaccgcggagcagacgcggaggctggtggcccctgggcgagatgccgtacgccaaccagcctaccgtgcggatcacggagctcactgacgagaatgtcaagttcatcatcgagaacaccgacctggcgtaaggctaccgagggaagaggctggcggctctggggcgcgggaggcccaagccggggccccggggcagggggcgggggtgtagtgggtggggtgggggcgatgtccttccagagctgcccccctgcaccagggctttagctttgggagcctgcggcgcgggcccagcctgtcgaggctgcagcgccttcacgccccttggcttttgatctttcagggtggccaatttcgattcggagggtcttcatcgctgaggttcccataataggtaagcgactccccttcctcgttcccgcgcccacgggttcctgccccgctctccacccacacactctttggggctccttccagtccttggttcgggctgagggtggtagtgctgaaaaaagtgcattgctggagacttgaccataccctgtgcccttggctcagtggccgccttcctggcgcccacggaccacttaggtccacccttgtcctgggtatgcattgctgagaagcatgtgtttaacattgtgcc

SEQ ID NO: 16136 - DNA, 504 bp, Homo sapiens
  SIMILAR (51)..(386): 1001254mologous to Homo sapiens dJ408N23.5 (novel protein simialr to aminopeptidase P),accession number Z98048,Smith-Waterman Score=596.
cccaaagtgctgggatttcaggcgtgaaccacctcagctagtcgggagggaaggaagctcaagggcagagtgggacagaccagacagtggttgtgctctccaaccctacatactacatgagcaacgatattccctatactttccaccaagacaacaatttcctgtacctatgtggattccaagagcctgatagcattcttgtccttcagagcctccctggcaaacaattaccatcacacaaagccatactttttgtgcctcggcgagatcccagtcgagaactttgggatggtccgcgatctggcactgatggagcaatagctctaactggagtagacgaagcctatacgctagaagaatttcaacatcttctaccaaaaatgaaaggtaacaaatgggagcagaagtcacattacaaaccagattgggattaaaacctttcttgcctgtttagacaagtccttaattttgttatcgtagcaccaccatgaaaagaccatgagc

SEQ ID NO: 16137 - DNA, 976 bp, Homo sapiens
  SIMILAR (523)..(912): 771254mologous to Mus musculus Pro-Pol-dUTPase polyprotein,accession number Y12713,Smith-Waterman Score=510.
atgaccggctgccaggtgaccctcggtgtcactgtggagcaagcacacaggctacagtgcttgggtagtcagaacctccctgaggtggagaaagagagaaaatatatgggctgtcataggcagtgcctgaagcagcgtcctaaggcactcgacacggtgccccacccagagcaagagctcagtgaatgtgagccacaattattaggagccctgacatcctcaaatttgaatctggctcccagagtctactgcgtgtatgaaggcctgcacgtatgtgccatgagggacctgacaagaagctgctggcaatccggaggccaactggagaccccggaccctgtgcagaggtgcaaagctcctgccacctggctgcgttcctcttcaccgtcacaggtcaaagggcagaactttaaacacccacttactcctcccctgccccggagcagccccgtgcctgaggcagaggacagctgcttgggaaatgagggccccattaacattccgagtgcctctggctctagacctgataaaaccagagcattgtacgtgtgaatgtggacaattccctctccattcctgttattgctgctgagctgggcgtaaggaaaccgagtgagaagggaatgcaacagaagaaaaagaccaaagacctgggtttcagggctgggaaagaaagcaagacagaatggaggaaatgaggcctgcaggacatggcgtctcaaatgtttgcgtcgcctttaaagtagcctgtcacagctgccttccacgactcttcaatgccctcatcccttctccagatagaaatggagcagctcttcttggaggccaggcttcagcttgatagcaagtctgaggccaggaggaaccagtgtgactccatgctgctcagaaaccaacagctgtgctccacatgtcaagaaatgaaaatggtacaaccaagaacaatgaaaatcccagatgatccaaaagcatcctt

SEQ ID NO: 16138 - DNA, 419 bp, Homo sapiens
  SIMILAR (408)..(217): 411254mologous to Rattus norvegicus nuclear GTPase PIKE,accession number AF280816,Smith-Waterman Score=91.
ctcttttctgctttcatcctcatatactagaacaaagtcaattcttcgctggccatcattaaaaaagagggagtcaggttttccattaaattcttcaaactccggggttcgaaaatcatgctgactttccagtgatcccaaatcggggacaattgtctgtccaaggttttccaacacgatatccccatcgtcgtcgtcctcctcctcctccatttgtagcaaaacattcctgctcatctttttcatgtctccctcagaaggcggctccgaacttggcgcgaagttgggggctcccgggttccagaacggcgcggctctcccaggggccggatcggggaccgcggggcgtgtgtcgcttgggctcaggggccgctgagcccagccagcgccggggaaagccgagccgagacgaaatcgtt

SEQ ID NO: 16139 - DNA, 792 bp, Homo sapiens
  SIMILAR (568)..(1125): 501254mologous to Mus musculus Gag polyprotein,accession number Y12713,Smith-Waterman Score=409.
atgaacgccagctgggcgtcctctaaatcaactcaattcggatactatccacctgcaaaatgggtcaccccaggtttgctccccaagccccagggcccctcaggacgagtgaaaaaggccctgcggtcctccctgcctgggggaattcctcctccgatcacagctccgagccgtcggtcggcttttactttaacgaggattcagatgggtcacaccctgtcctccaaatgcgggcctgctccccggaccccgcccagggggctcgccccagtgccgaggctcctgggcaaccctagcactctgcgagtcggggaagtgaccccaaagttgcttctgagtggagacttccgcacgcagaggcgtccccgcagctgccaggcttttcaggggcagcatcccccgccccaaaacattcctgctcatctttttcatgtctccctcagaaggcggctccgaacttggcgcgaagttgggggctcccgggttccagaacggcgcggctctcccaggggccggatcggggaccgcggggcgtgtgtcgcttgggctcaggggccgctgagcccagccagcgccggggaaagccgagccgaggcacccaccgaccggagcccagagccggaggacgcctctcgcctgccgagcggagcccggagactgagcatgcccagtgcggccgccgcggctcgctgcggaatgattgaacttccccggttttacgaggcgcgcagaaggaagtcggcaggcgagactgcagagggagtagtgcgatcctgcgcgcgggggaactag

SEQ ID NO: 16140 - DNA, 969 bp, Homo sapiens
  SIMILAR (421)..(969): 671254mologous to Homo sapiens putative p150,accession number U93563,Smith-Waterman Score=605.
agtttttatttttctccttcttaattgatctaacagacaatattttgttctcctcctctcctgaacacatccccactggagaaactggaggtctgtttgtgggagaagtttctgaccttacctggagctgagtcaatttagagagccaaggacccagaagagagacaacaatcactgcagtttggcttacaagaagccacatccataggaaaaggaggacagtactacatcaagggaacaccccatgggacaaaagaatctgaacaacagccttcagccctagatcttccctctgacagagcctacccaaatgagaaggaaccagaaaaccaactctggtaatatgacaaaacaaggctctttaacaccgtacccctacccccgccccacaaaaaaataataaaaaaaattatacaagacattaagggagaaatattgagagcattccctctgagaactggaacaaaacacagatgcccactctcaccactcctcttcaacatattactggaagtcctagccagagcaatcagacaagagaaagaaataaagagcatccaaattggtaaagaggaagtcaaactctcactgtttgctgatgatataatcatttaccttgaaagccctaaatactcctccagaaagctccaagaactgataaaagaattcagcaaagtttccagatatgagattaatgtacacaaatcagtagctcttctatacaccaacagcaaccaagctgagaatcaaatcaagaaatcaaccccttttacaatagctgcaaaaaataaaataaaatacttaggaatatacctaaccaaggatgcaaaagacggctacaaggaaaactacaaaacactgatgaaagaaattatagatgacaaaaacaaacagaaatacatcccatgatcatggaagggtagaatcaatattgtgaaaacaaccatactgtcaacagcaatctacaaa

SEQ ID NO: 16141 - DNA, 403 bp, Homo sapiens; identical to SEQ ID NO: 13877
  SIMILAR (506)..(859): 491254mologous to Homo sapiens Nuclear proliferation- associated antigen p28,accession number W05151,Smith-Waterman Score =171.

SEQ ID NO: 16142 - DNA, 454 bp, Homo sapiens
  SIMILAR (194)..(3): 1001254mologous to Homo sapiens Human prostate cancer- associated protein 12,accession number Y48226,Smith-Waterman Score= 345.
atggagatgtggaagtagaaggggaagagtttgctctgcactagtccgaaggtatgtcggggaaggcttcggaaaagcaggaagcctgagacgaaggtcacccacatttgcatgccccaggcacctgacaagaccagtagatggaccatcttaatcaggcctcctaggttcccgccttcctccatcttgcagtcctggaaaggaggcaccgggtggctcagaactttacctttgcctcatgcgtggccttcagaccctgtgagcccgctcggggacagggttacggccaatccagcagagattcgttaggaaccgggacctcaatccgcagcacccggattccgagaacagaggcgtcggggccaaatgggctgaatctggtacctcactcccacgcccccgggtggacagcgaccctcctcggccgcgtcccctcgtgggtttcccctcgtgc

SEQ ID NO: 16143 - DNA, 898 bp, Homo sapiens
  SIMILAR (487)..(26): 551254mologous to Homo sapiens Human prostate cancer- associated protein 12,accession number Y48226,Smith-Waterman Score= 362.
gcggagagcactgtacttggggtccttctctcgcagctggcggtagggatcgggaccctggtggctgcctggtacctccccacccaggcctcgctccttctccacggtttgcagggccccacatggcaagctttggtgcggggtttccagcccagcgggcgtttgacattggccagcttaaggcttcaggaacaggcaaggtaaacgcgggctgggcctccccagaatagtgggttgagccccaagcatgctgtgaagccaatatcaagagataaatgaaaggcacagccccatggagatgtggaagtagaaggggaagagtttgctctgcactagtcccaaaggtatgtcggggaaggcttcggaaaagcaggaagcctgagacgaaggtcacccacatttgcatgccccaggcacctgacaagaccagtagatggaccatcttaatcaggcctcctaggttcccgccttcctccatcttgcagtcctgggaaggaggcaccgggtggctcagaactttacctttgcctcatgcgtggccttcagaccctgtgagcccgctcggggacagggttacggccaatccagcagagattcggatattaggtgaagatcccgaaagccccgaggaaaccctaaatctcatcctgaggacaccgatcccaccaaagccccgaggaaacgccaaatctcatcccgaggacaccgatcccaccgttaggaaccgggacctcaatccgcagcacccggattccgagaacagaggcgtcggggccaaatgggctgaatctggtacctcactcccacgcccccgggtggacagcgaccctcctcggccgcgtcccctcgtgggtttcccccaaccaataattcgtcccgcctcccagctgagcccgaa

SEQ ID NO: 16144 - DNA, 1179 bp, Homo sapiens
  SIMILAR (565)..(494): 1001254mologous to Gallus gallus rhoGap protein,accession number U36309,Smith-Waterman Score=125.
taaaacttgtttaaaacacaatctgggtgccaacccagggggaggagaaatggggggaagggaaatggtttatctaaacacatgacttaaagcccaaaaaatgctccctgacaaaaatgaccatataggtttgggggcctctgttcaaatttttcatatctgtcctttcagttttttcaaatgttatttcaaatgtgttcaagttatgttaaagttgcatgccattcttaactgaaacattatgaaacaaaaatctctctagaaaaactatctgcagcatctctcaaaggcttatgcccagttcaagtacgtttgcagattgagaacctgagcatgtgcaaaacgcaatgcgtgaaagtgggaagaacttcaggcagaggtaataccaagtcacacatcctatcacctccaccaaggtatcaaggctttcctctgtttgcagaccactacggtacataggatgttgagggggaatgagaaagtcatctaggttccggccatccatggcttccatccagagcctccggtcctcttccgacaaagcttgcatggtgataacccctggccctagcaggccctttgcacatataacccgaatgcacctgtatttctctcagcttatagataacttgaaaactcatgacactacaggaaaaggacaccattaagacaaaaagcaggctcacaggaatatccaccaaagctaaggttcaccatcacaacaataaagccccaggttttagggtatagaaaaaaattcaacagccatgttttcagacataggactccatcagaggggaatattagtgtgttccaccttcagaaaaaatcctgcaatgtagtgataattcaccccatcttacagatgtggttaaaccacttacccagagtcacacagctagtaaggaacagatcccaaattcaaatttaggaatgctcttatcttttttacctgcatcatgcagcctgccatacaaacatatttgaaatgagggtgctgagggttccagtagattcttcagatctttcaaaaatctttctgggctccactattctgactttcagaaatcttcagttttcctgggtctcttccctaacagtacacaaatgcaggttaagtgagcacctgctaaaagtttagtttgaatagcaactaacttgattaagctcctctagtct

SEQ ID NO: 16145 - DNA, 461 bp, Homo sapiens
  SIMILAR (123)..(1): 581254mologous to Homo sapiens Human secreted protein, SEQ ID NO: 7492,accession number G03411,Smith-Waterman Score=126.
gggagaatcacctgagccagggaagtcaaggctgcagtgagccatgatcacaccactggactccagcctgggtgacagagtgagatcctgtcaaaaaaaaaaaaaaaatctgcaaaaccaaaaattatttcacaagaactttgaacttgtgaaattctttcacaaacaactggtttctttcccctctccagctattctctcacagcatagttcatatataggtgcttcccacagagtaaactctgcctgtgatgttgtcccgttcttccaggtccgtgggctgctggacaccctggtgactgacctgatggtcctggctgatgagctcagccccataaagaatgtcgaggaggctttgcgcctctgcaggtgactctcgggcccaagcaaccttctggaaaacgggttaataaataaatcaataaagaaccttcaagtttctactaaaaaaaaaaaaaaga

SEQ ID NO: 16146 - DNA, 2862 bp, Homo sapiens
  SIMILAR (692)..(189): 351254mologous to Haliotis rufescens lustrin A,accession number AF023459,Smith-Waterman Score=105.
atgcaccaggccagggactcgaggacccgaggtctcaatgcaggtgtgctgctggctggctacagctgctggggtggctccttgggagtctgctgcctgctcaggaacttcctcaatgtgggagtccctggttctgcaggccagcccagcctggaagaggagctcatgcctccagggacagcagtcaaccccatggggctggagctccaagtctccccttttctgggagaaaagaagcgggcaaagggacctgaacaacccacacccacaattcaggaagagcctgaacctgttagcaatgtcctacaaggagatgacattcttgccttggccattaagaaggaagacttgaaggagcaacacattcctcgccttactgaaaaggaagataaacgtgtcatcacccagaaatttatcatccgtaaactcaaacccatggatcctaggaggaaggtctgccaccttgtagcacgtcctgcgaatcctgatgaagccacaaagcctctggactactccggtcccggtgacagcttcgatggcagtgaccagatcctgccccaccacatcttggggagtctccaggattttaagagaattgcacttgctcgagggaacacccagctggctgagcggatacctacctcaccctgtctgatgaccctcatctctgctgaaggagagtcaaagcaaaaagccccaaaagaagagaagagacctccctgggccccacctcctcagcacaactttctgaaaaactggcagcgtaacacagccctgcggaagaagcagcaggaagccctcagcgaacacctaaagaagccagtgagtgagctgctcatgcacaccggggagacctacagacggatccaggaggagcgggagctcattgactgcacacttccaacccggcgtgataggaaaagctgggagaacagtgggttctggagtcgactggaatacttgggagatgagatgacaggtctggtcatgaccaagacaaaaactcagcgtggcctcatggagcccatcactcacatcaggaagccccactccatccgggtggagacaggattaccagcccagagggacgcttcataccgctacacctgggatcggagtctgtttctgatctaccgacgcaaggagctgcagagaatcatggaagagctggatttcagccagcagaggcaggttgggattgctgctcacttgacctttgaaaccctagaaggcgagaaaacctcctcagaactgactgtggtcaataatggcaccgtggccatttggtatgactggcgacggcagcaccagccggacactttccaagaccttaagaaaaacaggatgcagcgattttactttgacaaccgggaaggtgtgattctgcctggagaaattaaaacatttaccttcttcttcaagtctttgactgctggggtcttcagggaattttgggagtttcgaacccatcctactctattaggaggtgctatactgcaggtcaatctccacgcggtctccctgacccaggacgtttttgaggatgagaggaaagtactggagagcaagctgactgcccatgaggcagtcaccgtcgttcgcgaagtgctgcaggagctgctgatgggggtcttgaccccggagcgcacaccatcacctgtggatgcctatctcaccgaggaagacttgttccggcacagaaatcctccgctgcattatgagcaccaagtggtgcaaagcctgcaccaactgtggcgccagtacatgaccctgcccgccaaggctgaggaggccaggccaggggacaaggagcacgtcagccccatagccacagagaaggcctctgtgaatgctgagctgttaccacgctttaggagccccatctccgaaactcaagtgccccggcctgagaacgaggccctcagggaatccgggtcccagaaggccagagtggggaccaagagtcctcagcggaagagcatcatggaggagatcctggtggaggaaagcccagatgtggacagcaccaagagcccctgggagccggatggccttcccctgctggagtggaacctctgcttggaggacttcagaaaggcagtgatggtgctccctgatgagaaccacagagaggatgcgttgatgaggctcaacaaagcagccctggagctgtgccagaagccaaggccattgcagtccaacctcctgcaccagatgtgtttgcagctgtggcgagatgtgattgacagcctggtgggccattccatgtggctgaggtctgtgctgggcctgcctgagaaggagaccatctatttgaatgtgcctgaagagcaagatcaaaaatcacctcctatcatggaagtgaaggtacctgtggggaaagctgggaaggaggagcggaaaggagcagcccaggaaaagaagcaactggggatcaaagacaaagaagacaagaaaggagccaagctgctcgggaaagaggcatgctggggcgtggaccgtcccaacagcaagaagcacaaggcaaaggatgacaagaaagtcataaaatctgcaagtcaggacaggttttctttggaagacccctacccctgacatcatcctctcttctcaagaacccatagaccccctggtcatggggaaatacacccagaggctgcacagtgaggtccgtgggcttgctggacaccctggtgactgacctgatggtcctgggcttgatgagctcagccccataaagaatgtcgaggaggctttgcgcctctgcaggtgactctcgggcccaagcaaccttctggaaaacgggttaataaataaatcaataaagaaccttcaagtttttactaaaaaaaaaaaaaaaaa

SEQ ID NO: 16147 - DNA, 461 bp, Homo sapiens; identical to SEQ ID NO: 5300
  SIMILAR (74)..(298): 601254mologous to Human endogenous retrovirus K pol protein,accession number Y17832,Smith-Waterman Score=234.
  misc_feature (1)...(461): n = a,t,c or g

SEQ ID NO: 16148 - DNA, 576 bp, Homo sapiens
  SIMILAR (7)..(204): 691254mologous to Homo sapiens polymerase,accession number AF080229,Smith-Waterman Score=264.
atggtggccattgttaagcctccagaacctatacctttaaaatggttaacagataagccaatttggatagaacaatggccactaaataaagagaaactggaggctttagagaaattagttagtgaacagttagaaaacgggcacatagctccaacattttccctttggaattctccagttttcgtaattaagaaaaaatcaggcttccagttcaaccctgcaggcatcctgctgaaactggtgctctttaccatgaagctaaacatgcacctggcccaggtatcagggaagctgaaagaggaagttgcaggagctggagttgctgtgggctcaccaacctggcaagtcagcagatgcatgcaccagccaaccagcatcattcttcagaagttcaggcctcaaccccacaaggctcctcctcccaatgctaacacagcactagacagcagggctgctgctgttttactttgctttagtgctggtgctggagtttggccttatgttcagagcctgaagaaagtaagaaatggtgaggaagatgcttttaccttcactttgccatctctggagcactga

SEQ ID NO: 16149 - DNA, 1692 bp, Homo sapiens; identical to SEQ ID NO: 4837
  SIMILAR (727)..(1689): 1001254mologous to Homo sapiens necdin,accession number AB007828,Smith-Waterman Score=1675.

SEQ ID NO: 16150 - DNA, 1419 bp, Homo sapiens
  SIMILAR (415)..(954): 551254mologous to Human endogenous retrovirus K pol protein,accession number Y17832,Smith-Waterman Score=532.
atgagccacactggggtctccaacacaccctctggtgactgcagtttgggaatacacttctggaacagacatactcagcagcagacagaactccgcactgaaggatccccacgtaggaagggacagaagaacatctttcaacgtacaacagttccctcagcccgtcttgtgtttcctgaacttgatacttttgaagaatataggccaattttgatttgtctgatgttttctaaatatcagattgaggttcagaattattttcagcgaaacaatgaagtgatgaagctagaaagccataatccgaagaagaccggtagtgccgcagtagatttatgctgcagaaaagctgcgagccttctgcctggggaacccccacaaaaggtcccaacaggagcctgtggacccttgccagcggatggatctagtaatggaaaagcttcttattctggctcgaaaagtaaagttttccagacgccctatacttcagctcaaaaagcagagcttgtagctgtaattgaggtattgactgcttttgatatgtcaattaatgtgatttctgattcttcatacatggttcattccgcacagttaattgaaaatgctcagttacgatttcatacagatgaacaactgatgactttatttacccaattgcaaacagcagttagaagtagaatgcaccctttttacatcactcacattagggctcatgtacctcttccaggacctttgactgaagggaatcaaatggccgatcacctagttgctaatgcaatatctaatgctagacactttcacaatttaacccatgttaatgcctctggcctcaaacgcagatacagcactacctggaaagaagctaaaaatattatccaacgatgcccaacttgccaaatggtatattcctcatcttttacaggaggagttaatcctcaaggactggaacctaactcttctttagcaaatggatgtcacacatgttccctcgtttgggagactagcttatgtacatgccagatgttatcagcacctgaacagtatctacagaaaccagatgcaaagacagaagcagaacaaccgatttggtggagagatccaataacaaaacgttgggaaataggtaaaataacttggggtaaaggttatgcttgtgcttctccaggaccaaatcaacagccgatttggatgccatcaagacacctaaaaccttatcatgagccagatgccgaggaagagattctgggaggatcccgaggaccccctagttgcagccatgtcgagactgacgctgaggaggtccccaactgtcacgagcaacacccgtcaaacacagccacccacatggggacagatcaagaagctgtcacagatggcagaagaaaacctgaggaaagcagtacaaccagtcacaatgagtaa

SEQ ID NO: 16151 - DNA, 807 bp, Homo sapiens
  SIMILAR (63)..(515): 701254mologous to Homo sapiens polymerase,accession number AF080231,Smith-Waterman Score=580.
ctagaaaaaaaatttgcaaggtttgaaagaaccacttcaattggaaagacaagttcccgccaaggcttaggatatcatttttgatggtggccactgttaagcctccagaacctacacctttaaaacggttaacagaaaagccaatttggatagaaaaatggccgctaagtaaatagaaactggaggctttagagaaattagttactgaacaattagaaaatgggcacatagcgccaacattttccccttggaattctccagttttcataattaagaaaaaatcgggtaaatggagaatgttaactgacttaatagctatcaattcagttatacaacctatgggagcattacagcctcctggattgccttctcctgctataattccaaaaaattggcctttaattgtcacagatttaaaggactgtttctttactatcactttagctaagcaagactgtgaatggtttacatttataattcctgcagtaaacaacttgcagcctgctaagcattttcattgtttcacagatgggtctagtaatggtaaagcttcttattctggctcaaaagttaaagttttccagacaccctatacttcagctctaacagcagagcttgtagctgtaattgaggtattgactgcttttaatatgtctattaatatgatttctgattcttcatacgtggttcattccacacagttagttgaaaatgctcagttacaatttcaaacagatgacactaatgactttatttacccagttgcaaacagcagttaggagtagaatgcaccctttttacatcact

SEQ ID NO: 16152 - DNA, 394 bp, Homo sapiens
  SIMILAR (2)..(394): 991254mologous to Homo sapiens dJ18C9.1 (similar to acetyl- coenzyme A synthetase),accession number AL049709,Smith-Waterman Score=708.
ttcagagtctctatgtgaacggatcttggattccagctgcagtcttctcatcactacagatgccttctacaggggggaaaagcttgtgaacctgaaggagctggctgacgaggccctgcagaagtgtcaggagaagggtttcccagtaagatgctgcattgtggtcaagcacctggggcgggcagagctcggcatgggtgactccaccagccagtcccccccaattaagaggtcatgcccagatgtgcagatttcatggaaccaagggattgacttgtggtggcatgagctcatgcaaaaggcaggggatgagtgtgagcccgagtggtgtgatgccgaggacccactcttcatcctgtacaccagtggctccacaggcaaacccaaggcaagt

SEQ ID NO: 16153 - DNA, 1123 bp, Homo sapiens
  SIMILAR (75)..(569): 611254mologous to Homo sapiens dJ18C9.1 (similar to acetyl- coenzyme A synthetase),accession number AL049709,Smith-Waterman Score=453.
agttcggcctgttttctcagtcccggcacccgccgcgaccgcaaaggcggccgcggttctaggaacttgacgtgatggggcttcctgaggagcgggtccggagcggcagcgggagccggggccaggaggaagctggagccggaggccgggcgcggagttggtctccgccgcccgaggttagactggtaagccttctgaggctaaatatgtctcagaagattaatgatatctgggcttccatttctgttgcagaattctggggagacattgccaaggaattttactggaagactccatgccctggcccattccttcggtacaactttgatgtgactaaagggaaaatcttcattgagtggatgaaaggagcaactttatgactctgcctgtttcttgtttggggaagaagttatacccctaatcactggttctttctggtatgtctcagggagggcaatgagccaggaggccagctggatgggagggagcaagtagcagcaagaagggttcatggttcatattctgtgcttttacctgcaggcattcagaagggggaccgagtggccatcttgagcaacccctttcttcattcactcaatccctggggctttcttctctccctcagactttcttcccttccctagggccctatggacattgtgcccactaggcagcatggggcttactaaggcctggaatgtctgttgctccccaaagatatggacatgggtgggtcttgccaagttccctttgagccaacaaggctaccactttaggcttttctcttctccaggggtttcccagtaagatgctgcattgtggtcaagcacctggcactgaccctttcctcccactccctgtatacttggaccctccaggggcaaggtacgggtgtatcttgtccccatcttgagctgttcacagttcttccctgcccatccctgcagatctcatggaaccaagggattgacttgtggtggcatgagctcatgcaagaggcaggggatgagtgtgagcctctgcccagcctccatttggtggtcagtaggggtgggcataagaccctaacctgttccccattcttcccacagggtgtggttcacacagttgggggctacatgct

SEQ ID NO: 16154 - DNA, 274 bp, Homo sapiens
  SIMILAR (274)..(14): 981254mologous to Homo sapiens dJ1170K4.4 (novel protein),accession number AL022314,Smith-Waterman Score=436.
gtttccactcgcagtactgacccaggatcactaggccctcggggtccacttcgtactcggccctgtaggggacggcagccgagctgttgactgtggacagcagctcctccaccagcagtgcctgcaccacctcggggctcagcatcagccggcggtgctcggggatttggagaatgaaccagaagaagcaggtgaggggtccctccccaaaggaatagacggagctggagttgtagtaagttcccaggcgggtgctggtgatgagctccttgag

SEQ ID NO: 16155 - DNA, 3213 bp, Homo sapiens
  SIMILAR (1091)..(3211): 611254mologous to Homo sapiens Human PRO618 protein sequence,accession number Y41710,Smith-Waterman Score=1889.
cacctgtcattgcctggacttcagtgcacaggcacacctggccccgacacaccagcgtgtcaccatgagaagaggagaaacccgctctcggcgccccccacagtgctgggccttcgcacacgttgtttcccgttcatcaagaaggggcgaatttttttcattcgacagaaaaacaagagagccagaagaaaattgcttttaataatacattttatttatcccatgatcaccagtgttatttcaacataaaatcaatataaaaattgttatcgcgttggttgacatcctgtttgcacttggccttggaaacctggtgtgcgtctcccccgtgcagcttttctcagttcagatgtgggtctgtgagtgtgtttatatgtgtggaagggacccccacccagtcccccacactctcaggactctagggcctaatggtttcactgaaagattgctcagcagaggctcccttgcaaatgcgaggctgtttccaactttggtctgtttccctggcaggatgcccgtggccgaggccccccaggtggctggcgggcagggggacggaggtgatggcgaggaagcggagccggaggggatgttcaaggcctgtgaggactccaagagaaaagcccgatattgctgtgtgaccttgggcaagtcacttctgttctctgggtctccctccctgtccttccagctggagatgctgtcagaccctggggtaaaccacggggcactgggctggagggccaggaactcacctgccaattatttctctttgcagaggagtttaattccccctgattactcagtcatcattgcacttgacccgggggctcacccccacctccagaagccctttcctccctaggtatttactgagtaaatggataggggtgtaaaccagggctgtgagtctaccctcttcacttcagccaaaatagcctttgcaatgggccctgccctgcggaggccccagctccttgccgcccctccccatctctgactgctccagccaaacaggctttcagccggaagagacaggagactttcccacctgcttcctccactaaccctgctggttccttcctgggcagggtacaaggcggaggtgatggtcagccaggtgtactcaggcagtctgcgtgtactcaatcgccacttctcggtaggaagtgggcctgtctgccctgcagagggtcccaggggctgttgtcttcccttctcacagctcaggggtggagctggggccagacctcagaatccttccctggcctctctcacttctgcctgccttagggagggacccctcacctgcttcttctggttcattctccaaatccccgagcaccgccggctgatgctgagccccgaggtggtgcaggcactgctggtggaggagctgctgtccacagtcaacagctcggctgccgtcccctacctccccagggtcccctccttctggctcacaggaatcaggggctgtgcccctctccccgctccaggttgttaccgctacagctacgtgggccagggccaggtcctccggctgaaggggcctgaccacctggcctccagctgcctgtggcacctgcagggccccaaggacctcatgctcaaactccggctggagtggacgctggcagccgccctccctgccactcccctcccagaccccagcccagccttgccacctttctgttctgccagggtgtacggctgcagccgccaggagcccgtggtggaggttctggcgtcgggggccatcatggcggtcgtctggtgcgccagcctgctgggaggtgcagccaggggacccctgtgtaacagctgctctcctggtccagcctgtgaagtgaacctgacgctggacaacaggctcgactcccagggcgtgaggtgggttcaccaacctggccacaccccatgggccacctgatggcccgctcctccctcccaggtgccctctctggactacggcttggccctctggtttgatgcctatgtgtctgtgcacgggacccaggagaccagccagtgcagccctgagtcgtctctgactccccccaggctgtgtggcttgcgcatcctgcagccctacgccgagaggatccccgtggtggccacggccgggatcaccatcaacttcacccttcgcggctacgcatggcctaatggcgccctgcctgcctccacggtcccctgtggttttgcagcctgccctggagagttcctctgttctgtgaatggacgccaagccccggctggctcctctggcttcctcccacctgtcccctctctgtgtccccacacagtttgcagagccacattccagtgcaaagaggacagcacatgcatctcactgggaaggtttccttggggctcagagacccaccttctgtgccctgcccccatcccctctgtcccaggggtgccatgtgggacattcaccttccagtgtgaggaccggagctgcgtgaagtctctgtctgcttctccccttcccctcctcctctgtccaccccaccacctgcccccatccccagactgtggcctccagggcccctccagccgcattgttggtggagctgtgtcctccgagggtgagtggccatggcaggccagcctccaggttcggggtcgacacatcttggggagaggcagcttcctcccacctcacctcaccccaccccaccccaccccaccccaccccagcatggcctccacggtgctgtggaccgtgttcctgggcaaggtgtggcagaactcgcgctggcctggagaggtgtccttcaaggtgagccgcctgctcctgcacccgtaccacgaagaggacagccatgactacgacgtggcgctgctgcagctcgaccacccggtggtgcgctcggccgccgtgcgccccgtctgcctgcccgcgcgcgggagaatagagaacaggggctccaggctcctgagatctcacttctgcccttgaccacggacaggccccatcagcaacgctctgcagaaagtggatgtgcagttgatcccacaggacctgtgcagcgaggtctatcgctcttcacctggaaaagggggtgcccttaccctgcttcagtcctttctcctttccccctttcagggtgactcaggtggtccgctggtgtgcaaggcactcagtggccgctggttcctggcggggctggtcagctggggcctgggctgtggccggcctaa

SEQ ID NO: 16156 - DNA, 854 bp, Homo sapiens
  SIMILAR (363)..(650): 971254mologous to Homo sapiens Human immunogenic prostate tumour protein sequence SEQ ID NO:378,accession number Y82017,Smith -Waterman Score=483.
aatttgcgaattagtttctgactacaaagaaaaacagatgccaaaatactcttctgaaaacagcaacccagggagaaaacttagaagcatgcaaggggcttcctgtaacatttcattggctgggtcacaccacatgctcattcccaaaccaggcactgggaagctagaaaattttatggctatcgaagaaatgaagaagcacggaagtactcacgtcggattcccagaaaacctgactaatggtgccactgctggcaatggtgatgatggattaattcctccaaggaagagcagaacacctgaaagccagcaatttcctgacactgagaatgaagagtatcacagtcttgtcactctcatagactgctctacatctggcctctgccaatgggaattcaggagtagtaaaactcctgctggacagacgatgtcaacttaatgtccttgacaacaaaaagaggacagctctgacaaaggccgtacaatgccaggaagatgaatgtgcgttaatgttgctggaacatggcactgatccaaacattccagatgagtatggaaataccactctgcactacgctatctacaatgaagataaattaatggccaaagcactgctcttatacggtgctgatatcgaatcaaaaaacaaggttgaagaagaaatgaagaagcatgaaagtaataatgtgggattactagaaaacctgagtaatggtgtcactgctggcaatggtgatgatggattaattcctcaaaggaagagcagaacacctgaaaatcagcaatttcctgacaacgaaagtgaagagtatcacagccacactgaattcttgccatcccgtatctacccctag

SEQ ID NO: 16157 - DNA, 1350 bp, Homo sapiens
  SIMILAR (1080)..(1340): 291254mologous to Plasmodium berghei merozoite surface protein-1,accession number AF000413,Smith-Waterman Score=89.
atgggtggtaactttaggggcctaaacccccttggccatggtgagattccccgggaagccgcaagagcaaccttccgtggccacctgttattgatttccaaagagggtgccacattccgagagccagtcaccagcaaaccactgggatgtacgggggaattaggcaccaacagatggggaatgggaatggaaagaccaccccactgttggacggaccaccaaaaaaaggatggaggacgggaaggagagctccaaggtcagctcaaagccaccggtctacctccaagatgcaaacccacaaagcctgtcctaagaagtaaggccactgctcaggcccccagcaaaggcctgactgggctctgggaagactccatcaccagtgtcaacacagactggaatattgatccaaaatcacttgggggacaaggtcatgggaagtacatttatgacataaaacccggagtgctggaaaagctctacacagaactgaaacagggtgaaaggaggaaggccacaatgtgtatcaagtgtgtagcaaagcacagtacactaagaaaggattattctaaggaaatactcaagaacccccttcccctttccttgtttcctacccttggaaagctagatccagaagaaataaaaggaagaagtatctcagaaccagtgcccaccacacccgtaccattccatggtagagggaaaagagccctgtgcaacttcaggattccatcctcactgcccatgattgacatgatcaagggtgatagcaatagcaggggtaactgggggaacttggatggtgaaattgctatggagtgtgagattgctgtagaagccccatttgaccaggaacaaatctctgaagctctcaaagcctgtttcagatccgctgatgagacagaaacggaaatcagtatgagtcgagactggaaaagccgaggtcacactcgactcccgcttcgcctcgcgggcgccttggcggagctggtgtccgggggcgggtcggtggcttctctccatctggagaaggcattaagggcctggtctaatgtgatccgcaaatgtgctgctgtttccgacctgaggcggcgactcctggctgaagggaggcggccagtgcggggccctgggactctgcgccaccctcgcctgctcgcaccagccttccgagtgcacactcctccgactacccgctgcctcgaagtcgctcctccagtgcctccgccgcgtcccggtcacccccacgcccactttccacgatcgcgcgtcgcctcaacccccggcgttctgggcgctcgctacccagtggtcaaccggccggaccttcggacccgcgaggtttctgcttag

SEQ ID NO: 16158 - DNA, 3489 bp, Homo sapiens
  SIMILAR (1120)..(2271): 981254mologous to Homo sapiens zinc finger protein ZNF229,accession number AF192979,Smith-Waterman Score=2096.
atcttcacagagcggagcagcggccggagcgttttgcgggctctgcgtggacttggagcttacagcgtcttgcgacttggaagcggattcagaggacaggacagaacacttggctactctccaactacgtccagatttcagcgggagtcggtgtcccgcaccccagaaacacctacaaactcacagacctcattcgaagccctggccaatctactagccaacatgacgcagttacctggccatttctccacattcctggtgagcgccccacacccagccgcagaagagcccctcctgcattccatcctcacacacaggcctgtccatctacttgctactgtcacactcttgccagcagaagaggcccctctaatggccgatatcaccgcccaggctatcctcaccccacagctgtgcagcgggaccctcctgctggcccacgtggctgccagagcccatgctgacaccaacctccagcatgtcggcgtccctgcgggcgacactaccggtgacatggccagcatgatcctcctccctggcagtgacactgttgatctcgaagtccttgccatcctcctagccaacgtgatgcagttacctggccatttatccacattcctgctgaggactccacactcagccacagaagagcccttcccgcattccggcctcacacaaagacctgtccttttacttgctactgtcacacatttgctggcaggagaggcccctctgatggccgacatcaccacctgggctatcatcacccctcagctgtgcagtgggaccctcctgcctgctgacgtggctgctggcgcccgtgccagcgtgaaccccaaacctgtccgtgtttctgcgggcgacgccaccggggacatccctagcttgaccccctttcctggcagtgacactgtcgtgggcgtgactcgaggtggacgcgcatttacgacaccatcgcccctaggatcggactgcgctgcggagggttctgggaaaggtagtcccacacctcgagtcgactacttccgtttccggcttccttcttggaattgttcgtttctcggagataattgtataaaagaaggagaaataaccccacatctcttgacactagagctccaggagccattgagcttcaaggacgtggctgtggtcttcactgaggaggagctagagctgctggactctacccagaggcagctgtaccaagatgtgatgcaggagaatttcaggaacctactctcagtgggagacaagaatggaaaggatacggagtatattcaagatgaagaattaaggttcttttcacacaaagagctctcctcatgcaaaatctgggaagaggtggcaggtgaattacctgggagccaagactgtagagtaaatctgcaaggaaaagacttccagttctcagaagatgctgctccccatcaagggtgggaaggagcatctacgccgtgttttccaattgagaatttcctggacagtctacaaggggatgggcttatcggtctagaaaatcaacagtttccagcctggagagctataagaccaatccccattcaaggatcttgggcaaaagcgtttgtgaaccagttaggggatgttcaagaaagatgtaaaaatctcgacacagaagacacagtatataaatgtaactgggatgatgacagcttttgctggatatcttgtcatgttgatcacagattccctgaaatagacaagccgtgtggttgcaataaatgcagaaaagactgcattaaaaactctgtacttcatcgcattaaccctggagagaatggcttgaaaagtaacgaatacagaaatggcttcagggacgatgcagaccttcccccgcatccaagagtacctttgaaagagaaactctgtcaatatgatgagtttagtgagggcttgaggcacagtgcccatcttaacagacatcaaagagttcccacaggagagaaatctgttaagagtcttgagcgtggtcggggcgtcagacagaacacgcacatacgtaaccaccccagagcccctgtgggagacatgccctatagatgtgatgtctgtggaaaggggttcaggtataaatcggttcttcttattcatcaaggggtgcacacaggaaggagaccctataaatgtgaggagtgtgggaaggcatttggtcgaagttcaaacctgcttgtccatcagagggtccacactggagagaaaccatataaatgcagcgagtgtgggaagggcttcagttacagctcagtgcttcaagtccatcagaggctgcacacaggggagaagccctacacctgcagcgagtgtggcaaaggcttctgtgccaagtctgcactgcacaaacaccagcacattcaccctggagaaaagccctacagctgtggcgagtgtggaaagggattcagctgcagctcccacctcagcagtcatcagaagacacacaccggcgagaggccctaccagtgtgacaagtgtggcaaaggtttcagtcacaactcgtaccttcaagctcaccagagagttcacatggggcagcatctgtacaaatgtaacgtgtgtggtaagagtttcagttacagctcagggcttctcatgcatcagagactgcacacaggagagaaaccctacaaatgcgagtgcgggaagagctttggccggagctccgacctccacatccatcagagggtccacacaggagagaaaccctataaatgcagtgagtgtgggaagggcttccggcggaattcagaccttcacagccaccagagggtccacacgggagagaggccctacgtgtgtgacgtgtgtgggaagggtttcatctacagctccgacctccttatccatcagagggtccacactggagagaaaccctataaatgtgctgagtgtggcaaaggcttcagttacagctcagggcttctcattcaccagagagtccacacaggcgagaaaccttacagatgccaagagtgcggaaagggctttaggtgcacatcaagccttcacaaacatcagcgagtccacacgggaaaaaagccctatacgtgtgatcagtgtggcaagggattcagttatggctctaatcttcgcacccaccagaggttgcacacaggagagaaaccctacacttgttgtgaatgtgggaagggtttcagatatggctcaggtctccttagtcataagagagtgcacactggcgagaagccatacagatgccacgtgtgtgggaagggctatagtcagagctcacatcttcaaggtcatcagagggtccacactggtgagaaaccctataaatgtgaggagtgtgggaagggctttggccgcaactcctgtcttcatgttcatcagagagtccacactggagagaagccctatacgtgtggtgtgtgtgggaaaggcttcagttatacctcaggtctgcggaaccaccaaagagtgcatttaggcgagaacccttataagtag

SEQ ID NO: 16159 - DNA, 1104 bp, Homo sapiens
  SIMILAR (423)..(1049): 281254mologous to Nicotiana tabacum extensin (AA 1- 620),accession number X13885,Smith-Waterman Score=116.
atgggaaccactgtaactgacattccacttgcagacatgctaggagtgccccggcgtctttctagcctccgcctccaggcgggtgaggaggtgacacctgagaattcctccctctcacccctgaccctgccggaaagcgaaactgagatgcgggcattgggccctgggaagcgtggggaaggggaaaggagaaagccaggcctgtactcagatcttcgcagagcggagcagcggccggagcgtttggcggactctgcgtggacttggagctcacagcgtcttgcgacttggaagcggattcagaggacaggacagaacacttgggcaagtgaatctctgtctttcgaagccctggccaatctaccagccaacatgatgcagctacctggccatttctccacatttctggtgagggccccacacccagccgcagaaaagcccctcctgcattccatcctcacacacaggcctgtccatccacttgctactgtcacactcttgccagcagaagaggcccctgtaatggccgatatcaccgcccagtctatcctcaccccacagctatgcagcgggaccctcctgctggcccacgtggctgccagagcccatgctggcactacactccagcatgtcggcatccctgcgggcgacactaccggtgacatggccagcatgaccctcctccctggcagtgacactgttgatttggaagccctggccaatctactagccaacatgacgcagttacctggccatttctccacattcctggtgagcgccccacagccagccgcagaaaagcccctcctgcattccatcctcacacacaggcctgtccatctgcttgctactgtcacactcttgccagcagaagaggcccctctaatggccgatatcaccgcccaggctatcctcaccccacagctgtgcagcgggaccctcctgctggcccacgtggctgccagagcccatgctgacacgaacctccagcatgtcggcatccctgcgggcgacactaccggtgacatggccagcatgaccctcctccctggcagtgacagaggctatgggtacctgagatgtaccaggcaggttgagacatag

SEQ ID NO: 16160 - DNA, 437 bp, Homo sapiens
  SIMILAR (352)..(2): 981254mologous to Homo sapiens cis-Golgi SNARE p28,accession number AF073926,Smith-Waterman Score=582.
gtgtataatcctgcaatatgtctctatgccgctgtaatgtatgcatcagggctgcattcaaggaggggacacctgcactgttggtatattctgccattttatcatttacccctgtaagccttgccaaaagttgttcaatctcaatcgccattgtctcaaacattctgtcttggcttgatccatttaaaaggggtgttgtatcagaactgtcgcgtcttccatctcgggtactgctatgactgtaacttgtacatagtttgctgaaggaaactagtttcaggtcaagttcattttccagctgtcgagcctgtttcctgagatcttcccagtaactgctggtccctgccgccatctttgtcgtccaacgtcagccgggataggggagcagaggcgatgcaggccggaaagtcaccacgaaatcgtcgaccgaggaattc

SEQ ID NO: 16161 - DNA, 1179 bp, Homo sapiens
  SIMILAR (983)..(219): 1001254mologous to Homo sapiens GOS28/P28 protein,accession number AF047438,Smith-Waterman Score=1293.
aattaaaaacagaaaaatgtgttagaaaacacagcacagagaaactgtggcttcagctcaacctgaccatgtcacagagtccatcactgtcagtcttgcattcatcctgctggtcaggctaattatcaagacagtcaacttctccctccgatgtttccttattccagaccagggtgtgaaagcggtggctgtcaagagtccctgaagatgtcccatcaatggaacgcatacagcagcaacaggatggtacagatcccaataacaccccctaggatgagcgagtcccgccgcttcctcaggttgatcctctggatcaggctgtttacagcaggaaaacgattggccaaagtgttcattttgctgtgaattgacttcaacattcctctctgtgaagtcatattttcttttgttgccatagcaatgcttattgtctcttctatcagacgatctgagtttcgaaagtggtcatgttctttcaaaaatagctcagttcctctggtggttactccagacccacttttatatgactcaatatcttttcgtactgatcccataagattctccctttcccgtattgccataaagtttgctttggttttatggaattcatgtgtataatcctgcaatatgtctctatgccgctgtaatgtatgcatcagggctgcattcaaggaggggacacctgcactgttggtatattctgccattttatcatttacccctgtaagccttgccaaaagttgttcaatctcaatcgccattgtctcaaacattctgtcttggcttgatccatttaaaaggggtgttgtatcagaactgtcgcgtcttccatctcgggtactgctatgactgtaacttgtacatagtttgctgaaggaaactagtttcaggtcaagttcattttccagctgtcgagcctgtttcctgagatccggaggccttctcgcctcaccttcccagtaactgctggtccctgccgccatctttgtcgtccaacgtcagccgggataggggagcagaggcgatgcaggccggaaagtcaccatggtgcgtgtttccgccttgagagccagggccgacgggatgcgagcctccgcggacactgccacctgccccctttaaattgtgctcactctgaagcctcttgcctctggtttctgcccggatctgcttggacat

SEQ ID NO: 16162 - DNA, 801 bp, Homo sapiens
  SIMILAR (444)..(800): 341254mologous to Arabidopsis thaliana protodermal factor 1,accession number AF141375,Smith-Waterman Score=101.
atgatcttcgcgccaggtgtccataacattattgccatcgctgatgggtacgtcaacaacaattcacagaggcttcagtgtatagcaataaaaacaggtcaaaggaatttggaaagtagtttctatgcggctgtaaagcaaagagacagttgggagaaaaaggacgcacccggaggccttctcgccctcaccttcccagtaactgctggtccctgccgccatctttgtcgtccaacgtcagccgggataggggagcagaggcgatgcaggccggaaagtcaccatgggagggggtgccttgctactgctccgcatgtggtccccactgccaccatggcagggagcctcattgctgctgtgcaatggacgagaagtccaagtggggggtgggtggagtgcttcattagagccagaggagaggaagtgtatgccgattggttcatgggcgccacgggcagcctggaaaaggcacaagtccccactccagtctatgggactggcagcctggcccccagccttcaggacctccctggcctgaaggtggggcctcaccagggaccccctcccttatacccaggagctagtctgcctcttgctgctttccatggcaccccggctgctcgtgctaaggggcacctgcaagccagtgctgagtcgccctcagtccccaaccttggttccctcttccatgcttgtcagtgcccagtccggtgggggcccaggcaacagggcccaagcatgtgcgtacccctccgggcagtgacagtgcgccgcctcagctccaaccccaatcccggatag

SEQ ID NO: 16163 - DNA, 532 bp, Homo sapiens
  SIMILAR (43)..(123): 921254mologous to Homo sapiens Protein encoded by plasmid pGRIPFL.fix.GRIP,accession number Y69389,Smith-Waterman Score=128.
cccacgcgtccgcggacgcgtgggccagcttcacgttacagcatggaagctgttgccaagtttgatttcactgcttggggtgaggatgaactgagctttcacactggagatgttttgaaggtaggtgacctggggccccaggggagcagtagggagtttcagttactcagtaatctgacagtccctgcctttgtctcttaagaactgcatgtggttccttttaaaaagagaagttcaccttgattccctttgtgcacccttataccagacaccaaccaggccgggtgatggaaatacagtcggcataagccaccatccttgtcctgggaggttcgtagtctggagaggggaacacatccacccaaagggctgttacagatgttcttggctaagttctcagggagcacaggtgagggaacaagtgattccatcttgaaagatgggggttgtaggagtgtgtgcaatgtgaacgtcaggaatgcactgaaggtgacttgggcttttagctaaagctcacagatgtgcaagccca

SEQ ID NO: 16164 - DNA, 1080 bp, Homo sapiens
  SIMILAR (749)..(1003): 481254mologous to Homo sapiens dJ370M22.1 (GRB2-related adaptor protein 2),accession number Z82206,Smith-Waterman Score= 146.
ggaggacatctcaatagaaaccactaaaactgaaaagcaaagagaaaaaccgaatgacaacaacaataacaagaacagaatatccaagaactatgggacaactataaaaggtgtaacatatgtgtaatggaaattaacaaagaagagagacacagtaacaggagaaatatgtgaagatgagccaggtgctgggcgttcggccacacagagaatcagaccagcaattaccctaggagaaccggcagtggagtctggcctggtgcagttcctgtcagggcgtcaagcaagatggttgcagatacctgagctggagggtaccaaggggaatgaaggtaagtgtcttcgtttcacaggctgccgggctgtgacactgccctaatcctcctttcaaagaataatccatgagcttacctttgaaatacaaggtggctacccagtctagataataaatgatttattgatgctacattctaatacaagatacaataacggacgtagcaccaagcctgtcacgctgtaggctgggccccttcccagagtaagttccgtcactctggaggtaaagtcataatatctaaatatggctcgattcatgtcaggtcttactggtactatggataccacaagtggagatgtaagtaggaaggtgcaggtccacaaataaatagggagcccagatgggagaaatgtcattagagagagaactgtgacaaatgagacacagacagaaggagagagagagaaagaggaagagagagagagctttcacactggagatgttttgaaggtaggtgacctggggccccaggggagcagtagggagtttcagttactcagtaatctgacagtcccgaatttcatagacatccagtttcccaagtaagtatctgcagcctgctgagatgggcctagccacacacactcctcttacatttccagcagtctcttcatcatccgggccagccagagctccccaggggacttctccatctctgtcaggtactgaccattcctgacactgccttggcccttctcggcctgttaacctcacagaatgctgaagcgccaagcatggcagca

SEQ ID NO: 16165 - DNA, 404 bp, Homo sapiens
  SIMILAR (152)..(277): 401254mologous to Boophilus microplus NADH dehydrogenase subunit 2,accession number AF110622,Smith-Waterman Score=66.
ggaatgatgctgtgagacaatctgagaagaattaaaatttaaattcatgtattcctacttttttctctgttctctaactgtaaaatattttcattacagatggaggaacaaatagatgttagataaatagatatataatagatcatccaaaattcttattcttatggttttatgtagtcagtatttacctctatttttctacatgtttatccttccaatttagttcattacttcctgcacctttgatgtcatatacataaacaggaaataacacatggtggctgggatgtagagagagccacaggacttgtgaatgaaatccacaggcaaggatgtgggcgattccttttgcaatattggagggaatgccaaaccctatgtttggctgtggaaaagagtatggg

SEQ ID NO: 16166 - DNA, 1044 bp, Homo sapiens
  SIMILAR (413)..(201): 541254mologous to Mus musculus protein kinase related to Raf protein kinases; Method: conceptual translation supplied by author,accession number U43585,Smith-Waterman Score=157.
atgagaaggctgcaccagatggaaattcggggtgtaaggggacgtccgcgcacagcccaccccacccacgggcccctcgagcctccatcaaagttcccaacacgcacccaccccacaaatcctgcccaaggtgagggctggtcccaggtcctccggctgctgcatcagcgagtgcaggagggaggagaagcctccaagggagagacgcgggctcaagcatgcaactcggccgggagtgaactggggccccgagggagatgtccagtctggtgctggagcccaaccctggtccccgacccccttatctccactgtccgtatctcctgctgggtgaggtccttggacacagcgcacttggtgcgcagcccgtgcaggctgccgaaggagatgccgatgagcttctggagctgcccccgagcgcagcgcgctctatgcgggctgcagcagcccaggagcggagccctgggtgctggcgtctaggcaaggaacccctgattcgggagagctggaccaggagcgccccttggcgctgccttagtcaggacgccagtagagctggcagccaagtctgcggatccagccctcagacccgcggcggtgggggcaaaaaactgcagcggtgggcgcaaaaagccggggcggtgggggcaaaaggccagggcgacgggggcaacaagccatggcggcggggtcaaaaagccgcggtggcggaggcaaaaagctgtggtggcggagcaaaaagctacggtgatgggcacaaaaagccgtaaaaagccgcagcattgggggcaaaaagccgcgacgcggtggcaaaaagccgcggcgcataaaagatgcggcggcgggggcagaaagcggctgcgtgggggggcggcaaaaagcaggggcggcaaaaagccgcgcgtcgaaaaatctgcggtggcgggggaaaaaagccgtggcgcgggtcaccaaaagcctgaaaaagctgcggcgacgggtgccaaaagccgcaaaaaaaccacggctgagggggcaaaaagcacgtgccgcaaaaagccatga

SEQ ID NO: 16167 - DNA, 924 bp, Homo sapiens
  SIMILAR (775)..(846): 1001254mologous to Homo sapiens bA541N10.2 (novel protein (ortholog of mouse FISH protein)),accession number AL133355,Smith- Waterman Score=128.
ttcctcggtcgacgatttcgtgggagggcctgaaccggacagtggcaagggacattagtgtaagagaaccaacaggtaggtaaccaatttgggggagagtggaaaaggccaggtgaactgccaggttctgcaaggcagaccacagtaacggctacaggatttttaaattaatgggaggggaaaagggggctcaggagatttctgggggtctgaactggtgatagcagaaatgctaaaggaatacatctcctgaaatgtgagggaaaacccacagagaaaatgggctttcatgagtaattggctcctctacccctttccaggctccgagagcgtttcacgggtttaccagagaaaatggcctccggagactgcaacgtgagagaactggaatttcagacagaaattgaatgcatgtggcttacaagacaaggaagcaccaaaggccaactcagggtttgctggattctggaaaatccaggggattttgaaaaagaaaatctgtggtggtttatcactaaaacagaactatacaggctgatcttttatacccagatgatgctggcaaccccctcccagccaggaatacacgtcaagcctccgccagcgccgatccccccggagcccgagccggagagcggcgaaggggagccgccggcccctccccaggacgctgacagcaggctccggggcccccgccccctggagaaggagccggagcccggccgggatgagaaggtgacgccgccgggggcgccactcgctttgtgggggaagatgctcgcctactgcgtgcaggatgccaccgtggtggacgtggagaagcggaggaacccctccaagcactacggcacccagggctacaggggcttctgtgagaaggtgctcctcatggggaacttgccctggttgcttttgcccatctaa

SEQ ID NO: 16168 - DNA, 496 bp, Homo sapiens
  SIMILAR (496)..(293): 891254mologous to Homo sapiens hypothetical protein,accession number AL442078,Smith-Waterman Score=319.
ctctgtgccatggcaatcactgctgagtgtcttctcctacaattacacaggcccgagctgtgtctggtggaaaggtctccactcaggtcagagtctgaaggagcaagatcttctcattaatgcagaacctgtgcagaaccaccatcagattctctccacagcgggagacctggcgctccatggccaggcgaaagtcctccttcacgcctttggtgatgcctcgagttacagtgtggtgcctgtcagcagtctgtatgctgggctgaagcacaggtaagaattcctgctgcagtaaccccatgggagggctagaaggcttgatcagcattccttgattgggtagtaattccagatgaattttcccaccttcctgagttctcaagtaggcaaattcctccagcatatcaatatttgtaacgtaattgaaaaaattctcatattggaaatttccttgttggcaaattttattgacagctttcaggaaaagattctcgcc

SEQ ID NO: 16169 - DNA, 509 bp, Homo sapiens
  SIMILAR (138)..(76): 481254mologous to Homo sapiens Human secreted protein encoded by gene 28 clone HNGJJ65,accession number Y02677,Smith-Waterman Score=61.
tttttttttttttttttccaggtttaaagtcctttgtattaaatttttgataggtatagacatttacaaatacttcatacaaagacacaaaaggtgagcactcagcatggaagagcaaaagagaacatgcttacttgatcagcattccttgattgggtagtaattccagatgaattttcccaccttcctgagttctcaagtaggcaaattcctccagcatatcaatatctgcaggccagattcaggttaaccacatgtaaaaaaaggtgctagttttctctgatgaggaaatggggtctcggcagttgagtaacttgcccattgccatcccactaaaaaaggtgccagttctctctgataaggaaatggggtcttggcagttgagtaacttgcccattgctaccccactaactgcagactccatatttgaacccagatctgtctgatgccaaaacctgattcttatacccactaaactccctcgcacagataactcttggcatgagatg

SEQ ID NO: 16170 - DNA, 1962 bp, Homo sapiens
  SIMILAR (1501)..(3585): 961254mologous to Homo sapiens putative p150,accession number U93572,Smith-Waterman Score=3571.
atgaggaggttgcactcccacggacggcatccaccaaagcgctttccaagtacttcgttgctcaataaacgtttgttggagaaaccggtgcataaaggtgaaataataaaacgtggacggatttcggaaagagaaggaaccccggagctcacgctttgcacgatcacccccaccagccccaggagttttcgcgtaaatcgaagcccggggagtgacctggaagcggttcaactgctctggcttctcagaagaggaggggaccgggcgacatgcgcagtagcctcccccgcggtggcggcggcggcggcggcggcggtggctgccgtggcggctgagagtccagagccggacgttccggccgcttcgggctggcggctggagagcgctcgggtcatgtctgcccagggggactgcgagttcctggtgcagcgagcccgggagttggtgccgcaagacctgtgggcagccaaggcgtggctgatcacggcccgcagcctctacccggcagactttaacatccaggtgaggtcccggctgtgcatgcggccgctctgcgtggaggagggccaacgagcgatgctggatgagctgggagccttctgggcagggtatgagatgtacaccatcgagcggaatgcagagcggaccgccaccgccgggaggctgctgtacgacatgtttgtgaatttcccagaccagccggtggtgtggagagaaatcagcattattacatcagcattaaggaacgattcacaggacaaacaaacccaatttttaagaagtttatttgaaactcttcctggtcgggtccagtgtgaaatgttactaaaggtcacggaacaatgcttcaacacgttagaacgatcagaaatgttgcttctacttttgaggcgcttccctgaaacggtggtgcagcatggggttggccttggggaggcactattagaggctgaaactattgaagaacaagaatctccagtgaactgctttagaaaattatttggtaaggaaaattgtattctctattacttctatggtaaattaatatgctgggtttgtgatgtccttcctctaataattaacaaccatgatgttcgattacctgccaatttattgtataagtacttgaacaaagcagctgaattttatatcaattatgtcactaggtctactcaaatagaaaatcagcatcaaggcgcccaggatacatctgatttaatgtcacctagcaaacgtagctctcagaagtacataatagaagggctgacggaaaaatcatcccagatcgtggacccttgggagaggttgtttaagattttgaatgttgttggaatgagatgtgaatggcagatggataaaggaagacgaagctatggagatattttgcatagaatgaaggatctctgcagatacatgaacaactttgatagtgaagcacatgcaaaatataaaaaccaagtggtgtattccaccatgctggtcttctttaagaatgcattccagtatgtcaacagcatacagccatctctcttccaaggttggtttacaaattttagagtgtccaaaaagccagttcatactgtggggatgctgggagttaaaaaaaattctgccgtagcctaccgcctcatgactttgagtctgtctgtattacaccaagacaacatagaagttatgagccttgtgaaggaggtgcctgcttcgccttcctccatgattgtaaatttcctgaggcctcatcagccatgtggaacttggtctgggcacctgttgctgcagagagttgccaaccccatatcctgtgagtctccgtccttgagcaccaagtatctaatcactctttctctctcagggctgcggtgctgtgaagatttcggcatcctgcactcatggccatgtttagtctatggtcacattgacactagagagtttcagggaccagtgcagtatgcccaggtctga

SEQ ID NO: 16171 - DNA, 2554 bp, Homo sapiens
  SIMILAR (1039)..(2679): 961254mologous to Homo sapiens putative p150,accession number U93564,Smith-Waterman Score=2780.
tttttttttttttttttcaaattttagggatgatttttattttacaaaaccagatgggtacttttggttttaccaaaaattacaaaaaaatgactcttaaaaaattggaaatagcttctcagacttcttgggaactacttttaagcaaccaaggagttagaactcagatcggttttcttctttgtaacagcaacaatgaccacggctctgtgccatggcagatcactggctgagtgtcttctcctacaattacacaggcccgagctgtgtctgggtgggaaaggtctccactcagggtcagagtctgaagggggcaaggatcttcttcattaatgcaggaacctgtgcaggaaccaccatcagattctctccacagcgggagacctggcgcttccatgggccaggccgaaaagtccctcccttcaagcctttgggtgatggcctcgagttacagtgtggtgcttgatcagcattcccttgattgggtagtaattccagatgaattttcccaccttcctgagttctcaagtaggcaaattcctccagcatatcaatatttgtaacgtaattgaaaaaattctcatattggaaatttccttgttggcaaattgttattgacagctttcaggaaaagattctcgccccgtggccactcttgctgaagcaacacaatcacatggccccaatgccatgtcgtctctgttgtctgtgaaagctctaagctttaaaaccggctaacattaaatggaggcagtatggcatggatagcctgctgggtacaaggcaggagcttcagatccgaaccttttctaaatttgggctttaactttcggaggggttcctcctgggatttgcctccatcttgaatggggagtaccatgtagcacatcaaatcaaggactttttcacatgtcattctgtactcccctaagcgcaaagtggcacgtcgccagcgtggatgagcgccctctgatgctccagggtcccctgccctgtgatctgtggctgagagatggatccctggagagctgctaagtgatgcaaggcctgtatcggcctttttatattgaccctgatagatgatcatatcagtgaggaagattcttaaccaaagccaagtatccgtcttcccaggccaagcaaatccttgtaaattctttgtcaaggaattctagggaatagagcaactcccagctctcccctggccaatttaaagctttctaacacttcagtggagttagcaagttcgcgctttattgactacaatgtgacgatttcttcctatcgccgaacagtcttcatcgtctgaactctgcatggttttttctcttccttcagctagtttcctctttttatggatgtgtttattacgatcaatttctacatcaccatacacattcgatacatcttcaagaagaaacccagtggaacttggctcggggcattaggaccttggaagagagatggctgtatgctgttgacatactggaatgcattcttaaagaagaccagcatggtggaatacaccacttggtttttatattttgcatgtgcttcactatcaaagttgttcatgtatctgcagagatccttcattctatgcaaaatatctccatagcttcgtcttcctttatccatctgccattcacatctcattccaacaacattcaaaatcttaaacaacctctcccaagggtccacgatctgggatgatttttccgtcagcccttctattatgtacttctgagagctacgtttgctaggtgacattaaatgcagatgtatcctgggcgccgtgatgctgatgtctctatttgagtagacctagtgacatgattgatataaaattcagctgcgttgttcaagtacttatacaataaattggcaggtaatcgaacatcatgagttgttaattattagaggaaggacatcacgtacaaataattttctaaagcagttcactggagattcttgttcttcaatagtttcagcctctaatagtgcctccccaaggccaaccccatgttgcaccaccgtttcagggaagcgcctcaaaagtagaagcaacatttctgatcgttctaacgtgttgaagcattgttccgtgacctttagtaacatttcacactggacccgaccaggaagagtttccaataaccttcttaaaaattgggtttgtttgtcctgtgaatcgttccttaatgctgatgtaataatgctgatttctctccacaccaccggctggtctgggaaattcacaaacatgtcgtacagcagcctcccggcggtggcggtccgctctgcattccgctcgatggtgtacatctcatactggatgttaaagtctgccgggtagaggctgcgggccgtgatcagccacgccttggctgcccacaggtcttgcggcaccaactcccgggctcgctgcaccaggaactcgcagtccccctgggcagacatgacccgagcgctctccagccgccagcccgaagcggccggaacgtccggctctggactttcagccgccacggcagccaccgccgccgccgccgcc

SEQ ID NO: 16172 - DNA, 1653 bp, Homo sapiens
  SIMILAR (2023)..(3402): 961254mologous to Homo sapiens putative p150,accession number U93563,Smith-Waterman Score=2329.
ctctgactccagcctgagccatggggtggggtgtcaggacagggacaagcagcctctccctcccaggggatgcacgactttcttcgtcttgctggagggtcagacagaaggaattcaagcattttgatgcgcatttctccctcacccttctacaaccctccctcaccactgccccgactttcaataccagttctgcctccttcctccaaactggttggcgtggcacggggttggcccttggcttcgcagtgcccggaggttcggagcgagcactggaccagagcccaagttcccaagttcccattccacggggagatgcggactttaggtggacccggaatggaaggagggtttttaaagaagcgaagcctctgtaacctggtctcctccctctcctcggtttaataccctgcctcccctactagtctccaggcttttctctggacaggggagggactgaacgtactcaactccagccccggggctgacctctctccctgagctttggagcgggtttggacctagccgttgcaagtaggcatgacttttatcacccatcgctatacccagagcagctgctcgaatgtgccaaggagcccaactcgggtgcaaagcgccgacgtctttcccaggttgaggacatcgcgagccagaggtgcaggcagcgaggcgcccaacagtagaatgcatcttccttcccgcgggcagaagccgtcaagtctggagtccgcagcggcacagaatacgcgctccctccctcccccttctctgtcccccgcctctcgctcaccccggcccactccagcggcgactttgagggattccctctctggcggcctctgcagcagcacagccggcctcattcggggcactgccccaccctagcgcccgagacgcgtgggctgagccctgaactgatggaattgttttgtttgttccgcagatacaatggctcaaatcatggcagaacaagaagtggaaaatctctcaggcctttccactaaccctgaaaaagatatatttgtggtgcgggaaaatgggacgacgcgccgccctttacagcccccgccccggggccgggcgagctgagggggcgcggggcgtctgtgttcccagctgatcacagaacaggccgatatcgcattgacccggggagctgaggtgaagggccgctgtggctggcggcccctaggtttaagaacccagacgctgcggggacgattgaagcgcacctccccggctcaacaggaaagccacaacatgtccaagggacctgaggcgacttgccagctctctggcacattaggttaggaacaatgagggttctaactattgctctgggctcttgctgtagctgggaagcacacagccaactcgcaccacctctctgccttggtcacccccgctgggaagtcctatgagtgtcaagctcaacaaaccatttcactggcctctagtgatccgcagaagacggtgttttgtagaacttatgattcaggatgttttgaccagagctctctgcttttcttctttcccattgcagagcataaatgcccagtggatgagcgggagcaactggaagaaaccttgcccctgattttggggctcatcttgggcctcgtcatcatggtaacactcgcgatttaccacgtc

SEQ ID NO: 16173 - DNA, 321 bp, Homo sapiens
  SIMILAR (50)..(319): 461254mologous to Homo sapiens dJ402G11.3 (KIAA0315),accession number AL022328,Smith-Waterman Score=159.
cccagcctggcccccttggccaggcatcactgggttttgtccccaacaggattctcccagcaacacctttgtggtccctgccgcccacactgtatgatgctcccacccctgcagttactacaaggggatccggcagatggtggggctcccacagccccttttccaccctgactgtcccgtcaccccccaggcgcacacggactccttgaacacccttggggtgctgggcggtcccccggtgtgctctgatgcgaccctccctcagatcatcaatgccttggaggaggatcctgccgcccagaagatgcagctggccttccg

SEQ ID NO: 16174 - DNA, 445 bp, Homo sapiens
  SIMILAR (269)..(3): 1001254mologous to Homo sapiens PRO1512,accession number AF130109,Smith-Waterman Score=479.
atgtatcttgtggcgtcccggaataggcggtaggagatgaagccatgggggtccacactatcaatgagtggaaacgcagtcatgccagtctctgacgtaaagatgacaatttcatataaaggggcaagctgctggaacaaggtctcgatgcctgggcgcttcttaaacctccagccagtggccagcgaccactcaggatgcaagaggacgccggtgagctccaaaacgagcgtgtagggtggctggtagtacggttcctgcagagggtctgctgctgtggcccttgcgccttagtgctcccgcggctcccgatctctgcggcctgatctggggcccggcggggcggcgtcgccaacctcgtgcacagtccccgcgagccgagccggagcccgcttcgcaagcgcgagaacaccgctgccgaggccgcacgaaatcgtcgacccgg

SEQ ID NO: 16175 - DNA, 1932 bp, Homo sapiens
  SIMILAR (1459)..(1142): 491254mologous to Homo sapiens PRO1512,accession number AF130109,Smith-Waterman Score=217.
tcagaggttctcttgaagtagtgtcaccacataactattctctattgataacttatcgcaaccaagttcttctatcagagggttgataacttcagaggcgtcagagctatcgtaaaggttaaaatatcgaggtccaccctgtgaggattcgctgatattcggcatcaaacgctgcttcccttgctctgcaggcttcccgaatcgcctgcggcgttcttcaagctcttgtattcttgcaggagcagtcaccggctgtaacatcgcctcttcaataaagctgttttcttctatctctggcttcccttgaattctttccgtgtgcttgccctcagcaaggagccacagctgcaggtggatttccacaccgggatgatgaggactcagacatcgctttccatttccgagtgcactttggtcatttgtggccatgaacagccatgagtggggggtctccagcccagtgctgaatatgcaatttgaattcactagttttaggcaatacgttgtttctcctaagtggttctccagatgttcagtgaacagataatcatagctcttgtagagggaataggactgtgattctgccatctggtgggaattctggtactcattgtccagctctgagatgtgcaggtcaaattgttgccatcctccaatctggtctcctaactcctctctccaggtttcgatatgaaagagaaggtgccaggccaggcgtcccggaagggcacctgcaagaggccgtcggcagtgggagatcaggcgcgggcgctccgggctgctcggtgtagaccggtcgcgcgcactcagcgccgcgcccagggcgcacggggactcggcggcctctctgagagcccaggcttcaggcagactctgaagaagaggcggcaggggaccgggcgctgcagggggaccgcggggccccagggcctggacccggcccgaagagtggatctgcagctcgaagacgccagcgggccgtgtcctgatgcccccatctggagactctcgggaccagcaggtgtggcgtctgggatgtactttattggacaagtggtggcccagtcttggtctggaagcactggggccctggacccaggcactgagtttgagaggcccagagttcagggctgctctagccggtttgccgctgtttgaaagccgccagcgggtcatcctccagggcatagtgtccagcacggttcgcacgtcctccacaccattcagtgcaatggctgtggcacaacagggggtggtcagccaggcttccggcatcagagttgccgtcccagggccgcagggcaacgccgttatagggctgaggcggaaggcttccttcttgcagtccacaactactactcgagctgggtccgattcagacatgaaatatcctttacatggtgtcatccatgtatcttgtggcgtcccggaataggcggtaggagatgaagcctgggggtccacactatcaatgagtggaaacgcagttgggtttcccgggacacaccgaccactcaggatgcaagaggacgcggtgagctccaaaacgagcgtgtagggtggctggtagtacggttcctgagagggtctgggagaaggcaagggctggtgggctcgatgatcatcattgtcgaactcatcaggaatcttggcaccattttcgtccaccgggttgtttccaagatatagacgacgctcacagtcccaccagctccaagcagcccagcaaccagagcgcaacttttttggcatagctgggaccctctgagcccggctgcgctgtggcccttgcgccttagtgctcccgcggctcccgatctctgcggctgatctggggcccggcggggcggcgtcgcaacctcgtgcacagtccccgcgagccgagccggagcccgcttcgcaaggcgagaacaccgctgccgaggccgccat

SEQ ID NO: 16176 - DNA, 1965 bp, Homo sapiens
  SIMILAR (1146)..(3122): 691254mologous to Homo sapiens putative p150,accession number U93572,Smith-Waterman Score=2027.
  misc_feature (1)...(1965): n = a,t,c or g
gcaccggcagcggtgttctcgcgcttgcgaagcgggctccggctcggctcgcggggactgtgcacgaggttggcgacgccgccccgccgggccccagatcaatgccgcagagatcgggagccgcgggagcactaaggcgcaagggccacagcagcagccgggctcagagggtcccagctatgccaaaaaaagttgcgctctggcttgctgggctgcttggagctggtgggactgtgagcgtcgtctatatctttggaaacaacccggtggacgaaaatggtgccaagattcctgatgagtttcgacaatgattccaattctggttacagcagtttgcgccggacattacaaatattttcaaagatttttaggacagatgattcattcgaggcccaccagcccttgccttcttcccagaccctctgcaggaaccgtactaccagccaccctacacgctcggttttggaagctcaccgcggtcctcttgcatcatgagtggtcgctggccactggctgggaggtttaagaaggcgcccaggcatcgagaccttgttccagcaggcntgcccctttatatgaaattgtcatctttacgtcagagactggcatgactgcgtttccactcattgatagtgtggacccccatgggcttcatctcctaccgcctattccgggacgccacaagatacatggattggacaccatgtaaaggatatttcatgtctgaatcggggacccagctcgagtagtagttgtggactggaaagaaggaagccttcccgcttgcagcccctataacggcgtttgccctgcgggccctggggacgggcaactcttgatgaccggggtcttgttggatctgtctgccttcctcaagacccattgcaactgaatggtgtggaggacgtgcgaagccgtgctggagcactatgccctgggaggatgacccgctggcggctttcaaacaagcggccaaagccggcctagagcaggaggaagcaagcaagcgcctgggccgaagctctccaaagtccaaacaagcagaacctcttcccttggctcccctcacccagccgcttgtggcctcgctcccaaacagccctgaaactctgggcctcctcaaactcagttgcctgggtccagggccccagtgcttccagaccaagacttgggccacccacttgtccaataaagtacatcccagacgccacacctgctgtgtcccgagagtctccgagatgggggcatncatcagggtgaggtccgggactcttgggtcatcgtcccacagtggctgatcggctgccaagcacagtgggggtgctttgttggatcagagcagatttttcaccctggtctcggaatctaaaaaccctcgctgtgtcttcctgtgtgttgcgtgatctgtgaaaaatacatctccctctgaccacagactcctcatctgtggagaagggaagagaggatggcacttggctttaaagacaggtagctgccaggctactgtggagagaatgtgttatgggcctagtgggcctctggtggaccagagattacccctctcaacaggccagctgctggttggctccagccagtgtggccctggggtaaagggggcctggagttgcttgacacgccagttgttcaaaagaagcaagaacttgggaatatttttttttttttttgagacagggtctcactgttgcccaggctgaggcaggagaatcgattaaacccaggaggcagaggttgcagtgagctgagatcacaccattgcactccagcctgggcgacagagtaaggctctgtctccaaaaaaaaaaaaaaaaaaaaaaaccaaaaaaaaaaccagtttgactttatctccctcgccctgcctccatccccacattgccccccactatcccagtctctcctactccagccttcatctagtgctaactgattaaatattctaagatgaca

SEQ ID NO: 16177 - DNA, 481 bp, Homo sapiens
  SIMILAR (126)..(263): 1001254mologous to Homo sapiens 11-beta-hydroxysteroid dehydrogenase,accession number M76665,Smith-Waterman Score=234.
atgatattcaccatgtgcgcaaaagcatggaagtcaacttcctcagttacgtggtcctgactgtagctgccttgcccatgctgaagcagagcaatggaagcattgttgtcgtctcctctctggctgaaacagccatgaaggcagtttctgggatagtccatatgcaagcagctccaaaggaggaatgtgccctggagatcatcaaagggggagctctgcgccaagaagaagtgtattatgacagctcactctggaccactctttctgatcagaaatccatgcaggaagatcctggaatttctctactcaacgagctataatatggacagattcataaacaagtaggaactccctgagggcttgggcatgctgagggattttgggactgttctgtctcatgtttatctgagctcttatctatgaagacatcttcccagagtgtccccagagacatgcaagtcatgggtcgcacctgacaaat

SEQ ID NO: 16178 - DNA, 455 bp, Homo sapiens
  SIMILAR (3)..(386): 991254mologous to Homo sapiens 11-beta-hydroxysteroid dehydrogenase,accession number M76665,Smith-Waterman Score=622.
  misc_feature (1)...(455): n = a,t,c or g
cttctttgaatctttttcatgatgatattcaccatgtgcgcaaaagcatggaagtcaacttcctcagttacgtggtcctgactgtagctgccttgcccatgctgaagcagagcaatggaagcattgttgtcgtctcctctctggctgggaaagtggcttatccaatggttgctgcctattctgcaagcaagtttgctttggatgggctcttctcctccatcagaaaggaatattcagtgtccagggtcaatgtatcaatcactctctgtgttcttggcctcatagacacagaaacagccatgaaggcagtttctgggatagtccatatgcaagcagctccaaaggaggaatgtgccctggagatcatcaaagggggagctctgcgcccaagaagaagtgtattatgacagctcactctggaccactcttctgagtcngaaatncatgcaggaaga

SEQ ID NO: 16179 - DNA, 708 bp, Homo sapiens
  SIMILAR (47)..(556): 651254mologous to Homo sapiens 11-beta-hydroxysteroid dehydrogenase,accession number M76665,Smith-Waterman Score=458.
gctgcctggtgagaaaatctcaatgataacctgagatctgactggtttcattaagttctcattgcttctggggctcttcatggcctactactactattctgcaaacgaggaattcagaccaggtaagtacccatgcgtctcattttggaggaataggtttaaaaaacacaggggtgcttgagtggcttatcatctggcgaagatgggagcccatgtggtggtgacagcgaggtcaaaagaaactctacagaaggtgagggttctatgctcgcagatatgtgtaccgtcacatgctcagatgtgttcttatatatgagacatgaccttcgcagagcaatttgttgcccaagcaggaaagctcatgggtgaggctgtttctcttacctcctcctctgaactttgcccttggggtcaccaagagcttttggatattcaccatgtgcgcaaaagcatggaagtcaacttcctcagttacgtggtcctgactgtagctgccttgcccatgctgaagcagagcaatggaagcattgttgtcgtctcctctctggctggtaagtgggacagggacatatgtggaaggtagaagaaaaaaaaaaatgccagggatgatgccgtgcaaacaccaggatcaaaatccgccatctaaatgttgttcctggcaaaataaaaacaaataacctagaggactctgtaaactgttaagcactt

SEQ ID NO: 16180 - DNA, 393 bp, Homo sapiens
  SIMILAR (1)..(393): 981254mologous to Homo sapiens KIAA1566 protein,accession number AB046786,Smith-Waterman Score=649.
cagaaggatacccaaagcatagactctccattttctttttctgctgaagataccctctcctgtccagtgacagaagtcatagccatcagtcactgtggaattaaagatagccctgtacaatcccctaatttccaacagacaggctctaagcttctgtccaatgtggctgcaagtcagcctgctaatatatcagtgttcaaaagggacctgaatgtgataacttctgtacccagcgaattgtgtttacatgagatgtcctcagatgcttcacttccaggggatccagaggcctatcctgctgctgtgtcaagcggtggagccattcatctgcagacaggagtggaaacagaagagatgagatcagcaattgctcctgatcccattcctctgacg

SEQ ID NO: 16181 - DNA, 4146 bp, Homo sapiens
  SIMILAR (1372)..(2523): 911254mologous to Homo sapiens Polypeptide identified by the signal sequence trap method,accession number Y02377,Smith-Waterman Score=1757.
cacaatatgcagaagagcctaatttatacagaggagctacagtttagcgtggcttcaaacagagagataaggctagatttacagcctgtatcccaaccagttggagctgaacaacaagcagctcttctaaaaccagatttagttactagcttgaatcaagatgtggcaactacgaaggaaaacgtcagtagccctgataacccaagtggaaatggcaaacaggatcggatcaaacagagaagagcttcctgtccccgaccagagaaggggactaaatttcagcttaccgtcactcaggtatcaacctctggagataacatggtagagtgtcagctggagacacacaacaacaagatggtcaccttcaagtttgatgttgatggtgatgcgccagaggatattgcagacgggcaggttgaagataactttgtgctggaaagtgagaaagaaaaatttgtagaagaattgagagctattgtaggtcaagcccaggagatccttcatgtccactttgccacagaaagagccactggagttgattctattactgtggactccaacagtattcagacagggtcatctgaacaagtacagataaattctacatctactcaaactgcagatgaatctgctcctcagtcatccccagttggtcggtggcgattctgtatcaatcagacgataagaaaccgtgagactcagtctcctccttctcttcagcattccatgtctgcggttcctggccgacatccacttccaggtccaaaaaacacaagtaataaggaaatatcacgggacacattgctcactatagaaaataatccatgccaccgtgcacttttcacctccaaatcagaacacaaggatgtggttgatggtaagatttctgaatgtgctagtgtagaaaccaagcagccagctatactttatcaagtggaagataacaggcagataatggcaccagttactaatagttccagttactctactacttcagttcgtgcagttccagctgaatgtgagggactcaccaaacaagcaagcatattcatacctgtgtatccatgtcaccaaactgccagtcaggctgatgcacttatgtcccatcctggcgaatcaactcagacttctggtaactctcttacaactctggcatttgatcaaaagcctcaaaccttatcagtacagcagccagctatggatgcagagtttatttctcaagaaggagaaactacagtgaacactgaagcaagttctcctaagacagtcattcccactcagacccctggccttgaaccaactacccttcaacccactactgtcctggaatcagatggagaaagacctccaaaactggagtttgcagacaaccgaattaaaactctggatgaaaaattaagaaacttgctctatcaggagcacagcatctctagcatctatcccgagagtcagaaggatacccaaagcatagactctccattttcttcctctgctgaagataccctctcctgtccagtgacagaagtcatagccatcagtcactgtggaattaaagatagccctgtacaatcccctaatttccaacagacaggctctaagcttctgtccaatgtggctgcaagtcagcctgctaatatatcagtgttcaaaagggacctgaatgtgataacttctgtacccagcgaattgtgtcattaggagatgtcctcagatgcttcacttccaggggatccagaggcctatcctgctgctgtgtcaagcggtggagccattcatctgcagacaggaggtggatattttggcctaagctttacttgtcctagtctcaaaaatcctattagcaagaaatcctggactcgcaaattaaaaagctgggcatacaggctacggcagtcaaccagctttttcaagagatcaaaagtccttgcagtggaaacagaagagatgagatcagcaattgctcctgatcccattcctctgacacgggagtccacagctgatactagggctttgaatagatgtaaagcgatgagtggatcatttcagcggggtcggtctcaggtgattacaattcctcagcagcagtcagcaaaaatgacatccttttgggaatagaacacatatcagtgttcagtgagacaaaccattctagtgaagaagcctttattaaaacagcaaagtctcagttggtagaaatagaacctgccacacaaaatccaaaaacttcgttttcttatgagaggttacaagctcttcaggaaacctgtaaagaaaataaaggagttcccaaacagggtgacaccttcttatctttcagcgcagcttgtgagactgatgtatcttcagtgaccccagaaaaggaatttgaagaaacttcagccacaggaagtagcatgcagtctggatctgaactgttgcttaaagagagagagatattgactgctgggaaacagcctagctctgatagtgaattttcagccagtcttgctggcagtggaaagtcagtggcaaagactggtccagagagtaatcagtgcttaccacaccacgaagaacaagcttatgctcaaacacagagttcactcttctattcgccatcttccccaatgagcagtgatgatgaatcagaaatagaggatgaggacttgaaggtggagcttcaaagattacgattcagacacattcaggaggtggtaaatcttcaaacccagcagaataaggagctgcaggagctctatgaacgccttcggtcaattaaagatagcaaaacccaatctactgagattcctttgccacctgcatcaccacgtcgaccaagatctttcaaaagcaaacttcgaagccgcccccagtccttgacacatgtggacaatggcatagttgttatagatccactgtgtgtggagagtaatgcagcatcatgccaacagtctccagccagtaaaaaagggatgttcacagatgacttacacaagctggtggatgactggacaaaggaagcagtaggaaattctcttattaagccaagtttaaaccaacttaaacaaagtcaacacaaactagagacagaaaactggaataaagtactccagctagaaagcgtgtaccaccgagaagacgaggcaacatggctcccccagcttcgcgcccagatcgtcgcctatcctgcttgcgcagccgctatcgcgtctgcccaccgacgaagcatgggtgtccagggcttccaagagttcctggagaagcgctgtcccggggccgtggtgcccgtggacctcctaaaactcgcgcgcacggtctcgcgccagcagcagcagcagcacttgcaccgccagctgccgccgactgcagccctagcgcccggggctccacgcgccgccaggggctccgtgcctctgcaaccgccgcttccgcccgctgccttgggtgcctactccgggggcgcggggccgattcggcaccatcaccccgctcaccacttccaccatcatggccaagcgcagcccgggctgcaccctccgctgccgccgccgccgccccctcagctgcccggggcccgggtgctggtggacgccggctcggcgctgccgcggctctatggcggctaccagacggattgggtgtgtggcggccaatggaacgccatgctgggctacttgtcagcgctgtgccaggcttgtgcctatcctggcggcgacggcctggagctcgtggtcatgttcccggggggcctgggcaaggaccggctggccgagtggggccgtcggtgccaggccgagcggcagacagcgcaactgatcgtgggacacgtgggcaacaagggcacccctccaccgcgggcctggttcctgccaccggcctgcctgagccactgcgtgaggctagcactcatccgcttccggttctaggtctttcagagccttgaagaccaccatttggaagtggtggcgtttttcagggaaaatggcttccatggccttcttgcccatgactccgagtatgctctctacaatattccctcttactacagttcccatgctctgaaactgagctggaatgggaagaacctcactaccaaccagttcctgatgcaagaagtagccaagcagctgggcctgaagaggatgaatttccccatatttgctgcac

SEQ ID NO: 16182 - DNA, 663 bp, Homo sapiens; identical to SEQ ID NO: 1392
  SIMILAR (70)..(192): 901254mologous to Homo sapiens calbindin D28K,accession number S46006,Smith-Waterman Score=204.

SEQ ID NO: 16183 - DNA, 473 bp, Homo sapiens
  SIMILAR (1)..(1458): 1001254mologous to Homo sapiens keratin protein Hb6,accession number AJ000263,Smith-Waterman Score=2518.
gtgtcagaccacgcagggacgcctgccttggtccttcacccttagcggcaagtcccgcttttctggggaaggggcaagtaccccaaccccttatatctctgtgccccgatcccttatttccgcaccccaacctcatatctctgcgccccaatcccttatgtccgcaccccgacctcgtatctctgtgccctgacccctttcccgcttttctggaggcacataagaacttccaaacgcctgaaccgcagcagcccggcattccaccagaacctcctcccccaggagcttgctacaagtgccagaaatctgaccaccaggccaaggaatgcctgcagcccaggattcctcctaagccatgtcccatctgtgcgggaccccactggaaatcagactgttcaactcacctggcagccactcccagagcccctggaactctggccgaaggctctctgactgactccttctcggcttag

SEQ ID NO: 16184 - DNA, 516 bp, Homo sapiens; identical to SEQ ID NO: 641
  SIMILAR (514)..(449): 861254mologous to Homo sapiens Human secreted protein, SEQ ID NO: 5576,accession number G01495,Smith-Waterman Score=106.

SEQ ID NO: 16185 - DNA, 1764 bp, Homo sapiens
  SIMILAR (1898)..(2356): 661254mologous to Homo sapiens HSPC298,accession number AF161416,Smith-Waterman Score=443.
ctaagcggagaaggagtcagtcagagagccttgggccagagttccaggggctctgggagtggctgccaggtgagttgaacagtccgatttccagtggggtcccgcacagatgggacatggcttaggaggaatcctgggccgcaggcattccttggcctggtggtcagatttctggcacttgtaacaagttcttgcccctgtcccaggaaagtgggacttgccgctaagggtgaaggagaaggggttgaggggtacttgcccctgccccaggaaagcgggacttgccactaagggtgaaggaccaaggcaggcgtccctgtgtggtctgacacccttgaaacatgagtgtataatcagagaggcatccctgcaatgattaaacaccaagggaaggctgccttcccagtccgtgaccggcgccggagttttgggttcatggataaaacatgtctcttttgtctcattgatactgctatgattactactattgttgctattatcattgtcttcatgttctgaggtaattctgagaaatctttctttttcatccaccatgaaatactgtagaagactcaagggctctttgcctttttcttgaactggagatttaggaaccacagccctctgcccaccagtccccctcctgcactccccactcccatggccacccatggaccaatcggcacacacttcctcccctctgaggcccataaaagccctgagatcagccagagcagagcagacatcaggacaaccagctgggaaccgtctgagccaggtctgtgacttcctcttcagagctctgtggttcctggtgtctccaagcttccaggcatacccatgttccctggtgccagctgtagaagctgcctgtggtgcacctggtccagccgcagccttgcagagggccagcacctggagctgccctccccgctggaagcttggagatgccaggaaccacagagcctgaaagagggtgtcacagccctggcttggggatctcctaggtctgtgctccccaaagggctgcagctcttctatcattttgtcttctctccttgtcgcaggcgctggatctcgctgctcgtcgctgcgcgctactaggtcctgctgtcgtccgagtcgcctccgggactctccggaattgtagcggctgtagccggctccttgcctgcggcgcggagggcaggtcccagtggtaggaggatgtgttccctttgcagaatcagaccccctcctgggactgtggggaccctctgtcgccggcctccattggaggatgcgttgtccctggagctgggtgcgctgttgcgtgacctggggcctgggtggtgggcgggcctgtccatggcaaagggcacggctgcgcgctacttcccgagaacccgccagcaggctcttgggaagcagcgatttctccttagtcacagtcagagagggtgatgcgacacactgggcttcactgtgctcgtgaagcggagccagggtgaaaggatcatatggcctaaccctaaccctaatgggagtaacttcacctgcgtcccacaggccccgcaagagtgacgctgccaggcaggcgccgccctgttcggttcctgctgctgtcgctcctcgctccccaccacctccagagctccggtgggtcaccatggaaagggaagccgctgcctggagctgagtcaggttagagagctgagcaaagtgcaggggtagaggaagcagcagaaaggccctgggagctctctgggtccccaggcagcccat

SEQ ID NO: 16186 - DNA, 571 bp, Homo sapiens
  SIMILAR (571)..(455): 941254mologous to Homo sapiens Human secreted protein, SEQ ID NO: 5576,accession number G01495,Smith-Waterman Score=198.
atgttgctcacacaaagcctgtttggtggtctcttcacacggacgcacatgaaatttggtgccgtgactcagatcaggggacctcccttgggagataaatcccctgtcctcctgctctttgctctagagagacaaaggagacacgttttatccatggacccaaaactccggtgctggtcacggactgggaaggcagccttcccttggtgtttaatcattgcagagatgcctgattattcacccacgtttcaaaggtgtcagaccacgcagggacgcctgccttggtccttcacccttagcagcaagtcccgcttttctggggaaggggcaagagcttgctacaagtgccagaaatctgaccaccaggccaaggaatgcccgcaacccgggattcctcctaagccatgtcccatctgtgcgggaccacactggaaatcggactgttcaactcacctggcagccactcccagagcccctggaactctggcccaaggctctctgactgactccttcttggcttagcagctgaagactgatgctgcctgattgcctcggaagccccgtagaccat

SEQ ID NO: 16187 - DNA, 657 bp, Homo sapiens
  SIMILAR (573)..(454): 801254mologous to Homo sapiens Human secreted protein, SEQ ID NO: 5576,accession number G01495,Smith-Waterman Score=177.
ttatctcgcgtgccgctgccgcggggcggttcgtctgcggtcgcgcgctgttttcgtgcgccctggtgattcgatactcagtcggggtcgcggcgttgttgcggctgacttgatgacgcccgtgttgtcgttgtgttggagctgtctcggtgttcgtgccgccactctagttgacggtgtagatgtcgacgccgcgcccgccgttcgtgcctgcgtttgtcgggcgccgaccctcactgttgttcgtgcctgccgctcgtctgactgacgtgcgcggtcggaaggtgcgggcttgtggtctgttgtcgccccgtctgcggtctccgtcttcttcgtcagcgacccgcgttgcgcgccattccatcggtcgccctcgtgttgctcgcctgtcgaccgtgtttgtcgctgtctgcgtagagtcgccctcgcgccagcggcgttggtgcttgtttgctctggcagccactcccagagcccctggaactctggcctaaagctgtctgaccgactccttctcggcttagcggctgaagactgacgctgcccgatcgcctcggaagccccgtagaccaccacagatgccgagctgactattcctggactatagccgctgatctcattgatgcccttcttcccaatccaaagcctcctttgcat

SEQ ID NO: 16188 - DNA, 1752 bp, Homo sapiens
  SIMILAR (1)..(3093): 991254mologous to Homo sapiens unknown,accession number AF148856,Smith-Waterman Score=5349.
atgatctttgtccttcagataagagttaggggccatgatgactccttcctcaagaaccatctagtgtttctggtgatttatggcacaaatggaaccttcaaccagaccctggttactgataacaatggcctagctccctttaccttggagacatccggttggaatgggacagacgtttctctggagggaaagtttcaaatggaagacttagtatataatccggaacaagtgccacgttactaccaaaatgcctacctgcacctgcgacccttctacagcacaacccgcagcttccttggcatccaccggctaaacggccccttgaaatgtggccagccccaggaagtgctggtggattattacatcgacccggccgatgcaagccctgaccaagagatcagcttctcctactatttaatagggaaaggaagtttggtgatggaggggcagaaacacctgaactctaagaagaaaggactgaaagcctccttctctctctcactgaccttcacttcgagactggcccctgatccttccctggtgatctatgccatttttcccagtggaggtgttgtagctgacaaaattcagttctcagtcgagatgtgctttgacaatcaggggacagacttaacttccactgtgagagttacccgaagctcggcatccgtgatggtctacggagcttccgaggcaatcgggcagcgtcagtcttcagctgctaagccgagaaggagtcagtcagacagccttgggccagagttccaggggctctgggagcggctgccaggtctgcggatcaatggagagctaatcactgcctacccacaagtggtggtagtcagagtaccaaccccttgggtgcaaagtgatagtgacatcactgttttgcgccatctagagaagatgggatgtcggttaatgaaccgacctcaagccatcctgaactgcgttaataagttctggacatttcaagagttggctggccatggtgttcctctgccggatactttctcttatggtggccacgaaaattttgctaaaatgattgatgaggctgaagttctggagttcccaatggtagtaaagaatacgcggggtcacagaggtatgtatgagttgttggtaagtactatgggatgttccaattctggtatggtcactacccctatcaagtggctgagtatgatcagtgtccagtgtctggccaatggaactttcctcagcccttcattgaccaaatgccccaagggcattcgagccagcgttccattatctggaggccctcgttctctgaaggcacggaccttttcagctttttccggtcctgtgcgttcagacgaacaggctgaagcactgccggaagcgtatgaaccgattgaggttaacgaattcggtgaaatcgatctgcttgcaatggttgaagatgaaatcatcctcgccttgccggtagttccggtgcatgattctgaacactgtgaagtgtccgaagcggacatggtctttggtgaactgcctgaagaagcgcaaaagccaaacccatttgccgtattagccagcttaaagcgagtaaggtccatggccgtacaacagaataaaccaacccgttccaaacgtggcatgcgtcgttcccatgacgcgctgaccgcagtcaccagcctgtctgtagacaaaacttctggtgaaaaacacctgcgtcaccacatcactgccgacggttactaccgcggccgcaaggtcatcgctaagtaa

SEQ ID NO: 16189 - DNA, 470 bp, Homo sapiens
  SIMILAR (83)..(205): 901254mologous to Homo sapiens calbindin D28K,accession number S46006,Smith-Waterman Score=202.
tcgaacgacgcttcacatagccggctaggtggacgcttcacctggacgcgcatgaaatttggtgccgtgactttgatcgggggacctcccttgggagatcaatcccctgtcctcctgctctttgctccgtgagaaagatccacctatgacctcaggtcctcagaccaaccagcccaagaaacatctcatcaatttcaaatccggaccccactggaaatcggactgttcaactcacctggcagccactcccagagcccctggaactctggcccaaggctctctgactgactccttctcggcttatcggctgaagactgacactgcccgatcgcctcggaagccccgtagaccatcacggacgccgagcttcaggtaagtctcacagtggaaggtaagcccgtccccttcttaatcaatatggaggctacccacaacaggacttaattaacctcaccttcaaggtgtgcaat

SEQ ID NO: 16190 - DNA, 753 bp, Homo sapiens
  SIMILAR (444)..(746): 391254mologous to Oryza sativa DNA binding protein,accession number X88799,Smith-Waterman Score=127.
atgcacgaacatcccataaatgcccttggcagtgatgagtacaatcacagcagagttaatggtagttctggaggggagaagtctgagatcatggtgccagcatgggcaggttttggtgaggaacctcctccaactgtctactgctggctctcctatcctcacaagttctaccatggaagccaaattggtgagcatgaggtgcggaacagagttatgtgcttatcccataacctgtctggttttctaggtattcagacattgcactcgctcagcactgcccttaacccagagcgccaggttgtaagaatcgggtctgtggacctcataccagataggcgcgaacgcctctggcagcggcgtccagggggtccggcggcactcgcggtggggctgcctgggttgcgggtgacgatctgcggggtcccgcacccggccccgcggagcccggacccgcacgtaggcggcgcggcaaaggcacaccctcctcgcggccgcgaacccagcgccgtcctcgcagcgcggcaatgcacggccaccgctgcccccagcccgcccgccgcagccgcgagcacccaaacacctaccctgcggggcgacgacccccggagctcaggcgaggccgctcgggcgtgccacctccgcggccatgacggcgacccggggaagcgccccgcgcgccaaggccccgcgctgctgagctgtgagcacggctgccccgtccgtccgtccgtccagcacccgcccggagagtga

SEQ ID NO: 16191 - DNA, 768 bp, Homo sapiens
  SIMILAR (1)..(3135): 971254mologous to Homo sapiens unknown,accession number AF148856,Smith-Waterman Score=5279.
tttgatgagttgagagaagaaggcttcagacaatcggtaataacaaacttctccgagctaaagaaggatgtttgaacccatcgcaaagaagctaaaaaccttgaaaaaaagattagacgaatggctaactagaataaacagtgtagaggagaccttaaatgacccgatggagctgaaaaccatggcacaagaactacgcgatgcatgcacaacctagtttagagaaaaaagggtaaaaagaaatgaacaaagcctccaagaaatatgggactatgtgaaaagaccaaatctacgtctgattggtgtacctgaaagtgacggggagaacggaaccaagttagaaaacactcttctggatatgatccaggagaacttccccaagctagcaaggcaggccaacattcaaattcaggaaatacagcaaataccacaaagatactcctcaagaagagcaactccaagacacataattgtcagatttactaaagttgaaatgaaggaaaaaatgttaagggcagccagagagaaaggttgggttacccacaaagggaagcccatcagactaacagcggatctctcggcagaaactctacaagccagaagagagtgggggccaatattcaacattcttaaagaaaagaattttcaacccagaatttcatatccagccaaactaagcttcataagtgaaggagaaataaaataccttacagacaagcaaatgctgagagattttgtcaccaccaggcctgccctaaaagagctcct

SEQ ID NO: 16192 - DNA, 897 bp, Homo sapiens
  SIMILAR (10)..(660): 531254mologous to Homo sapiens putative p150,accession number U93565,Smith-Waterman Score=517.
acaggtgaacgagacaaagttaacaaggatccaggaattaaactcagctctgcaccaagcagacctaacagacatctaagaactctccaccccaaatcaacagaatatacattcttctcagcaccacatcacacttattccaaaattgaccacatagttggaagtaaagcactcctcagcaaatgtaaaagaacagaaattataacaaaccgtctctcagtccacagtgcaatcaaactagaacaccactcaactacatggaaactgaacaacctgctcctgaatgactactgggtacataatgaaatgaaagcagaaataaagatgttctttgaaaccaatgagaacaaagacacaacataccagaatccctgggacacatttaaagcacctccgctggtgataccccagcagacagggtctggagtggacctccagcaaattccagcagacctgcagctgagggtcctgactgttagaaggaaaactaacaaagagcaaggacatccacaccaaaaccccatctgtacgtcaccatcatcaaagaccaaagaagctaaaaaccttgaaaaaagattagatgaatggctaactagaataaacagcatagagaacaccttaaaggacctgatggagctgaaaaccagggcacgagaactacgtgacgcatgcagaagcttcagtagccaattcgatcaagtggaagaaagagtatcagtgattgaagatcaaatgaatgaaatgaagaaagaagagaagtttagagaaaaaagagtaaaaagaaatgaacaaagcctccaagaaatatgggactctgtgaaaagaccaaatctgcatctgattggtgtacctgaaagtgacggggagaatggcatcaagttggaaaacactctttag

SEQ ID NO: 16193 - DNA, 1209 bp, Homo sapiens
  SIMILAR (580)..(1206): 771254mologous to Homo sapiens p40,accession number U93567,Smith-Waterman Score=833.
atgactggggcagctggggaagaggctgctggggctggcgttggagctgaagttgatgctagggctgaagcaagaatgggaattgaggctgaggcaagaatggtgacagaagctggggttgaaactgaggcaaggatgggggttggagctggggctgaggctggagctgaagaagaggttatagctgcagctgaagtagaggctggaactgaagctgagactgaggctgaggctgaaactggagctaagggtgaggctggaactggagctgaggttgaggccagaactggagctaaagttgaggctggaaccggagctgaggttgaggctggaactggagttaaggttgccggaagtggagctgaggttgaggctggaactgaagctgaggttgaaggtggaagtggagccgaagctagagcctctgctggtgatacccaggcagtggacctccagcaaattccaacagacctgcagctgagggacctggctgttagaaggaaaactaacaaacagaaaggaatagcatcaacatcaacaaaaaggacatccacaccaaaaccccatctgttggtaataacaaacttctctgagctaaaggaggacgttcaaacccatcacaaggaaactaaaaaccttgaaaaaagattagacgaatggctaactagaataaacagtgtagaaaagaccttaaatgacctgatggagctgaaaaccatggcacgagagctacgtgacacatgcccaagcttcagtagccgattcgatcaagtggaagaaagtgtatcagtgactgaagatcaaataaatgaaatgaagcgagaagagaagtttagagaaaaaagagtaaaaagaaacgaacaaagcctccaagaaatatgggactatgtgaaaagaccaaatctacatttgattagtgtacctgaaagtgacggggagaatggaaccaagttggaaaacattcttccggatattatccaggagaacttccccaacctagcaaggcaggctaacattcaaattcaggaaacacggagaacaccacaaagatactcctcgagaagagtaaccccaagacacataattgtcagattcaccaaggttgaaatgaaggaaaaaatattaagcgcagccagagagaaaggtcaggttaccctcaaagggaagcccatcagactaacagctgatctctcggcagaaactctataa

SEQ ID NO: 16194 - DNA, 882 bp, Homo sapiens
  SIMILAR (1)..(3036): 941254mologous to Homo sapiens putative p150,accession number U93563,Smith-Waterman Score=4979.
atggcgccagtatctgcttctgaggacttctggcaatgtccagagacatctttgatttcgcaactagaaagtgcccctggaattcagttgatggaggccagggatgctgataaaagtcttataatgcacgaaatagcccccacctccaacagggaattaccagtccataaaatcagtattgccaaaccttgctctatgctaatgatctcatggttttttgttaataccggacaaagcttccagaggaaggatcaggcagcaatatttgctgttctgcagcctctgctggtgatacacaggcaaacagggtctggagtggacctccagcaaactccaacagacctacagctgagggacctgactgtcagaaggaaaaataacaaacagaaaggaatagcatcaacatcaagaaaaaggacatctacaccaaaaccccatctgcaggatcacagctcctcaccagcaatggaacaaagctggatgcagaaagactttgacaagttggcagaagtaggcttcagaaggtcggtaataacaaacttctccgagctaaaggaggatgttcaaacccatcacaaggaagctaaaaaccttgaaaaaagattagatgaatggctaactagaataaacagtgtagagaataccttaaatgacttgatggagctgaaaaccatggcacaagaactacatgatgcatgcacaagcttcagtagacaatttgatcaagtggaagaaagggtatcagtgattgaagataaaattagtgaaataaagcaagaagagaagtttagagaaaaaagagttaaaaagaaacgaacaaagtctccaaacaatatgggactatgtgaaaagaccaaatctacatttgattggtgtatctga

SEQ ID NO: 16195 - DNA, 1008 bp, Homo sapiens; identical to SEQ ID NO: 5642
  SIMILAR (1)..(549): 971254mologous to Homo sapiens N-type calcium channel alpha-1 subunit,accession number M94173,Smith-Waterman Score=949.

SEQ ID NO: 16196 - DNA, 1257 bp, Homo sapiens
  SIMILAR (1)..(3156): 951254mologous to Homo sapiens putative p150,accession number U93565,Smith-Waterman Score=5296.
atggttatgttggaaggaactggggaagaagagtggggcgctgctgaaaatatacccaaaagtgtggagcgactttggaaccgggtaacaggcagaggttggaacagattggagggctcagaagaagacaggaaaatgtgggaaagattggaacttcctagagacttgttgaatggctttgaccaaaatgctgataacaatatggacaataaaattaaagtccaggctgaggtggcctcagctggagatgaggaacttgttgggaactggagcaaaggagaaaaacttcaagagtttgtggatcacaaagtgtggtggctgacacatgactggaaaaatgtaaaggagagaggttgtaatacttgctgtgatgaccgatggatggcagtgaagccagctgcacgtctatggaaagggaccatatttcctctaggctgctatagaaaccacagaagatatgcacatcctctgttggtgatacccaggcaaacaggatcaggagtggacctccagcaagccccaacagacctgcagctgagggacctgactgttagaaggaaaactaacaaacagaaaggaatagcaccaacatcaacaaaaaggacatccacaccaaaaccccatctgtcaccatcatcaaagacaaaggtagataaaaccacaaagatggggagaaaccagagcagaaaagctgaaaattctaaaaaccagagcaccccttctcctccaaaggatcgcatctcctcgccagcaaaggaacaaagaaggatggagaatgactttgacgagttcacagaagtaggcttcagaaagtcggaagctaaaaaccttgaaaaaagattagacaaatggctaactagaataaacagtgtagagaagaccttaaatgacctgatggagctgaaaaccatggcacgagaaatatgtgatgcatgcataagcttcagtagccgattcgatcaagtggaaataagggtatcagtgattgaagatccaattaatgaaatgaagcgagaagagaagtttagagaaaaaagagtaaaaagaaatgaacaaagcctccaagaaatatgtgactatgtgaaaagaccaaatctacgtctgattggtgtacctgaaagtgatggggagaatggaaccaagttggaaaacactcttcaggatattatccaggagaacgtccccaacctaacaaggcaggccaacattcaaattcaggaaatacagagaagagaacaccacaaagatactccttga

SEQ ID NO: 16197 - DNA, 467 bp, Homo sapiens
  SIMILAR (60)..(467): 571254mologous to Homo sapiens p40,accession number U93571,Smith-Waterman Score=381.
ccaaaaccccatttgtaggttaccaacatcaaagaccaaaggtagataaaaccacaaagatggggagaaaccagagcagaaaagctgaaaattctaaaaatcagagcacctcatctcctccaaaggatccaggctccttgccagcaacggaacaaagctggacagagaatgactttgacgagttgacagaagtaggcttcagaaggtcggcaataacaaacttctccgagctaaaggagcatgttctaacccgtcgcaaagaagctaaaaaccttgaaaaaaggttagatgaatggcttactagaataaacagtgtagagaagaccttaaatgacctgatggagctgaaaaccatggcacaagaacttcgtgatgcacgcacaagcttcaatagctgattcaatcaagtggaaaaaaggatatcagtaattgaagatcaaattgatgaaataaagtgagaagacaag

SEQ ID NO: 16198 - DNA, 669 bp, Homo sapiens
  SIMILAR (1)..(1665): 961254mologous to Homo sapiens putative p150,accession number U93563,Smith-Waterman Score=2751.
ctctaaacttctcacttcatttcattcatttgatcttcaatcactgataccctttcttccacttgattgaatcagctgctgaagcttgtgcatgcatcacgtagttctcgtgccatggttttcagctccatcacgtcatttaaggtcttctctatgctgtttattctagttagccattcgtctaatcttttttccaggttgttagcttctttgcgatgggttcaaacatcctcctttagctcagagaagtttgttattgccaatcatctgaagcctacttctgtcaactcgtcaaagtcattcagaggaaggagttttggaggaaggagagacctagggagggttttttgttttgtttttgtaagagaaggatgttggccaggcgcggtggctcacgcctataatcccagcactttgggaggccagtgcaggccgatcatgaggttaggagatttgagaccatcctgggccaacatggtgaaatgccgtctgtactaaaatacaaaaaattagccaggcgtgatggtacacacctgtagtcccagctacttgggaggctgaggcaggagaattacttgcacctgggaggcagaggttgcagtgagctgagattgcgccactgcactccagcctggcgacacagcgagactccgtctcaaaaaaaaaaaa

SEQ ID NO: 16199 - DNA, 1458 bp, Homo sapiens
  SIMILAR (388)..(56): 931254mologous to Homo sapiens High affinity immunoglobulin E receptor-like protein (IGERB),accession number W96745,Smith- Waterman Score=515.
aacagaaagggatagcatcaatatcaacaaaaaggacatctataccaaaacccaatctgtaggtcgccagcatcaaagaccaaaggtagataaaactacaaagatggggagaaaccagaacagaaaagctgagaattctaaaaaccagagtgcctcttctcctccaaaggattgcagctcctcgccagcaatggaacaaagctggatggagaacaactttgatgagttgacagaaataggcttcagaaggtcggtaataacaaacttctccgagctaaaggaggatgttcaaacccattgcaaggaagctaaaaaccttgaaaaaaagattagatgaatggctaactagaataaacagcatagagaagaacttaaatgacctgatggagctgaaaaccatggcacaggaactacgtgatgcatgcacaagcttcagtagccaatttgatcaagtggaagaaagagtatctgtgattgaagatcaaatgaatgaaatgaagcaagaagagaagtttagagaaaaaaagagtaaaaagaaatgaacaaagcctgcaagaaatatgggactgtgtgaaaaggccaaatctacatctgattggtatacctgaaagtgatggggagaatggaaccaagctggacaacactcttcaggatattatctaggagaacttcccccacctagcaaggtaggccaacattcaaattcaggaaatacaggaaatacagagaacaccacaaagatactcaccgagaagagcaactccaagacacataattgtcagattcaccaaggttgatatgaaggaaaaaatgttaagggcagtcagagagaaaggctttaaaccaacaaagatcagaagagacaaagaaggccattacataatggtaaagggatcaattcaacaagaagagctaactatcctaaatatatatgcacccaataccggaggacccagattcataaagcaagtcctgagtgacctacaaagagacttagactcccacacaataataatgggagactttaacaccccactgtcaacattagacagatctatgaggcagaaaattaacaaggatatccaggaattgaactcagctctgcaccaagtggacctaatagacatctacagaactctccagcccaaatcaacagaatatacattcttctcagcaccacatcgcacttattccaaaattgaccacgtagttggaagtaaaacactcctcagcaaatgtaaaagaccagaaactacaacaaactgtctatcaaaccgcagtgcaatcaaactagaactcaggattaagaaactcactcaaaaccgctcagctgcatggaaactgaacaacctgctcctgaatgactactgggtacataacgaaatgaaggcagaaataaagatgttctttgaaaccagaacaaagatacaacatgccagaatctctgggattctgtag

SEQ ID NO: 16200 - DNA, 656 bp, Homo sapiens
  SIMILAR (205)..(2): 951254mologous to Homo sapiens PTB domain adaptor protein CED -6,accession number AF200715,Smith-Waterman Score=332.
cttttttttttttttggccttcagatttcttgataggccttgcaaactttagtttccttacagcatctctcacaacttctgttccttttggctgttccacttctgtactgccaagaaactttgcattatagggaatgaaatgttttgataaagcttcaggtgtatgcatccatgttttgtctttcttcctgctaaaagcacggttccatgatgaggatcagccaaataaatgttcagttccacgacttaaatcctgggtatgctcaaatatagttgaaagaaaatggacacttgactttatatagcttctatcatacagttgccatcagaattcttcctatcagtttctctcctatgtatatcagatggaatcataaataacttggcacgctagttccagctgcagcgtccagcttcctgttcaagtcccattcaacatcgtaaacacattccaagaaaaccagcctgcccagagttccctcccgcacacagggaagtcagcgcggcagccgcaggagcctcagaatagagagaactgcctgctccggattctgatccgtgtggcgagtgaggccacgagaaggtggacccggccaagcgaatttagcagtcggagcgagaacccaagggctcatcacccccgccgcgccttgcgc

SEQ ID NO: 16201 - DNA, 1203 bp, Homo sapiens
  SIMILAR (1885)..(2523): 691254mologous to Mus musculus Pro-Pol-dUTPase polyprotein,accession number Y12713,Smith-Waterman Score=785.
ttttttactccttcttgctccctttcccacgcagaactttactaaaggtcagtaagaatgggctgttgtgttttctctcaaatcctatacagaagtccttaattccgaggtaaacatctgaatggaacaaatgagtatgatctgggggttaaggcaattttcaagtgtgtgtatgtgtgtgtctgttttaaggcataacaaagtccagagattaaggccgagttaaaaaacaaatgaggacaaaccaatgaggacaaaccagtccgctgaggtgcggccagagcagcagcaactgtgtctgctttcttgataaaggctgtgaagacggcacgttttactcttattcgtgtatttcttttgacactttacccctctatgaagcctcagaggtgttttaaaattgtgttaggaaacacacagagataagaaaaggcaaatgggtctgaactagtgtctcagggaagagtctggaaaggaaacgcggcgcgagtggggtgggagagggggcctgtggttttgcttctgtccgggctaaagactgagtaaggtagggcccctccttctgcggatgggtttctctctcattccaccctccacccacctccggttccgcgtgcacgcgcgagatagtccagtgggcccacagataaccgaccattcagagatttaaagaaggaaagtcagcgagcttgaacacaggcgtcccgtgtggaaatgtccaaggagaccgccagaagtgcgcaagccggagtcggctagagtttccttctcaccgagagggggagcccggcgttcccggccgggagcgacccggagtccccagccccgcgtcccagctgccgccagcgccagttttggattcggcggattaggaagaggagggaggggggagagagcgcgaagagggaggggaccgaagctggagggtcccgagtccagcgccgtgttggcgtagagaaactttccctctcggcctcggagacggcgccccggccgtgccggagtggagatcgccaggctcggaggaaccggcagctctccacgcccctgcccgaagcctgacccgactgcctctctcagtgagttatttatgattccatctgatatacctaggaggagaaactgatagaagaattctgatggcaactgtatgatagaagctatataaagccaagtgtccattttctttcaactatatttgag

SEQ ID NO: 16202 - DNA, 2716 bp, Homo sapiens
  SIMILAR (967)..(425): 441254mologous to Homo sapiens px19,accession number AF153607,Smith-Waterman Score=242.
atgaacgtgaaactgaaaagcaaagtaataccatcaacacttggcaaaatagaacctctccgctgtcagcgccagaaatacttacctgctgagaaaaggaaaagcacaacactgactttaccccgcgacgcttttaaaaaatccaaaatacccagcgcgatggggatgggattgcatcaaagctctcagagcacagctgcaaagggtaaagcaaagctagagctctactctggacctatcactctagacagtttctctgtgaggggcagttttatacacatttcaggtggcagaataaattcaatccttgtttctccatcttatcgagtagtagaagttagttacattctctttgaactcatcatgaattccatgaagactgaagaaaacaagtcatttaggcgctatggaagatgaccagaggactaggacctgaagtttcaaaggatactgtcatgaaggcaggacacatgctggacacacctgttggatccattgtctatctggcataagaaagtgtagcagcacctttaagcttaaaagtgaagtcaacaagcatgaaacagcccttgaaatgcagaatccaaatttgaacaataaagaatgttgtttcacctttacgttgaatggaaactccagaaaattagaccgtagtgtgtttacagcatatggtaaacccagcgagagtatctactcagccctgagtgctaatgactatttcagtgaaaggataaagaatcagtttaataagaacattattgtttatgaagaaaagacaatagatgggaccatataaatttaggaatgccccctcaagtgccctgccctagtgattcctcattttaaaattaccatttggtccaaagaaagagtagcaaagaagatggacacatattacgcccaatgtgaaaatcccaaacatggaatgcattctttttcatgttgttgctataggaaggacaagaaagaagattgttaagatcaacgaacttcatgaaaaaggaagtaaactttgtatttatgccttgaagggtgagactattgaaggagccttatgcaaggatggccgttttcggtctgacataggtgaatttgaatggaaactaaaggaaggtcataagaaaatttatggaaaacagtccatggtggatgaagtatctggaaaagtcttagaaatggacatttcaaaaaaaaaaagcattacaacagaaagatatccataaaaaaattaaacagaatgaaagtgccactgatgaaattaatcaccagagtctgatacagtctaagaaaaaagtccacaaaccaaagaaagatggagagaccaaagatgtagaacacagcagagagcaaattctcccacctcaggatctaagccattatattaaagataaaactcgccagacaattcccaggattagaaattattacttttgtagtttgccccgaaaatataggcaaataaactcacaagttagacggaggccgcatctgggtaggcggtatgctattaatctggatgtccaaaaggaggcaattaatctcttaaagaattatcaaacgttgaatgaagccataatgcatcagtatccgaattttaaagaggaggcacagtgggtaagaaaatattttcgggaagaacaaaagagaatgaatctttcaccagctaagcaattcaacatatataaaaaggacttcggaaaaatgactgcaaattctgtttcagttgcaacctgcgaacagcttacatattatagcaagtcagttgggttcatgcaatgggacaataatggaaacacaggtaatgctacttgctttgtcttcaatggtggttatattttcacctgtcgacatgttgtacatcttatggtgggtaaaaacacacatccaagtttgtggccagatataattagcaaatgtgcgaaggtaaccttcacttatacagagttctgccctactcctgacaattggttttccattgagccatggcttaaagtgtccaatgaaaatctagattatgccattttaaaactaaaagaaaatggaaatgcgtttcctccaggactatggcgacagatttctcctcaaccatctactggtttgatttatttaattggtcatcctgaaggccagatcaagaaaatagatggttgtactgtgattcctctaaacgaacgattgaaaaaatatccaaacgattgtcaagatgggttggtagatctctatgataccaccagtaatgtatactgtatgtttacccaaagaagtttcctatcagaggtttggaacacacacacgcttagttatgatacttgtttctctgatgggtcctcaggctccccagtgtttaatgcatctggcaaattggttgctttgcatacctttgggcttttttatcaacgaggatttaatgtgcatgcccttattgaatttggttattctatggattctattctttgtgatattaaaaagacaaatgagagcttgtataaatcattaaatgatgagaaacttgagacctacgatgaagagaaaggtaaacaagagtcatcacttcaagatcatcagattgaacccatggaatgttagaaaagagatgctgtcttcaagaaaatatgccaataattcctggcaaagatttcatgacaaagacacttaaagcaattgcaacaaaagtgaaaattggcaaatgagacctaattaaatctttctgcacagc

SEQ ID NO: 16203 - DNA, 921 bp, Homo sapiens
  SIMILAR (54)..(575): 1001254mologous to Homo sapiens SSX3,accession number U90840,Smith-Waterman Score=929.
ctgattttctctttggattcttccaaaatcagagtcagactactccctgtgccatgaacggagatgacacctttgcaaggagacccacggttggtgctcaaataccagagaagatacaaaaggccttcgatgatattgccaaatacttctctaaggaagagtgggaaaagatgaaagtctcggagaaaatcgtctatgtgtatatgaagagaaagtatgaggccatgactaaactaggtttcaaggccatcctcccatctttcatgcgtaataaacgggtcacagacttccaggggaatgattttgataatgaccctaaccgtgggaatcaggttcaacgtcctcagatgactttcggcaggctccagggaatcttcccgaagatcatgcccaagaagccagcagaggaaggaaatgtttcgaaggaagtgccagaagcatctggcccacaaaacgatgggaaacagctgtgccccccgggaaaaccaactacctctgagaagattaacatgatatctggacccaaaaggggggaacatgcctggacccacagactgcgtgagagaaagcagctgggtgggtttatgaagagatcagcgaccctgaggaagatgacgagtaactccccttggggatatgacacatgcccatgatgagaagcagaacgtggtgacctttcacgaacatgggcatggctgtggacccctcgtcatcaggtgcatagcaagtgaaagcaagtgttcacaacagtgaaaagttgagcgtcatttttcttagtgtgcccaagagttcgatgttggcgtttccgctgtattttcttgcagtgtgcccattctggttagacattagcgttttcgttgaatgagcaagacatgcttaatgcatatttccggcttgtgtaacccatgcacctaccctcag

SEQ ID NO: 16204 - DNA, 778 bp, Homo sapiens
cagaagtccattatctcgaagtcgtagacacaccttccaagcatcccaatctttggtttctttaatgacaatagcatttaataatccttttcctcttacggcagttacaacatcagaaggtagcttcatgagttcatttctcaagataatgcccaatttgtctgcattttcagcaaggttttcttcttctaaaacctcaagggctgcgatggccactcggcagcctagtggattgccaccgtatgtggacccatgctcccctggcttaatggtcagcatgatgtcatcatcacacagcactgcagacacagggtataagcccccagaaagggcctttccaaggaggactatatcaggtctgacattttcataatcaacagccagccatctaccagttctggccaatcctgtctgtatttcatcagcaataaagagaacctggtgcctggtgcagagctctcgcactcccattaggtaacctggatccggaacaacaacgcctgcttcaccctgaattggttctaccatgaacgcagccacatttggatcctgaagagcacgctccagtgcgggcagatcattatagggaatgatgtcgaatcccggcataaatggtccaaaaccatcgtaactggttgggtctgtggaactggagatagcagacaacgtcctaccccagaagttcccagctgcaaaaacaatctttgctttgtatttctgaatgcccttcacggtatagccccacttacgagctagtttacaggcagtctctccagcc

SEQ ID NO: 16205 - DNA, 830 bp, Homo sapiens
  SIMILAR (431)..(829): 631254mologous to Homo sapiens SSX4,accession number U90841,Smith-Waterman Score=354.
ataagcacatgaaaagatgttcaacactcatttgcttcactagatgcagaataacaccacgatgaggtatcactacacacttattacaatagctaaaataaaagacatagtgaccaccgtatgtggacccacgttcccctggcttaatggtcagcattatgttatcattccacagcaccgcagacacagagtatcagcccccagaaagggcctttccaaggaggactatatcaggcctaacattttcatgatcaacagccagccatctaccagttctggccaccaccccgcccagagcaccaaaggtcctgaggctggaaagactcaggctgtttctctcgcaggtgagactgctcccagtgccatgaacgggctgaatggcagacatgcctagctgagtccctgccataattccttttttttttttttccaggccttcgatgatattgccaaatacttctctaagaaagagtgggaaaagatgaaatgagccaccgtgccaggcccaagcttgcctcttaagaaataaacattttgctcctttctaggtttcaaggtcaccctcccacctttcatgcgtagtgtctctctagagtttggaaatctttaccaacaaagaaaaattctgatgtagctctaaagcactgtagaaatgtcactgatactgtttatctgcgaccttcacattgtaaagatcatgcccaagaagccagcagaggaagaaaatggtttgaaggaagtgccagaggcatctggcccacaaaatgatgggaaacagctgtgccccccgggaaatccaagtaccttggagaagattaacaagacatctg

SEQ ID NO: 16206 - DNA, 921 bp, Homo sapiens; identical to SEQ ID NO: 16203
  SIMILAR (54)..(575): 1001254mologous to Homo sapiens SSX3,accession number U90840,Smith-Waterman Score=929.

SEQ ID NO: 16207 - DNA, 778 bp, Homo sapiens; identical to SEQ ID NO: 16204
  SIMILAR (1110)..(559): 1001254mologous to Escherichia coli acriflavine resistance protein,accession number M96848,Smith-Waterman Score=930.

SEQ ID NO: 16208 - DNA, 822 bp, Homo sapiens
  SIMILAR (429)..(821): 641254mologous to Homo sapiens SSX4,accession number U90841,Smith-Waterman Score=355.
aagcacatgaaaagatgttcaacactcatttgcttcactagatgcagaataacaccacgatgaggtatcactacacacttattacaatagctaaaataaaagacatagtgacaaccgtatgtggacccacgttcccctggcttaatggtcagcattatgttatcattccacagcaccgcagacacagagtatcagcccccagaaagggcctttccaaggaggactatatcaggcctaacattttcatgatcaacagccagccatctaccagttctggccactcccccgcccagagcaccaaaggtcctgaggctggaaagactcaggctgtttctctcgcaggtgagactgctcccagtgccatgaacggagtgaatggcagacatgcctagctgagtccctgccataattccttttttttttttttccaggccttcgatgatattgccaaatacttctctaagaaagagtgggaaaagatgaaatcagccaccgtgccaggcccaagcttgcctcttaagaaataaacattttgctcctttctaggtttcaaggtcaccctcccacctttcatgcgtagtaactctctagagtttggaaatctttaccaacaaagaaaaattctgatgtatttctaaagcactgtagaaatgtcactgatactgtttatctgcgaccttcacattgtaaagatcatgcccaagaagccagcagaggaagaaaatggtttgaaggaagtgccagaggcatctggcccacaaaatgatgggaaacagctgtgccccccgggaaatccaagtaccttggagaagattaacaaga

SEQ ID NO: 16209 - DNA, 450 bp, Homo sapiens
  SIMILAR (643)..(834): 581254mologous to Escherichia coli K12 putative glycoprotein,accession number AE000239,Smith-Waterman Score=138.
atgattgtgaagcctccccagccatatgtaactagagttcattctcagatctatccagggtgtccttcgaatggctccccaaatccaaccaaagcctcttcttacgaagtcatcgacatctgtctctcaggccaggcttcttcaaaacaaaaggcgcttctccctcgccagtgctcaggctcagcaaaggctcaggcagaacaagcccaaatctcagtgtcttacaaacagcaaagaatggataaccagttctcttcattcaccattcccagctatactcctctggagtgtatccggaaccagtgggactgctttgaccctcagaatctggaggaaaagcacctcatagccctctgcacaaaggtgagtgtgactggcatggccctggagacggccgcccacgctggttttgcacctctggtgaccatcaaagctggcatcacaacttga

SEQ ID NO: 16210 - DNA, 566 bp, Homo sapiens
  SIMILAR (249)..(560): 401254mologous to Homo sapiens Protein encoded by the endogenetic fragment of HERV-W,accession number B07702,Smith- Waterman Score=205.
ccacaatttttacgagggttactcaaagtttgccaacaggggggagatatgaaggcatagataagggcacttaactcctattctccggattttctctacttcatgggtacctaccgcattggtacctatgtcacttgccaaggtcaaggtcactgggtctcagggacaaaaggtggaaagtgaagggggacacggactttctctctccgtcacaccctgagtatttgctgaaagaagagaatgatggacacctctgctccctgtctttcagaatgggcaaccagttctcttcaccacttccagcttatactcctctggagtgtatcctgaaccattgggacgggttttacccttagaatctggaggaaaaacacctcatagccctacgcacaaagggttggccaaattatgatttacaggaaggactgagttggcctcaggaaggaaccattcatttcaataccacttggcagttggaacttttctgcagacatgaggacagatggtctgaggccacatatatgcaggctttctatatcttgcaaggcaatcgagaccttggctaa

SEQ ID NO: 16211 - DNA, 1623 bp, Homo sapiens
  SIMILAR (778)..(1593): 1001254mologous to Escherichia coli CG Site No. 18232; alternate gene name hypF,accession number U29579,Smith-Waterman Score=1473.
atggagtgtccggcaaacccggggggtgttcccaccctcgactctagaggatccctcacgttattagaaatcaaccatcggccattagcaacaatgggcgtcgagaaccagacgctggcggtctcttattactacgctgtgcgtcgacgcccgcatcagcatgactatattgcgctctcacgtctctttcatacggtcatgttgtttgatgtaccagttatgacgcggttgatggagagcgaagcgcggcgctttattgcgctggtggatgagttttacgagcgccatgtcaaattagtggtgagtgcagaagtgccgctgtatgaaatttatcagggcgatcggctgaagtttgagttccagcgttgcctgtcacgtctgcaagagatgcaaagcgaagagtatctgaagcgcgagcatttggcggctaaaccagaaaccgtaaaacgcgactggtatgttgttgacgcgaccggtaaaactctgggccgtctggctactgaactggctcgtcgcctgcgcggtaagcacaaagcggaatacactccgcacgtagataccggtgattacatcatcgttctgaacgctgacaaagttgctgtaaccggcaacaagcgtactgacaaagtgtactatcaccacaccggccacatcggtggtatcaaacaagcgacctttgaagagatgattgctcgccgtcctgagcgtgtgattgataatcgcagaggatccctccggcaggcgggttacgcaattcatgatggcgggaataactcaatggcaaaaaacacatcttgcggtgtccaactgcgtattcgtggcaaagtgcagggcgtcggttttcgtccgtttgtctggcagctggcacagcaattaaatcttcacggcgatgtctgtaatgacggcgatggcgtagaagtccggctgcgggaagacccggaaacgtttcttgttcaattgtatcagcactgcccgccgctggcgcgtattgatagcgtcgagcgtgagccgtttatctggtcacaactgcccaccgagttcactatacgccagagcacaggcggcaccatgaatacgcaaattgttcccgatgccgctacttgccctgcttgccttgccgaaatgaataccccaggcgaacggcgttatcgttatccgtttatcaactgtacccactgcggcccgcgtttcaccattattcgcgccatgccttacgaccgcccgtttaccgtgatggcggcgtttccgctatgtccggcctgtgacaaagagtaccgtgacccgctcgatcgtcgcttccacgcccagccggtggcctgcccggagtgtggcccgcatcttgaatgggtaagtcatggtgaacatgcggaacaagaggcggcattacaggcagctatcgcacagttaaaaatgggcaaaattgtcgccatcaaagggattggcggatttcatcttgcctgcgatgcacgtaacagtaacgcggtggcgacacttcgggcgcgcaaacatcgcccggcgaaaccgctggcggtcatgttgccagtggctgacggtttaccagacgctgcgcgccagttgcttaccacgcccgccggcgccggattgtggcttgggtggaagtaa

SEQ ID NO: 16212 - DNA, 480 bp, Homo sapiens
  SIMILAR (334)..(1041): 991254mologous to Escherichia coli tRNA nucleotidyltransferase,accession number M12788,Smith-Waterman Score =1237.
tgtaatgtgtgttgtgatgcccagcacatttgttggatggtacaaagggaattatgatacttaatcaaaaagccatacaagccagataacattaaggcttaacggtaacaataggtgattcagttaggaaattaatgttagagatcggttttccttgtggaaatcagtggtattcaaatgcctgaattggctacccggttttagagctgctctccatgtatgagcaggacataggattcactctctggaatgcttctgtaggcaggactttgaaatgaccctgtcctcagcctggaggatgcggtattctgattgtctggtgctgtgtcaactgggcctgcctctgggatagtgttgtggctgccccacgagaaccctatatgccaggtgagcttgaagcacctcaaagacagagcactgaagctccatgacacagggctattcagctatcattgcccctgtttgccagcacctctgtct

SEQ ID NO: 16213 - DNA, 1581 bp, Homo sapiens
  SIMILAR (420)..(596): 321254mologous to Rhodopseudomonas palustris ferredoxin,accession number U75364,Smith-Waterman Score=67.
atggggcgctggcccatgccacgtcaagctagccgaccccactctatcgactcgataaatggtcatcaccatcatccggagtggaattttaatgtggtgaaaactggcgacacgctggatatcggcaacggcaaacagctcatttttgtcgaaacaccaatgctgcactggccggacagcatgatgacttacctgacaggcgacgcggtgctgttcagtaacgatgctttcggtcaacactactgcgacgagcatctgttcaacgatgaagtggatcagacggagcttttcgagcagtgccagcgttactacgccaatatcctgacgccgttcagccgcctggtaacaccgaaaattaccgagatcctgggctttaacttaccagtcgatatgatagccacttcccacggcgtggtatggcgcgataacccgacgcaaattgtcgagctgtacctgaaatgggcggctgattatcaggaagacagaatcaccattttctacgacaccatggtgaataacacccccatgatggctgacgctatcgcccaggggattgccggaaaccggcccacgccttgcgggggaaaatttcaacgtcggcccgaaacgataaacacgaagatcctgacctattgtctttccgctcagaaaggggagcttgattggccgccctctagaggatccccggcggcttgcccgactcatgcgctgatttgtgtcgatcgtaataaacttgaacaactgagcgcagaaaaacgccgccgaattcccggaaatattcgtagaatacggagcgggcggtatcgccgacctgtgactgccggatgcgacgctgtcgtgtccggcagggcgggttacgcaattcatgatggcgggaataactcaatggcaaaaaacacatcttgcggtgtccaactgcgtattcgtggcaaagtgcagggcgttagttttcatccgtttgtctggcagctggcacagcaattaaatcttcacggcgatgtctgtaatgacggcgatggctgggccactgctgattcctctgtgtcgtcttgttctcaaactgatttgtcgtttgattctcaagtgtctcttcccattagtgttcacactcagacatttttgcccagctctaaggtaacttcatctatagctgctcagactgatgcatttatggacacctgtttccagtcaggtggggtctccagagaaactcaaaccagtgggatagaaagtccaacggatgaccatgtacagatggaccaagctggaatgtgcggagacatttttgagagtgttcattcatcatataatgttgctacaggcctgcgacagcctggtcttactggtccccatctcctgcggccgactggcggtaagaacgggcttgtcagaactctccgtcagggacctgagaaggaacaacggaacgcgttcggaacggcttggactcccaagactcacctgattagtggccacaccgggagaattgaagcggcagtagccggcggagacgcccgaccagaaggccggctgctagggagcagacagttgaaccgcttgccagacgccgaaacccagtga

SEQ ID NO: 16214 - DNA, 1099 bp, Homo sapiens
  SIMILAR (2)..(214): 1001254mologous to Escherichia coli ATP synthase gamma subunit (atp-7),accession number J01594,Smith-Waterman Score=337.
gacatcactacaatctggctcggacccgggatcgtataaacttgaacaactgagcgcagaaaaacgccgccgtacggcgctgatgttctaaaaatcttagagaactgttctggcatcaaaggaattcccggaaatattcgtagaatacggagcggggcggtatcgccgacctgtgactgccggatgcgacgctgtcgtgtccggcagggcgggttacgcaattcatgatggcgggaataactcaatggcaaaaaacacatcttgcggtgtccaactgcgtattcgtggcaaagtgcagggcgtcggttttcgtccgtttgtctggcagctggcacagcaattaaatcttcacggcgatgtctgtaatgacggcgatggcgtataagtccggctgcgggaagacccggaaacgtttcttgttcaattgtatcagcactgcccgccgctggcgcgtattgatagcgtcgagcagcacaggcggcaccatgaatacgcaaattgttcccgatgccgctacttgccctgcttgccttgccgaaatgaataccccaggcgaacggcgttatcgttatccgtttatcaactgtacccactgcggcccgcgtttcaccagacactagaggaggagagctggtcgattccgttctccgttatgctggtcgttccgctggggattatcgatgcgttgctggctgccaccttccgtggcctgaccaatgacgtttacttccaggtaggcctgctcacccccattgggttgtcggcgaagaacgcgatccttatcgtcgaattcgccaaagacttgatggataaagaaggtaaaggtctgattgaagcgacgcttgatgcggtgcggatgcgtttacgtccgatcctgatgacctcgctggcgtttatcctcggcgttatgccgctggttatcagtactggtgctggttccggcgcgcagaacgcagtaggtaccggtgtaatgggcgggatggtgaccgcaacggtactggcaatcttcttcgttccggtattctttgtggtgaatcgccgccgctttagccgcaagaatgaagatatcgagcacagccatactgtcgatcatcattga

SEQ ID NO: 16215 - DNA, 804 bp, Homo sapiens; identical to SEQ ID NO: 16048
  SIMILAR (7)..(1101): 631254mologous to Bacillus sp. Beta- fructofuranosidase,accession number AB010272,Smith-Waterman Score= 1139.

SEQ ID NO: 16216 - DNA, 373 bp, Homo sapiens
  SIMILAR (1)..(417): 961254mologous to Escherichia coli K12 putative regulator,accession number AE000200,Smith-Waterman Score=698.
ataatgagcagcattcttggctttaatcagttttcccattagtatttcaagggacctttggtctttacacatccgcagagtaagatggaattgtgctaagcacatattatcatttttattggcatcatttctagattctagaaggcccactgccagcaaacactggtgacctctgtttgcctttacaagtacaacctgatcgagagcaggttcgctgggccctttttaaaaaataagacttatctattaaattcaaggatatcattgcatattgaacaatgtgacttatataaaatagccaagtctcaagggtcagaggaattgtttctaatagatctgcctttatatgtcatgtgtagaggagcagccaaga

SEQ ID NO: 16217 - DNA, 3636 bp, Homo sapiens
  SIMILAR (34)..(531): 1001254mologous to Escherichia coli K12 putative regulator,accession number AE000200,Smith-Waterman Score=868.
atgcccatcaatgatagactggctaaagaaaatgtggcacattacaccatggaatactatgtggccataaaaaagaatgagatcatgtcttttgcagggacatggatgaagctggaaaccatcattctcagcaaactaacacaggaacagaaaaccaaacaccacatgttctcactctcccatgctcccccaagcctagccatagaaactagaatcctcttcccaagatacagaaaatgtggaagtgactttgaaatgggtaacaggcagaggtttgtacttcctagagacttggagagctcagaagacaggaagatgtgggaaagtttggaacttcctagagacttgttgaatggctttgaccaaaatgctgatagtgatatggacagtgaaggccaggttgaggaggtctcagatggaatgagaaatttactgggaattagagcaaaggtaacccttgctatgccacagcaaagaatttggctgtattgtgcccatgtcctagggctttgtgaaagtgatgatttaggggacatggatgaagctgaaaaccatcattctcagcaaactaacacaggaacagaaaaccaaacacctcatgctcttactcataagtgggagttgaacaatgagaacacatggacatagggaggggaacatccctttacttctccatgctaccctaacgactacccaaacagccaggcttgcatgtggacgctccgagcccccaccggttatatcattcagataacatttaacgactttgacattgaagaagctcccaattgcatttatgactcattatcccttgataatggagagagccagactaaattttgtggagcaactgccaaaggcctatcatttaactcaagtgcgaatgagatgcatgtgtccttttcaagtgactttagcatccagaagaaaggtttcaatgccagctacatcagaggtatgtaaaccaaaggcaacgccaaccttctgcttttatttaacatgttctcttaccaggtatctgttgcaaaaagcatctctattccagagctcagtgctttcacactctgctttgaagcaaccaaagttggccatgaagacagtgattggacagctttctcctactcaaatgcatccttcacacaattgctcagttttggaaaggccaagagtggctactttctatccatttctgattcaaaatgtttgttgaataatgcattacctgtcaaagaaaaagaagacatttttgcagaaagctttgaacagctctgccttgtttggaataattctttgggctctattggtgtaaatttcaaaagaaactatgaaacagttccatgtgattctaccattagtaaagttattcctgggaatgggaaattgttgttgggctccaatcaaaatgaaattgtctctctaaaaggggacatttataactttcgactttggaattttaccatgaatgccaaaatcctctccaacctcagctgtaatgtgaaagggaatgtagtcgactggcaaaatgacttctggaatatcccaaacctagctctgaaagctgaaagcaacctaagctgtggtgagtttgtagcgtattcctttttttttttttttttagcattattctatgtggggaccctctgtcaaggtagggagcccacaccgtgctctggaatctctttgctttctacttgcaattctgaggtaaaagtacagagcaaggtggcagaatgggtaagtgagcttgtaacttttcttttttaaaaaaattctttaacttctgggccaaatgacaagcaaccaatgaacaacaacaacagttctatccgaaatgtttccctaggttggtgctttgggcccttctagtttacaatgctaccaacaatactaatttagctcctaaaaaataatgagtccttggatgaaggcttgaggctacatacagtgaatgtgagacaactgggtaagtgactaatttttttataatatgcattttatacaactgtatattcagaaccttctgaatacgttcttccttgtccagacaagcctggcttttctgcttctcggatatggtaatattttcactgactcttgccagcaaagctacatgttatcagccttccctccaactgtttaagtaagtgagcagttttcctttatttctcaaggacaaaatgacatgacttcaagaacttaacctcagccaatattaccaacattgtggaacaggtcaaaagaattgtgaataaagaagaaaacattgatataacacttggctcaactctaatgaatatattttctaatatcttaagcagttcagacagtgacttgcttgagtcatcttctgagtaagtattttttttttcctggagagtaaattttattggataatgatgttaatcacatgtgaatattacaactcggaacttggctctcagcgtatcatccctgttaccagggacaaatgcaatttcaaattttagcattggtcttccaagcaataatgaatcgtatttccaggtaatgagccagtggtttctttcattttaattaattagttagacatataaaccaaacttacttgaggaatttaagtccagaaggattctgtattaggttaggaaggagcacagtttacttttcttcaacaaaactggacttttccaggtaagcacattcattaaattattgtttttcaactgcaaatgaagtttctttcaagtacaacctgatcgagagcaggttcgctgggccctttttaaaaaataaaacttatctattaaattcaagataattggaaacattactatccagaatctgaaggatcctgttcaaataaaaatcaaacatacaagaactcaggtaagaaaacgctcccaatagcatttggacagaagtggactatttaatatacaggttataccggtttgcagaaagcttgggaaagaaggtaatgatgaaaaacaatgtgtaacgacttccagaagtaatgctgcatttttcctgttgcatttcttccttctggcaacctttacctggatggggctagaagcaattcacatgtacattgctctagttaaagtatttaacacttacattcgccgatacattctaaaattctgcatcattggctggggtaagcctcttaaaatttttttggttttgtttttccctcatgaaaattgccaagtctatggaaaagaaagttatgggaaagaaaaaggtgatgaattgtaagtaataaaaactttttgtgatgagtagatatcctttgtttcctgaagtggagtcatgttttttctgaacattgccatgttcattgtggtaatggtgcagatctgtgggaggaatggcaagagaagcaaccggaccctgagagaagaagtgttaaggaacctgcgcagtgtggttagcttgacctttctgttgggcatgacatggggttttgcattctttgcctggggacccttaaatatccccttcatgtacctcttctccatcttcaattcattacaaggtaagataaattgtacatgaatagtctctgctttctaattttgtcatattttctgtttccattaatgagaattgggatgttttatttttcccagcatgggtcccctgtcaggaggg

SEQ ID NO: 16218 - DNA, 720 bp, Homo sapiens
  SIMILAR (368)..(544): 571254mologous to Homo sapiens zinc finger protein FPM315,accession number D88827,Smith-Waterman Score=123.
ctaccagggaattgacccttcgggtttccttcgatggacccttcccagagaaacgttcatttcactgtgggaccagtgatttctctccaaaccttctcgtagggaatccaccctcatggggccccgggtcgtgatccaaatgagcgcttctccttgagccttggagtaactggagcgggtggggaccacctttaaatctgttacgacccggtcagtgattcttaaacctggctgatccaatggccgcttgatacaatggtgtcgttcgggaaacgcagccctaacgttggtcctaagctgacaaattggtctgtggacgccaaacttccgtgctaggactttctgcgtgtggaccgggggcctagtcctgtgcttctgagggttctgcttccaagaggctgctggtgcccgggacaccagcagtttcgccatgggtgtttcgccatgggagtttcgccatgggtgactttggcctgagatgcgctccatggagcagattctggagttgctggtgttggaggagttcctgactatcacgggccagtgattttttgttgttgttgttgttgttgtcttctctggaaccttcatcctccagatttccccccagtgcagtgaagagtgtgctattgcttttggtttccacggggaggcagtgtcgctgtcatagtgtccgctcgcgaagatctgcagcttcactcctgaagccagcaagaccat

SEQ ID NO: 16219 - DNA, 1452 bp, Homo sapiens
  SIMILAR (268)..(678): 391254mologous to Homo sapiens HSPC240,accession number AF151074,Smith-Waterman Score=205.
tgggaagagaaggaaaacaaagaatacctaaaatctctatttgaaatcttgattctgatgggaaagcaaaacatacctctggatggacatgaggctgatgaaatcccagaaggtctctttactccagataactttcaggcactgctggagtgtcggataaattctggtgaagaggttctgagaaagcggtttgagacaacagcagttaacacgttgttttgttcaaaaacacagcagaggcagatgctggagatctgtgagagctgtattcgagaagaaactctcagggaagtgagagactcacacttcttttccattatcactgacgatgtagtggacatagcaggggaagagcacctacctgtgttggtgaggtttgttgatgaatctcataacctaagagaggaatttataggcttcctgccttatgaagccgatgcagaaattttggctgtgaaatttcacactatgataactgagaagtggggattaaatatggagtattgtcgtggccaggcttacattgtctctagtggattttcttccaaaatgaaagttgttgcttctagacttttagagaaatatccccaagctatctacacactctgctcttcctgtgccttaaatatgtggttggcaaaatcagtacctgttatgggagtatctgttgcattaggaacaattgaggaagtttgttcttttttccatcgatcaccacaactgcttttagaacttgacaacgtaatttctgttctttttcagaacagtaaagaaaggggtaaagaactgaaggaaatctgccattctcagtggacaggcaggcatgatgcttttgaaattttagtggaactcctgcaagcacttgttttatgtttagatggtataaatagtgacacaaatattagatggaataactatatagctggccgagcatttgtactcctgcagtgcagtgtcagattttgatttcattgttactattgttgttcttaaaaatgtcctatcttttacaagagcctttgggaaaaacctccaggggcaaacctctgatgtcttctttgcggccggtagcttgactgcagtactgcattcactcaacgaagtgatggaaaatattgaagtttatcatgaattttggtttgaggaagccacaaatttggcacaccaaacttgatattcaaatgaaactccctgggaaattccgcagagctcaccacggtaacttggaatctcagctaacctctgagagttactataaagaaaccctaagtgccccaacagtggagcacattattcaggaacttaaagatatattctcagaacagcacctcacagctcttaaaagcttatctctggtaccctcagtcatgggacaactcatattcaatacgtcggaggaacaccatgctgacatgtatagaagtgacttacccaatcctgacacgctgtcag

SEQ ID NO: 16220 - DNA, 1056 bp, Homo sapiens
  SIMILAR (940)..(1194): 1001254mologous to Escherichia coli peptidyl-tRNA hydrolase,accession number X61941,Smith-Waterman Score=431.
atgcgtcctcccccagggctcctaatatgggctctgggcagcggactccccatgaatgcagagtcagaagggagccacaatggccagtctctgcagatgtcccatgagctgacaccatgggactatcggcaccatcgtggcctgagagggtcggggctatatcaggtgtcttaccccctgttaacattttaccacatttataggtttttttctgatacacttgagaccggcgctctagcgccggcgggatcgacggtcagcatagcgaaagaacgcgctacctgcggccgaaggtatagcgccgctgcgggccctgtgagagctgagaagacgacggcggccgaggaggcccaattccgaggctcggccccgtcagggtccgcgctggcggtgtgcgcgtacctgctccgaagcgtctccgctgactgccagtcggtagcgcgactggatgcggggcccacgtgccacgcagacgcccctcggcgcctcccgctcttgctctgcggcccaacgagcgcgttcctgccgcgggacagccttgcagagaaacgcggtcttacacacgcactggcctcccgggtgccagcgccagcaggggcggccagccaccgcgggagcgggctagagtgtggcccggaggcagcccgaggcttcgcgacgtttttgcgacagccgcggccgtgttccgcgagtgccctccctcctcctctctttgaggagccctgcagagctggccgtgctacctcccgaggcagtgtggggccacagtgcagaacttctgtggtgtccccacctgtatgcggaagagcacatggtccaacttggtcgtcttcaggttcccacaggatccatccagatgcgcaaactaatagcttgactgctgtactgcatgcactcaatgaaatgatggaaaatattgaagttcatcatgagttttggtttgaggaagccacaaatttggcaaccaaacctgatattcaaatgaaactccctgggaaattccacagagctcagcaaggcaacttggaatctcaactaacctcagagttactgtaa

SEQ ID NO: 16221 - DNA, 399 bp, Homo sapiens
  SIMILAR (180)..(371): 1001254mologous to Homo sapiens dJ774I24.2 (NEURONAL MIGRATION PROTEIN ASTROTACTIN),accession number AL031290,Smith- Waterman Score=354.
gaacactcagagccaccaatcggggtgcagattgtagattacctcctccgtcaagagaaagtcactgacaggatggaccactccaaagtggagacagaaacagtgctgagctttgtggacgacatcatctctggagcaaagtctccttgtgcaatgccatctcaggtgccggacaagcagctcaagaaatagcagacaagatctacaatctcttcaatggctacactagtgggaaggagcagcagaccgcctacaacaccctcctggatctgggttcccccaccttacaccgggtcctctaccactataaccagcactatgagagttttggggaattcacctggcgatgtgaggatgagttaggtcccaggtaatcaataaactaaatcaaccctttta

SEQ ID NO: 16222 - DNA, 1541 bp, Homo sapiens
  SIMILAR (2)..(1291): 961254mologous to Mus musculus astrotactin,accession number U48797,Smith-Waterman Score=2226.
tgaggagtcctgttctatctggtacccaaacaagcaggtccagcggcgactctggctggagtatgaagacatcagtaaaggcaactccccatcagatgagtctgaggagcgggaaagagaccccaaggtgctgacattcccagaatacatcaccagcttgtcagactccggcaccaagcgcatggcggctggagtccgcatggaatgccagagcaagggacgatgcccctcgtcctgccccctgtgtcatatgacatccagccctgacacccctgctgagccggttctgctggaggtgaccaaagcagcccccatctatgaactagtgaccaacaaccagacccagaggctcttgcaggaggctaccatgagctctctctggtgctcagggactggagatgtcatcgaggactggtgtcgatgtgactccactgcttttggagctgatggactccccacctgtgcgcctctcccacagcctgtgctgagactctccacggttcacgagcccagcagcactcttgtggtcctggagtgggaacactcagagccaccaatcggggtgcagattgtagattacctcctccgtcaagagaaagtcactgacaggatggaccactccaaagtggagacagaaacagtgctgagctttgtggacgacatcatctctggagcaaagtctccttgtgcaatgccatctcaggtgccggacaagcagctcaccaccatctctctgatcatacgatgcctggaacctgacaccatttacatgttcacgctgtggggagtggacaacacaggacggcgctccaggccaagcgacgtgatcgtgaagaccccatgccccgtggtggatgatgtcaaggctcaagaaatagcagacaagatctacaatctcttcaatggctacactagtgggaaggagcagcagaccgcctacaacaccctcctggatctgggttcccccaccttacaccgggtcctctaccactataaccagcactatgagagttttggggaattcacctggcgatgtgaggatgagttaggtcccaggaaagctggtctcatcctttcccagcttggggacctcagcagttggtgcaatggactccttcaggaacccaagataagcttgcggcgcagctcactcaagtacctggggtgccgctacagcgagatcaaaccctacggacttgactgggcggagctcagccgggacctcaggaagacgtgtgaggagcagaccctgagtatcccctacaacgactatggggacagcaaagagatctagcaccataaggccagggagctgctgccagaatgaagtaggaaagaggagggatccatctgggttggtctgtggatttttaatattttttaatggaacatgaaaacctccacagcaacatcgaaaccagggagaaagtgatccttgctccctgtcagaacttcttcagtatgatgtttctccatctgcattgattggggaaatctgccaagccagtggtttcatgcagtgccatatttctttagaggat

SEQ ID NO: 16223 - DNA, 1912 bp, Homo sapiens
  SIMILAR (369)..(971): 811254mologous to Homo sapiens dJ774I24.2 (NEURONAL MIGRATION PROTEIN ASTROTACTIN),accession number AL031290,Smith-Waterman Score=817.
tacatccttcccattcctctctactccctaatcttgctaggtatctagaactgaagggctttgagggggattcgctgcatcttgattttaattgggatcgccagaaaacagtagcaaggggagcaacccctcagatgtttacagctatgacaggacccagcgatggccagctggagggcaggaaggccctcggaccctcagctccggagtgtttgtgacctcaccccacccgcactcgctccgcccaatccgtacagtatattgaaaaagattgggggcctggtgaggggctggaggaggggggagtcttgggtcagcttgtggcctttgactccttcactgtttctttccattttgtgtctgcaggcaactccccatcagatgagtctgaggagcgggaaagagaccccaaggtgctgacattcccagaatacatcaccagcttgtcagactccggcaccaagcacatggcggctggagtccgcatggagtgccacagcaagggacgatgcccctcgtcctgccccctgtgtcatgtgacatccagccctgacacccctgctgagccggttctgctggaggtgaccaaagcagcgcttctcaacactcaatcttttccctgttctcttatgcagctcttgcaggaggctaccatgagctctctctggtgctcagggactggagatgtcatcgaggactggtgtcgatgtgactccactgcttttggaggttgtgtccctgtttcatgttccttcctgtctgcacacaggctgagactctccacggttcacgagcccagcagcactcttgtggtcctggagtgggaacactcagagccaccaatcggggtgcagattgtagattacctcctccgtcaagagaaagtcactgacaggatggaccactccaaagtggagacaggtgagcaccttctacttcatgggcttgtcttgatccaaggtgataaaactaaaacaaagaaaaatgccctgcctcatggctttgctccaggtccccagtatcccagggcaatgcaggaggagcagggagaagaagaagctgttcttcttctccaggaagcagctgttcttctgccactgagggttagagacatacgcagctgctgcttcaggcatagagagctgttgtttctcatgctttttccattccttctcctctgggcagaaacagtgctgagctttgtggacgacatcatctctggagcaaagtctccttgtgcaatgccatctcaggtgccggacaagcagctcaccaccatctactttcagcctttaatagccaggttttcattttcttctaggaaggggctccttagaatcatgtcttcacattgtcatggagactgcgatgtttccactctggattcctacactgtttctgctaaccatgccctcccactccctgccaggttcacgctgtggggagtggacaacacaggacggcgctccaggccaagcgacgtgatcgtgtatatgtaaataacttattttccttttcctccttcctcagaaatagcagacaagatctacaatctcttcaatggctacactagtgggaaggagcagcagaccgcctacaacaccctcctggatctgggttcccccaccttacaccgggtcctctaccactataaccagcactatgagagttttgcttctttctaacttaagtatcctctgtgcttgatccataggaaagctggtctcatcctttcccagcttggggacctcagcagttggtgcaatggactccttcaggaacccaagataagcttgcggcgcagctcactcaagtacctggggtgccgctacagcgagatcaaaccctacggacttgactgggcggagctcagccgggacctcaggaagacgtgtgaggagcagaccctgag

SEQ ID NO: 16224 - DNA, 2034 bp, Homo sapiens
  SIMILAR (63)..(5543): 1001254mologous to Homo sapiens prosucrose- isomaltase,accession number X63597,Smith-Waterman Score=9914.
atggaatactatgcagccataaaaaagaatgagatcatgccttgcaggaacatggatggagatggagactattatcctcagcaaactaatgcaggaatagaaaatcaaatacctcatgttgtcacttatgtcttcaaacctgtgcactctggatttagctgctatgaccggagtcttagcatgccgtacattgaaccaacccaggaggcaattccattcctcatgttgcttagcttggcttttgctggacctgcaattacgattatggtaggagaaggaattctctactgttgcctctccaaaagaagaaatggggtcggactagagcccaacattaatgctggaggctgcaacttcaattccttcctcagacgagctgtcagattcgttgagaacaatgttccagagcctgcatcagcgacaggtctagaaagtccattatccaaaggaaaaagtgttcatgtatttggattatgctctacagctctcattacagatatcatacagctgtccacaggatatcaagcaccttactttctgactgtgtgcaaaccaaactatacctctctgaatgtatcttgcaaagaaaattcctacattgtggaagatatttgctcaggatctgacctcacagttatcaacagtggcagaaagtccttcccttctcaacatgcaacccttgctgcctttgcagctgtgtatgtttcgggcttgtatgctgtggggaatttcctgcccagtgatgagagtatgtttcagcacagagacgccctcaggtctctgacagacctcaatcaagatcccaaccgacttttatctgctaaaaatggtagcagcagtgatggaattgctcatacagaaggcatcctcaaccgaaaccacagagatgctagctctctgacaaatctcaaaagagcaaatgctgatgtggaaatcattactccacggagccccatggggaaggagaacatggttaccttcagcaataccttgccgcgagccaataccccatctgtagaagaccctgtcagaagaaatgcgagcattcatgcctctatggattccgctcgatcaaagcagctcctcacccagtggaagaataagaatgaaagtcgaaagttgtccttgcaagttatagagcctgagcctgggcagtcaccacccagatccatagaaatgaggtcaagctcagagccatcgagggtaggggtgaatggagaccaccatggtcctggcaatcagtacctcaaaatccagcctggcgctgtccccggatgtaacaacagcatgcctggagggccaagagtgtccattcagtcccgtcctgggtcctcacagttggtgcacatccctgaggagactcaggaaaacataagcacctcccccaaaagcagctctgctcgggccaagtggttaaaagctgctgaaaagactgtggcctgtaacagaagcaacagccagccccgaatcatgcaagtcatagccatgtccaagcagcagggtgtcctccaaagcagccccaagaacactgaaggcagcacggtctcctgcactggctccatccgctataaaaccttgacagaccatgagcccagtgggatagtgagggttgaggctcacccagagaacaacaggcccatcatacagatcccgtccactgaaggtgaaggcagtggctcctggaagtggaaagcccctgaaaagggcagccttcgccaaacttacgagctcaacgatctcaacagggactcagaaagctgtgagtctctgaaagacagctttggttctggagatcgcaagagaagcaacattgatagcaatgagcatcaccaccacggaattaccaccatccgcgtcaccccagtagagggcagcgaaattggctcagagacgctgtccatttcttcttcccgcgactccaccctgcggagaaagggcaatatcattctaatccctgaaagaagcaacagccccgaaaacactagaaatatcttctacaaaggaacctcccccacacgggcttataaggattga

SEQ ID NO: 16225 - DNA, 739 bp, Homo sapiens
  SIMILAR (52)..(1341): 1001254mologous to Homo sapiens cytokeratin 18,accession number X12881,Smith-Waterman Score=2120.
atgaagcgcgctggctccagcggtggccgcggggaatgtgacatcagcggcgccgggcgcttggggctggaggaggcagctcgcctcagctgcgctgtgcacacctcgcccgggggaggacgcagacccgggcaggcggcagggatgtcggcgaaggagaggccaaagggcaaagtgatcaaggacagcgtcaccctcctgccctgcttttatttcgtcgagttgcctatattggcatcatcggtggttagcctctatttcctcgaactcacagatgtcttcaaacctgtgcactctggatttagctgctatgaccggagtcttagcatgccgtacattgaaccaacccaggaggcaattccattcctcatgttgcttagcttggcttttgctggacctgcaattacgattatggtaggagaaggaattctctactgttgcctctccaaaagaagaaatggggtcggactagagcccaacattaatgctggaggctgcaacttcaattccttcctcagacgagctgtcagattcgttggtgttcatgtatttggattatgctctacagctctcattacagatatcatacagctgtacacaggacatcaagcaccttactttctgactgtgcgcacaccaaactatacctctctgaatgtatcttgtacataaaattcctaccttgcggaagatattcgctcacgatctgacctcacactcactcacagtggcggaatgc

SEQ ID NO: 16226 - DNA, 1890 bp, Homo sapiens
  SIMILAR (307)..(612): 691254mologous to Homo sapiens dJ29K1.2,accession number Z98745,Smith-Waterman Score=394.
  misc_feature (1)...(1890): n = a,t,c or g
atgggggcccggaaattcccaagtttagaaaaaaaaaggtttcctaaggggataaaaaccaaaacccaagaaattggcccctgggggaaggaaagggtaattcgttggggagaaaagaaacgggtcgctccaattctagatcacattcttcaaggtcaaagtctagatgacagtctagttctcgatcaagatcaagatctcattctagaaagaagcgacacagttctaggtctcgttccagaacatattcaaggtcttggagtagagatcgtatgtattctagagatgatcgtcactaatacatcgagtttcaactgtgagataaaatatgaagtcattgtagactgcagtagacacggacgggaatacaagggaagggagccaagacacggatctggaagcctagaacgaccgacggaacaggaaacatcccagcccaaaatccgaaaggaaattgtagaaacaaaaggcactgcacgtggcaactgcggtaccactggtctcctgcggccaaaaaccatgatggtggagagatcctatggtccacaagacagggtggcagtggggacttggccacaccctggcactgagaggtgggcctctagctgggacgtcagcagttctgtgaggcatcagagtgaaggtgtggtgcaagggtgggagcacaggtgcacacataagtctcagcaagaagtgggagcatgtgtgaattttagaactccgaaagtgattctgatctataacctctacctaccagtctcccaccaattcagtaagaccttcatgtccatagtaattgttcagaaaaatctctatctgcacaatgactttcgggcacttaacgtgacacatatctaccgactgactatccctaacacgacaacgtgcttcacagcaacccaagacgaagacaaacagatctttcacactgcagcacaacatcgatcacacacatccagctaccaatacttgtctttaactcgcagccaccgatacgaaatcgtgttctatacaagaggtttgggagcaccatttccagctggtgacgggcacggcaaatttcaacgcctgggcaagccttactcacattccgtacatttcgtgattcctcaagacaaaacacaacacatttccatcaacacaccccataagaattcagagacaacaaagcaacatacgtgctcatttgcctatggactatactattatcaacaaaaagaagataacccatatgcctggccacaagtgccagcagctgcagagatggtttcccgcttagcccagtcacgtcactctcagcagtcaattctcattcatttcagccatcaatcataccacacagatcacatttcaacagtcatncaggatgcacacagcgagtcgcgtaggagccacagcggtatcgatccatctcacaccacccatgacacaggtcagagcttcacagcagagcagaccaaaacgcaacatgctgacatgatcttcatcacacatgcacttcatgcagagcgaacaaggtcaacggatacaccatatcaacacatgttcaccacaccgatggccaatagcgaggtcatatccatcatataccagtttcatccaacaggtcatcaagagcttcatccccatgattatcaagagcgtggacatgctcaacagatccatatccaccaaacatcaaccacaggtcatcacacccccatgacaggatacccaccaacaaacacagcaaacgcggcactataccaccatatcgatgataaacaatccagtcagcaagagccgaatccagacaccaggcagaacactaccaagtcatgtcccacaacgcagtcccagacagatacatccagtgacagtcagcatcaggcaagcacaagaatcccgtga

SEQ ID NO: 16227 - DNA, 3022 bp, Homo sapiens
  SIMILAR (208)..(987): 951254mologous to Homo sapiens laminin-binding protein,accession number J03799,Smith-Waterman Score=1285.
gccccagatcggaagtgacggagacgtgctagcgcgtcgaaggtagctctatggttttcctcgcgttcttgagtcgggaaatggccgctgtgtggttgcaacggagataaattcccggaaccgcgattcggcgtgtcaggaattcgaatttagagtttaatttctcagagcattctctccaggaagaatttttacagtatctcaaagacttcacttgacttcttgatcctgcataaaaccaaggagaaaagaaatgggtcgctccaattctagatcacattcttcaaggtcaaagtctagatcacagtcttagttctcgatcaagatcaagatctcattctagaaagaagcgatacagttcttaggtctcggttccagaacatattcaaggtctcgtagtagagatcgtatgtattctagagattatcgtcgcgattacagaaataatagaggaatgagacgaccttatgggtacagaggaaggggtagaggggtatttatcaaggaggaggaggtagatatcatcgaggtggttatagacctgtctggaatagaaggcactctaggagtcctagacgaaggtcgttcacgttccaggagtccaaaaagaagatccgtttcttctcaaagatccagaagcagatctcgccggtcatatagatcttctaggtctccaagatcatcctcttctcgttcttcatccccatatagcaaatctcctgtttctaaaagacgagggtctcaggaaaaacaaaccaaaaaagctgaaggggaaccccaagaagagagtccgttgaaaagtaaatcacaggaggaaccgaaagatacatttgaacatgacccatctgagtctatcgatgaatttaataagtcatcagccacatccggtgatatttggcctggcctttcagcttatgataatagtcctagatcaccccatagtccttcacctattgctacaccacctagtcagagttcatcttgctctgatgctcccatgctcagtacagttcactctgcaaaaaatactccttctcagcattcacattccattcagcatagtcctgaaaggtctgggtctggttctgttggaaatggatctagtcgatacagtccttctcagaatagtccaattcatcacatcccttcacgaagaagtcctgcaaagacaatcgcaccacagaatgctccaagagatgagtctaggggccgttcctcgttttatcctgatggtggagatcaggaaactgcaaagactgggaagttcttaaaaaggttcacagatgaagagtctagagtattcctgcttgataggggtaataccagggataaagaggcttcaaaagagaaaggatcagagaaagggagggcagagggagaatgggaagatcaggaagctctagattacttcagtgataaagagtctggaaaacaaaagtttaatgattcagaaggggatgacacagaggagacagaggattatagacagttcaggaagtcagtcctcgcagatcagggtaaaagttttgctactgcatctcaccggaatactgaggaggaaggactcaagtacaagtccaaagtttcactgaaaggcaatagagaaagtgatggatttagagaagaaaaaaattataaacttaaagagactggatatgtagtggaaaggcctagcactacaaaagataagcacaaagaagaagacaaaaattctgaaagaataacagtaaagaaagaaactcagtcacctgagcaggtaaagtctgaaaagctcaaagacctctttgattacagtccccctctacacaagaatctggatgcacgagaaaagtctaccttcagagaggaaagcccacttaggatcaaaatgatagcgagtgattctcaccgtcctgaagtcaaactcaaaatggcacctgttcctcttgatgattctaacagacctgcttccttgactaaagacaggctgcttgctagtacacttgtccattctgtcaagaaggagcaagaattccgatccatctttgaccacattaagttgccacaggccagcaaaagcacttcagagtcatttattcaacacattgtgtccttggttcatcatgttaaagagcaatacttcaagtcagctgcaatgaccctaaacgagcggttcacttcgtatcagaaagccactgaagaacatagtactcggcaaaagagccctgaaatacacaggagaattgacatctcaccaagtaccctgaggaagcatacccgtttagcaggggaagagagagtttttaaagaagaaaatcaaaagggagataaaaaattaaggtgtgactctgctgaccttcggcatgacattgatcgccgtagaaaagaaagaagtaaagaacggggagattccaagggctccagggaatccagtggatcaagaaagcaggaaaaaactccaaaagattacaaggaatacaaatcttacaaagatgacagtaaacataaaagagagcaagatcattctcgatcttcatcctcttcagcatcaccttcttctcccagttctcgagaagaaaaggagagtaagaaggaaagagaagaagaatttaaaactcaccatgaaatgaaagaatactcaggctttgcaggagttagccgaccacgaggaaccttttttcgaattagaggcagaggaagagccagaggagtttttgctgggacaaatactggtccaaacaactcaaatactacttttcaaaagagaccgaaggaagaggaatgggatccagaatataccccaaagagcaagaagtacttcttgcatgacgacagagatgatggtgtggattattgggccaaaagaggaagaggtcgtggtacttttcaacgtggcagagggcgctttaacttcaaaaaatcaggtagcagtcctaaatggactcatgacaaataccaaggggatgggattgttgaagatgaagaagagaccatggaaaataatgaagaaaagaaggacagacgcaaggaagaaaaggaataa

SEQ ID NO: 16228 - DNA, 3918 bp, Homo sapiens; identical to SEQ ID NO: 10002
  SIMILAR (646)..(2187): 991254mologous to Homo sapiens ubiquilin,accession number AF176069,Smith-Waterman Score=2605.

SEQ ID NO: 16229 - DNA, 456 bp, Homo sapiens
  SIMILAR (1044)..(664): 661254mologous to Homo sapiens carboxylesterase,accession number L07764,Smith-Waterman Score=407.
atgcccggccgtcatcacatatttctaagtatctgccatgtgtcaggcactgtaataagcaccagaaatgatgatgatgatgatgatagtaatggtgatggatttgtgaatgcaccaatcgacactctgtatctagctactctggtggggacgtggagaacctttgtgtccacactctatctagctaatctggtggggacttggagaacctttgtgtctagctcagggattgtaaacgcaccaatcagcaccctgtcaaaacagaccactcggctctctgtaaaatggaccaatcagcaggatgtctgcagcttcactcctgagccagcaagaccacgaacccaccagaaggaagaaacaacgaacacatccgaacatcagaaggagcaaactccgcacacgcggcctttaagaactgtaacactcactgcgatggtccgcggcttcattcttaaa

SEQ ID NO: 16230 - DNA, 1211 bp, Homo sapiens
  SIMILAR (493)..(1005): 631254mologous to Acinetobacter sp. ADP1 beta-ketoadipyl CoA thiolase,accession number AF009224,Smith-Waterman Score=559.
atgaggaggtgggagaaatacctggttacaggctgtcccaagattcctcggatggtaacagaccttgaggacagccatccagggcaggagcttaacactgagaaagctgtgccagtgtccaggaagaagtcaatttcctggccctcaatggttaaacttacccgaggctcacttcacggaggtgtggagggagaggcactagcgggaaccaggctgcgcacggtgcttgcgggccagctggagttccgggtgggcgtgggcttggcaggcctgcactcggagcagccagccgtccctgccccgggcaatgagggtcttagcacccgggccaatggctgcggagggtgtgctgggtgccccagcagggccagcccactggcgctgagctcgatttcttgcgaggccttagctgccttcccgtggggcagggctcgggacccgcagcctgccatgcctgagccttccccgccaccacgccctcctcccccccgccctcctcctccgtgggctcctgtgcagccggagcctccccgacaagtgccgccccctgctccacggcacccaatcccgtcgaccacccaagggctgaggaccggagcctccccgacaagtgccgccccctgctccacggcacccaatcccgtcgaccacccaagggctgaggagtgcgggcgcatggcgcgggactggcaggcagctccacctgcagccccagtgcaagatccactgggtgaagccagctgggctcctgagtctagtgggaacttggagaacctttatgtctagctaagggattgtaaatacaccgatgggcactctgtatctagctcaaggtttgtaaacacaccaatcagcaccctgtgtctagctcagtgtttgtgaatgcaccaatccacactctgtatctggctactctggtggggacttggagaacctttgtgtccacactctgtatctagctaatctagtggggatgtggagaacctttgtgtctagctcagggatcgtaaacgcaccaatcagcaccctgtcaaaacagaccacttgactctctgtaaaatggaccaatcagcaggatgtgggtggggcgagacaagagaataaaagcaggctgcctgagccagcagtgacaacccccctcgggtcccctcccacgccgtggaagctttgttctttcgctctttgcaataaatcttgctactgcccaaaaa

SEQ ID NO: 16231 - DNA, 1690 bp, Homo sapiens
  SIMILAR (168)..(1073): 991254mologous to Homo sapiens carboxylesterase,accession number D21088,Smith-Waterman Score=1557.
atgggactgggcggcgtggagcagggggcggtgctcgtcggggaggctcgggccgcgcaggagcccacggagcgggaggaggctcaggcatggcgggctgcaggtcccaagccctgccccgcggggtggcagctaaggcccagcgagaagtcgagcacagcagctgctggccttggtgctaagctcctcagtgcccggggccggctggccgctccgaaactgaatgcactacaggaggagctgaagaattttggtgtcattgtgttggcctttccctgcaaccagtttggaaaacaagaaccaggaacaaactcagaaatacttcttggtctcaagtatgtgtgtccaggtagtggctttgtccccagtttccagctctttgagaaaggggatgtgaatggagaaaaagaacagaaggtctttactttcctgaaggtgcatgagtataaacctggcatggatgggttagctagaaatgctctgaaagcatattttgtttttctcaaaaatgctctagaactttccttggcacatataaaagcacggctggaactggttgctcagagctgctgtgaccgtgagcacagatctcttcgtgtcagggcctgctcctggacgcggagccgaaatcggttcaaagcctgcgggcggggctccttgcaggtccccgaaagaatgagaaccgggacccccccccccccaccaacgggacgtggaaggacgggttacagaggagaacgcgttatctcctctgggaggcgattttcagaacttactgcgggaaaaaaaaaaaaaaagaaaagaaaaaagaaagaacccccccccaaaaaaaaaacaagcccaagaggagcagaagaaaacaaagggtgggagaaaactgggacaaattactttttcttgacccccaaaaggggggtcttcggagaaaaagttaaagatgaagaaattatcctggattatccaagtggagctcaaataccatcacaagtgcctttaatagggagaggcacagggagattatacagttacagaagagaagaagacaatgtgaccacacggacacagatagaagcaatgccaccaccagccaaggaatgcgagcagccaccagaggctgggaaaagttgttgtaccttgcatttgttggctgagaagtgcgagcgcatggcgcgggactggcaggcaactccacctgcagccccagtgcgggatccactgggtgaaagccagctgggctcctgagtctggtggggccttggagaacctttatgtctagctcagggattgtaaatacaccaatcggcactctgtatctagctcaaggtttgtaaacacaccaatcagcagcctgtgtctagctcagggtttgtgaatgcaccaattgacactctgtatctagctactctggtggggccttggagaacactttgtgtccacactctgtatctagttaatctagtggggatgtggagaacctttgtgtctagctcagggattgtaaacgcaccaatcagcgccctgtcaaaacagaccacttggctctaccaatcagcaggatgtgggtggggccagataagagaataaaagcaggctgccccaggcagcagtggccaacccgctcgggttcctttttgcattgtggaagctttgtttgttcgctctttgcaataaatcttgctgctgctcacaa

SEQ ID NO: 16232 - DNA, 840 bp, Homo sapiens
  SIMILAR (140)..(838): 981254mologous to Escherichia coli K12 putative transcriptional regulator LYSR-type,accession number AE000392,Smith -Waterman Score=1145.
ggcgcctgctgtggccaccgaggtgttgcctggagcggggctgacagcaggtgtgctcctgtggagtgaccccaaggagccttcgaatccaggttcaagccatagagttggggcctctgacctggacaatccggcccacccaaccctacttagctacaccatgcaaaaactggaagaagagctggatgtggtgctgtttgaccgctcgggccatcgtaccaaattcaccaatgtcgggaggatgttgttggagcgagggcgcgttttgctgcaagccgcagataaactgactactgatgcggaagctctcgcgcgcggttgggaaacgcatctcaccattgtgaccgaagcgctggtaccgacacctgcctttttcccgttaatcgacaaactggcggcaaaagccaatacccaactggcaatcatcacataagtgctggcgggggcgtgggaacggctggagcaggggcgggcggatattgttatcgcgccggatatgcattttcgttcctcgtcggagatcaactcgcgcaagctctatacgttaatgaacgtctacgttgccgcgcctgatcacccgattcatcaggagccggaaccgttatctgaagtgacgcgtgtgaaatatcgtggaattgcggtggcggataccgctcgtgagcgcccggtgttgaccgtacagctgctggacaaacagccgcgcttaacggtgagcacgattgaagataaacgtcaggcattactggcggggcttggcgtggcgacgatgccgtatcctatggtcgaaaaagatattgcggaagggcggttgcgtgtcgtcagcccggaatcgaccagcga

SEQ ID NO: 16233 - DNA, 923 bp, Homo sapiens
  SIMILAR (1408)..(1893): 971254mologous to Homo sapiens dihydrolipoamide acetyltransferase,accession number J03866,Smith-Waterman Score=829.
gtcgcttcttgtccgatggcactatcataagtgtggactctgctgggaaggtgcagttctgggactcagccactgggacgcttgtgaagagccatctcatcgctaatgctgacgtgcagtccattgctgtagctgactttttcccaggtcatgagtctcgggctacagaagctttgtgctgggcagaaggacagcgactctttagtgctgggctcaatggcgagattatggagtatgatttacaggcgttaaacatcaagtatgctatggatgcctttggaggacctatttggagcatggctgccagccccagtggctctcaacttttggttggttgtgaagatggatctgtgaaactatttcaaattaccccagacaaaatccagtttgaaagaaattttgatcggcagaaaagtcgcatcctgagtctcagctggcatccctctggtacccacattgcagctggttccatagactacattagtgtgtttgatgtcaaatcaggcagcgctgttcataagatgattgtggacaggcagtatatgggcgtgtctaagcggaagtgcatcgtgtggggtgtcgccttcttgtccgatggcactatcataagtgtggactctgctgggaaggtgcagttctgggactcagccactgggacgcttgtgaagagccatctcatcgctaatgctgacgtgcagtccattgctgtagctgaccaaagaagacagtttcgtggtgggcacagccgagggaacagtcttccattttcagctggtccctgtgacatctaacagcagttgagaagcagtgggtgcggacaaaaccgttccagcatcacactcatgacgtgcgcactgtgggcccacagcccaacagcgctgatatctgggaggcactgacacccacttagtctttcgtcctcg

SEQ ID NO: 16234 - DNA, 1059 bp, Homo sapiens
  SIMILAR (25)..(291): 341254mologous to Homo sapiens Human homologue of UNC-53 (Hs- UNC-53/2) sequence,accession number Y85565,Smith-Waterman Score= 114.
aggtggtggtcccatgggccctggatctggacctaacctgagagccggtgttctgttaacctctgggaatggtcctcccaatcctaggccagttggcctgggcccaggaccaaaccccaatctgagatcaggctttttagggacaaaccctgcccccaggtcaggtgtgtttccaggcccaggccttgggcccaacccaagaccaagtggcctgggcccaggccctaatctagatgccagagcaggtggcctcttgggcacaggatctggtcttaacttaagaatggctggacctcaaggcctcgatcttgcccccattctaagagcagcaggtcttttaggagcaaattcagcttctttctcacaggcttctggaaacatgggcacaagcccatcctccatggcaagagtacctggccccatgggcccaaactcgggtcctagctctcggggaattggccttccagggccaaatccatctcccatgtcaagggctcctggccccataggccctaattcagctcatttctcaaggccagttggccccatgggggtaaatgccaatccctttcccaggggagcaggttcatctgccattttctcgagtcttctggcacgattggcatcaaacccagctaccttccaaaggtccgctggcctccagggctcaaatccaaccattttcccaagagcctctgggccacttggccccaacccagctaacttcccaagggccactggcctgcagggtccaagtccaactaccttcccaaggtctactggcccattaggccctggtcaagttactttccccaggccagctgccgggcatctgggcccttctccagctggccctgtgggtatcaacccagctcctttcacaaggccaactgggaccctgggtctcaacccagcttcctttccaaggatgaatggccctgcaggcaagagtttcgtcccatttcctagagtggggagcctccctggcacaaacccagctgctttccccagaccagggggtccaatggctgcaatgtacccaaatggaatgttgccccc

SEQ ID NO: 16235 - DNA, 1540 bp, Homo sapiens
  SIMILAR (1090)..(974): 1001254mologous to Homo sapiens Human secreted protein, SEQ ID NO: 6956,accession number G02875,Smith-Waterman Score=211.
atgattgtggacaggcagtatatgggcgtgtctaagcggaagtgcatcgtgtggggtgtcgccttcttgtccgatggcactatcataagtgtggactctgctgggaaggtgcagttctgggactcagccactgggacgcttgtgaagagccatctcatcgctaatgctgacgtgcagtccattgctgtagctgacgaccctgactcaaatcctgggacaacttgttttcacttgctttttaaagacagaaagctcatggtgcaaattgttatttccagtgcgagggctggaggcctggcagaatgggtgctgatggagctacagggggagatcgaggctcgcctacagcactggattagctggaaacctcctgggagacctacattacaccactgaggaatctcgttcttgttctgccaaagggaatccctgtgctgatcgtggggcatcatatcctgtatggggaaaagtcaattcccacctgggagaaaccttttgcagtccttgtcaaacacactcctgggggatcaggactgtgatgaagcttggccgcgagactgggcacccggtacctggggtgacagcacttcattcaaaggacaagatcctttttcaaaacccgccccaagcccatttattcaccagcgtccccaagaaagtatgaaagagctcggattttcctgggtgtgaactcggatcccttccttatggcggctggttttcttggtggaaatctggccccatttccaaggaactcatctccttttccagcttcatcaggctcattggcttcaaatccagcacctttcccggctggtgctcgtgacccaagcatggcttcttttccaagagggatgaatcccactggcacaggtgcagtttctttcccaaggcctggtggcttcttggggccaggcccgggacgaggccccaccctaaaccctaggacaggggctcttccaggcctggggcctctgtctaatcccaggttagggggtctcccaggaccaggtcctatatccaacctaagggcaggtagtctcctgggagcaggtcctgaccccagaagtggtggtcccatgggccctggatctggacctaacctgagagcaggtgttctgttgacttctgggaatggtcctcccaatccttggccagttggcctgggcccaggaccaaaccccaatctgagatcaggctttttagggacaaaccctgcccccacgttaggtgtgtttccaagaccaagtggcctgggcctgggccgtaatctagatgccagagcaggtggcctcttgggcacaggacctggtcttaagaatagctggacctcaaggcctcgatcttttccccattctaagagcggcaggtcttttaggagcaaattcagcttgtcacaggcttctggaaacatgggcacaagcccgtcttccatggcaagagtacctggccccatgggtccaaacttgggtcctggccctcgggaaattggccttccagggccaaatccatctcccatgtcaagggctcctggccccat

SEQ ID NO: 16236 - DNA, 723 bp, Homo sapiens
  SIMILAR (50)..(487): 1001254mologous to Homo sapiens Human transmembrane protein HTMPN-23,accession number Y57899,Smith-Waterman Score=748.
atgttgctagagaagatatgtccgcaacagcagaatggcaaagcagaagggcacagagtagtaacagggatattggcctatagttttattattattgttattcattttgtgtttgccaggtttcggtaccaggataatgctggcttcatagactgcattcaaaagtacaactaccccacctccaagcagatctccaggcattcagagcacatgcttgcccgaaccagcagcctgacccaccccactcttcctgtgcagagatcctgtttgggctccaaattcacaagtgacaaaaaattacttgggactgagacagagctggatgataggcctaacaatatatataacttgttcagtgttgctggacaaaggggtcttgatccagaccctgagatagggttctttgatcttgcacaggaaggaatgcaaggcaagtcacagagttcgggtattccaacagacctgcagctgagggtcctgtctgttagaaggaaaactaacagaaaggacatccacaccagaaacccatctgtacatcaccatcatcaaagaccaaaagtagataaaaccacaaagatggggaaaaaacagaacagaaaaactggaaactctaaaacgcagagcgcctctcctcctccaaaggaacacagttcctcaccagcaacggaacaaagctggatggagaatgactttgacgagctgagagaagaaggcttcagatga

SEQ ID NO: 16237 - DNA, 480 bp, Homo sapiens
  SIMILAR (145)..(369): 331254mologous to Rickettsia prowazekii 50S RIBOSOMAL PROTEIN L9 (rplI),accession number AJ235270,Smith-Waterman Score=95.
atgggactgtcgtgccctcggcattgtggagcactgggtggatggaaggtaccactggccagggagggccagaagctgcgtctgcaccagcgacactacatcgacaagctggtggaggacacggagcactggcccaaagaaaatctggagatcatcttcacacagtctgtggagacacttggagtctggggtgacctgatctcagtaaagaaatctgtggatcggaatcaactcctttctcagagactggctgcatatgcatcacctgaaaacaagaagctgtttgaagaggagaaattgctgagaccaggaggaaagttacagaagatccagaccaaggcaggtgaggcaacagtgacatttctgaaaagctgtcacctggaggtagggatgaagaacagtgtcaaacgggagctgaaccctgaaacagttgcctgccacttcttcaagaatcttggtggtgtggtcacccccatataa

SEQ ID NO: 16238 - DNA, 543 bp, Homo sapiens
  SIMILAR (679)..(1242): 951254mologous to Escherichia coli K12 putative transport system permease protein,accession number AE000302,Smith-Waterman Score=943.
atggcgtcccagatataccagtttccaacggatgatgacactattgctaaggtcaacgctgcaatgaatggacagttgccgtttgctgttgtgggaagtatggatgagataaaagtcggaaacaagatggttaaagctcgccagtacctttggggtgttgtacagacccataccaggcactatgagctttacaggcgctgcaaactggaggaaatgggctttacagatgtgggcccagaaaacaagccggtcagtcttcaagagacctatgaagccaaaagacatgagttccatggtgaacgtcagaggaaggaagaagaaatgaaacagatgtttgtgcagccagtgaaggagaaagaagccatattgaaagaagctgagagaaagctacaggccaaatttgaggaccttaagagacttcaccaagaagagagaatgaagcttgaagaacaaagaagactttgggattctttagagcgcaaggcaggttgcaacctaaccattttcgttttacaagaaaataaggtccttccggaaaattag

SEQ ID NO: 16239 - DNA, 264 bp, Homo sapiens
  SIMILAR (46)..(441): 331254mologous to Homo sapiens GPI-anchored metastasis- associated protein homolog,accession number AC018758,Smith-Waterman Score=145.
atgaactgcaaagagggaactgacagcagctgcggctgcaggggcaacgacgagaagaagatgttgaagtgtgtggtggtgggggacggtgccgtggggaaaacctgcctgctgatgagctacgccaacgacgccttcccagaggaatacgtgcccactgtgtttgaccactatgcagggatgactcaacgcgtcccaacaacctttagagctttcacagcttaccatggaagaattgcatttcttcccccatcctatctttag

SEQ ID NO: 16240 - DNA, 2178 bp, Homo sapiens
  SIMILAR (363)..(569): 361254mologous to Homo sapiens GPI-anchored metastasis- associated protein homolog,accession number AC018758,Smith-Waterman Score=108.
ttaattgaaataaaaatgttcttgggtttctccccagccagtgatgaaacattcggtccggtcagcgaccacataatttggggatggcagacaagctgggattactttgtcagtgatgacggcaggactgcttagctttagcaaggcaatatcttttcgtgtgggctccaagaacagcctagacacttctatttcctgaacatgcggttcgagattcacttcttggtgtgcacccaggatgaccttgtaggatgaaggccttggggaccttgttctaagactgacttgccagggccaggaatgtgggtgggccacacacccccctacaacccttccaggacatttcttcggctccacttgaggcttcccacaatcaaatgaaggggccgcacactgagggacatcacagtagtcgtaaagttttcttggatttgtcgtgtagcaccagggaccacctacatcaccatcagggttacggcagtaatttttttccagacccgcccgtggatttgtctctggagtgaaaatgctgtgtctatggggctcctgggcagcccagtcctggcatggcgtcccagtaacagtggtcgccctcttgcctcggtatcctttcccattcccaaacatacagtcttcttcggaaggagtctctacatctggaagcaggacaacaggcggaggtgctacaacactcgcttctgttcctgagcattttttcaggttgcagtactcccacctgacgctggggtctgtggtaaaacaccaggggcctttatcggcatctggattcctgcagtagttcattgtcaggccagcatttgggtagttttctggggtcttctggtgccggtgtggtgtcatagatgaccaagactgacacttctttcctgtggtggtggtggaggatgtgcctcggtagctctgtccatcaccatggtagcagtcctggaccacaggggttagctcaggtggtgctgtgggagccaattgttccgtggatactggggaggagtcacaggacggtatcttacagtactcccaccgcacttggctgttggttgtatggcaccatggggccctttttccgtcaggattgcggcagtagttttcatccaaatttttgcaggggaagttttctggtgtcctgttatgtgtgtgaggggtctgtgcactccagtgctgacaggtgtgcccggacacggtaacagccacattcccgcgatagttttcacctgttcccttcagacactggtaggtgggaccagaagatggtggaggtgttgtgcagcgggggatgtcacaaagttcccagcgcttgttggggtcggtggtgaaacaccaaggccgcagctccctatcggggttacgacagtaattcttcttcaggttcttgtttggaaatttggaaggaatgtatccatgagcgtgtgggctctgagagtcccaggcctggcattccagtccagacatggtcttggaaattttgccgtcatagttttctccactgcaatgcatacattcctcttcacactcaagaatgtcgcagtagtcatatctcttttctggatcagtagtatagcaccagggcccctgcggatcgttgtctggattcctgcagtagttctcctccagtccctctgaggggtgtgtagcaggtgagaatctaggtctgtggggagaagtggaactccatttttgacaggtgatgccattttttgttttggacatcgtccctctgtagttctttccattcccagtcttgcactctgagagatacactttcttttcaaataaaactacatctctcatcctaatgattatggaggacttcctgttttcagccattatcacacattgttgctctttactgtgatattggaatgccctgcaggtgaattcttcgtcctcctcacattttgctgcacattcttctatacttcctgctcccagctgcttcttagtgacactgaacagtgaagccccctgggtattcacatagtcatccagaggctctccttgaccttcataatccatcagcatcgtgaaagcacagagggacgttgagcagagctctgtgctggcgccaccgcactctgtagcctgtaagagagcagcaaagaggaatgtgttgctcaggtatagacgggggtgggtgcatagagacttccgctgcggcat

SEQ ID NO: 16241 - DNA, 820 bp, Homo sapiens; identical to SEQ ID NO: 1915
  SIMILAR (8)..(409): 891254mologous to Homo sapiens Human plasminogen,accession number W34285,Smith-Waterman Score=652.

SEQ ID NO: 16242 - DNA, 1401 bp, Homo sapiens
  SIMILAR (1040)..(1591): 961254mologous to Homo sapiens COL4A5 (Collagen Alpha 5(IV) Chain Precursor),accession number AL031622,Smith-Waterman Score= 999.
atgcaggggcgccagggtgggagccgcagcgggcccgtggccgcccggaggacactgattcttctggagcgaaggcgagggtccaaggcgggaccggaccaaggcagcctgcgctccgcggaggcgcgggcgcgaccccgctctgtccagacgctggctcccggactgatcctcagtcctgccgtcatcactgacaaagtaatcccagcttgtctgccatccccaaattatgtggtcgccgaccagactgaatgttacatcactgactggggagaaacccaagagatgacatctctatgtcggccactggatggcagcacctactcgcagaccacatcaactttcctggcaacttgcggtacctttggggctggctttctcaaggaagcccagctccctgtgattgagaatgaagtgtgcaatcgctatgagtttctgaatggaagagtcaaatccactgagctctgtgctgggcatttggctggaggcattgacagttgcaagaagcagatactgagccacaaatctgctaagattgccctgaatgagagttttaactcctgtagagaaagagttgaaattgtgaaaaaacagagacaagctgttatcatgcgagtagctgatctgcaacaagaggtgcatgcacagccttgccaggtgtttactgttaaagtgagggcattgactggaaaaaaatgggaccctggaacttggagtggggatgtgtgggagaaccctgatgaagctgaggacactgagtttgtgaactctgatgaaacttttttgccagaagaaacagtttccccatccccagtagtgaggacagatggatcttggaaaatgatggtggattattttaagcttaaccaagtggtgactccaattgcagctgctctaccagttgtggttttgttgcttgagcaaattaacacatctcctggtgcctggtatgcagccattggcttggcaagtggctttttctccattcctgtccataagacccaccagaagcaatttgccttcagctggcaaggccagcaatatacctttactgtcctacctcaggggtatatcagctctctggctttgtgtcataatcttattcgaagagaccttgatggctttttgcttctgcaaaatatcacactgctggtccattatgttgatgacattatgctgattggatccagtgagcaagaagtagcaaatgcactggacttattggtgttttctgaccatctagccataaagtgggtcatgcacagcagcattgcatcatcaagtggaagtggtatatgcgtgatcaggctcaagaaggtcctgaaggcacaacctgcaccaatggcctcatggggggttctctatgatcagttgacagaagaagagaagattagggcctag

SEQ ID NO: 16243 - DNA, 2756 bp, Homo sapiens
  SIMILAR (352)..(456): 601254mologous to Homo sapiens Human secreted protein encoded by gene 81,accession number Y00337,Smith-Waterman Score=128.
gaagaccaaaaccaaaatttactcaaatcaaagttaagtacagagtttatttttaacaaatgtcatagctatgtcaccttactacagaatccagcagtcagaaaataacacaaaaaatgccgaggtttggcgtacgtggtagctggggacagtgtcttcgtttgattactgccagttatttccagcatgctaaatcccctaccccacgttcccagcctcctaggtgagtcagtgcgtcactctgtctcccgtcccaattaattaatttctccatcaactcccctcaatcccaagtaaacaaaccttggaaacacgaacataagaacacccaggcttattggggcgtgcacagccaagaccccaagaagtgactccttgtaaaatgtatttgtccttctcgaagcaaaccagaggacctccactgtcaccctggcaactgtcagtgcctccggccaaatgccccagcacagagttcggtggattggactcttcccattcagaaactcatagcgattgcacactttattctcaatcacagggagctgggcttccttgagaaggccagctccaaaagtaccttgggtttctccccagccagtgatgaaacattcggtccggtcagcgaccacataatttggggatggcagacaagctgggattactttgtcagtgatgacggcaggactgcttagctttagcaaggcaatatcttttcgtgtgggctccaagaacagcctagacacttctatttcctgaacatgcggttcgagattcacttcttggtgtgcacccaggatgaccttgtaggatgaaggccttggggacttctccaagcagtgggcagcagtcaacacccactctggggatatcaaggtgcctccacagaagtgcattccaaaccttgttctaagactgacttgccagggccaggaatgtgggtgggccacacacccccccacaacccttccaggacatttcttcggctccacttgaggcttcccacaatcaaatgaaggggccgcacactgagggacatcacagtagtcgtaaagttttcttggatttgtcgtgtagcaccagggaccacctacatcaccatcagggttacggcagtaatttttttccagacccgcccgtggatttgtctctggagtgaaaatgctgtgtctatggggctcctgggcagcccagtcctggcatggcgtcccagtaacagtggtcgccctcttgcctcggtatcctttcccattcccaaacatacagtcttcttcggaaggagtctctacatctggaagcaggacaacaggcggaggtgctacaacactcgcttctgttcctgagcattttttcaggttgcagtactcccacctgacgctggggtctgtggtaaaacaccaggggcctttatcggcatctggattcctgcagtagttcattgtcaggccagcatttgggtagttttctggggtcttctggtgccggtgtggtgtcatagatgaccaagactgacacttctttcctgtggtggtggtggaggatgtgcctcggtagctctgtccatcaccatggtagcagtcctggaccacaggggttagctcaggtggtgctgtgggagccaattgttccgtggatactggggaggagtcacaggacggtatcttacagtactcccaccgcacttggctgttggttgtatggcaccatggggccctttttccgtcaggattgcggcagtagttttcatccaaatttttgcaggggaagttttctggtgtcctgttatgtgtgtgaggggtctgtgcactccagtgctgacaggtgtgcccggaaacggtaacagccacattcccgcgatagttttcacctgttcccttcagacactggtaggtgggaccagaagatggtggaggtgttgtgcagcgggggatgtcgcaaagttcccagcgcttgttggggtcggtggtgaaacaccaaggccgcagctccctatcggggttacgacagtaattcttcttcaggttcttgtttggaaatttggaaggaatgtatccatgagcgtgtgggctctgagagtcccaggcctggcattccagtccagacatggtcttggaaattttgccgtcatagttttctccactgcaatgcatacattcctcttcacactcaagaatgtcgcagtagtcatatctcttttctggatcagtagtatagcaccagggcccctgcggatcgttgtctggattcctgcagtagttctcctccagtccctctgaggggtgtgtagcaggtgagaatctaggtctgtggggagaagtggaactccatttttgacaggtgatgccattttttgttttggacatcgtccctctgtagttctttccattcccagtcttgcactctgagagatacactttcttttcaaataaaactacatctctcatcctaatgattatggaggacttcctgttttcagccattatcacacattgttgctctttactgtgatattggaatgccctgcaggtgaattcttcgtcctcctcacattttgctgcacattcttctatacttcctgctcccagctgcttcttagtgacactgaacagtgaagccccctgggtattcacatagtcatccagaggctctccttgacctgatttcagaaataaaagaagtagaagaaccacttccttatgttccattttgggactggccagcagtgcccagaaagtgggtcccaatcccaggatgttgtt

SEQ ID NO: 16244 - DNA, 448 bp, Homo sapiens
  SIMILAR (148)..(264): 841254mologous to Human endogenous retrovirus tripartite fusion transcript PLA2L,accession number Z14310,Smith-Waterman Score=173.
  misc_feature (1)...(448): n = a,t,c or g
tgtgagtactgcccgagttcacccaggngaaccaaacagccatgtannnnnnnnnnnnnnnnnnnnnnnnnnnnnnnnnnnnnnnnnnnnnnnnntttggtgccctgactcggatcgggggacctcccttgggagatcaatcccctgtcctcctgttctttgctccctgagaaagatccacctatgacttcaggtcctcagactgaccagcccaaggaacatctcaccaattttaaatcagcggccaggcgttcctccagaacctcctcccacaggaacttgctacacgtgctggaaatctggcaactggaccaaggaatgcccgcagcccgggattcctaagccgcatcccatctgtgtgggaccccacggaaaatcggactgttcaactcacctggcagccactcccagagcccctggaactctgcccaaggctctctgactcctt

SEQ ID NO: 16245 - DNA, 303 bp, Homo sapiens
  SIMILAR (86)..(190): 851254mologous to Homo sapiens Human secreted protein, SEQ ID NO: 5210,accession number G01129,Smith-Waterman Score=155.
atggctgacagggacgacctggtgacccgttcgatgacgcgcgtgatatttggtgccgtgactcggatcgggggacctaccttggagatcaatcccttgtcctcctgctctttgctccatgagaaagatccacctatgaccttgggtcctcagaccaaccagcccaaggaacatctcaccaattttaaattggataactcaaatgctcagctgccgttccgcaactctataccaattacccatgatccttccgcacttctggctctcccttttgcaaatgagaagacatttttcttctcctga

SEQ ID NO: 16246 - DNA, 903 bp, Homo sapiens
  SIMILAR (286)..(417): 791254mologous to Homo sapiens calbindin D28K,accession number S46006,Smith-Waterman Score=180.
atgctcacagaaggctttttggccttcttggggtcaagcctaactgccacatctttaagtgctgtgtctattggagaaagcagttggatccagtgtcatacaagtctttggggatgtaaaggtggccaagaaagagcccctggtgaggtggaagagccttggtgggccaaggccaaggcaggcatcacctttggctgtcacctggccaaacaagagatggggcagacccctgtggcacagacagccccaaaggatgtgagtccccagagtacagatgatccttattcacaatcgggggacctccctcgggagatcaatcccctgtcctcctgctatttgctccatgagaaagatccacctacgacatcgaatcctcagaccaaccagcccaaggaacatctcaccaattttaaatcagtgcgactcatcccaaacctttcttctttccctcccacctgtccccacagtcccaaccccaagcgttgctttcaatcttccttttctaccgacccatctgacctctcccttcatcccaagattgctcctcctcaggtgtacaataatagagaagagttgcaattacttgcctcttctctgagagaaagcctagccacatctccagcacacaagaacttcaaaatgcctaaaccacagtggccaggtgttccttcaggacttcatccctcaggatcttgcttcacgtgctggaaatctggccactgggccaaggaatgcctgtggcccgggatccctcctaagctgtatcccatctatgagggactccactggaaatcggactgtccaactcacctggcaaccactcccagagcccctggaactctggcccaagactctctgactgactccttcccagatcttctcagcttagcagctgaagactga

SEQ ID NO: 16247 - DNA, 890 bp, Homo sapiens
  SIMILAR (259)..(414): 841254mologous to Homo sapiens Human secreted protein, SEQ ID NO: 5210,accession number G01129,Smith-Waterman Score=234.
atggtcaaccccaaattctttgccagtgaaaagattactcaagaacacaatgataaagactttttcagacatacaaagttaaaagaagttactaacagcagatctacactacacttgacgccagcacatcttagagtctcactcaaggcccatactgtgtactacctggctaccactgttgattattcaggacccaaggactcttcagtcagcagccatgttgctcacacaaagcctgtttggtggtatcttcacacggacgcgcatgaaatttggtgccgtgacttggatcgggggacctcccttgggagatcaatcccctgtcctcctgttctttgctccgtgagaaagatccacctacgacctcaggtcctcagacccaccagcccaaggaacatctcaccaattttaaatcgggtgtcagaccacgcagggacgcctgccttggtccttcacccttagcggcaagtcccgcttttctggggaaggggcaagtaccccaaccccttatatctctgtgccccgatcccttatttccgcaccccaacctcatatctctgcgccccaatcccttatgtccgcaccccgacctcgtatctctgtgccctgacccctttcccgcttttctggaggcacataagaacttccaaacgcctgaaccgcagcagcccggcattccaccagaacctcctcccccaggagcttgctacaagtgccagaaatctgaccaccaggccaaggaatgcctgcagcccaggattcctcctaagccatgtcccatctgtgcgggaccccactggaaatcagactgttcaactcacctggcagccactcccagagcccctggaactctggccgaaggctctctgactgactccttctcggcttag

SEQ ID NO: 16248 - DNA, 528 bp, Homo sapiens
  SIMILAR (337)..(528): 761254mologous to Homo sapiens Fragment of human secreted protein encoded by gene 3,accession number W78239,Smith-Waterman Score=246.
atggggggaaaaaaggaaaagaaaaaagaaaagcgttttaatccaaagaagagcttggagaagtcgaagaccatgatgtgtgcatggaacagtgagatggtcatggagagggaagcactggaagtggccggggcagagatagaatttggagttgtgtacagttgtgtggaagacaagaggtacactgtcaggaaaggaaaaggtgccttttataatggtcaaaaactacaggtttcacaagaagaactgaaggaagcggggcttcttggcgcttctgaagggagaaagctgcacaaggatgccgccaggaatgctcgcacctcctaccgggatggcctgcgtaagacggggcggtctctgtgcggaaaaggtcctctgagagcaggtcaaggtggccacgcatatcctaaagaatggttgtggtgggctagactgctgtcaatggcagctggcgaggtggccaactcagctgcatatgggtttgcaccggccacactggtgactccactaggaactctcagcgtccta

SEQ ID NO: 16249 - DNA, 2299 bp, Homo sapiens
  SIMILAR (69)..(899): 1001254mologous to Homo sapiens myo-inositol-1(or 4)- monophosphatase,accession number X66922,Smith-Waterman Score=1424.
cgacggtatcgataagcttgatatcgaattccctccgactcaagatatttgtcaaatattttcagaagatggctgatccttggcaggaatgcatggattatgcagtaactctagcaagacaagctggagaggtagtttgtgaagctataaaaaatgaaatgaatgttatgctgaaaagttctccagttgatttggtaactgctacggaccaaaaagttgaaaaaatgcttatctcttccataaaggaaaagtatccatctcacagtttcattggtgaagaatctgtggcagctggggaaaaaagtatcttaaccgacaaccccacatggatcattgaccctattgatggaacaactaactttgtacatagatttccttttgtagctgtttcaattggctttgctgtaaataaaaagatagaatttggagttgtgtacagttgtgtggaaggcaagatgtacactgccagaaaaggaaaaggtgccttttgtaatggtcaaaaactacaagtttcacaacaagaagatattaccaaatctctcttggtgactgagttgggctcttccagaacaccagagactgtgagaatggttctttctaatatggaaaagcttttttgcattcctgttcatgggatccggagtgttggaacagcagctgttaatatgtgccttgtggcaactggcggagcagatgcatattatgaaatgggaattcactgctgggatgttgcaggagctggcattattgttactgaagctggtggcgtgctaatggatgttacaggtggaccatttgatttgatgtcacgaagagtaattgctgcaaataatagaatattagcagaaaggatagctaaagaaattcaggttatacctttgcagcgagacgacgaagattaattaaggcagcctcatagtcaatcccagttgcttttccccagatttggtgactcatcaatggatatgtgttttggatgtatgatatgcttggtttaaattctctttgtccaggtcaaaaatttggaacttgtttcttattttactatgtctaggtttgcaagaattgacataatgtttgtttcactgatttaaaaaattttgcatgtaagaatgtactttaggaaacatacccaggaagtacagttgataaatataacatcaactgaaatagtcaattagcaattttgtgtttctaaatatctatggtcccctgaaattttgacttagtatataggtgcagagacacccacttagaaagttaactgtttggaaaaacatttctctttagtttcaaaaaccatatataattaaatttgtaaggatatactgagtaccctaggccaacttttttttctttgcagagaaccttttttgttttattcttcagtgttcatatagcacctggcccattacatatctaggcaactaaaaacaaacattgtaagaatgaatatttttaatgtagtaattcctagttacaatagatacataaagtaatgaactcagcattctgtacttttgcttcaggtttgaagtaaaaattatctagttaaattttttttatttcacgttaccatgccatttcacattaccataccatcagatagcatggcttattgtgggcatttctgcagtgaatacattttccaaaacagttaaattgtctgtttggatttgctttaaagtcttgtgtaagagagaagaaactatttctataataaaaagcactctcatcagatatctgacataattagatacaatataacattttactaagttcagtattcatgttttaaaggtgtttatactgatttgattgtgctggcaaatatactgtattgttaatattgaactatttatttttctcttagtcttcttatttaattaacttcattgccgctggattctgttcagcctttaaaaatatttcttagtggtcattgctctgcagaactcaaaaagaaaattgtacttgttcatagacatttttaaagggttaatttattgttcagccttatcccttggcacgtaaacagactactagacttattgtaggttcgtttgagctttgtgttgtaaaattaaaaatgcttctataaagttttcaaggtagggagtgattttattattgtgtatatctaatatattaagtatgtgtgatactaaggtttgactgctataattatttgtactgttgatcacatgtacttaaaacatctgatactgtattctaagacaggttgtttttgcaattaaatttattttaataagacgatcatgaataaaactttaaattg

SEQ ID NO: 16250 - DNA, 687 bp, Homo sapiens
  SIMILAR (49)..(147): 1001254mologous to Homo sapiens myosin X,accession number AF132021,Smith-Waterman Score=182.
atgctgctagatgcgaccaacagcatgcagctgcactgcccggtgtcgggaacacgggtctggctgagagaaaatggccagcattttccaagtactgtaaattcctgtgcagaaggcatcgtcgtcttccggacagactatggtcaggaccccttctgggacattggatgtaatcgtcatgctccttctttgatagccttgacggttttgagaaatgctggtcaggaagcctctcacctcctgaggaccaatggcacctttaccaattggttgaccaatcatgagcacctttttaatatagcccgaggccctcccacacctgtgaactgtcagcgcagcattctctctagcaacatcctcgaccgctgctcacccagcgtctgcgcctatatccagtgctaccaggcctgttgctttgccagcaacaccaatgcatcctctggcttcggcattcacatacattacctcctctcagaggccctcgctggcctgctgggcgcccctcctccgtcagtcagcttgctgcatgtacctttgtccccagcacacaaggtggtgcccagcaaagaaggcaggaaggaggatttccaacaacccaagaacctggtgaacttcagtataaactccacccatctggaaactttgccagaagagcgtatttgtctcttaccagccctgccctattaa

SEQ ID NO: 16251 - DNA, 1030 bp, Homo sapiens
  SIMILAR (521)..(1027): 631254mologous to Mus musculus Pro-Pol-dUTPase polyprotein,accession number Y12713,Smith-Waterman Score=533.
gccatacgaccccccatatccaatggtgattgaggtgtcagtggcagataggcatgctgtttggagcctttggcaggcccccataggtgaatcacatcagaggcctctaggattttggaacaaggccctgccatcttctgcagataactactctccttttgagagacagctcttggcctgttactgggctttggtggaaattgaacgtttgattatacccaatggtttggctggatggtcagggacttggaagaagcatgactggaaaattggtgacaaagaaatttggggaagaggtgtatggatgaaactctctgagtggtcaacaactgtgaagatatttgtattccatgtgagtgctcaccaatgggtgacctcagcagaggaggattttaataatcaagtggataggatgacctgttctgtggacaccattcagcctctttccccagccacccctgtcatcgcccagtgggcccacgaacaaaggggccatagtggcacagatggaggttatggatgggctcagcaacatggacttccactcaccaaggctgacctggctatggccactgctaagtgcccaatttgccagcacttatgggggaatggccttttgaagtcacaattacaacgtaaacaaggtaacaatagtttgcagggctggggcaaagttctccagacggccgtgaatgctctgaatcagcatgcaatatatggtactctttctcccatagccagaattcatgggtccaggcatcaagggttggatgtagaagtggctccactcaccatcatccctagtgatccactagcaaaatttttgcttcctgttcctgcaacattacgttctgttgacctagaggtcttagttccagagacaggaatgctgccaccaggagacacaacaatgattccattaaactggaagttaaggttgctacctggacactttgggctccttctacctttaactcaacaggctaagaagggagttacagtgttggctggggtgattgacccagactaa

SEQ ID NO: 16252 - DNA, 338 bp, Homo sapiens; identical to SEQ ID NO: 4495
  SIMILAR (1)..(189): 761254mologous to Mus musculus Pro-Pol-dUTPase polyprotein,accession number Y12713,Smith-Waterman Score=287.

SEQ ID NO: 16253 - DNA, 392 bp, Homo sapiens
  SIMILAR (5)..(307): 801254mologous to Mus musculus Pro-Pol-dUTPase polyprotein,accession number Y12713,Smith-Waterman Score=425.
gggaactgtgtactggggaaagggaaatgatcagacatttcagggactactggacactggctctgagctgacgttgattccaggggacccaaaacatcattgtggtcctccaggaccaaaagtaagggcttatggagatcaggtaattaacggagttttggctcaggtccaacttatagtgggtccagtgggcccctggactcatcctgtggtcatttccccagtgccagaatgcgtaattggcatagccatacttaacagctggcagaacccccacattggctccctgactggtagggtgagggctgcagacttgagccagtttatagactcagaaccctttgaatggagtggcagtcgggtcttcttgaggaaggacctggtacgctacc

SEQ ID NO: 16254 - DNA, 2187 bp, Homo sapiens
  SIMILAR (1366)..(2184): 581254mologous to Mus musculus Pro-Pol-dUTPase polyprotein,accession number Y12713,Smith-Waterman Score=828.
tccaagtcccaaaactgaagaaccctgactaatacagattttggtattgggagtggttctagaggaacagaatattaaggatggagttcttttgttggttttggggtttctgaagttggctgcttaatatgattagaccccaaaatgctaaggactctacttctaatagtatggagaacacggataatccttggcatgaactgtttagagagttatgcaaaataaatgcatttgacacttctgattcattgcacatgagaggcgaggagtttagtgactctatacataatgcctttgcgcatatgtggagaaccaaggaacatagtgaagctggttggttgctcctaaattctgtagacaaagtgatgaaagaaaatgatgaacttagggattctatctcctggcttcagaagcagatactgagcctcagatctgctaagattgccctgagtgagagtcttatcagctgtagagaaagagttgaaattgtggaaaaacagacacaagctcttatcatgcgagtggctgacctgcaacaaaaggtgcatgcacagcctcaccatgcacagcctcgccaagtatctactgttaaagtgagggcactgattggaaaagaatgggaccctgcaacttggaatggggatgtgtgggaggaccctgatgaagctggggatactgagtttgtaaactctgatgaactttttttgccagaagagacagcttccccatccccagtagtggcaacatccactccccaacccatgctgccatcagcctttccacctttgaattaaggtgattaaccatacactgcctgaggcaacagtgatggcctctcttgaggcagttgccaggcaagataatgctgattctcctcaggaactacccccaacacccctgtttgcttctagacctacaactagactaaagtcccggtgggcccctagagggccagaatgcataattggcatagacatacttagcagcggacagaacccccacattggctccctgactggtagggtgagggctattatggtgggaaaggccaaacggaagccattagagctgcctctacctagaaaaatattaaatcaaaaacaatatcgcatagctggagggattgaggagattagtgccaccatcaaggacctgaaagacgcaggggtggtgattcctaccacatccctgttcgactctcccatttggcctgtgcagaagacagatggatcttggagaatgacagtggattatcgtcagattaatcaagtggcaactccaattgcagctgctataccagatgtggcttcattgcttaagcaaattaacacatctcctgacacctggccatacgaccccccatatccaatggtgattgaggtgtcagtggcagataggcatgctgtttggagcctttggcaggcccccataggtgaatcacatcagaggcctctaggattttggaacaaggccctgccatcttctgcagataactactctccttttgagagacagctcttggcctgttactgggctttggtggaaattgaacgtttgattatgggtcatcaagtcaccatgcagtctgaactgcctatcatgaactgggtgatttctgacccatctagttataaaaaatggccagatgtgcaattatatactgattcatgggctgtagccaatggtttggctggatggtcagggacttggaagaagcatgattggaaaattggtgacaaagaaatttggggaagaggcatgtggatggagctctctgagtggtcaaaaactgtgaaggtatttgtatcccatgtgagtgctcaccaacgggtgacctctgcagaggaggattttaataatcaagtggacccggtgacccattctgtggacaccactcagcctctttccccagccacctctgtcatcgcccaatggatccatgaacaaagtggccatggtggcagggatggaggttactcatgggctcagcaacatggacttccattcaccaaggctgacctggctatggccactgctgagtgcccaatttgtcagcagaagagacccacactgagccctccatatggcaccattccttggggtgatcagccagctacctggtggcagattgattatattggacctcttttatcatggaaagagcagaggtttttcctccctggatag

SEQ ID NO: 16255 - DNA, 890 bp, Homo sapiens
  SIMILAR (788)..(883): 521254mologous to Plasmodium lophurae histidine-rich protein,accession number M15317,Smith-Waterman Score=122.
cggcacgaggtaaaatccatttccttacttgttcattttagtcttggacagagaggggaacattcttgcctttggatcggaggagggccagtagaggtttaagcaaagactccccaggaggtgtagacatgtagaaaaagagccttttgttactactgcagatatctgacccttcgttagccagtcagagtatgctggcagagcccaattataggctcctgaagaggacgtgggaagagaagaaaggggggaagtggtttctctctggaaattcccattttcctgcaagagagttcatggatattcctttccgaagtggtggaaacagcattgaatccagattccttcttttcagctgtgggaatgacatcttctcaggcagtcttgagaatcaaaagaacaaagaattagcaatgcccgaaaccgaatcacttgatagaagatatcaaggctctaagccctcttctaaagagaagctgctcagcctggacccccagggcacctcccaaaaagctcaccagtcattctccagcgatagtatttgtcacacactggcatttcctacactcctactgaccacatctccagggactgctgggagcccactgaccaagctcccgaagatcaaggagaatgaatattggataaaaatcgggtaccactctggttcctctgcttttctgcctgccatgttctgtggtatcaagttgagcctaaaggaagagtcctcttctgccatggccccagtacccctggatcttacctcccttgaagaatcactggatggcatttcaggatacccagccatcatcaccaccatcactgccactaccatcatcactgtcttcattatcatcatcattatgatcatcacagttcacatgtactga

SEQ ID NO: 16256 - DNA, 606 bp, Homo sapiens
  SIMILAR (506)..(583): 571254mologous to Mycoplasma pneumoniae conserved hypothetical protein,accession number AE000039,Smith-Waterman Score =82.
tcaaaagagccctgctaggtctgttcgtgatatcactagaaaactaagggtcacaaactctagaaagagaaagagccaggatttgaagactactaaagcctgcattgtttctgctttcgctgaagcttccagttgaccactgatttcaatcttctctttcagcttttccccagaggtagcataataagcatagtaaatggggcccctaactgcaaaagagagaagataggcttcagtggaatacctaaatgcaaactcaagaagcttgcagcgatggtattgagcttgaatatgtaatcttctgttagcttgtttaattaatcggtcattttgcgttagaatctcatggatgtatagcagagttaccatgctttgaatgagaatgatggtcacacactgatcctgcagtaatctaggcagattcatttctaacaagtccccaagtgagttgatgctgctggtctgagaaccacactgcagagaggctttggggaattctggccagtggatctcgtttcgctgggcaccttcctgctgctgcctctttggtttacacagttgccttccatctccccttgtgtcccgagtctggaactcagagtccat

SEQ ID NO: 16257 - DNA, 1962 bp, Homo sapiens
  SIMILAR (1)..(3156): 961254mologous to Homo sapiens putative p150,accession number U93565,Smith-Waterman Score=5371.
tcattgccttgagggtgcttgggcaggaatcaggcctgatgggcaccctgggcactggccatagaggccacagctgtagccccagccacagcggcaggtgggaccatccagcacttccccagatgcttggcctgcatgagggacattaaaagcattgcagcttgatcctgaagatagatccataaaactgtagcctctacagaggtgtggatctagggtgactgctgggcactggcttctgccagctggcctctgggctgtgtggctacttttcccaccctttggtccttctgaacccagggcctttgcttggcccaagacctccaccctggtcagctgactctcctgcttggtttgggcagagcttagtctgagcagggactcctggcctgagcctgagaggtcgatgttgcagtgagccgtgatcacgccactgtactctagccttttcttgtcgttcaggatatgtctgtggagtttagtcaggggcttcagacagccaccagctggttccgaccccagggcaggccctctgattgtggggtctaggatggtgggagcatgcagaggcaccttccaggccttgaagggagcccccttcctgctgatgtgcttcctttgagttagcagcaaagactcgccaactgttcttactgtcattagtggtgatgtttgcattatctgtgttggattgttgggtctataaagtgcctgtcttgtcagggctgcccactggcctgttgagacctcaggtttgcacacaggtctggctacttggtggttctgggctcccaagggcagcaagagggggagcttcaggatgccatggtctgcagtatttgcttgcatcacatttgctgcagtcccctcgggtttattgatgtggccagagcgaacggtgaccatttccagggtcactgtgggagaagacttcccaaaatgtgagtggaagtggatcgtagtaaaggtttcatctgcattgtcttcatgttgagtgggctcccagatgtggacaagtgtcctcccagatggagggatggtgacacggctccgtggagggtgctcctgccttccctggctgtcttggctgagggctgggtctgtatcctccacagtccccctcgtctgtggccgatgctgcatacttgtcccttgtgcagaagcactggcccagtacacagttcctcctcgaaaggtgtcacaaggatgcatatgagaacgtgtgaccctgctggagaaggtggtccacccctttatcgtgagtctttcccatcgagagaccttggagttgatggagattgggtgtgtaggtgttctgtgctgatgtggacagctgggtggtgagaaggtagcgatgaaggttccataccctgccctcacgctgctcatccgttcgctcagggggcctgtcttggcaggaggcaccatctgaagctccctcggtgcctctgggacctgagccctgctgatgggcagccaggggtgaccagggcagaacctgctgaaggcttcatgggagacacaaagcctgggtggcagcagcagtcctgcaccctgcaacgctgtagaaatgggcacagtgtctttcggttcctgctcctcttcctttgcctccacctggggtccctgctcctctccctgtgcctccccctggggtccctgctcctctccctgtgcctccgcctggggtccctgctcctctccctgtgcctccgcctggggtccctgctcctctccctgtgcctccgcctggggtccctgctcctcttcctgtgcctccacctgctgttccgacctggttacccagtgagggaatggggaagaaacctctcctaccatagcaaggattcctggtggcaacaacgtcctagagctttgcaaagctctcggtctttgacgttgacgaagtcgattcatggaaactgctggaaccctttgacgacttggattgactgtattcat

SEQ ID NO: 16258 - DNA, 1155 bp, Homo sapiens
  SIMILAR (184)..(1152): 991254mologous to Cloning vector pZC320 SopB,accession number U26464,Smith-Waterman Score=1594.
  misc_feature (1)...(1155): n = a,t,c or g
tttttcgatatgcttcgtgatctgctcaagaacgttgatcttaaagggttcgagcctgatgtacgtattttgcttaccaaatacagcaatagtaatggctctcagtccccgtggatggaggagcaaattcgggatgcctggggaagcatggttctaaaaaatgttgtacgtcgaaacggnataatgaagcgtgcgcctgttattccaaaacatacgctcaatactcaaccggttgaagatacttcgttatcgacaccagctgccccgatggtggattcgttaattgcgcgcgtaggagtaatggctcgcggtaatgccattactttgcctgtatgtggtcgggatgtgaagtttactcttgaagtgctccggggtgatagtgttgagaagacctctcgggtatggtcaggtaatgaacgtgaccaggngctgcttactgaggacgcactggatgatctcatcccttcttttctactgactggtcaacagacaccggctttcggtcgaagagtatctggtgtcatagaaattgccgatgggagtcgccgtcgtaaagctgctgcacttaccgaaagtaattatcgtgttctggttggcgagctggatgatgagcagatggctgcattatccagattgggtaacgattatcgcccaacaagtgcttatgaacgtggtcagcgttatgcaagccgattgcagaatgaatttgctggaaatatttctgcgctggctgatgcggaaaatatttcacgtaagattattacccgctgtatcaacaccgccaaattgcctaaatcagttgttgctcttttttctcaccccggtgaactatctgcccggtcaggtgatgcacttcaaaaagcctttacagataaagaggaattacttaagcagcaggcatctaaccttcatgagcagaaaaaagctggggtgatatttgaagctgaagaagttatcactcttttaacttctgtgcttaaaacgtcatctgcatcaagaactagtttaagctcacgacatcagtttgctcctggagcgacagtattgtataagggcgataaaatggtgcttaacctggacaggtctcgtgttccaactgagtgtatagagaaaattgaggccattcttaaggaacttgaaaagccagcaccctga

SEQ ID NO: 16259 - DNA, 549 bp, Homo sapiens
  SIMILAR (1)..(549): 871254mologous to Cloning vector pZC320 SopB,accession number U26464,Smith-Waterman Score=803.
atgaagcgtgcgcctgttattccaaaacatacgctcaatactcaaccggttgaagatacttcgttatcgacaccagctgccccgatggtggattcgttaattgcgcgcgtaggagtaatggctcgcggtaatgccattactttgcctgtatgtggtcgggatgtgaagtttactcttgaagtgctccggggtgatagtgttgagaagacctctcgggtatggtcaggtaatgaacgtgaccaggagctgcttactgaggacgcactggatgatctcatcccttcttttctactgactggtcaacagacaccggcgttcggtcgaagagtatctggtgtcatagaaattgccgatgggagtcgccgtcgtaaagctgctgcacttaccgaaagtgattatcgtgttctggttggcgagctggatgatgagcagatggctgcattatccagatttggtgcttatgaacgtggtcagcgttatgcaggcgattgcagaatgaatgtgctgggaatacttcctgcgctggctgatgcgggaaaatattcacag

SEQ ID NO: 16260 - DNA, 622 bp, Homo sapiens
  SIMILAR (253)..(621): 961254mologous to Cloning vector pZC320 SopB,accession number U26464,Smith-Waterman Score=590.
atgcttcgtgatctgctcaagaacgttgatcttaaagggttcgagcctgatgtacgtattttgcttaccaaatacagcaatagtaatggctctcagtccccgtggatggaggagcaaattcgggatgcctggggaagcatggttctaaaaaatgttgtacgtgaaacggatgaagttggtaaaggtcagatccggatgagaactgtttttgaacaggccattgatcaacgctcttcaactgataatgaaggtgcgcctgttattccaaaacatacgctcaatactcaaccggttgaagatacttcgttatcgacaccagctgccccgatggtggattcgttaattgcgcgcgtaggagtaatggctcgcggtaatgccattactttgcctgtatgtggtcgggatgtgaagtttactcttgaagtgctccggggtgatagtgttgagaagacctctcgggtatggtcaggtaatgaacgtgaccaggagctgcttactgaggacgcactggatgatctcatcccttcttttctactgactggtcaacagacaccggcgttcggtcgaagagtatctggtgtcatagaaattgccgatgggggatcctctagatccaagaaaa

SEQ ID NO: 16261 - DNA, 350 bp, Homo sapiens
  SIMILAR (201)..(4): 741254mologous to Bacteriophage N15 gp27; SopB; ParB,accession number AF064539,Smith-Waterman Score=240.
tcatttctgcaatcggcttgcataacgctgaccacgttcataagcacttgttgggcgataatcgttacccaatctggataatgcagccatctgctcatcatccagctcgccaaccagaacacgataatcactttcggtaagtgcagcagctttacgacggcgactcccatcggcaatttctgaccatacccgagaggtcttctcaacactatcaccccggagcacttcaagagtaaacttcacatcccgaccacatacaggcaaagtaatggcattaccgcgagccattactcctacgcgcgcaattaacgaatccaccatcggggcagctggtgtcgataacgaagtat

SEQ ID NO: 16262 - DNA, 801 bp, Homo sapiens
  SIMILAR (520)..(2688): 941254mologous to Homo sapiens putative p150,accession number U93572,Smith-Waterman Score=3542.
tcagggtgctggcttttcaagttccttaagaatggcctcaattttctctatacactcagttggaacacgagacctgtccaggttaagcaccattttatcgcccttatacaatactgtcgctccaggagcaaactgatgtcgtgagctccccccagttcttgatgcagatgacgtaataagcacagaagttaaaagagtgataacttcttcagcttcaaatatcaccccagcttttttctgctcatgaaggttagatgcctgctgcttaagtaactcctctttatctgtaaaggctttttgaagtgcatcaccacgttcataagcacttgttgggcgataatcgttacccaatctggataatgcagccatctgctcatcatccagctcgccaaccagaacacgataatcactttcggtaagtgcagcagctttacgacggcgactcccatcggcaatttctatgacaccagatactcttcgaccgaacgccggtgtctgttgaccagtcagtagaaaagaagggatgagatcatccagtgcgtcctcagtaagcagctcctggtcacgttcattacctgaccatacccgagaggtcttctcaacactatcaccccggagcacttcaagagtaaacttcacatcccgaccacatacaggcaaagtaatggcattaccgcgagccattactcctacgcgcgcaattaacgaatccaccatcggggcagctggtgtcgataacgaagtatcttcaaccggttgagtattgagcgtatgttttggaataacaggcgcacgcttcat

SEQ ID NO: 16263 - DNA, 381 bp, Homo sapiens
  SIMILAR (370)..(128): 931254mologous to Cloning vector pZC320 SopA,accession number U26464,Smith-Waterman Score=401.
atgaagcgtgagagtgcgattccaaaacatacgctcaatactggggcggttgaagatacttcgttatcgacaccagctgccccgatggtggattcgttaattgcgcgcgtaggagtaatggctcgcgatagaaaggcaggagagtgtcttctgcatgaatatgaagatctggtacccatccgtgatacattgaggctgttccctgggggtcgttaccttccacgagcaaaacacgtagccccttcagagccagatcctgagcaagatgaacagaaactgaggttttgtaaacgccacctttatgggcagcaaccccgatcaccggtggaaatacgttttcaacacgtggcaatcgcgtacccaacacattcacgcatatga

SEQ ID NO: 16264 - DNA, 732 bp, Homo sapiens
  SIMILAR (732)..(58): 951254mologous to Cloning vector pZC320 SopB,accession number U26464,Smith-Waterman Score=1064.
cggcataaccaagcctatgcctacagcatccagggtgacggtgccgaggatgacgatgagcgcattgttagatttcatacacggtgcctgacgggggtgagaaaaaagagcaacaactgatttaggcaatttggcggtgttgatacagcgggtaataatcttacgtgaaatattttccgcatcagccagcgcagaaatatttccagcaaattcattctgcaatcggcttgcataacgctgaccacgttcataagcacttgttgggcgataatcgttacccaatctggataatgcagccatctgctcatcatccagctcgccaaccagaacacgataatcactttcggtaagtgcagcagctttacgacggcgactcccatcggcaatttctatgacaccagatactcttcgaccgaacgccggtgtctgttgaccagtcagtagaaaagaagggatgagatcatccagtgcgtcctcagtaagcagctcctggtcacgttcattacctgaccatacccgagaggtcttctcaacactatcaccccggagcacttcaagagtaaacttcacatcccgaccacatacaggcaaagtaatggcattaccgcgagccattactcctacgcgcgcaattaacgaatccaccatcggggcagctggtgtcgataacgaagtatcttcaaccggttgagtattgagcgtatgtttttgaataacaggcgcacgcttcat

SEQ ID NO: 16265 - DNA, 624 bp, Homo sapiens
  SIMILAR (1774)..(5016): 971254mologous to Homo sapiens unknown,accession number AF148856,Smith-Waterman Score=5486.
atgaagcgtgcgcctgttattccaaaacatacgctcaatactcaaccggttgaagatacttcgttatcgacaccagctgccccgatggtggattcgttaattgcgcgcgtaggagtaatggctcgcggtaatgccattactttgcctgtatgtggtcgggatgtgaagtttactcttgaagtgctccggggtgatagtgttgagaagacctctcgggtctggtcaggtaatgaacgtgaccaggagctgcttactgaggacgcactggatgatctcatcccttcttttctactggctgggcaacagacaccggcgttcggtcgaagagtttctggtgtcttagaaattgccgatggagtccccgtcgtaaagctgctgccctcaccgaaagtgattaatcctgttctggtgggcgagcttggtgaggagcagatggttgctttatccaaatggtctggaaccacgggcccactcgtatcggctgtcttgatattagtccgggaccacggtcccactcgcatcggcggtctgattattagactgggaccacgaacccactcgtgtttgcggtctgaaaataggtctggaaccaagatccccttgtatttgtctattaaactataa

SEQ ID NO: 16266 - DNA, 299 bp, Homo sapiens
  SIMILAR (3)..(146): 1001254mologous to Cloning vector pZC320 SopA,accession number U26464,Smith-Waterman Score=252.
ggttcgagcctgatgtacgtattttgcttacgaaatacagcaatagtaatggctctcagtccccgtggatggaggagcaaattcgggatgcctggggaagcatggttctaaaaaatgttgtacgtgaaacggatgaagttggtaaagaccccaggcccctgccgtatctgggccatgacgagccctacacatttgacatcaacctctctgttaacctgaaaagtatggttgtaggggggaccgacatgggccaggagcctctgaagcaaatgggtgcctgggggcccttgtccctgaag

SEQ ID NO: 16267 - DNA, 702 bp, Homo sapiens
  SIMILAR (415)..(555): 701254mologous to Homo sapiens fumarylacetoacetase (AA 1- 349),accession number X51728,Smith-Waterman Score=179.
cccctctgccttccaggggccctgcaatgcgctttcaggcccagcctttcctcacaggccaggctttgttctccatctcggcctgtctgctgcccaccttccctttctctcccctcctgtggctttcaggaacatctctggtttggctcctgtgacctttgacctgctgatgccccttccttggctgcatttcctggagacccacagtatgatcccccctactgctatccagggacacagtgctgggtccctggagagggaatgctcctgctgtctcagaccctctgcctaggggagcaggtgctgctgggggcctggctggtatgggggcccagccgggaccccaggcccctgccgtatctgtgccatgacgagccctacacatttgacatcaacctctctgttaacctgaaaggccctggaaacagattgggagagccgatccccatttccaaggcccatgagcacatttttggaatggtccttatgaacgactggagtggtaattactggagctctgttcctgtaaagatgaccgggaaggagctggggacttggggcaatttcataaaagctgaagattggtgcaggtcaaaaggggcagtaatggcattaccgcgagcggtgactcctacgcgcgcaattaacgaatccaccatcggggcagctggtgtcgataacgaagtatcttcaaccggttga

SEQ ID NO: 16268 - DNA, 1677 bp, Homo sapiens
  SIMILAR (970)..(1377): 871254mologous to Cloning vector pZC320 SopB,accession number U26464,Smith-Waterman Score=565.
cagtcgtatggctgctatgtgctgattgttcccacgcctgctgagttgtgtgcctcacctccgcactgcagtttttcgatatgcttcgtgatctggcaagacggttatcttaaagggttcgagccagatgtacgtatttgcctacccaaatccaccaatagtaatgcttctcagtccccgtggaatgaaggagccaaattcgggatggcctgggaaagcatgggttctaaaaaatgttgtacgtgaaacggatgaagtttggtaaaggtcagatccggatgagagctgattttgtgcacggccattgattaacgctcttcaactggtgcctggagaaatgctctttctatttgggaacctgtctgcaatgaaattttcgatcgtctgattaaaccacgctgggagattagatgggggaagcgtgcgcctgttattccaaaacatacgctcaatactcaaccggttgaagatacttcgttatcgacaccagctgccccgatggtggattcgttaattgcgcgcgtaggagtaatggctcgcggtaatgccattactttgcctgtatgtggtcgggatgtgaagtttactcttgaagtgctccgggcgtgatagtgttgagaagaacctctcgggtatggtcaggtaatgaacaagaccggtagcgccattggttatcccgctctggatgatctcatcccttctttttctactgactggtcaaaaaaacaccggcgttcggtcaaaaaagtatttggtgtcataaaaaattgcccatgggaagtgccccgccgtaaaactggttgcacttaccgaaagtgattatcgtgttctggttggcgagctggatgatgagcagatggctgcattatccagattgggtaacgattatgggcccaacaattgcttatgaacgtggtcagcggttttgcaagcccgattgcagaatgaatttgctgggaaatatttcttgcgctggctgatgcggaaaatatttcacgaaagattattacccgctgtatcaacaccgccaaattgcctaaatcagttgttgctcttttttctcaccccggtgaactatctgcccggtcaggtgatgcacttcaaaaagcctttacagataaagaggaattacttaagcagcaggcatctaaccttcatgagcagaaaaaagctggggtgatatttgaagctgaagaagttatcactcttttaacttctgtgcttaaaacgtcatctgcatcaagaactagtttaagctcacgacatcagtttgctcctggagcgacagtattgtataagggcgataaaatgtttatcacagttaaaattgctaaacgcagtcaggcaccgtgtatgaaatctaacaatgcgctcatcgtcatcctcggcaccgtcaccctggatgctgtaggcataggcttggttatgccggtactgccgggcctcttgcgggatatcgtccattccgacagcatcgccagtcactatggcgtgctgctagcgctatatgcgttgatgcaatttctatgcgcacccgttctcggagcactgtccgaccgctttggccgccgcccagtcctgctcgcttcgctacttggagccactatcgactacgcgatcatggcgaccacacccgtcctgtggatctacccactagtcaattcaccatcttgttga

SEQ ID NO: 16269 - DNA, 963 bp, Homo sapiens
  SIMILAR (220)..(780): 501254mologous to Mus musculus growth suppressor 1S,accession number AF165164,Smith-Waterman Score=501.
atggacagcagaagacatgaatataaactcaataatgaggggtgtgagaaggttggtgagtatgtgaaagccctggagtgtgccaaagcctatcttctatgccatccagatgatgaggatgtcctagacaatgtggattactatgagagtctgctggatgatagcattgacccggcatccattgaggccagagaggatttaacaatgtttgtgaaacgtcataagctggagtctgagctgataaaatcagctgcagaaggtctggggttttcatacactgaaccgcttaaccagctcgaaaaagcagtggaagcagctcacacatttttcgtggctaaccctgagcacatggaaatgcagcagaacattgagaattacagggcgacagctggtgttgaagcattgcagttggtagacagagaagccaagccacacatggagagttacaatgcaggagttaaacattatgaggctgatgactttgagatggctatcaggcacttcgaacaagccttaagagaatatttcgttgaagatacagaatgccggaccctatgtgaggggcctcagagatttgaagaatatgagtatttagggtataaggctggtctgtatgaagctattgcagatcactacatgcaggtgcttgtttgtcagcatgaatgtgtgagggaacttgccacccgccctggccgcctctctcccatcgagaattttcttcctctgcactatgattacctacagtttgcctactatcgaggaagtgggaactttaaggagccaaacaaagactgtttctatgttgatgccttgttgccagaaaacagaaatcagatcctcacccagatcctccaatcagcaaatctgagtgccaacaagctcttcacagtgggaggacaaatagcaatctacctttgcaaagctcaagaacttttaggtctaaatttgggtttacgtttttaa

SEQ ID NO: 16270 - DNA, 1251 bp, Homo sapiens
  SIMILAR (844)..(948): 881254mologous to Homo sapiens Human secreted protein, SEQ ID NO: 8176,accession number G04095,Smith-Waterman Score=157.
gggcacaggcgttcttaatgttgcatagccctgggtcccccacccggccccggttcactttgagcggtcccaaggcctgagggcctactgtccagtccccaggttatcgtcctgagcaaagacagaccccgagccctgcggtcttggggctcaaacagtccctggatggccaaacaagcaaatattcgccatggcagtgggtgctggaagggtggctcacggagctgacgccctccgcagagaaccgtggtctagtcctgcgggtcacgaggcctatctgggacagtggtgtttgagctgagacttcaacgaatagagacagggtgaggttcctgcagcccagggcttcagcgtgaacaaccccagaaggaaaaagagtgctgttgttaaagggtatctgggcatcatggacccaaccatcaccaggagtttctcacttcatctctggaaaggggttggcacgtgcacgaacaagggagtatggtgacagaggagcatgaaaatgccagcagggaccagataatgcaggtgctgagacaaaaaaaacatcactcagaagccaaacgtctgcaaggaaaaatctgtaccctgtgcttagccctgcggcctggaagttcagagaaggctgaaagtgctccctgtgaggaaaccagggcatgtttagacagagctttaatcatgtctaaccaactcagagcagtggcagcagccatcttgaagaagatgtcgcctccttctggatttgcactggagtgtgggggaggaatcatgcttgtttgtgatggatacagaggaaaaacttcaccccatacacccaatgaaaagtttgaaggtgcaactgtcctgaaagcactcaaagatttaacaatgtttgtgaaacgtcataagctggagtctgagctgataaaatcagctgcagaaggtctggggttttcatacactgaaccgcgcgggccccccgcccgacgagaaagcgggccgcggcaggaaagaggggggaagaagagaacaactggcggcccaacaccacgcggcccacgagaccgccgcgcagcagcggcgcgccgcgacggccggggcggcaagaggggctccgggcgagagccccggaccagcgcccgccccggaaacaaagaaggcacggtgggtataggtcctggggggaccgagccctctaaccctggggggatccgggggctaacctctaaggtaggagatttcgggattcgcctaactttagctcgaagttag

SEQ ID NO: 16271 - DNA, 1146 bp, Homo sapiens
  SIMILAR (979)..(1143): 351254mologous to Plasmodium falciparum glutamic acid-rich protein,accession number AF251290,Smith-Waterman Score=100.
atggtggtgtgtaattggtacacattgagcttcagcctgctgtttgtttcagtcaccccagactatgtccctcctcttggaaactttgatgtggaaactttagatataacacctcatactgttactgctatttcagcaaaaatcagaaagaaaggaaaaatagaaaggaaacaaaaaacagatggcagcaagacatcctcctctgacacactttcagaagagaaaaattcagaatgtgaccctacgccatctcatagaggccagctaaacaaggagttcacagggaaggaagaaaagacatcattgttactacataattcccatgcttttttccgagagctggacattgaggtcttctctattctacattgtggacttgtgacgaagttcatcttagatactgaaatgcacactgaatgtttagctgctgagaatcacggtgtagttgatggaccaggagtgaaagttcaggagtaccacataatgtcttcctgctatcagaggctgctgcagatttttcatgggctttttgcttggagtggattttctcaacctgaaaatcagaatttactgtattcagccctccatgtccttagtagccgactgaaacagggagaacacagccagcctttggaggaactactcagtatctacctggagcacacagagagcattctgaaggccatagaggagattgctggtgttggtgtcccagaactgatcaactctcctaaagatgcatcttcctccacattccctacactgaccaggcatacttttgttgttttcttccgtgtgatgatggctgaactagagaagacggtgaaaaaaattgagcctggcacagcagcagactcgcagcagattcatgaagagaaactcctctactggaacatggctgttcgagacttcagtatcctcatcaacttgataaaggtatttgatagtcatcctgttctgcatgtatgtttgaagggtgaagagattaagtcccaaaattcccaggagagcacagcagatgagagtgaggatgacatgtcatcccaggcctccaagagcaaagccactgaggatggtgaagaagacgaagtaagtgctggagaaaaggagcaagatagtgatgagagttatgatgactctgattag

SEQ ID NO: 16272 - DNA, 271 bp, Homo sapiens
  SIMILAR (269)..(84): 801254mologous to multiple sclerosis associated retrovirus protease,accession number AF009666,Smith-Waterman Score=236.
atactaagcctgctactgctgccactacctgtaaaccatgaggccaaccctttgccactacatcagtttccttactcaggtatgccacgggttgcaagctcatcccttggacctgtgggagtggggctttcaggcataattagaaaagcatgtgaaaagagtaaagttcctcagtcacagcttagtgactgggagaagtatctagtgactggctgtcctaggaccccttggatagtgacagatctggaggacagttgtccgagacaggaga

SEQ ID NO: 16273 - DNA, 993 bp, Homo sapiens
  SIMILAR (1)..(2961): 971254mologous to Homo sapiens putative p150,accession number U93563,Smith-Waterman Score=4999.
  misc_feature (1)...(993): n = a,t,c or g
atgtcgaagcgtcgttggttaacgggaaacggaagtgatcgagagaacattcgcctggatttgggatttctggtcagcgatgaagagaaacggtacaaatgtgaagactgtggcaaagcctttaaccgctcctctaaccttactacacataagaaaattcatactggagagaaaccctacaaatgtgaagaatgtggcaaggcctttaagcgctcctctatccttactacacataagagaattcatactggagagaaaccctacaaatgtgaagaatgtggcaaagtttttaagtacctttcttccctttctacacataagataattcatactggagagaaaccctacaaatgtgaagaatgtggtaaagccttcaactggtcctcacaccttactacacataagagaattcatactggagagaaaccctacaaatgtgaagaatgtggcaaaggctttaagtactcctctacccttactaaacataaaataatccatactggagagaaaccctacaaatgtgaagaatgtggtgaagcctttaagtactcctgttcccttactgcacataagataattcatactggaaagaaaccttacaaatgtgaagaatgtggcaaagtgtttaagcactcctctcccctttctaaacataagagaattcatactggagagaaaccctacaaatgtgaagaatgtggcaagagactttgcccaggnaatatagcagcaccaacgatgttaagtaatgccagtaaaggcgccaaacccgctccgttggnctgtggaggtcccggtgtcttagctgtggatctcccaatacctgcaggacacggggccacacagcctgggcctttaggagaagtaagaaccagacctggagctctgactgcagcgagagacaaaggccgcaccaaacccggaaaccgtcctcttcgctccagctgcgttcctgattggatggtttccagcccaccatccctgattggataa

SEQ ID NO: 16274 - DNA, 1428 bp, Homo sapiens
  SIMILAR (266)..(397): 811254mologous to Homo sapiens PEX3 protein,accession number AJ131389,Smith-Waterman Score=185.
ctaaaacttgaagtccctcatctcctccaccacctgggcatgcccttcctcctggtcctccaggccgctggtctggcggcagatctcagccagcatgctgttgatcatgcaggagggctgaggcaccgacgtccccgtgagcttcttcacgggacgtttttccggcaaagggtagatcttgcattggccagccggtagctgccgtctttgacgttgtccaggaggccttggcccctgaccacagagttctccatctgctgcctctcgaagacaagcaggaagggcagccctcttggccatggggatctccttggagtcagtctccttgttgttgaacgtggtatttagcagcatgtgaaacagcagtttcactgtgctgatggtgggatacttcaaggcagacagtatcttggccacttgcttgcagagctgcaggaattccaccagcccctggatggtggaccacttggtagcctccaacatcaggttgtgattgttgctgtcttcagatacaccagggatgacgcactgctgctctttgagcggcagcatgcagtgtccctgttttgctgtgtctgcttctccacaagagcatgtcaaaggccatggtgggctgctggaagtagtccaccggtggacagcaccaagagagcaggctctccagtttagggagctggaaagcctgctgatgccagcataggaggtcttcatgatgtccttgccatagtcggtggtggccctgcactccttgatgttgatgccccatttgatgaagagcaccggcatgatggtttccgctgtgttcttttcgagcacctcaaatgtcttcaggcaccggaacccacatacaggcttctcttctagctctgtgatgctgggactaggattctgcaaacacttttctcctttaccatctgttttcctgttaagttcttctggtagaagaaacctcacagagccccgggtatgcttgaccattgaaggccaggaggttaactgtctctgggacactggtgtagccttctcagtcttactttcctgtcccagacaactgtcctccagatctgtcactatccgaggggtcctaggacagccagtcactagatacttctcccagccactaagttgtgagtggggagctttactcttttcacatgcttttctaattatgcctgaaagccccactcccttgttagggagacacattcctccttcacttgcaactactactgcaacttgccttgcctgctttggagcttccctggtgtcacgtaaagagatgcctgtgggaagctgcaggccactgatacgtgtacaaaactggaattgcaaggtattaatccccataagaaaactcttcaagtttgcaaaattatttctgtgcatagagcctattaaaagtattctcagccgggcacagttgctcat

SEQ ID NO: 16275 - DNA, 3867 bp, Homo sapiens; identical to SEQ ID NO: 4425
  SIMILAR (377)..(919): 851254mologous to Homo sapiens cytokeratin 18 (424 AA),accession number X12883,Smith-Waterman Score=752.

SEQ ID NO: 16276 - DNA, 281 bp, Homo sapiens
  SIMILAR (191)..(3): 741254mologous to multiple sclerosis associated retrovirus protease,accession number AF009666,Smith-Waterman Score=235.
atggcccctgcttttgctaggatgtctctccctaacaaaggagtggggctttcaggcataattagaaaagcacgtgaaaagagtaaagttccccagtcacaacttagtgcctgggagaagtatctagtgactgcctgtcctaggatcccctcagatagtgacagatctggaggacagttgtctggcacagaagacatttttagtttgtggattcaatcttgaaaatatattggtctacaatcagctgcagttggaggctcccactgagaagaatgaaaaca

SEQ ID NO: 16277 - DNA, 2209 bp, Homo sapiens
  SIMILAR (2115)..(4): 991254mologous to Homo sapiens human liver glycogen synthase,accession number D29685,Smith-Waterman Score=3755.
atgaacttctctagatttgatcctgtgacggcgtgtgcccggcttgttattgttctgttggcccgacctgtgggcaagaggtcgcttgtgtccagaagtctccgaccttatgagaattactactatagtggagattctaaagggacatctggcgaagagaaggccaagaggctcttcctccctgaaccagggctgggacacggctgccataagggtgtgtccccaccgcccagcagtcagccccaggatcccacccgtcacgggttccagcccccaacacggccatcggagccctccctgaactttgcccccagcaccaagggcagatatatgggggcttatataccctcagtgcaacctggccccaaagatccccctgggctccccacaactcagcgtctgatcacatctactgtcactcagggcctcagggggcggggccttaagcattatccaatcagggatggtgggctggaaaccatccaatcaggaacgcagctggagcgaagaggacggtttccgggtttggtgcggcctttgtctctcgctgcagtcagagctccaggtctggttcttacttctcctaaaggcctatgctgtgtggccccgtgtcctgcaggtattgggagatccacagctaagacaccgggacctcctggaagccaaaaatggtgagagtgagggtccgacatcccgagagaggagagggactggttggaaccggtgaaaagtggctgtggcgggactcaggcctccccgcagtcagctccacagtctgctcccccagttctccttgctcagctcggcctcagtcctgttcagccataaaatggcagctgcgctgacagccaggcccccagaagtcctgcctcttcactgcgctgtgactgtgccctggcctggagcccactttgggcagctctgcacctgcagcatggcgtctctcccagattgtgcagggaccaggggaaggtcggcagctcagcgtctgatcacatctactgtcactcagggcctcagggggcggggccttaagcattatccaatcagggatggtgggctggaaaccatccaatcaggaacgcagctggagcgaagaggacggtttccgggtttggtgcggcctttgtctctcgctgcagtcagagctccaggtctggttcttctcctaaaggcccaggctgtgtggccccgtgtcctgcaggtattgggagatccacagctaagacaccgggacctcctggaagccaaaaatggcttctcattagaatcacatggccaatttgcagaaattccttgtgtcctccgcacagcttctgtttattgttctgggtggaagcatccatggagtcccttatgtgactctaagggaccattgcaatttagagatgtggccatagaattctctctggaggagtggcattgcctggacactgcacagcggaatttatataggaatgtgatgttagagaactacagtaacctggtcttccttggtattactgtttctaagccagacctgatcacctgtctggagcaaggaagaaaacctttgaccatgaagagaaatgagatgatagccaaaccctcagaggaacgatcaggcagcagtatctgcggttcagcaaaatccgctgttctgcagccaccgctgctgatacccaggcaaacagtgtctggagtggacctccagcaaacttcaacagacctgcagctgagggtcctgtctgttagaaggaaaactaacaaagagaaaggacatccacaccaaaaacccatctgtacatcaccatcatcaaagaccaaagagaagttcttaaaggacctgatggagctgaaaaccaaggcacgagagctatgtgacgaatgcagaagcctctgtagccgatgcgatcaactggaagaaagggtatcagcgatggaaaatgaaatgaatgaaatgaagcgagaagagaagtttagagaaaaaagaataaaaagaaacgaacaaagcctccaagaaatatgggactatgtgaaaagaccaaatctacatctgattggtgtatctaaaagtgacggggagaatggaaccaagttggaaagcattctgcaggatattatccaggagaacttccccaatctagcaaggcagaccaacattcaaatcaggaaatacagagaacgccacaaagatactcctcgagaagaggaattccaagacacataa

SEQ ID NO: 16278 - DNA, 1143 bp, Homo sapiens
  SIMILAR (43)..(135): 511254mologous to Homo sapiens SEQ ID NO 392 from WO9922243,accession number Y19674,Smith-Waterman Score=71.
atggaggcagttgaaagttggaattatgactctcatacttggatctgcttaacagttgagtttttttcttctgaggaggcaagaattgaggttgctgcagacctgtacccatacggattcactaccagtaacaggtgtataatggcccctgcttttgctagaatgtctctccctaaaaagcgagtggggctttcaggcataattagaaaagcatgtgaaaagagtaaagttccccagtcacaacttagtggctggaagaagtatctagtgactggctgtcctaggaaccctcagatagtgacagatctggaggacagttgtctgggacaggagacaagggtgcagaactggacagaggatgagatggatgaattgacaaaagtaggcttcagaagatgggtaataaactctgctgagctaaaggaacatgttctaaaccaattgaaagaagctaagaaccttgataaaaggcaagatgaagcccttaggccgttacacaacctccgcctcctgggttcaagcgattcccctgcttcagccgccgtagcacctgggactacagctcagcgtctgatcacatctactgtcactcagggcctcagggggcggggccttaagcattatccaatcagggatggtgggctggaaaccatccaatcaggaacgcagctggagcgaagaggacggtttccgggtttggtgcggcctttgtctctcgctgcagtcagagctccaggtctggttcttacttctcctaaaggcccaggctgtgtggccccgtgtcctgcaggtattgggagatccacggctaagacaccgggacctcctggaagccaaaaatgggaccattgcaatttagagatgtggccatagaattctctctggaggagtggcattgcctggacactgcacagcggaatttatataggaatgtgatgttagagaactacattaacctggtcttcctgggtattacggtttctaagccagacctgatcacctgtctggagcaaggaagaaaacctttgaccatgaagagaaatgagatgatagccaaaccctcagtgagcttccttcaagtttcacagggagaagcaaaggcccttctttgtgacttataaaagactgcacagtgtggctgct

SEQ ID NO: 16279 - DNA, 2097 bp, Homo sapiens
  SIMILAR (17)..(391): 981254mologous to Homo sapiens histone H2B,accession number Z80779,Smith-Waterman Score=613.
ctcactttgaagcatgctcgttccatctctgatccccccaccccatttctttggctcagggatcaggggttaggatttccctcttatcggcccctatttccctgccctatccagctacaggcaagaacgttagtctccttaccctgtgccctgtcccaatgtgtgcccgggctttgctccttgcgtgcagttcgaggggaagacatcgtttggaatgtcagtgttcaacctcagcaacgccatcaggggtgttgtggggcaggtgggaggcctggggccaggtctgagctgtgccacctgccgcagggccctgctgctgggcctgcacctctggcctggcctcctggaccttcaaccctgttcctgactccccccgctaggcatccgagcctatgagcagctgggacagaggggaagacggggtgggggcatgaagagaatccttctgcttacacctcccccacctgcaccagccatgtccagttacctgtgtgtctgcctgacagtttcctttggctggcagctaggcactgtgtcttcctgtctctctagggactggttcttgaagggaaacttataggtgtgagccaccacgcctggctgatttctgagactctgtgttttgcccctctttttgggacattgggacatagcttcctccatgacctggcttccctgctgcccccatcctcaggtcatctacaagaagttccaacttggctgtgctataggccacaatgaaacagcaatggagagtgaagctctcgtgggatgggaagaaggggatggacccctgttggctctaatcccatgtactcgggcattcccctagatgtcctacacagtgcccagagggacctggggcaagtctcagggtctgggcatgacagttccacgacctctacacctcaggccctccaagcgcaggatgcaggccgtggccaacgtgtccggcattggtcctggtgctctctccacatcctgcatcccgtaccctctgtctcatggcccaggcagtgtgaaggcggagatgctgcacatgtacagccagaaggacccgctcatccttcacgtggaaggggggcagcacttgggtcctgacttctgtcccaccctactctggccacagatccgccgggccctgcagcagctgcttttcccaggcaaggccttcagctggccacgacatgtggccatagctctgatcctgcttatctaatatgggccttgtccccaagtcaggttgactcctgtcccttcttcttgttctccagggtccacctcagcccccagcctcatcttcatcctccccagcatgtggttgtcagaggcgggggacagcagaggctgcagactggcccacttccctcctccccagggatgccaagcttggatcatggccctaatcccaaccccaaccccatgggaggacaaaaaaaacccgaagaaaacagtccaaggccctccaacctctgactacatttttgaaagggaatctaagtgtggtgcgcacaattaccatcctttacctgtagccctggagagaggaaaatgtatttacttatgggatgtagaaggcagaaaatattttgactttctgagttcttacagtgctgtcaaccaagggcattgtcaccccaagattgtgaatgcactaaagagtcaagggaagaaattgaccttaacctctagagctttctataataacgtacttggtgaatatgaggagtatattactaaacttttcaactaccacaaagttcttcctatgaatacaggaatggaagctggagagactgcctgtaaactagctcataagtggggctatactgtgaagggcattcagaaatacaaagcaaaggttatttccgcagctggaaacttttggggtaggacgttttctgctatctccagttccacagacctgacgagttatgatggttttggaccgtttatgcctggcttcgacgtcattccctgcaatgatctgcctgcactggagagtgcttttcagaatccaaatgtggctgcattcatggtagaaccaattcagggtgaagcaggtgttgttccagatccaggttacttaatgggagt

SEQ ID NO: 16280 - DNA, 2070 bp, Homo sapiens
  SIMILAR (302)..(463): 981254mologous to Homo sapiens histone H2B,accession number Z83740,Smith-Waterman Score=256.
acccgactgcagacataccgacccgcaatccgggtcgacccacgcgtccgcattgttaaagctcggcgctgacaagatctgaggcttttctatttgaaggacacaatgttttccaaactagcacatttgcagaggtttgctgtacttagtcgcggagttcattcttcagtggcttctgctacatctgttgcaactaaaaaaacagtccaaggccctccaacctctgatgacatttttgaaagggaatataagtatggtgcacacaactaccatcctttacctgtagccctggagagaggaaaaggtatttacttatgggatgtagaaggcagaaaatattttgacttcctgagttcttacagtgctgtcaaccaagggcattgtcaccccaagattgtgaatgctcttgaagagtcaagtgggacaaaattgacctttaacatctagagctttctataataacgtacttggtgaatatgaggagtattattactaaactttttcaactaccacaaagttcttcctatgaatacaggagtggaggctggagagactgcctggtaaactagcttcgtaagtgggggctattaccgtgaagggcattcagaaatacaaagtcaaagattgtttttgcagctgggaacttctggggtaggacgttgtctgctatctccagttccacagacccaaccagttacgatggttttggaccatttatgccgggattcgacatcattccctataatgatctgcccgcactggagcgtgctcttcaggatccaaatgtggctgcgttcatggtagaaccaattcagggtgaagcaggcgttgttgttccggatccaggttacctaatgggagtgcgagagctctgcaccaggcaccaggttctctttattgctgatgaaatacagacaggattggccagaactggtagatggctggctgttgattatgaaaatgtcagacctgatatagtcctccttggaaaggccctttctgggggcttataccctgtgtctgcagtgctgtgtgatgatgacatcatgctgaccattaagccaggggagcatgggtccacatacggtggcaatccactaggctgccgagtggccatcgcagcccttggaggtttttagaagaagaaaaccttgctgaaaatgcagacaaattgggcattatcttgagaaatgaactcatgaagctaccttctgatgttgtaactgccgtaagaggaaaaggattattaaacgctattgtcattaaagaaaccaaagattgggatgcttggaaggtgtgtctacgacttcgagataatggacttctggccaagccaacccatggcgacattatcaggtttgcgcctccgctggtgatcaaggaggatgagcttcgagagtccattgaaattattaacaagaccatcttgtctttctgagggtagccagctgttttcagtggtccctgggagccagctggagacaggtggtcctgtaaaagctttattcctaatgtgggcacattccactcccatgagtcttcaaaaactttttttttgaatatatttttttcagttgatacataatagaacaacgtttatgaacctgccgtttgctttgtaacgtaactaaataatgtaatggcatctatattcagttgaagtgttttgatgtgcatgtgtacttcctaaggtgaaatgcatctatatacagacagcctctaaatcaagtccttcagtataattgatatatgtttttataatttcctcactggtataagtgtttcatatttgaaaaagttatctctgggtattgcataaaaggcttcatcttataaagtgaaatcattgttattgaattttaggaaggattaatggttaagtgtatataaaatactaatattaagtaaacttcatattggccaacaccagggttgtattctatggatgtcattattttgaattaagaattagtgtttaacattcctaaattgttttgagtgcttgattataatttgtaaaaaatgtttattttcaatacttctttaaatttaaaataaagcttatatttc

SEQ ID NO: 16281 - DNA, 2169 bp, Homo sapiens
  SIMILAR (307)..(675): 1001254mologous to Homo sapiens rhabdoid tumor deletion region protein 1,accession number AF133587,Smith-Waterman Score= 635.
tcaggtcgggggtctcctctcctcctgcaatgccttgggcgtgggtccagccttgtctgagacacagagaaatggacctccagtgcggaagatctgcaccaacattcgaaagaaaaaagatatgcagccagggatgagaaccaatggcccaccctgctgagtgctggaatgtgtaatgaagtcctgcgtgggtctgtaatgaacccagattcggctcctaacaggtgctgagtgcatgtttgcaaacccaggcgcctgttgcaaggagaggacagagctaaagcaaggagccttgaaaggtagagagtggaatcgttgccctgagcacctgggtgtggtcgcagcatcccccgtgaggcctcccaacctgcagctgcctcctgcgtgcgcatctgccactgctggctttagggccagggccaggcccagcattctactgtcacacttctggtggaggcttttaatgatccagtttcctggactcctctccagaggctctgatcctgccacgctggtgttggagcctgggtgtctgtatttttcaaaaccaccccaagtgatctgctgtagtgtatagcctgcatccctgaccccagtagccagctggtcagggactgtccttggttttctgccctcagctcgccgtggagacagcctgtgggacctgggagagacgaaggaaaggactgggcactcagtggggctgcagaactggcttgaagggtatagcaatgtggggacccagcaaaatcctggtgtgggaaccagcagacttggctgctcagaacggcagcctaactctgtaaggttctcatttcccaatcctttccttctccccacggctgcccagaaccatggtcctcccgggctctcaggtggtccctggcagctgagctgtgccacctcctcggaaggcccctcgtggccctgaaagggaaccttcagaagcgtgtgcccacagccaagatggggcctaaagtataattcaacttttagctccttacaagcatccccagatggatttctagcttccgtccctctcttgggcccagctctgtctctacgtggtgcctggaagtccctctggccccacgcacttcctcgtcttgttcccaaagctgctttgcttcttaccttcccatcttggtggacaccatctccatcttcctggtcatcctggctcaaaactttggccatactttcctccttcctcccttggccctgcactgaaatgtcaagaaggtccagacctgtgctcagtacccgcagggtgcacatgtgttccaggagggcgaggaacagtggcagctggaatcctgagctaggtttctctggttttgtcacaagctccctgccaagcagccaggtgagcggctccagtccaggcctgtggcctccctcatccacagcagtgattgcctcgtcactatgggtgtagttgggtgcatcagagcccaccaggcccagccccacggtgtgcacacatgcccctgaactggctaggcttcctgtcctgacatctgccaatcctgaacggcttcttgaccctaatggatcactcaggggagtgggtgctggcagcacagtgggtgtccctggcagcacagtcagacccccatcagcaggggattggccgtcactgggtggacggcagcatctaggaatcaggtttcgaaggatggtgtagaatggttgccgggggccgggcagtggagaggtgcttcgagccgagggctcagcatgtgcaaatgtgcagaagtgtgaaacagccccgctggagtcattcagctggctaggcaaatccgtcaaagccacgcacactggcatggtcggcctctgtttttcatctgtataatgggctttgtgctcccttagggctcctcctgtgggttctgctgctggaccagggctcagcctccagtttagcttgagggtgcccaggcctgcagaaggtgtcaagcaagggctgggagagggggaggaaggaggaggcaggaaggcaacgggaggggaaggaggagggcagaggaagggtctccgagtgcctctcactcccgcctcagctctccgctccagtggtcccatatagggctctgggtcccaaacaccagaggaaggagcggggacagcccaggcttcttccctgggtcttgttcctgagctgcccat

SEQ ID NO: 16282 - DNA, 2257 bp, Homo sapiens
  SIMILAR (741)..(499): 611254mologous to Homo sapiens uncharacterized hematopoietic stem/progenitor cells protein MDS029,accession number AF220049,Smith-Waterman Score=218.
gagccggacgtgtgcgcgaagatggcgggccggagcatgcaagcggcaagatgtcctacagatgaattatctttaaccaattgttcagttgtgaatgaaaaggatttccagtctggccagcatgtgattgtgaggacctctcccaatcacaggtacacatttacactgaagacacatccatcggtggttccagggagcattgcattcagtttacctcagagaaaatgggctgggctttctattgggcaagaaatagaagtctccttatatacatttgacaaagccaaacagtgtattggcacaatgaccatcgagattgatttcctgcagaaaaaaagcaatgactccaacccttatgacaccgacaagatggcagcagaatttattcagcaattcaacaaccaggcctactcagtgggacaacagcttgtctttagcttcaatgaaaagctttttggcttactggtgaaggacattgaatccatggatcctagcatcctgaagggagagcctgcgacagggaaaaggcagaagattgaagtaggactggttgttggaaacagtcaagttgcatttgaaaaagcagaaaattcgtcacttaatcttattggcaaagctaaaaccaaggaaaatcgccaatcaattatcaatcctgactggaactttgaaaaaatgggaataggaggtctagacaagggggttttcagatattttccgacgagcatttgcttcccgagtatttcctccacagattgtggagcagatgggttgtaaacatgttaaaggcatcctgttatatggacccccaggttgtggtaagactctcttggctcgacagattggcaagatgttgaatgcaagagagcccaaagtggtcaatgggccagaaatccttaacaaatatgtgggagaatcagaggctaacattcgcaaactttttgctgatgctgaagaggagcaaaggaggcttggtgctaacagtggtttgcacatcatcatctttgatgaaattgatgccatctgcaagcagagagggagcatggctggtagcacgggagttcatgacactgttgtcaaccagttgctgtccaaaattgatggcgtggagcagctaaacaacatcctagtcattggaatgaccaatagaccagatctgatagatgaggctcttcttagacctggaagactggaagttaaaatggagataggcttgccagatgagaaaggccgactacagattcttcacatccacacagcaagaatgagagggcatcagttactctctgctgatgtagacattaaagaactggccgtggagaccaagaatttcagtggtgctgaattggagggtctggtgcgagcagcccagtccactgctatgaatagacacataaaggccagtactaaagtggaagtggacatggagaaagcagaaagcctgcaagtgacgagaggagacttccttgcttctttggagaatgatatcaaaccagcctttggcacaaaccaagaagattatgcaagttacattatgaacggtatcatcaaatggggtgacccagttactcgagttctagatgatggggagctgctggtgcagcagactaagaacagtgaccgcacaccattggtcagcgtgcttctggaaggccctcctcacagtgggaagactgctttagctgcaaaaattgcagaggaatccaacttcccgttcatcaagatctgttctcctgataaaatgattggcttttctgaaacagccaaatgtcaggccatgaagaagatctttgatgatgcgtacaaatcccagctcagttgtgtggttgtggatgacattgagagattgcttgattacgtccctattggccctcgattttcaaatcttgtattacaggctcttctcgttttactgaaaaaggcacctcctcagggccgcaagcttcttatcattgggaccactagccgcaaagatgtccttcaggagatggaaatgcttaacgctttcagcaccaccatccacgtgcccaacattgccacaggagagcagctgttggaagctttggagcttttgggcaacttaaaggataaggaacgcaccacaattgcacagcaagtcaaagggaagaaggtctggataggaatcaagaagttactaatgctgatcgagatgtccctacagatggatcctgaataccgtgtgagaaaattcttggccctcttaagagaagaaggagctagcccccttgattttgattga

SEQ ID NO: 16283 - DNA, 2181 bp, Homo sapiens
  SIMILAR (361)..(786): 751254mologous to Mus musculus Pro-Pol-dUTPase polyprotein,accession number Y12713,Smith-Waterman Score=558.
atggggcagggcctgggcaccctcaagctaaactggaggctgagccctggtccagcagcagaacccacaggaggagccctaagggagcacaaagcccattatacagatgaaaaacagaggccgaccatgccagtgtgcgtggctttgacggatttgcctagccagctgaatgactccagcggggctgtttcacacttctgcacatttgcacatgctgagccctcggctcgaagcacctctccactgcccggcccccggcaaccattctacaccatccttcgaaacctgattcctagatgctgccgtccacccagtgacggccaatcccctgctgatgggggtctgactgtgctgccagggacacccactgtgctgccagcacccactcccctgagtgatccattagggtcaagaagccgttcaggattggcagatgtcaggacaggaagcctagccagttcaggggcatgtgtgcataccgtggggctgggcctggtgggctctgatgcacccaactacacccatagtgacgaggcaatcactgctgtggatgagggaggccacaggcctggactggagccgctcacctggctgcttggcagggagcttgtgacaaaaccagagaaacctagctcaggattccagctgccactgttcctcgccctcctggaacacatgtgcaccctgcggcttctgaaggttccctttcagggccacgaggggccttccgaggaggtggcacagctcagctgccagggaccacctgagagcccgggaggaccatggttctgggcagccgtggggagaaggaaaggaaaaccaaggacagtccctgaccagctggctactggggtcagggatgcaggctatacactacggcagatcacttggggtggttttgaaaaatacagacacccaggctccaacaccagcgtggcaggatcagagcctctggagaggagtccaggaaactggatcattaaaagcctccaccagaagtgtgacagtagaatgcttcatcttcaggcagctttcctcatagtcacagaatggctgctgcagctccaggccaatccctggcaagcagaatgggtccccgtgattgacttagatcagtcaggatttacctctgagcaaggaaacatttacgtatttggtcctctgatgaatgactgtccccagcagatggcaagttccttgcaggccaaaacctgggctgcttttgctcatcagtgctcagctgccaaggggcagctgcacacagagttgctccatgaagatgcgttgaagaaatggaccagtccagcaatgggctgggaacgcagcaggagccatgacaagcccaggcggctctcccgacccttggtgcccccgaggccatttccccgcgctccctgtgccggcagcagccgcgtgcggagagggctcgccgaccagaaggggcagcagttccctacacagcggtccctgctccccaccggcagtgcttccttcaccccagaccggggctgcgcagagtcctggtgcctcaggccgcgggcgctgattggctgctcgctgacatcctcaaacccggctgctccgcgctgggctcgggaggggggcggctgcgggtggaggtgcgcttctgacaagcccgaaagtcatttccaatctcaagtggactttgttccaactattgggggcgtcgctccccctcttcatggtcgcgggcaaacttcctcctcggcgcctcttctaatggagccccacctgctcgggctgctcctcggcctcctgctcggtggcaccagggtcctcgctggctacccaatttggtggtgctgggcccagggctgtgtggctgtgaatatctttgcagacatctacctgtggtgggttcgtggtctcactgacttcaagaatgaagccacgtacctttgcgcctggcccctgccgccctgcacccgctcctctcccaaccccaacatgggttgtaaacatgttaaaggcatcctgttatatggacccccaggttgtggtaagactctcttggctcgacagattggcaagatgttgaatgcaagagagcccaaagtggtcaatgggccagaaatccttaacaaatatgtgggagaatcagaggctaacattcgcaaactttttgctgatgctgaagaggagcaaaggagggtaatgtga

SEQ ID NO: 16284 - DNA, 450 bp, Homo sapiens; identical to SEQ ID NO: 4249
  SIMILAR (46)..(378): 1001254mologous to Homo sapiens hnRNPcore protein A1,accession number X79536,Smith-Waterman Score=577.
  misc_feature (1)...(450): n = a,t,c or g

SEQ ID NO: 16285 - DNA, 501 bp, Homo sapiens; identical to SEQ ID NO: 4250
  SIMILAR (10)..(141): 401254mologous to Homo sapiens PRO2130,accession number AF119862,Smith-Waterman Score=80.

SEQ ID NO: 16286 - DNA, 636 bp, Homo sapiens; identical to SEQ ID NO: 5058
  SIMILAR (331)..(696): 301254mologous to Homo sapiens p40,accession number U93567,Smith-Waterman Score=123.

SEQ ID NO: 16287 - DNA, 765 bp, Homo sapiens; identical to SEQ ID NO: 4251
  SIMILAR (357)..(193): 451254mologous to Homo sapiens Human secreted protein sequence encoded by gene 6 SEQ ID NO:72,accession number Y91351,Smith-Waterman Score=77.

SEQ ID NO: 16288 - DNA, 1042 bp, Homo sapiens
  SIMILAR (706)..(1179): 251254mologous to Girardia tigrina myosin heavy chain,accession number U91585,Smith-Waterman Score=148.
gagctgtgggaccagaccccagcacacattgtcagcagcagctgcctctcagccagatatgcctaagaggaaactgtggggtgtttgtgagcctagagggggctggtttgccctggttcaaaaattaagctttatagagaagctgacaccagctctctataaaatgtcctacctggcagccatcttgaaggactatgtggtaaggagagatccaaagaccaagtgctccaggggctttgggtttgtcacttatgccactgtggaggaggtggatgcagccatgaatacaaggccacacaaggtggatggaagagttgtggaaccaaagagagctgtctcaagagaagattctcaaagaccaggtgcccgcttaactgtgaaaaagatatttgttggtggcattaaagaagacactgaagaacatcacctaagaaattattctgaacaatatagaaaaattgaagtgattgaaattacgactgacagaggcagtgtcaagaaaaggggctttgctcttgtaacctttgatgaccatgactctgtggataagattgtcattcagaaataccattctgtgaatggccacaactatgaagttaggaaagccctgccaaacaagagatggctagtgtttcatccagacaaagaggtcgaaatggttctggaaactttggtggtagtcgtggaggtgtttatggtgggaatgacaactttggttgtggaggaaacttcagtagctttggtggcagtggggatggctataatggattcggtgatgatggaggcagttttggaggtggtggaagctacaatgattttgggcattatcacaatcagtttttcaaattttgggaccgatgaggggaagaactttggagccagtatctctgcccccctgtgtggtggaggcaatacttcgccaaccagaggatccccgtcttcgaaagagcctgaagagctgcagaaacttttcattggatggctgggctttgaaacaactgatgagagcctgagggaccatttgagccatggggaatactga

SEQ ID NO: 16289 - DNA, 2017 bp, Homo sapiens
  SIMILAR (3)..(137): 911254mologous to Mus musculus Pro-Pol-dUTPase polyprotein,accession number Y12713,Smith-Waterman Score=212.
  misc_feature (1)...(2017): n = a,t,c or g
ccatatgtggcccagggggacctgagtggattccaagacattggtggctacacaaaaaggaaactggacttttattccacgctgttggctggcagtccaggacctcagcatccaggaagtcacctttgtcctcagaccaacctggaaaaatctcgcttttctgcccgtggacaccgccgaagaagcactcgttaaaagtctcctcttcaccctgccgtcattggtctaaagtcaaagtctcctaaagagccccgaacagcctgaggggngggaagctcttcattckgagggttygagctttgaaacaactcgatgagagcctcgaggagccatttttgagcaaatgggggaaacgcthcacggacttgtgtggtaatgagagatcccaaaccaccaagcgctccagggggcttttgggtttgtcacataatgccacttgtggaggaggtggatgcagcctatgaatgcaaggcccacacaaaggtggattggaagagttgttggaacccaaagaggagcttgtcttccagaggaagatttctcaaaggaccaggttgcccacattaacttgtgaaaaaagatattttgtttggttggcattaaaagaagacacttgaaagaacattcacctaaagagattattttgaagagattattttgaacagtattggaaaaatttgaagtggttgaaatccattgactggaccggaggccagtggccaagaaaaaggggctttgccttttgtaacctttggacggaccatggactccgtgggataagattgtccatttcaggaattaccatactgtgaatgggccacaacctgtgaagtttagaaaagccctgtcaaaagccaagaagatggctagtgctttcatccaagccaaaagaggtccgaagtggttctgggaaacttttggtggtgggtcgtggaggtgggtttcggtgggaatgacaacttcggtccgtggaggaaacttcagttggtccgtggtggcctttggtggcagccgtggttggtggtggatatggttggcagtggggatggcctataatggatttggaactgatggaagcaattttggaggtggtgtgaagctacaatgattttgggaattacaacaatcagtcttcaaattttggacccatgaaagggaggaaatttttggaggcagaagctctggcccctatgggcggtggaggccaatacttttgctaaaccccgaaaaccaaggtggctatggcggttccagcagcagcaagtaactattggcagtggcagaagattttaattaggaaacaaagcttagccaggagaggagagccagagaagttgacagggaagctacaggttacaacagatttgtgaactcagcctaagcacagtggtggcagggcctagcctgctacaaagaagacatgttttagacaaatactccatggtgtaatgggcaaaaaactccgaggactgtatttgtgactaattgtataacaggttattttagtttcctgttcctgtggaaagtgtaaagcattcccaccaaagggttttaatgtagattttttttttttgcaccccatgctgttgattgctaaatgtaacagtctgatcgtgacgctgaataaatgtcttttttttttaatgtgctgtataaagttagtctgctctgaagccatcttggtaaattttccccaagagtgtgaagttagaattccttcagggtgatgccaggttctttttggagtttatatacaacctgcttgggtggagaagccattgtcttcagaaaccttggtgtaggtgaactgatggttactgttgcgatctgaagttcaccattaaaagggattacccaagcaaaatcatggaattattggttataaaaatgattgttggcccatcctatgcaatatatctaaattgaataatggtaccagataaaattatagatgggaatgaagcttgtgtatcattcattatcatgtgtaatcaataaacgatttaattctcttgaa

SEQ ID NO: 16290 - DNA, 439 bp, Homo sapiens; identical to SEQ ID NO: 11208
  SIMILAR (163)..(783): 681254mologous to Mus musculus Pro-Pol-dUTPase polyprotein,accession number Y12713,Smith-Waterman Score=702.

SEQ ID NO: 16291 - DNA, 408 bp, Homo sapiens
  SIMILAR (375)..(328): 501254mologous to Homo sapiens thrombopoietin,accession number AB014682,Smith-Waterman Score=42.
cagaacctgacagcccagagaagtaggttgggagcctgcggcgtccagggcctccgcgcgaagaaacaaggcgtctgcgggaaaggagacggagcctggaaccctgggcttttctacttaaggaagcgaaggtcgggtgacagccaagctccctgttccagtgggaaggccccatgggtctgtgttccacgcctcttgtcatgaatatgggggattcacttataaccaaagcatttgttccaggtcccaccactaactattactagtcctgggcccagaaccaggcgtcctcactcctagtacccaagcccttctctagccacaggtgtttgggctgcggtgtggtgtaagcagccccattttcccgcaaagtgatgggaagagacactgagtcacacgggctcagga

SEQ ID NO: 16292 - DNA, 418 bp, Homo sapiens
  SIMILAR (135)..(212): 1001254mologous to Homo sapiens RIP protein kinase,accession number U50062,Smith-Waterman Score=128.
cggcacgagggaagagatcggtacagacccgggcatgaccccagcacgtgggagtgatgtgttggaggtgtgcaccaggctcttgaggcgctggctctgccagcctcaggcatagcacctttcctgcccacaggcacaacgaggccctcttggaggaggcgaagatgatgaacagactgagacacagccgggtggtgaagctcctgggcgttcatcatagaggaagggaagtactccctggtgatggagtacatggagaagggcaacctgatgcacgtgcttgaaagccgagggtagagagggcccctccgcacggggattccccagcgctttgggccctggctgtttgttatggctccccttaggggtggttgttgcagctccgtaacatacaatttgcccattgcttgggaggttg

SEQ ID NO: 16293 - DNA, 2016 bp, Homo sapiens
  SIMILAR (395)..(1120): 741254mologous to Mus musculus Pro-Pol-dUTPase polyprotein,accession number Y12713,Smith-Waterman Score=1011.
atgcaaccagacatgtccttgaatgtcattaagatgaaatccagtgacttcctggagagtgcagaactggacagcggaggctttgggaaggtgtctctgtgtttccacagaacccagggactcatgatcatgaaaacagtgtacaaggggcccaactgcattgagcacaacgaggccctcttggaggaggcgaagatgatgaacagactgagacacagccgggtggtgaagctcctgggcgtcatcatagaggaagggaagtactccctggtgatggagtacatggagaagggcaacctgatgcacgtgctgaaagccgagatgagtactccgctttctgtaaaaggaaggataattttggaaatcattgaaggaatgtgctacttacatggaaaaggcgtgatacacaaggacctgaagcctgaaaatatccttgttgataatgacttccacattaagatcgcagacctcggccttgcctcctttaagatgtggagcaaactgaataatgaagagcacaatgagctgagggaagtggacggcaccgctaagaagaatggcggcaccctctactacatggcgcccgagcacctgaatgacgtcaacgcaaagcccacagagaagtcggatgtgtacagctttgctgtagtactctgggcgatatttgcaaataaggagccatatgaaaatgctatctgtgagcagcagttgataatgtgcataaaatctgggaacaggccagatgtggatgacatcactgagtactgcccaagagaaattatcagtctcatgaagctctgctgggaagcgaatccggaagctcggccgacatttcctggcattgaagaaaaatttaggcctttttatttaagtcaattagaagaaagtgtagaagaggacgtgaagagtttaaagaaagagtattcaaacgaaaatgcagttgtgaagagaatgcagtctcttcaacttgattgtgtggcagtaccttcaagccggtcaaattcagccacagaacagcctggttcactgcacagttcccagggacttgggatgggtcctgtggaggagtcctggtttgctccttccctggagcacccacaagaagagaatgagcccagcctgcagagtaaactccaagacgaagccaactaccatctttatggcagccgcatggacaggcagacgaaacagcagcccagacagaatgtggcttacaacagagaggaggaaaggagacgcagggtctcccatgacccttttgcacagcaaagaccttacgagaattttcagaatacagagggaaaaggcactgtttattccagtgcagccagtcatggtaatgcagtgcaccagccctcagggctcaccagccaacctcaagtactgtatcagaacaatggattatatagctcacatggctttggaacaagaccactggatccaggaacagcaggtcccagagtttggtacaggccaattccaagtcatatgcctagtctgcataatatcccagtgcctgagaccaactatctaggaaatacacccaccatgccattcagctccttgccaccaacagatgaatctataaaatataccatatacaatagtactggcattcagattggagcctacaattatatggagattggtgggacgagttcatcactactagacagcacaaatacgaacttcaaagaagagccagctgctaagtaccaagctatctttgataataccactagtctgacggataaacacctggacccaatcagggaaaatctgggaaagcactggaaaaactgtgcccgtaaactgggcttcacacagtctcagattgatgaaattgaccatgactatgagcgagatggactgaaagaaaaggtttaccagatgctccaaaagtgggtgatgagggaaggcataaagggagccacggtggggaagctggcccaggcgctccaccagtgttccaggatcgaccttctgagcagcttgatttacgtcagccagaactaa

SEQ ID NO: 16294 - DNA, 770 bp, Homo sapiens
  SIMILAR (699)..(884): 771254mologous to Homo sapiens mariner transposase,accession number U52077,Smith-Waterman Score=249.
agggactgaaacataaaataaccagtgtccagaggcaagtgacatatgccttacgcttgtggccatccttcatttcttcattcgtaaactttgcttaaaagactaaaattcccaattccttataaaaaatatattcttgccctcagccctgatggccactggcaaatacttttattttccaattgataagagagcctccttcatcttcttggtcatagttgggatgaggtgcatgtggtcatccacacacttggtcacacaactgtccagctgctgcttcacctgaagctccttactcccagcatctattgaatctttggctttgtcgttgcaatgcatggtgcaccgggccaggcggtcctggaacttctccagctcactggtgaccaaagcctgggcttgagccagaggcacatggcagcgctcgatgcactggtgcacctgcttcatggaggcctggctgtcctcacaacagctggcgctgcaccggaacatgagaccagaggcattgcggggctcagagaagaacagtgtagaaacccgcgctgtgtgaagcgaggttgggcgcaagagaagcaggcatgacctggccaacggggaggccggaagtcctcgcctttctggtctttcacgttggcagcgcctctgctgggcctcgggccgctcacctgcatcttccggatgttctctctctccagactcttcaccatggactccaccgcctcctgcacccggagctgctgcagctcagccatggccccacgcgtccg

SEQ ID NO: 16295 - DNA, 2879 bp, Homo sapiens
  SIMILAR (1360)..(1920): 941254mologous to Escherichia coli CG site No. 872,accession number U00039,Smith-Waterman Score=854.
atggtggagctgcagcagctgcgggtgcaggaggtggtggactccatggtgaagagtctggaaagggagaacatctggaagacacagggtctcatgttctggtgcagcgccagctgttgtgaggacagccaggcattcacccagcaggtgcaccagtgcatcgagtgctgccctgtgcctctggctcaagtccaggccttggtcaccagtgagttggagaagttccaggaccacctggctcggtgcaccatgcattgcaatgacaaagccaaagattcaatagatgctgggagtaaggagcttcaggtgaagcagcagctggacggttgtgtgaccaatcctgaaaagggaagtggaaaaaagtgtgctaaattgggtcagagatattacgggagagttttagagcttattcttcctgtggccagtgcttgtcctggaagtaaggatctcctctgtaacaagccagagccctccaacataccagactcttcttactacacaggagggctcatctctgggcaggtgctggggccacaagacagatacgaatggaactttgtactcttcggggacggtacggggggcgggcaagaaacaataaacaagccggcaaagaaagcgccacaaaattccaggtggcgatatccaggttacagaatgagagtctgtagtgcgacaaaaagaatgagccactggtactccacacccatcagcctgctggatctcccggggagttacgctgatcaaaccagccacagaactcccttcagccaaagccgaatccagagcaaggccccaactctcttcaatcctatgcaggatgagagaagtgaggaaattgcagaagaaaagttggaagctagcagagacgccttgtttcttcgcgcggaggccctggacgccgcaggctcccaacctacttctctgggctgtcaggttctgaacccggtcctgaagaggccctggcgccggggggccggggcagggggaggaggcagcgcgaacagtccacgccctccagccgggcgcgctcgacgcggacggcgggccagctgccggagcgcggcgactccaggggacccacagctggggcgccagagcgcggccatccgggcggggccgacggagcgcggcaggacttggctggacggcgcggccacggagaagggcgcgggtacagctctgccggggggggaaaaagtggtaccattttgggcgttcttgagcttcagaatgcaaccagacatgtccttgaatgtcattaagatgaaatccagtgacttcctggagagtgcagaactggacagcggaggctttgggaaggtgtctctgtgtttccacagaacccagggactcatgatcatgaaaacagtgtacaaggggcccaactgcattgagcacaacgaggccctcttggaggaggcgaagatgatgaacagactgagacacagccgggtggtgaagctcctgggcgtcatcatagaggaagggaagtactccctggtgatggagtacatggagaagggcaacctgatgcacgtgctgaaagccgagatgagtactccgctttctgtaaaaggaaggataattttggaaatcattgaaggaatgtgctacttacatggaaaaggcgtgatacacaaggacctgaagcctgaaaatatccttgttgataatgacttccacattaagatgagtactccgctttctgtaaaaggaaggataattttggaaatcattgaaggaatgtgctacttacatggaaaaggcgtgatacacaaggacctgaagcctgaaaatatccttgttgataatgacttccacattaagatgtggagcaaactgaataatgaagagcacaatgagctgagggaagtggacggcaccgctaagaagaatggcggcaccctctactacatggcgcccgagcacctgaatgacgtcaacgcaaagcccacagagaagtcggatgtgtacagctttgctgtagtactctgggcgatatttgcaaataaggagccatatgaaaatgctatctgtgagcagcagttgataatgtgcataaaatctgggaacaggccagatgtggatgacatcactgagtactgcccaagagaaattatcagtctcatgaagctctgctgggaagcgaatccggaagctcggccgacatttcctgtgggtacaattcagaaacagccaaatggaagagatgtacaaggcattgaagaaaaatttaggcctttttatttaagtcaattagaagaaagtgtagaagaggacgtgaagagtttaaagcgcgcctacctgccgcacctagtaaccgcagagcgcctacctgccgcacctcggaaccgcagagcgcctacctgccgcacctcggaaccgcagagcgcctacctgccgcacctcggaaccgcagagcgcctacctgccgcacctcggaaccgcagagcgcctacctgccgcacctcggaaccgcagagcgcctacctgccgcacctcggaaccgcagagcgcctacctgccgcacctcggaaccgcagagcgcctacctgccgcacctcggaaccgcagcgcgcctacctgccgcacctcggaaccgcagcgcgcctacctgccgcacctcggaaccgcagcgcgcctacctgccgcacctcggaaccgcagcgcgcctacctgccgcacctcggaaccgcagcgcgcctacctgccgcacctagtaaccgcagcgcgcctacctgccgcacctagtaaccgcagcgcgcctacctgccgcacctagtaaccgcagagcgcctacctgccgcacctagtaaccgcagagcgcctacctgccgcacctagtaaccgcagagcgcctacctgccgcacctagg

SEQ ID NO: 16296 - DNA, 1363 bp, Homo sapiens
  SIMILAR (242)..(126): 871254mologous to Homo sapiens Human secreted protein, SEQ ID NO: 5576,accession number G01495,Smith-Waterman Score=179.
cctgctgcagctgtggaactggtcctatcagccatatgcagtatcctgggtctgatttcccctgctcttaccttggagcacacagcccgtgctaagggttctgtgcctccccacatcactccccgtgttggcctctccaaagacagtctctttcacacacctcccctgccccaggactcctcatcagatgaaacgaacccctctcatgtcctggatccagtgaaccactttcactttgttagtggggacacaagtttcatccaaattggcaagccactcctgctgcccccaaccactctgggttggattagtggtcattccccaggaggacttttatctgtggagcagactctagggcagctttctgcagtcgggtccatatatagtggcccttatatcaggatgcaaatgagtatggctttcactgagtaccagagaggatttcctcaggaatcacaaatactggtgaattccatgggccaaccgactcttctatatgtcctgcttccaattgcccttttactaattgatggagttgaatcagtttcccctgtgataggggccactgatccacccatacaggtttgtcagtcagccactctagcggcaaagcaggcactgaccaatacctctttagggtatatcgctgccggcatactcagaatccttgcccttcttgtactgtgtcactttgtggggttggtgcttgccacacttcttacagaaagtccagtgggttttagggacattcgccatgtttgtgtgagtgctgtcagcatggaaagcgataccaaatgtggcaaagcttttaagtggtcctcataccttagtagacataaggtcattcatattggaattcatactgaggagaaattctacaaatgtgaagaatgtggcaaagggctttactggtcctcttcccttactaaagaatgtggaaaagcttttaaacggtacttaaaccttactacacataagataattcctgctggagagaaaccctacaaatgtgaagaatgtggcaaagcttttaacaaatcttcatccattactaaacataagataattcatactggagagaaaacctacaaatgtgaggaatgtggcaaagcctttaacctgtccccccaacttactgcacataagataacttatactggagagaagccctacaaatgtgaaaaatgtggcaaacattttaaccaatcatcaacccttactacacatatgttaattcatgctggagagaaaccctacaaatatgaagaatgtggcaaagcttttaaccaatcctcaaaacttactaaacataagataactcatactggagaaaaatcctacaaatgtgaagaatgtggccaag

SEQ ID NO: 16297 - DNA, 312 bp, Homo sapiens
  SIMILAR (198)..(314): 891254mologous to Homo sapiens Human secreted protein, SEQ ID NO: 5576,accession number G01495,Smith-Waterman Score=181.
gggatgcagctccgtggctaagtagggatccccagtgactggccccaaatatcccctaagactgaccctcgttctgcagcccctcaactcgaaccgagctgcccacctttcccgggggtcggaggggcaggacgtagcgcaagcccatgtcggggttacagcttccaacccactgagttaagcaataaaacggtctgctgtcctgaccccgcccccacagggcccgcggcggagcccgcgtacgccccccagttttctcgtccccagccgcactccagctggtccttctctaggcagatccggaggcggccg

SEQ ID NO: 16298 - DNA, 870 bp, Homo sapiens
  SIMILAR (178)..(5): 751254mologous to Homo sapiens neutral protease large subunit,accession number M27826,Smith-Waterman Score=207.
cggccgagtcgacgtttgctgagaatcatcatggaccattatgattctcagcaaaccaacgattacatgcagccagaagaggactgggaccgggacctgctcctggacccggcctgggagaagcagcagagaaaggcgcctggcggaagcgggagcgcccctgccccggagcccgggaacgccgggccggagcgcggggaggtggcgccgctggcgggcaggtctccttgggggtccgtggtccaggccaccctgcggctgttgcaaccatccccgcgcggaggggagagcgccggagagatcggcggccgcctccggatctgcctggagaaggaccagctggagtgcggctggggacgagaaaactggggggcgtacgcgggctcccccgcgggcccttgggttggaagctgtaaccccgacatgggcttgcgctacgtcctgcccctccgacccccgggaaaggtgggcagctcggttcgagttgaggggctgcagaacgagggtgtatgtgtgtacccagtcaagctggaggaacttaatcaatacttgttgagcgaatggatgttgaaacagagaggcagcgttggcaagtgcatagaggtggttgtgaataaggcccacatcccgattctgcagacagggggttatctggcgggcaagtctggttatctgggcatgaagccactggttcggaagcaagctcagcataggcccacattgctggccctgggactgttctgggaatatggagctgagcatccctgcgtcccgctgccctgcccccagcagcagccagccctgcctactcaatgtggagacaaccaggatgaaaactttcatgatgatccacttccacttactgaatag

SEQ ID NO: 16299 - DNA, 1447 bp, Homo sapiens
  SIMILAR (79)..(369): 511254mologous to Homo sapiens clathrin coat assembly protein -like,accession number D63643,Smith-Waterman Score=209.
atggacagaatcctgggactagtgccagtgactctgtggatacgccgagcgatctgggcgtgcactgctgtggtggcctttatggtcaggaggcgacatgcagtgagaagaagggaagaactggcccaaagggattcagcccagggtgaggtccacggaaaggccagggccaagatgcagccagcaccccaggccggtggtggcctcacatcacccatgccagaggtcagtcctcgattgctccaaaccctctgctcaagggttcagaaggaaatgagcaggtcttcccatcagggcccagatgagcttctgaaaacaagtgtgacaaaacaacctcctgaacatcctggaatgaccgatgcaaagtacaccccacacggttcacagcacgaagatcatcaggggcaaaccgtggacgatctgaatgacagcacagaccgtcagcaacctgcagagctgcctggccaagaaattacgagacggaagcaacgcttgcaggcgaaggaggagaagaaggaaaggccagagcaggcaggggcaggagtggaacgggccgcgaatgtcggagtgaagtgcagaccttcctggcccacacccctccgagcatgtgctcgagggcagtgtaaagaactcacagcggaagtccaaagtcttcctgcaggcctccctgcggggcacgagggcacagctggagagggagcttccaaaactgcagctgagggttcccgctgcctacactgcaccgagaactcccgtgatggggtctcacgggagtccacggaggagaacgcctactgcctggacctcgaccagagacttcgaaaggtgcacgaaaacacttgcaaccactacaagaagatgacccaagacctggcccaggaatcgaaaaaagacacttccaattttcagagggagatcttcttccgtgagaaaatggcccaggaaggccggatggctgctgtatccactgagacagcgctccagccgctccgggaagaaaatgaccacagcaggcagaagccagctgattttgaggccaagttccagcttctccggggtggtgctttggctcctggggttctgcccgcagcccacaggggcccggaagtgtcagggggaccatgggacgacagggcccccagaagggaggcaggtcacaatcaatcagaagatgttggagaatcctattcacaggaatacttggtagattcgcagtttgaagagtccccaccatgggcacatggattgcaggaggctagaggaccaggaaaggcaattgcgggtgtccctgtgagaagcgaagagggggtgactgcagcagaggcagcggattggcaggaggttcccctgaaggatgctaaggaatacgctgaatccataggtgccatcgtggttgagacaagtgcaaaaaatgctattaatatcgaagagctctttcaaggaatca

SEQ ID NO: 16300 - DNA, 978 bp, Homo sapiens
  SIMILAR (1359)..(1258): 481254mologous to Homo sapiens Human neurofilament-H mutant protein fragment 2,accession number Y20843,Smith-Waterman Score=56.
ccctcggacggccccggaggatgctgctgagccccggcactgcctggctgcgagcacatgatggcgatacgggagctcaaagtgtgccttctcggggacactggggttgggaaatcaagcatcgtgtgtcgatttgtccaggatcactttgaccacaacatcagccctactattgggggcatcttttatgaccaaaactgtgccttgtggaaatgaacttcacaagttcctcatctgggacactgctggtcaggaacgttttcattcattgctcccattgtacttagcggggctcagctgcagctgttatcgtgtatgattttaccgaggccggattccattttcatcccttgaagaaatgggtccaagcggctgaaagaacttggtccggaaaaacattgtaatggccatcgctggaaacaagtgcgacctctcagatatttagggaggttccccctgaagggatgctaaaggaatacggctgaatccataggtgccatcgtggttgagacaagtgcaaaaaatgctattaatatctgaagagctctttcaaggaatcagccgccagatcccacccttggacccccatgaaaatggaaacaatgggaacaatcaaagttgagaagccaaccatgcaagccagccgccggtgctgttgacccaagggcccgtggtccacgggtactttgaagaagccatgagcccacatcctgtggcactgctgaaggaccctacgcttcggtgggcctgggcacctcactttgagtaagagtgaggcacactggctttgcatcctggaagacctgcagggggcggggcaggaaatgtacctgaaaaggattttagaaaaccctgggaaaacccaccacaccaccaccacaaaatggcctttagtgtatgaaatgcacatggaggggatgtagttgcatttttgctaaaaaaaaaaaaaaacctttaaaaattgttggatgtgtaaaa

SEQ ID NO: 16301 - DNA, 1185 bp, Homo sapiens; identical to SEQ ID NO: 1049
  SIMILAR (243)..(374): 311254mologous to Homo sapiens immunoglobulin light chain variable region,accession number AJ241393,Smith-Waterman Score=60.

SEQ ID NO: 16302 - DNA, 516 bp, Homo sapiens
  SIMILAR (64)..(348): 311254mologous to Mycoplasma hyorhinis VlpE prolipoprotein,accession number U35016,Smith-Waterman Score=100.
atgcaacttttctgcaagataagcaatcctacgggaccgccagatggttacaagttcctgatacctagtacagccacggaaagagaacaaaagcctcttattcctgatgtagcttccccattctccagccaatcaacacccaaagcccaagaaaccacaggttcccatgccacccctaatcctgctcaaagcagccctgagaaacatcgcccattatctctccataccacccccaaacattttcaccgtcccaacactctgccagggtgggatctgagtcttccgactaatatcagaagccaggattgtgaggcctctgagcccaaccctatgcgcactgatagtcgcctgtgtgactgtgcgacgtacaaatttagatggccggttcctgcgtttagtgatgagtttccgagcacaaggtctcgtgaaaagggcctgttcttaccttcactgatgacatcgtctcgtgaacttccttctacctggctcatcttggctcaaaagctcccctactga

SEQ ID NO: 16303 - DNA, 429 bp, Homo sapiens
  SIMILAR (84)..(299): 721254mologous to HERV-H/env62 envelope protein,accession number AJ289709,Smith-Waterman Score=260.
ggcacgagagctgatatctcctggtgctatccccaaactgccactcttaactcttgaagtaaataaataatctttcctggcaggactatggtgaatctccttaagcactctctaatcagacatcctgagtcgtcccaattcttagaccttttatacctgtttttctccttctgttattccatttagtttttcaattcatacaaaaccgtatccaggccatcaccaatcattctatatgacaaatgtttcttctaacaaccccacaatatcaccccttaccacaagacctcccttcagcttaatctctcccgctctaggttcccacgccgcccctaatcccgcttgaagcagccctgagaaacatcgcccattctctctccataccaccccccaaaaatttcaccgccccaacacttcaacactattttg

SEQ ID NO: 16304 - DNA, 438 bp, Homo sapiens
  SIMILAR (148)..(231): 961254mologous to Homo sapiens ribosomal protein,accession number M15661,Smith-Waterman Score=153.
atggccaattactcttgtccttggagaggttttaaaggggtcacaattgaagcagactccaaggtgcaggcgagagctgccggaggcaagggtctccgatgccgtttcttgttctcatcatgtagacaaaacagccctgctgcaaagatggtcaacgtacctaaaaccggaagaaccttctgtaagaagtgtggcaagcatcagcctcacaaagtgacacagtataagaaggaattgtggaattcccactatattgaagacatggaaaatgagaatgaaaactcagttcctactctcaaaactgtacaatcttgtaaaaatgttaagaatttaacaggtcatgctgatgcaacaggtgggctcccacagcccttgggcatctcctctcctatggctttgcagagtacagtccccctcctggctgccttcacaggctga

SEQ ID NO: 16305 - DNA, 593 bp, Homo sapiens
  SIMILAR (630)..(322): 741254mologous to Homo sapiens transcription initiation factor IA protein,accession number AJ272050,Smith-Waterman Score= 367.
tgcggtacccggccggaaaaccgggtcgacccacgcgtccgccctttcctgttaggcgagagctgcgaaaggcgagagctgcgaagggccaggtgtcgggcgctgtttctcgttttcatcatatagacaaaccccgccctgctgccaaagattggtcaacgtacctaaaacccgaaagaaccttttgtaagaagtagtggcaagcatccgcccccacaaagtgacacagtataagaagggcaaggattctttttatgcccacgggaaggaggcgctatgatcggaagcagagtggctatggtgggcagacaaagccaattttccggaagaaggctaagaccacaaagaagaatggggttaaggctggaatgtgttgagcctaactgcagatccaagaggattgctggctattaagagatgcaagcattttgaactgggaggagataagaagagaaagggccaagtgatccagttctaaactttgggatatttttctttcaaatttgaagagaaaatggtgaagccatagaaaagttacccgagggaaaataaatacagtactattcttacgcaaaaaaaaaaaaaaaaaaaac

SEQ ID NO: 16306 - DNA, 452 bp, Homo sapiens; identical to SEQ ID NO: 14677

SEQ ID NO: 16307 - DNA, 1701 bp, Homo sapiens
  SIMILAR (322)..(987): 791254mologous to Mus musculus fatso protein,accession number AJ237917,Smith-Waterman Score=918.
atgccctttaagtgtaaaaagcagcatactttcaataaaaccagtccaaaggaaggagccatcattttcacccacggctgtctgtgcacgtctccttttaactctgagctcagtgaacacttggggaatttgaaattgtcctcatgggaacatctacaccatagaagtcagcaaacactctcggtcagactccacgtccccactccacagccagttgagcacgaatttatccaactgatttatattcacacaggtgcaaaattacaggcgagcaaggttattattgcaacaaaagatgggaagcgacgtaaaagtcccttgtggcagctgaaatatcctaaactaattctccgagaagccagcagtgtatctgaggagctccataaagaggttcaagaagcctttctcacactgcacaagcatggctgcttatttcgggacctggttaggatccaaggcaaagatctgctcactccggtatctcgcatcctcattggtaatccaggctgcacctacaagtacctgaacaccaggctctttacggtcccctggccagtgaaagggtctaatataaaacacaccgaggctgaaatagccgctgcttgtgagaccttcctcaagctcaatgactacctgcagatagaaaccatccaggctttggaagaacttgctgccaaagagaaggctaatgaggatgctgtgccattgtgtatgtctgcagatttccccagggttgggatgggttcatcctacaacggacaagatgaagtggacattaagagcagagcagcatacaacgtaactttgctgaatttcatggatcctcagaaaatgccatacctgaaagaggaaccttattttggcatggggaaaatggcagtgagctggcatcatgatgaaaatctggtggacaggattcagctccaactctgggatcccgtggatggaacaacagcctcttcagctgtgccaaagcaaggaagggacaagaggagagaagtccccaacaccctctcccagccaaacagccaagaaggcctcatctcagccttccacagccgctgcgtgcatgctgtattttataaactcacgtcagcacccaagacaacatccctaccagacgtcccttctgacctcctggcagagggcttggcggcatctagagcaggtcaagccttatggaggtgtgataagaaatcccttcttaccttggttcgtaagataaacttgcagggcaagagggatggaggaagatcagccacgaaccagcaatcccagcctcacttggataacaccggccttgaaagacagctcgagcagaaggtgggacgatgccgatcaccttggagaggtctcggccatcttgaaggaaatgctcagaaggggcacctgcttcacggtgttaacaagaatgggcagcacctgcttcggcgccacggggtcagcatccgcgcgggccgcgccccgcacctggcagctgctgacacagcaccgggacgcatttcctgcctgggtcactcagaggcgctcaagcctaggatccaagctggagggctgggtgcggagagtatttggcaggtgttgtgggaaggcgggagtaacagcagcgttttttgtcggcatgatgaagagccggctgccgagcttcctcttcctggcaagcaggcgagtggtggccacatgaaaagaatgaggagctga

SEQ ID NO: 16308 - DNA, 462 bp, Homo sapiens
  SIMILAR (286)..(372): 931254mologous to Homo sapiens 3-hydroxyanthranilic acid dioxygenase,accession number Z29481,Smith-Waterman Score=148.
atggatcctccgaaaatcccacacctgaaagagaaaccttattttggcatgcggaaaatggcagtgcgctggcatcatgctgaaaatctggtggacaggccccaaagaggaaagacactaacccaggcttctacacatggtgggagcagcgttccaggtgatgagatcagcagctgggagacctgctgcgtgcgaactgagtatgttcctaagacgcctaaggagttcagcacggggctcggggtccactgcgacactgcgcggacagcggccgctcggctgggcctcaggcaccaggagcagctcaaagtcatgttcatcggaggccccaacaccaggaaggactatcacatcgaagagggtgaagaggtaggtttgactggtctccctggatctaggcctgcgggcaaggagcctggccctagcgggagggggcgcttcccactcgaggcccagagatga

SEQ ID NO: 16309 - DNA, 2028 bp, Homo sapiens
  SIMILAR (1266)..(2114): 231254mologous to Babesia bigemina 200 kDa antigen p200,accession number AF142406,Smith-Waterman Score=242.
atggcctgggcaggacggggccggggcagccgtcagggttccgagctgcatcttccctgggccatagatgtctgcttatttagtttggtccgttcagggttccgtttcctaagggaggtttggtgggagatctggaagaaagtgctgctgcttctgcatgtagcaaatggtgcccagcaggcagggcccatcccctggaacacagggctacaagccaaccactctgtgcctgtgagtaaaccacaccaaaaatggccagtccagcacttccaggagctgctcaggtcagcaaactctttgacagctcctttcaaacaggtacagtactggagggggacaaagatgaaccagagggtccctgtgccccaaattcacagctggttccgaatgttctgtggcatggctcatgagagccacggcatagggaagtggggtgtggctttggagggacaccctcctggcccaggaaaacaggaaagcatagccaatgcctgctgggaggcagcagttagaagtccaggctctagatctcacaaagcagagaccaaatcttcaaaaagcagagaccaaatcctgtctgtcctgcgacctgccagctttgtcagggacaagagcattccacagccctggctggagagtgatgggattaacaagagatggagccccacatgcctctcaggggaaccctcgcttggtcgagtgaaccctctgctacatgagcttcagactcagtgctttgtaagaacaccaagttatcagagggctacagaggcagcaaagcctcaagagagatgcacaatccaactgaataagatgtgttgtctgcaagcagggtcattctcaaggtatgcttcagttattgctatcaagcacatctgccatgcacattccacccccaaagcccttctgacttcattcttggttcttactactactcgaagtctgaacttacacttacaccttcgcctttcacatccagacaaattcagagatggaggagtatcatcttcacagtactcccgctactgctccttaactcagccagactttgactctagcaattcctctactttcttcctcctattaaccatatcccttctaagtagccaattctgtatcaggcttatatccctgcctgagtgtcccgtcagtcaatggcaggaagcagcccgtgaacatcttggagggggcagtgatttgtcctcaatgggggagacacatccagatttgggtgggggccccagtgagggccctggtggctggccgtgggagcaagtcagtgcagcatttgctcagcttgtgcttgtgagcaccatgtccttccaaggcacttggcgaaagagattctcctccacagacacacagatcctgcctttcacctgtgcctatggcctcgtccttcaggtccccatgatgcaccaaacgaccgaggtcaactacggtcagttccaggacactgcaggccatcaggtgggggtgctggagcttccttacctgggaagtgcagtgagtctgttcctggtgctgccccgtgacaaagacacccccctgagccacatcgagccacacctcacagccagcaccatccacctctggaccaccagcctgaggagagccaggatggatgtgttcctgcccagtgaattgaccaaggaaccttttcgttgggatcagagactctttgcattagtgttgcggttgcctggcaccatgtcagtagaatcagaacagttgacaggtgtgcctttagatgactctgcaatcacaccaatgtgtgaagtgacaggcgtgggtatggagtgctttagtgatgctaaagacaccattgaagacctttcagaaatgcatgggagtcaagacctctcagaaatgcgggggaaccccaccaagccttcacccccactctctgggaccacagtggagaattttggcagcagagggacagacagctatgaggccttctctgagccttctttgggcaaagagcctgtcacacacaggaccagggttccactccagtggccctga

SEQ ID NO: 16310 - DNA, 819 bp, Homo sapiens; identical to SEQ ID NO: 108
  SIMILAR (700)..(1125): 751254mologous to Mus musculus Pro-Pol-dUTPase polyprotein,accession number Y12713,Smith-Waterman Score=532.

SEQ ID NO: 16311 - DNA, 217 bp, Homo sapiens
  SIMILAR (16)..(180): 381254mologous to Xylella fastidiosa hypothetical protein,accession number AE003900,Smith-Waterman Score=65.
catttacaatttcgtatctggtggtcacaagaggcccatctgcaggctcagctaaatcggactaatagtattctaattactcaggctcagctcacaggctccgatagtttctctgatacttatgcccaattaaactttgatgctcttaccacagaacaagtaacaaagccaaattacaagatgccattgaaaaatctgtctgatgagcatgctcaag

SEQ ID NO: 16312 - DNA, 135 bp, Homo sapiens
  SIMILAR (205)..(288): 421254mologous to Homo sapiens Human secreted protein from gene 11 clone HMJAG94,accession number W83941,Smith-Waterman Score= 84.
ttatccttcttcctcctcctcctcttcctcctcctcctcctcctcctcctcctcctcctcttcttcttcttcttcttcttcttcttcttcttcttcctcttcttctttttcttcttcaggtatgttcttgtacat

SEQ ID NO: 16313 - DNA, 426 bp, Homo sapiens
tcaagcatatactacattgattatttccacctcctcctcctccttttcttcctcctcctcctcttcctccttctcctcctcttcttcctcctcctcctcctccttcttcttcttcttcttcttcttcttcttcttcttcttcttcttcttcttcttcttcttcttcttcttcttcttcttcttcttccttggccttgccacctcaatttctaccatagatttaagtctagaagcaacaagagtggtacatcgaattggcacaaaaggtacacccacaggtccctttagctccccttcctgggatgtgtcaacagtcatggggacctggagctcagggagggaagatgccagcccgtggggctgctgtggtgagtggggggggctgcttttctttggtttctcactctggggtgggcatcgccccat

SEQ ID NO: 16314 - DNA, 3747 bp, Homo sapiens
  SIMILAR (1821)..(913): 991254mologous to Escherichia coli K12 ribonucleoside- diphosphate reductase 2, alpha subunit,accession number AE000352,Smith-Waterman Score=1577.
ttactacagttttctgaatctgatgatcctccaccttttcctcaaccttcctctcctgcacggccttcgttatctgatcagcctctccctccagctactcctcccctacctgacagtgtagagaattcaatgtctaactctggtgactttgacttatggtcaccccctgatgatcttatttcttttcatgaagagctgttactcaggcagctcacaggctctgatagtttctctgatacttctgtccaattaaactttgatgcccttaccacagaacaagtaacaaagttgtgtatgagagcttgggataaattacgtgctccaggccaagctcctgtttcttttaccatgattaaacaaggtcactctgaattataccctgattttttagctaaattacaagatgctgttgaaaaatctgtctccgatgagcatgctgaaggcattctctttcgccatcccaatgcaacccccagcacaaacaaatctacctacagccaaaccaaatgggttccagcctctccttctgtctcagtacaatgcttgtccacctccacagtaggaggcggggcagttgatctctgtagtactattcctctgaatttactacctgactctttgcctttgactgtccccactggccctttacctcaaggttcagtgggcctggtgttaggtagggcatctagctctgctaaaggaatcaccattcatactggtctcattaattctgattctgttgatgagattaaattaatcacatctgccaaggttcctgtttccattctggctggtgagtcaatcgctcaattgcttttactacctaatatcattttaaacaaaggagataagacacgtggccctgggatgggctccagaggtgaaaaggccgcttattggattaatgtaatttctaaacaaaggcccacctgcaccatacacattcaaggaagaaagtttgagggcctagtagatactggtgctgatgtttctgttatttcctctagtttatggccttcctcttggcttaaacatcccactaacatgggactagtaggtgttggaaaggccgaggaagtttatgggagcacatttatcttgccttgcactggccttgatggtcaaaagggtacaattcagccctatatcatgacaattcctattaatatttggggtagagatttactggcacaatggggggctgaaattaatattccacataactcttatagtgctcccagtcagcacatgatggaaaatagggggtttgttcctggactcggtcttagtccaaagcatgaagggattactaaactcctcccagttactataaaagaaaacaggttatcctttttagtggtggctgctgccacacctcctgatcctatacctttacagtgtaaatctgacacacccgtttggattcagcagtggccactttctaaagaaaaactggaggctttaactcacttggtttctgagcagttactacttggaaatgtggaaccttctctttccccttggaattatcctgtgtttctagtaaaaaagaaatcaggcacatggcagatggattgtgagaaatttgcttttactgtaccatctatcaataatcaggagcctgcagctcgttatcaatggaaagtacttcctcagggaatgctaaatagccctacaatctgccagctttatgttggacaagtgctttcaccagttcgagcccaatttcctgaggcctatattcttcattatattgatgatattttaattgctgcccccacagataaagaattaattgactgttaccaaattttgaaccgctgtgttacagaggccggattacacatcgctcaggataaaattcaacagaccactcctgttcaatatttagtaatggtggtcgataaacaatgtattcaacctcaaaaagttcaaattaggagagattctttaaaaactttaaatgacttccaaaaacttttgggtaacattaattatttaagacctactttaggcattccgacctatgcattgtctaacttgttttctacgctgaggggagcttccgatctccacagccccaggactttgacccctgaggctttactagaactggaattcatagaggaaagaatccagactgcccagttatctagagtaaagccgtttcagccttttcagcttctggtttttgcttcattacactcccctactggactaataattcaacataatgatttagtggagtggttacaacaggtggcttgccaatgtagacaccctttctatattacacatattagatctcataccactttaccaggatccatgtctgccggtaaccataaagtcgactgtttggtctcttttacaacccaagaagctcaggagttccataatctcactcatgtcaatgctgctggattaaaagataaattttctcttatctggaaacaggctaagtttattgttcacagctgccctcagtgccaggtcttcgtacttccaaatcaggaaactggcattaatcctagaggcctaactcctaatgctttatggcaaatggatgtgactcatgttagctcctttggcagactgtcatatgtgcatgtctctgtagataccttctcaggttttatctgggctacttgccaaacaggggaaggcacggcccatgttaaaaaacatctgtattcttgctttgcagttatggggcttccatatcaaataaagacagacaatgcccctgcatatgttagtaaggcttttgatacatttatgcaacagtggggaatttcccatattactggaatcccttgcaatcctcagggacaagctgtggtggaatgggccaatcgcactttaaaaacccaactgtccaaacagtctgaacaaccaaaacatgatttaactactccccacttccaattacatttggcattgtttactttaaattttttaaatgttcctaaagataatattctaactgcagctgaatgccattatacaggcaaaaaattcttcttaaatgaaggcaagccagtgttatggaaaaactcccaaaccaatacctgggaacctggcacaattataacgtggggaagaggatatgcttgtgtttcaccaggagatcatcaatcccctgtgtgggtacccaccagaagactcaagcttcgggtgaatactgacaatgaaaaccacagaggaaagacgtctgtgtcagagactgccctcagacatgtttcctctcacactgatttacctgctacacatgattattcttattgggcttatgtgccttttcctccacttattcgacctctcacctggatagatgctcctgcagaaatctacactaaccacagtgaaaggaatgttggctttgtttcccttcatggaggtctagccatcatgtgggaccagaataatgtcttgcggcaactgaatgcttctggccatgactacacccttggtctggggtatctaaccttttggcttcccttggctacattggaaggagaagaagaagaagagaaagaagaagaaggaggaggaggaggaggagaagaagaagaagaagaagaagaagaagaagaagaagaagaagaagaagaagaaggaggaggaggaggaggaggaggaggaggagaaggaggaggaggaggaggaactttcttgggctacacaaaatacactaacactaaaatagctgatctaaaaaaaaatcacaaaaaacatactgtttaa

SEQ ID NO: 16315 - DNA, 786 bp, Homo sapiens
  SIMILAR (310)..(486): 961254mologous to Homo sapiens Human TANGO 240,accession number Y95967,Smith-Waterman Score=300.
atggcctgccagctgtggatgcaactaagggagccaagaaagacaggctttcaagccctcaccctgaaatttccccatggcctttccaggagcgtgatacactgtgaaaaggtaaccaataaaagcccctttcttgagcacactgaagtaaggaagacagtttacaagtcactctccaaagcccctagctgcctgggcaaaagagtgagaacctgtctcaaaaaaaaaagaaaagtgggatattctcgctacctctgcattctagccgttagcggcttggtgactgttattccagacctgtttccagtgcagatggtccccatccctgctggagtatttacaatgggcacagatgatcctcagataaagcaggatggggaagcacctgcgaggagagttactattgatgccttttacatggatgcctatgaagtcagtaatactgaatttgagaagtttgtgaactcaactggctatttgacagagcctcctgtggatgccgtcctggccacagaccactcactgaaaacacagaaacagcagcaattcaacttagggagaattccagatcttatccaggaccaacaaggcggtacctgtataagtctgcaaaaaccagtgttactgcatttggggcccaagtcccttcgaatacctggaaagccttcccaagaaggagaggcacacacaagcccagactgtggagactacaataaatacctaactcttcaatgcctagacaccagtgaatatctacacgtatcaacaccatccaggaaaacatga

SEQ ID NO: 16316 - DNA, 1914 bp, Homo sapiens
  SIMILAR (477)..(941): 1001254mologous to Homo sapiens dJ681N20.2 (similar to FTLL1(ferritin, light polypeptide-like 1),possible processed pseudogene),accession number AL031670,Smith-Waterman Score=804.
atggggagaaaacagagcagaaaagctgaaaattctaaaaaccagagtgcctcttcttcaaaggattgcagttccttgccagcaactgaacaaagctggacagagaatgactttgatgagttgacagaagtaggtttcagaaggtcagtaataacaaacttctccgagctaaaaatgtatgttcgaacccattgcaaggaagctaaaaaccttgaaaaaaggagcacccaattcataaaacaagtccttagagacctacaaagagacttagattcccacacaataataatgggagactttaacactccactgtcaatattagaaagatcaacgacacagaaggttaacaacgatactcaggaattgaactcagctctgcaccaagtggacctaatagacatctacagaactctccaccccaaatcaacagaatatacattcttcttagcaccacatcatacttattccaaaattgaccacatagttagaagtaaagcactcttcagcaaatgtaaaagaacagaaatcacaacaaactgtctctcagaccacagtgcaatcaaattagaactcaggattaagaaactcactcaaaaccacacaactacatggaaactgaacaacctgctcctgaatgactactgggtaaataatgaaatgagagcagaaataaagatgttctttgaaaccaatgagaacaaagacacaatgtaccagaatctctgggacacatttaaagcagtgtgtagagggaaatttatagcactaaatgcccacaagagaaagcaggaaagatctaaaattgacaacctaacatcacaattaaaagaactagagatgcaagagcaaacacattcaaaagccagcagaaggcaagaaacaactaagatcagagcagaactgaaggagatagagacacaaaaaacccttcaaaaaatcactgaatccaggagctggtgttttgaaaagatcaacaaaattgatagactgctagcaagactaataatgaagaaaagagagaagaatcaaatagacacaataaaaaatgataaaggggatataaccacagatcccacagaaatacaaactaccatcagtggatactataaacacctctccacaaataaactagaaaatctagaagaaatggataaattgctggacacatacaccctcccaagactataccaggaacaagttgaatctctgaatacaccaataacaggccctgaaattgaggcaatagttaatagcccaccaaccaaaaaaattccagtatcagacgaattcacagctgaattctaccagagaaccaacgacaaaaaccacatgattatctcaatagatgcagaaaaggccttcgacgaaagtcaacagcacttcatgctgaaaactcttaataaactaggtattcatggaacgcatctcaaaatattaagagctgtttatgacaaacccacagccaatatcatactgaatgggcaaaaactggaagcattccctttgaaaacccgcacaagagaaggatgccctccgtcaccactcctattcaacatagtgttggaagttctgaccagggcaatcaggcaagagaaagaaataaagggtattcaattaggaaaagaggaagtcaaattgtccctgtttgcagatgacgtgattgtatatttagaaaaccccattgtctcagcccaaaaactccttaagctgataagcaatttcagcaaagtctcaggacttcgagtgctagcgaacgtctatgggagcttccaggacatggaaacacaagggctgaggttctttgggcagaattcagtcccccaacagctgcgcccctacaatggtgcctcgctgcagacactcgagtctggggaaaaggcaagtgcccctgcaaaagatcactgtctagtgtaa

SEQ ID NO: 16317 - DNA, 1382 bp, Homo sapiens
  SIMILAR (237)..(1220): 681254mologous to Homo sapiens cyclin H,accession number U11791,Smith-Waterman Score=980.
ccaaaaccccatttgtaggttaccaacatcaaagaccaaaggtagataaaaccacaaagatggggagaaaccagagcagaaaagctgaaaattctaaaaatcagagcacctcatctcctccaaaggatcgcagctccttgccagcaacggaacaaagctggacagagaatgactttgacgagttgacagaagtaggcttcagaaggtcggcaataacaaacttctccgagctaaaggagcatgttctaacccgtcgcaaagaagctaaaaaccttgaaaaaaggttagatgaatggcttactagaataaacagtgtagagaagaccttaaatgacctgatggagctgaaaaccatggcacaagaacttcgtgatgcacgcacaagcttcaatagctgattcaatcaagtggaaaaaaggatatcagtaattgaagatcaaattgatgaaataaagcaagacgacaaggcggcagagacctgcaactggcgctgggtgagtgaatcgctacggcaactgcgcgccagcgttgatgccttccacgcccgcgccagccactataatgccggagaatgcttacatcagcttgcggcattaaacagtcgattaaattgcgcacaagagatggcccggcgcgacagtattggtgaagttcctcctgtgccgtggcgcacggtcgttggctctggcattgccggagaagcaaagcttgatcatctgcggctggtgtctttaattggccgcgaagtgaacaaggaaaactcaccggcagctacccggtggctgtttagttttcaagctggcgcactggcgggcgggcaaattgttttacaagcagcaaaacccaatgcccatgggcagcctgtggtagctacccgcaacctgcttaatccagctggcattgtggcagtgctaaagcagcgccccagattggtggctgcagcagtccaggcattttacctacgagaccctattgacctgcgagcttgtcgtgttttcaagacattcttgcctgaaacacgaataatgacatcgtattatgccatagagtggtcgctctggacactagttgacgtgcttcatgcggagaatagtgagtcagcgcacatgtcccataactcgtatgatccgccatcggatgtcgcgcgtcatcttactcatttgcccatgtctcctatccctgattatatcatcgctaggttccgttaccgtcatcgctcaagagtgcgtcttaccgctcgaaagttaagtcccgcgttcatgcgttgctcgtccgagatacaaaggtattctactatgttggagagaggcttcaacgggggatattgtcgctctacaacagttagagtggtcaccgaggcgactcgtatgttgagtttctaa

SEQ ID NO: 16318 - DNA, 1194 bp, Homo sapiens
  SIMILAR (382)..(708): 321254mologous to Homo sapiens tyrosine kinase,accession number M27454,Smith-Waterman Score=93.
atggctcatgcctgtaatcccagcactttgggaggccaaggaaaaaaagtcaatgtcagtaatctggaaactcttctaaataatatagaaatcgaagttgggaaagaggaatatgaggacctactgaaccatctgccagttgatgaaaatgaaatggttgatgtgaatgtggtgatggatgaagcaaaagcttttacaggagaaaaagttaatgtcagtaatctggggaatgagctgaggaaaatggggctcgtactcactgatgaggagcacgagaagctgctgaaaactctgccaattcgcaggccaagggtcaacacaaaaaaggtggagatttttttggaaaacatgggaactaaaatcaaggatgaggaacttgaggaactcattacccaactaccaactgaggaaaggaatagcgtcaacatcaacgaaaaggtcatctacaccaaaaccccatctgtaggtcaccaacatcaaagaccaaaggtagataaaaccacaaagatggggagaaaccagagcagaaaagctgaaaattctaaaaaccagagcacgtcttctcctccaaaggattgcagctcctcaccagcaactgaacaaagctggacggagaatgactttgacaaattgacagaagtaggcttcagaaggtcagtaataacaaacttctccgagctaaaggagcatgttcgaacccatctcaaggaagctaaaagccttgaaaaaaggttagacgaatggctaactagaataaacagtgtagagaagaccataaatgacctgatggagctgaaaaccatggcacgagaacttcatgatgcatgcacaagcttcaatagccgattcgatcaagtggaagaaaaggtgaagagagctactgatacctataatttaggaattgcccttgaacaccgaaaagagatgctaaacctctggcagaagatccgaggggatttgattgggatggactctagaaatgagtccttttatgacaccttttctacttatacatggtcctggaatgtttgccaagaattactttctcctaaggacttaaggttatatgatgcctatgtgaatagaaattcctcccataactccagatcctcttcctcatcagataccagtgaatgttacacagactcaggaagaaaaagaaaacggaaaggtttaaagggatttcaacaatga

SEQ ID NO: 16319 - DNA, 1909 bp, Homo sapiens; identical to SEQ ID NO: 5620
  SIMILAR (919)..(1425): 891254mologous to Homo sapiens putative p150,accession number U93570,Smith-Waterman Score=797.

SEQ ID NO: 16320 - DNA, 1791 bp, Homo sapiens
  SIMILAR (562)..(1773): 941254mologous to Homo sapiens putative p150,accession number U93572,Smith-Waterman Score=1989.
atggataaattccttgacacatacaccctcccaagacttaaccaggaagaagttgaatctctgaatagaccaataacaggctctgaaattgaggcaataattaatagcttaccaaccaaagaaagtccaggaccagacggattcacagccgaattctaccagaggtacaaggaggagctggtaccattccttctgaaactattgcaatcaatagaaaaagagggaatcctctctaactcattttatgaggccagcatcatcctgataccaaagcctaggagagacacaaccaaaaaagagaattttagaccaatatccttgatgaacattgatgcaaaaatcctcaataaaatactggcaaaccgaatccagcaacacatcgaaaagcttatccaccatgatcaagtgggcttcatccctgggatgcaaggctggttcaacatacgcaaatcaataaacgtaatccagcatataaacagaaccaaagacaaaaaccacatgattatctcaatagatgcagaaaaggcctttgacaaaattcaacaacccttcatgctaaaaattctcaataaattagtgttggaagttctggccagggcagtcagacaggagaaggaaataaagggcattcaattaggaaaaggggaagtcaaattgtccctgtttgccgatgacatgattgtatatctagaaaaccccatcgtctcagcccaaaatctccttaagctgataagcaacttcagcaaagtctcaggatacaaaatcagtgtacaaaaatcacaagcattcttatacaccaataacagacaaacagagagccaaatcatgagtgaactcccattcacaattgcttcaaagagaataaaatacctaggaatccaccttacaagggacgtgaaggacctcttcaaggagaactacaaaccactgctcaatgaaataaaagaggacacaaacaaatggaagaacattccatgctcatgggtaggaagaatcaatatcgtgaaaatggccatactgcccaaggtaatttatagattcaatgccatccccatcaagctgccaatgactttcttcacagaattggaaaaaactactttaaagttcatatggaaccaaaaaagagcccgcatcgccaagtcaatcctaagccaaaagaacaaagctggaggcatcacactacctgacttcaaactatactacaaggctacagtaaccaaaacagcatggtactggtaccaaaacagagttatagaccaatggaacagaacagagccctcagaaataatgccgcatatctacaactacctgatctttgacaaacctgagaaaaagaagcaatggggaaaggattccctatttaataaaaggtgctgggcaaactggctagccatatgtagaaagctgaaactggatcccttccttacaccttatacaaaaattaattcaagatggattaaagacttaaaggttagacctaaaaccataaaaaccctagaagaaaacctaggcattaccattcaggacataggcatgggcaaggacttcatgtctaaaacaccaaaagcaatggcaacaaaagccaaaattgacaaatgggatctaattaaactaaagaccttctgcacagcaaaagaaaccaccatcagagtgaacaggcaacctacagaatgggagaaaatttttgcaacctactcatctgacaaagggctaatatccagaatctacaatgaactcaaacaaatttacaggaaaaaaacaaccccatcaaaaagtgggcaaaggatatga

SEQ ID NO: 16321 - DNA, 1821 bp, Homo sapiens
  SIMILAR (2572)..(1178): 291254mologous to Homo sapiens A human collagen 1 (alpha1) protein helical region,accession number Y84544,Smith-Waterman Score =170.
atggataaattcctcgacacatacgctctcccaagactaaaccaggaagaagttgaatctctgaatagaccaataacaggatctgaaattgtggcaataatcaatagcttaccaaccaaaaagagtccacgaccagatggattcacagccgaattctaccagaggtacaaggaggaactgcatataaacagaaccaaagacaaaaaccacatgattatctcaatagatgcagaaaaggcctttgacaaaattcaacaacacttcatgctaaaaactctcaataaattaggtattgatgggacgtatttcaaaataataagagctatctgtgacaaacccaaagccaatatcatactgaatgggcaaaaactggaagcattccctttgaaaactggcacaagacagggatgccctctctcaccactcctattcaacatagtgttggaagttctggccagggcaattaggcaggagaaggaaataaagggtattcaattgggaaaagaagaagtcaaattgtccctgtttgcagacgacatgattgtgtgtgcagaaaaccccattgtctcagcccaaaatctccttaagctgataagcaacttcagcaaagtctcaggatacaaaatcaatgtacaaaaatcacaagtattcttatacaccaacaacagacaaacagagagccaaatcatgagtgaactcccattcacaattgcttcaaagagaataaaatacctaggaatccaacttacaagggatgtgaaggacctcttcaaggagaagtataaaccactgctcaatgaaataaaagaggatacaaacaaatggaagaacattccatgctcatgggtaggaagactcaatatcgtgaaaatggccatactgcccaaggtaatttacagattcaatgccatccccatcaagctaccaatgactttcttcacagaattggaaaaaactactttaaagttcatatggaaccaaaaaacagcccgcatcgccaagtcaatcctaagccaaaagaacaaagctggaggcatcacactacctgacttcaaactatactacaaggctacagtaaccaaaacagcatggtactggtaccaaaacagagatatagatcaatggaacagaacagagccctcagaaataatgccgcatatctacaactatctgatctttgacaaacctgagaaaaacaagcaatggggaaaggattccctatttaataaatggtgctgggaaaactggctagccatatgtagaaagctgaaactggatcccttccttacaccttatacaaaaatcaattccagatggattaaagaattaaatgttagacctaaaaccataaaaaccctagaagaaaacctaggcaataccattcaggacataggcatgggcaaggacttcatgtctaaaacaccaaaagcaatggcaacaaaagccaaaattgacaaatgggatctaattcaactaaacagcttctgcacagcaaaagaaactaccatcagagtgaacaggcaacctacaaaatgggagaaaatttttgcaacctactcatctgacaaagggctaatatccagaatctacaatgaactcaaacaaatttacaagaaaaaaacaaacaaccccatcaaaaagtgggcaaaggacatgaacagacacttctcaaaagaagacatttatgcagccaaaaaacacatgaaaaaatgctcatcatcactggccatcagagaaatgcaaatcaaaaccacattgagataccatctcacaccagttagaatggcaatcattaaaaagtcaggaaacaacaggtgctag

SEQ ID NO: 16322 - DNA, 1047 bp, Homo sapiens; identical to SEQ ID NO: 7491
  SIMILAR (244)..(1029): 931254mologous to Homo sapiens putative p150,accession number U93564,Smith-Waterman Score=1317.

SEQ ID NO: 16323 - DNA, 1140 bp, Homo sapiens
  SIMILAR (64)..(1068): 801254mologous to Homo sapiens putative p150,accession number U93574,Smith-Waterman Score=1442.
atgattatttcaatagatgcagaaaaggccttcaacaaaattcaacagcccttcatgctaaaaactctcaataaactaggaataaaatacctaggaatccaacttacaagggatgtgaaggacctcttcaaggagaactacaaaccactgctcaatggaataaaagaggacacaaacaaatggaagaacattccatgctcatggataggaagaatcaatattgtgaaggtggccatactgcccaaggtaatttatagattcaatgccatccccatcaagctaccaatgactttcttcacagaattggaaaaaactactttaaagttcatatggaaccaaaaaagagcccgcaattccaagacaatcctaagccaaaagaacaaagctggaggcatcatgctacctgacctcaaactatactacaagcccacagtaaccaacacagcatggtactggtaccaaaacagagataaagaccaatggaacagaatagagccctcagaaataataccacacatctacaaccatctcatctgtgacaaacctgacaaaaacaagaaatggggaaaagattccctatttaatgaatggtgctgggaaaactggctagccatatgtagaaagctgaaactggatcccttccttacaccttatacaaaaattaattcaagatggattaaagacttaaatgttagacctaaaaccataaaaaccctagaagaaaacctaggcagttccattcaggacataggcatgggcaaggacttcatgactaaaataccaaaagcaatggcaacagaagccaaaattgacaaatgggatctaattaaactaaaaagcttctgcacagcaaaagaaactaccatcagagtgaacaggaaacttacagaacaggagaaaatttttacaatctacccatctgacaaagggctaatacccagaatctacacacaacttaaacaaatttacaagaaaaaaatcaaacaaccccatcaaaaagtggacaaaggatatgaacaagcatttctcaaaagaacacatttatgcagccaacagacacatgaaaaaatgctcatcatcactggtcatcagagaaatgcaaatcaaaaccacaatgagataccatctcacaccagttag

SEQ ID NO: 16324 - DNA, 1065 bp, Homo sapiens
  SIMILAR (436)..(1074): 1001254mologous to Homo sapiens DGCR8,accession number AF165527,Smith-Waterman Score=1106.
atggccatactgcccaaggtaatttatagattcaatgccatccccatcaagctaccattgactttcttcacagaattggaaaaaactactttaaagttcatatggaaccaaaaaagagcccacattgccaagtcaatcctaagccaaaagaacaaagctggaggcatcatgctacctgacttcaaactttactacaagggtacagtaaccaaaacagcatggtactggtaccaaaacagagatatagaccagtggaacagaacagagccctcagaaatactaccacacatctacaactatctgatctttgacaaacctgagaaaaacaagaaatggggaaaggattccctatttaataaatggtgctgggaaaactggctagacatatgtagaaagctgaaactggatcccttccttacaccttatacaaaaattaattcaagatggattaaagacttaaatgttagacctaaaaccataaaaaccctagaagaaaacccaggcaataccattcaggacagaggcatgggcaaggacttcatgtctaaaacaccaaaagcaatggcgacagaagccaaaattgacaaatgggatctaattaaactaaagagcttctgcacagcaaaagaaacgaccatcagagtgaacaggcaacctacagaatgggagaaaatttttacaatctactcatctgacaaagggctaatatccagaatctacaaagaactcaaacaaatttacaagaaaaaaacaaacaaccccatcaaaaagtgggcgaaggatatgaacagacacttctcaaaggaagaaatttatgcagccaacagacacatgaaaaaatgctcatcatcactggccatcagagaaatgcaaatcaaaaccacaatgagataccatctcacaccagttagaatggcaatcattaaaaagtcaggaaacaacaggtgggaattgaacaatgagaacacttggacacaggaaggggaacatcacacaccagggcctgtcgtggggtggggggatcggggagggatagcattaggagatatacctaatgctaaatga

SEQ ID NO: 16325 - DNA, 972 bp, Homo sapiens
  SIMILAR (208)..(969): 951254mologous to Homo sapiens putative p150,accession number U93574,Smith-Waterman Score=1332.
atgagtgaactcccattcacaattgcttcaaagagaataaaatacctaggaatccaacttacaatggatgtgaaggacctcttcagggagaactacaaaccattgctcaatgaaataaaagaggatacaaagaaatggaagaacattccatgctcatgggtaggaagaatcaatatcgtgaaaatggccatactgcccaagaattggaaaaaaactactttaaagttcatatggaaccaaaaaagagcccgcatcgtcaagtcaatcctaagccaaaagaacaaagctggaggcatcacactacctgacttcaaactatactacaaggctacagtaaccaaaacagcatggtactggtaccaaaacagagatatagatcaatggaacagaacagagccctcagaaataacgccacatatctacaactatctgatctttgacaaacctgagaaaaacaagcaatggggaaaggattccctatttaataaatggtgctgggaaaactggctagccatatgtagaaagctgaaactggatccctttcttacaccttatacaaaaatcaattcaagatggattaaagacttaaacgttagacctaaaaccataaaaaccctagaagaaaacctaggcaataccattcaggacataggcatgggcaaggacttcatgtctaaaacaccaaaagcaatggcaacagaagccaaaattgacaaatgggatctaattaaactaaagagcttctgcacagcaaaagaaactaccatcagagtgaacaggcaacctacaaaatgggagaaaattttcgcaacttactcatctgacaaagggctaatatccagaatctacaatgaattcaaacaaatttacaagaaaaaaacaaacaaccccatcaaaaagtgggccaaggacatgaacagacacttctcacaagaagacatttatgcagccaaaaaacacatgaaaaaatga

SEQ ID NO: 16326 - DNA, 1761 bp, Homo sapiens
  SIMILAR (303)..(899): 341254mologous to Leishmania major L8453.1,accession number AC008054,Smith-Waterman Score=188.
atggacacctttcttcaggctgaaagaaaggactatatggaggcctacgagttgattgagcaggaagaacagggggtgaaggagctcaacagacccctcactgctccaagtgccttgcatcccagggatgaagcccacttgatcatggtggataagctgtttgatgtgctgctggattcggtttgccagtattttattgaggatttttgcatcgatgttcatcacattaattcaagatggattaaagacttaaatgttagacctaaaaccataaaaaccctagaagaaaacctaggcaataccattcaggacataggcatgggcaaggacttcctgtctaaaacaccaaaagcaatggcaacaaaagccaaaattgacaaatgggatctaattaaactaaataacttctgcacagcaaaagaaactaccatcagactgcccgttccaaacccttgcggaccagtagctgaaacaccgctatcccgtgtgtttgtcttgcgggaagcccgaaagacgctgaagccacatcaatctacatgtttatcaaaaggtcgcgacaactcaatcgacagctggaaaaccgcggcccgtgtcttaaagacagcgataagttcgacgccaacgatcccgatcctgaaagatcagacgcaagaatggtcggtttctgcaacctttacatctgacggaaaaatccgtttattctacactgactattccggtaaacattacggcaaacaaagcctgacaacagcgcaggtaaatgtgtcaaaatctgatgacacactcaaaatcaacggagtggaagatcacaaaacgatttttgacggagacggaaaaacatatcagaacgttcagcagtttatcgatgaaggcaattatacatccggcgacaaccatacgctgagagaccctcactacgttgaagacaaaggccataaataccttgtattcgaagccaacacgggaacagaaaacggataccaaggcgaagaatctttatttaacaaagcgtactacggcggcggcacgaacttcttccgtaaagaaagccagaagcttcagcagagcgctaaaaaacgcgatgctgagttagcgaacggcgccctcggtatcatagagttaaataatgattacacattgaaaaaagtaatgaagccgctgatcacttcaaacacggtaactgatgaaatcgagcgcgcgaatgttttcaaaatgaacggcaaatggtacttgggagagttgggctggaggagggagtggagcagtggggacaggaagtccctcgctagactcagcaaaacagggacccttggcttggctgctctgacctacaaatgcacacgagaccagtggacggtatattgccgggtcatccgagaaaagaacctctgccaggacatgcggtggtaccagcgctgctgccagacctgcagggacttctatgcaaacaagatgtcgccagccaccgccgagctcgtgacacgcagtcccaagggtcgctcaaagctcagactcaggtaccagcttgtatttatcagtttgaaggggaagcccgcaagaaagggcaaggccagctcaggatcaaagctcagcctcctctccagctccaagactgtggctctggctggcatgggaaggggagatgagtttcaaatggagcttgagagtgaagatttaaccagtgaacgggatggaatcctaactcctacaagcagtaaccaaaagaagtcgaaagcttatggctccctaataaggacttag

SEQ ID NO: 16327 - DNA, 4452 bp, Homo sapiens
  SIMILAR (239)..(901): 751254mologous to Homo sapiens lung surfactant protein D,accession number X65018,Smith-Waterman Score=822.
atgggagactttaacaccccactgtcaacattagacagatcaacgcgacagaaagttaacaaggatatccagaaatggaactcagctctgcaccaagtggacctaatagacatctacagaactctccaccccaaatcaacagaatatacattcttctcaacactacatcacacttattccaaaattgaccacatagttggaaaaatacaaattcccatcagggaatactataaacacctctacgcaagtaaactagaaaatctagaagaaacggataaattcctggacacatacaccctcccaagactaaaccaggaagaagttgaatccctgaatagaccaatagcaggttctgaaattgaggcaataattaatagcctaccaaccaaaaaaagtccaggaccagatggattcacagccgaattctaccagagtgttggaagttctggccagggcaatcaggcaggagaaagaaataaagggtattcaattaggaaaaaggaagtcaaattgtccatgtttgcagatgacattactgcatatttagaaaaccccatcgtctcagccccaaatctccttaagctgataagcaacttcagcaaatctcaggatacaaaatcaatgtgcaaaaatcacaagcattcctctacaccaataagagacaaacagagccaaatcatgagtgaactcccattcacagttgcttcaaagagaataaaatacctaggaatcaaacttagaagggatgtgaaggacctcttcaaggagaactacaaaccactgctcaatgaaataaaagaggacacaaacaaatggaagaacattccatgctcatggataggaagaatcaatattgtgaaaatgaccatactgcccaaggtaatttatagattcaatgccatccccatcaagctaccaatgactttctttgcagaattggaaaaaactactttaaagttcatatggaatcaaaaaagagcccacattgccaagacaatcctaagccaaaagaacaaagctggaggcatcatgctacctgacttcaaactatactacaaggctacagtcaccaaaacagcatggtactggtaccaaaacagagatatagaccaatggaacagaatagagccctcagaaataataccacacatctgtaagcatctaatctttgacaaacctgacaaaaacaagaaatggggaaaggattccctatttaataaatggtgctgggaaaactggctagccatatgtagaaagctgcatctggaccccttccttacaccttatacgaagattaattcaagatggattaaagacttaaatgttagacataaaaccataaaaaccctagaagaaaacctaggcaataccattcaggacataggcatgggcaaggacttcatgactaaaacaccaaaagcaatggcaacaaaagccaaaattgacaaatgggatctaattaaactaaagagcttctgcacagcaaaagaaactatcatcagactgtcccccagaaacgctgagcccccagcggcctgggtctgggtgtttgtagatccatgtgctacggtcagacttgagcaagttcctgaccttcaggcttgggcaacacctgtatttatagacgtggcccacacctaccaaacagtcaccggcatgctgctaggggaaggatatctgcagatcgtcgctttcggcaccttggtcacagggagctgcaccctgcaccctgcgtcccaggtcgtggggagccgcaccctgcaccctgcgttccaggtcatggggagctgcatcctgcactctgcgtcccaggtcgtgggcagctgcactctgtaccctgcatcccaggtcgtggggagccgcaccctgcaccctgtgtcccaggtcgtgggcagctgcaccctgcatcccagagatcttcgctttaacagaatcagagagatccaacctggggcattcaggcggctgaggaacttgaacacattgcttctcaataataatcagatcaagaggatacctagtggagcatttgaagacttggaaaatttaaaatatctctatctgtacaagaatgagatccagtcaattgacaggcaagcatttaagggacttgcctctctagagcaactgcgactggactcaaacacacttcactgcgactgtgaaatcctgtggttggcggatttgctgaaaacctacgcggagtcggggaacgcgcaggcagcggccatctgtgaatatcccagacgcatccagggacgctcagtggcaaccatcaccccggaagagctgaactgtgaaaggccccggatcacctccgagccccaggacgcagatgtgacctcggggaacaccgtgtacttcacctgcagagccgaaggcaaccccaagcctgagatcatctggctgcgaaacaagagcctggagcgccatgcagctgctgacacaggttcgctcagctcccgtgtggatctaacttgtctcccaaacaaaggaagtcttctcttgtgtccacaaacatgctgtggacctgttaaggctaagacggccctggctgcggctgtcagggtgacggagggaagtcctaccgctgaccattacatgcgtcctggcagcgagccccacctctcgagtctcacctgccggctggccttacctaacatccagagtcacctgcaggccaccctcacctgctggctcgccgtgtttctgactgggatctcagtggcatccaatgtcacctctctcctcttcacctgcttctgcataaagggaactaaagtgaagttacaggtgggtaatgagctgagcatgaagacagattcccgcctaaacttgctggacgatgggaccctgatgatccagaacacacaggagacagaccagggtatctaccagtgcatggcaaagaacgtggccggagaggtgaagacgcaagaggtgaccctcaggtacttcgggtctccagggtcatttctgggcaatagagtgtgcacatcttcagtgtcagtatgcacggccacgtccctgcagccacagaatacagaggtgctggttggggagagcgtcacgctggagtgcagcgccacaggccaccccccgccgcggatctcctggacgagaggtgaccgcacacccttgccagttgacccgcgggtgaacatcacgccttctggcgggctttacatacagaacgtcgtacagggggacagcggagagtatgcgtgctctgcgaccaacaacattgacagcgtccatgccaccgctttcatcatcgtccaggctcttcctcagttcactgtgacgcctcaggacagagtcgttattgagggccagaccgtggatttccagtgtgaagccaagggcaacccgccgcccgtcatcgcctggaccaagggagggagccagctctccgtggaccggcggcacctggtcctgtcatcgggaacacttagaatctctggtgttgccctccacgaccagggccagtacgaatgccaggctgtcaacatcatcggctcccagaaggtcgtggcccacctgactgtgcagcccagagaggaggaagctcccctctgtttccttctccgagagtcgggctctccccagagcttgttatcctctgtgggccctgcggcacagcatatgcctgagactgccccaccatcgttttttgatgtaattgactcgttctcctggattctctacatctgccttccagtcaccccagtgtttgccagcattcccagcgacacaacagtggaggtgggcgccaatgtgcagctcccgtgcagctcccagggcgagcccgagccagccatcacctggaacaaggatggggttcaggtgacagaaagtggaaaatttcacatcagccctgaaggattcttgaccatcaatgacgttggccctgcagacgcaggtcgctatgagtgtgtggcccggaacaccattgggtcggcctcgtccggtgtgagcacatgttgtaagaagatggttcagaagggccctcgggttggcccagttatcaccaatagtcgccgccacttggtcgttcgttcagcaaatgccttcgtgggctggactctgtcctcagtgctgagccagacataccgggacgccatgaggaagttcccagcagaggagcaccttcctgacgtcagtcgaaatggagatccgtttgtagctacctccatcgtggaagcgattgcgactgttgacagagctataaactcaacccgaacacatttgtttgacaggtatcgtggggctgtaaacacgctgaccctcaaatcactgagctttagggtgaagggcacaccctctatgccagtcattgtcctgggccagggcctacagtcacaaacggaagaaataaaaacctctgccctcaaagatcagaccttccagagaaatgcagatggaaaaccagagagaggcccctgcacataa

SEQ ID NO: 16328 - DNA, 3860 bp, Homo sapiens
  SIMILAR (406)..(687): 601254mologous to Homo sapiens muscle specific gene M9,accession number AB019392,Smith-Waterman Score=270.
accaattccttcctaacctggattccactgtccttggtgaaaactactttgatggaacctaccagatgctttatcttttggttaaaggaactatacctgttgaaattcacactgccacagtgatatttgtttctttccaattatctgttgcaacagaagatgacttttatacctctcacaatctggttaaaaatcttgccttgttcctaaagataccaagtgacaaaatccgtatcagcaaaataagagggaagagtctgaggaggaagagatccatgggattcataattgaaatagagattggagaccctcctattcagttcataagcaatggcaccacaggtcagatgcagttatctgaactccaggaaattgctggttctcttggacaagctgtaattttaggaaacatcagtagtatccttggatttaacatttcgtccatgtctattactaatcccctccccagcccaagtgactctgggtggattaaggtgactgcccagccagttgaaaggtctgcatttcctgttcatcacgtggccttcgtgtcctcactcttagtgatcactcagccggtggcagcacagccaggacagccatttcctcagcagccttcggtaaaggcaacagattctgacggtaactgtgtatcagttggaattactgcactaactttgagggccatactcaaggactccaataataaccaagtcaatggccttagtggaaatacaacaattccgtttagcagctgttgggccaactacacagaccttactccccttagaacaggaaaaaattataagattgaatttatactggataatgttgttggggtagaatccagaactttcagcctgctggcagagtctgtctctagcagtggcagcagcagcagcagcaacagcaaagcatcaactgtgggagactttgatctgcttggttatgaagtagttgaagggaataatgtcacactggatattacagaacaaaccaaaggaaaacccaacttggagacattcacactgaattgggatgggatcgcttctaagccactcactctatggtcatcagaagctgaagaacatattaacagagggcagaagacagctgaaaccgatgcttactgtggtcgttattccctgaaaaacccagctgttctttttgactcagcagatgttaaaccaaacagacgaccatatggagatattttattgtttccttataatcagtgctttgccatgactgatggagcagttcagcaaccagtaccacatttcatcactgcttaccatcctgatccaggatttcataccatagcaggatttccccactcttgggagcatttgcaaatgtgtgaagaatcccctggctgtcatagtaactgggaaagattcattcttcaagagcatatggaagaagaggtggttctacctgccttcgtgctcagctcaggttttccttacttctttaatgctcgcattaccaatgttgctttaataccagtcaccactaaagcctggtcctcatggaatgtcaccatgattttcccttcacaaggaagcattcgaggtggcaccacgctgacaataagtgggcgtttctttgatcagacagatttccccgtcagagttctagttggaggtgaaccttgtgatattttgaatgtcacagaaaatagtatatgttgcaagacaccccccaaacctcatattctcaaaactgtatatccaggagggagaggcctgaagcttgaggtgtggaataatagccgtccaatacgtttggaagagatactggaatacaatgaaaaaacgcctgggtacatgggtgccagttgggtagattcagcttcctatatttggctcatggaacaagacacatttgttgcacgctttagtggatttttggtggctccagattctgatgtttatagattctacatcaagggtgatgaccgttatgctatttattttagccagactggacttccagaagataaggtgaggattgcatatcattctgctaatgccaacagttatttttccagtccaacacaaagatcagatgatattcatctgcagaaaggaaaagaatactatattgaaatcttgctgcaggagtacagattaagtgcatttgttgatgttggactgtaccagtatcgaaatgtttatactgaacaacaaacaggagatgcagtgaatgaagaacaagttatcaaatcccagtcgacaatcctccaggaagtacaggttataacattggaaaactgggaaacaactaatgcaattaatgaggttcagaagatcaaggtaaccagcccatgtgtggaagctaattcatgttcactttaccaatatagattaatctataatatggaaaaaactgtgttggaagttctggccagggcaattaggcaggagaaggaaataaagggtattcaattacgaaaagaggaagtcaaattgtccctgtttgcagatgacatgattgtatatctagaaaaccccattgtctcagcccaaaatctccttaagctgataagcaacttcagcaaagtctcaggatacaaaatcaatgtacaaaaatcacaagcattcttatacaccaataacagacaaacagagagccaaatcatgagtgaactcccattcataattgcttcaaagaaaataaaatacctaggaatccaacttacaagggatgtgaaggacctcttcaaggagaactacaaaccactgctcaaggaaataaaagaggatacaaacaaatggaagaacattccatgctcatgggtaggaagaatcaatatcatgaaaatggccatactgcccaaggtaatttatagattcaatgccatccccatcaagctgccaatgactttcttcacagaactggaaaaaactactttaaagttcatatggaacaaaaaaagagcccgcaacgccaagtcaatcctaagccaaaagaacaaagctggaggcatcatgctacctgacttcaaactatactacaaggctacagtaaccaaaacagcatggtactggtaccaaaacagagatatagatcaatggaacagaacagagccctcagaaataatgccgcatatctacaactatctgatctttggcaaacccgagaaaaacaagcaatggggaaaggattccctatttaataaatggtgctgggaaaactggctagccatatgtagaaagctgaaactggatcccttccttacaccttatacaaaaattaattcaagatggattaaagacttaaatgttagacctaaaaccataaaaaccctagaagaaaacctaggcattaccattcaggacatagacatgggcaaggacttcatgtctaaaacaccaaaagcaatggcaacaaaagccaaaattgacaaatgggatctaattaaactaaaaagcttctgcacaacaaaagaaactaccatcagagtgaacaggcaacctacaaaatgggagaaaattttcgcgacctactcatctgacaaagggctaatatccagaatctacaatgaactcaaacaaatttacaagaaaaaaacaaacaaccccatcaaaaagtgggcaaaggacatgaacagacacttctcaaaagaagacatttatgcagccaaaaaaacgcatgaaaaaatgctcaccatcactggccatcagagaaatgcaaatcaaaccacaatgagataccatctcacaccagttagaatggcaatcattaaaaagtcaggaaacagtaggtgctggagaggttgtggagaaataggaacacttttacactgttggtgggactgtaaactagttcaacccctgtggaagtcagtgtggtga

SEQ ID NO: 16329 - DNA, 1942 bp, Homo sapiens
  SIMILAR (63)..(701): 661254mologous to Homo sapiens debrisoquine 4- hydroxylase,accession number M20403,Smith-Waterman Score=610.
atgagtgaactcccattcacaattgcttcaaagagaataaaaaacctgggtaaagggcatgtgaaggacctcttcaaggaaaactacaaaccactgctcagaaataaaagaggacacaaacaactggaagaacattccatgctcatggataggaagaatcaatatcgtaaaaatggccaaactgcccaagcctccactggtgatacccaggcaaacagggtctggagtggacctccagcaaactccaacagaccttcacctgagggtcctgactgtcagaaggaaaactaacaaacagaaaggacatccacaccaaaaccccatctgtacgtcaccatcatcaaagaccaaagtgttggaagttctggccagggcattcaggcaggagaaggaaataaagggtattcaagtaggaaaagaggaagtcaaattgtccctgtttgcagatgacatgattgtatatctagaaaaccccatcgtctcagcccaaaatctccttaagctgataagcaatttcagcaaagtctcaggatacaaaatcaatgtgcaaaaatcacaagcattcttatataccaataacagacaaacagagagccaaatcatgactgaactcccatttacaactgcttcaaagagaataaaatacctaggaatccaacttacaagggatgtgaaggacctcttcaaggagaactacaaaccactgctcaacgaaataaaagaggatacaaacaaatggaagaacattccatgctcatgggtaggaagaatcaatattgtgaaaatggccatactgcccaaggtaatttatagattcaatgccatccccatcaagctaccaatgactttcttcatagaattggaaaaaactactttaaagttcatatggaaccaaaaaagagcccgcatcgccaagtcaatcctaagccaaaagaacaaagctggaggcatcacgctacctgacttcaaactatactacaaggctacagtaaccaaaacagcatggtactggtaccaaaacagagatatagaccaatggaacagaacagagccctcagaaataatgctccatatctacaactatctgatctttgacaaacctgagaaaaacaagcaatggggaaaggattccctatttaatatatggtgctgggaaaactggctagccatatgtagaaagctgaaactggatcccttccttacaccttatacaaaaattaattcaagatggattaaagacttaaatgttagatctaaaaccataaaaaccctagaagaaaacctaggcaataccattcaggacataggcatgggcaaggacttcatgtctaaaacaccaaaagcaatggcaacaaaagccaaaattgacaaatgggatctaattaaactaaagagcttctgcacagcaaaagagactaccatcagcgtgaacaggcaacctacagaatgggagaaaatttttgcaatctactcatctgacaaagggctaatatccagaatctacaatgaactcaaacaaatttacaagaaaaaaacaaacaaccccatcaaaaagtgggtgaaggatacgaacagacacttctcaaaagaagacatttatgcagccaaaagacacatgacaaaatgctcatcatcactggctgttagagaaatgcaaatcaaaaccacaatgagataccatctcacaccagttgaagaggtgagggcgggtgagatggccaagacaagaagatgccaaaatgtcaaaggtgccagtgaggaaggcatcagagctcttgctttgtttctcattaacctcactgtccatatggagggcaaccacattgatggagacattgaaattcaaaccaatagaagtcccttgcaagcccctggagaaatctgtgagtcttttactgctttgatggcaatgcaactgctcagtaaattgttttggagttga

SEQ ID NO: 16330 - DNA, 3635 bp, Homo sapiens
  SIMILAR (495)..(1025): 981254mologous to Homo sapiens BCNT,accession number AB009285,Smith-Waterman Score=876.
atgggcccgcactcctcagcccttgggtggtcgatgggactgggcgccgtggagcagggtgtggcgttcgtcggggaggctcgggccgcacatgagcccatggagggggtgggaggctcaggcatggcaagctgcaggtcccgagccctgccccgtgggaaggcagctaagacccgaccaaaaacagaagacgcttgggtatttgcaaagcccaatgccattcaagcggtcggggttatgtcttttgcatttatttgccaccataactccttcttagtttacagttctctagaagaacccacagtagctaagtggtcccgccttatccatatgtccatcgtgatttctgtatttatctgtatattctttgctacatgtggatacttgacatttactggcttcacccaaggggacttatttgaaaattactgcagaaatgatgacctggtaacatttggaagattttgttatggtgtcactgtcattttgacataccctatggaatgctttgtgacaagagaggatatggccactactatgaagatgacttttggacaaaggactggttttaggaatcctgaaagtttctgggagactttaccagtcttatttctgcaagtcatgattaccacatattttgtagctaaacaattgctgttcctacacagtaagatcatcatcttggccaggaaaaagagatcaaacatgtgcaagaaggaagaagaagaaggaagaggagaagaaggaggagaaatacaaactaccatcagagaatactacaaacccctctacgcaaataaactagaaaatctagaagaaatggataaattcctcgacatatacactctcccaagactaaaccaggaagaagttgaatctctgaatagaccaataacaggatctgaaattgtggcaataatcaatagcttaccaaccaaaaagagtccaggaccagatggattcacagcagaattctaccagaggtacaaggaggaactggtaccattccttctgaaactattcgaatcaacagaaaaagagggaatcctccctaactcattttatgaggccggcaccatcctgataccaaagccaggcagagacacaaccaaaaaagagaattttagaccaatattcttgatgaatattgatgcaaaactcctcaataaaatactggcaaaccaaatccagcagcacatcaaaaagcttatccaccatgatcaagtgggcttcatccctgggatgcaaggctggttcaatatatgcaaaccaataaatgtaatccagcatataaacagaaccaaagacaaaaaccacatgattatctcaatagatgcagaaaaggcctttgacaaaattcaacaaccctccatgctaaaaactctcaataaattaagtactgatgggacgtatctcaaaataataagagctatctatgacaaacccacagccaatatcatactgaatgggcaaaaactggaagcattccctttgaaaactggcacaagacaaggatgccctctctcaccactcctattcaacatagtgttggaagttctggccagggcaattaggcaggagaaggaaataaagggtattcaattaggaaaagaggaagtcaaattgtccctgtttgcagacgacatgattgtatatctagaaaaccccattgtctcagcccaaaatctccttaagctgataagcaacttcagcaaagtctcaggatacaaaatatacaaaatcgatgtgcaaaaatcacaagcattcctatacaccaataatagacaaacagagagccaaatcatgagtgaactcccattcacaattgcttcaaagagaataaaatacccaggaatccaacttacaaggaatgtgaaggacctcttcaaggagaactacaaaccactgctcaatgaaataaaagaggacacaaacaaatggaagaacattccatgctcatggataggaagaatcaatattgtgaaaatggccatactgcccaaggtaatttatagattcaatgccatccccatcaagctaccaatgacttccttcacagaattggaaaaaaactactttaaagttcatatggaaccaaaaaagagcccgcattgccaagtcaatcctaagccaaaagaacaaagctggaggcatcacgctacctgacttcaaactatactacaaggctacagtaaccgaaacagcatggtactggtaccaaaacagagatatagaccaatggaatagaacagagccctcagaaataataccacacatctacaactatctgatctttgacaaacctgacaaaaacaagaaatgggggaaaggattccctgtttaataaatggtgttgggaaaactggctatttaataaatggtgctgcagaaagttgaaactggatccttatacaaaatttacaccttacacaaaaattaattcaagatggattaaaggcttaaatgttagacctaaaaccataaaaaccctagaagaaaacctaggcaataccattcaggacataggcatgggcaaggacttcatgactaaaacaccaaaagcaatggcaacaaaagccaaaattgacaaatgggatctaattaaactaaagagcttctgttctttgctggggtatctgaagactgaaaacacagcaaaagaaactaccatcagactgaacaggcaacctacagaatgggagaaaatttttgcaatctacccatctgacgaagggctaatatccagaatctacaaagaacttaaacaaatttacaagaaaaaaaatcaaacaattccatcaaaaagtgggcaaaggatatgaacaaacacttctcaaaagaagacatttatgcagccaacagacacatgaaaaaaatgctcatcatcactggccatcagagaaatgcaaatcaaaaccacaatgagataccatctcacaccagttagaatggcaatcattaaaaagtcaggaaacaacaggtgctggagaggatgtggagaaataggaacacttttacactgttggtgggactgtaaactggttcaaccattgtggaagacagtgtggcgattcctcagggatctacaactagaaataccatttgacccagccatcccattactgggtatatacccaaaggattataaatcatgctgctataaagacacatgcacacgtatgtttattgcggcactattcacaatagcaaagacttggaaccaacctaaatatccaacaacaataggctagattaagaaaatgtggcacatatacaccatggaatactatgcagccataaaaaaggatgagttcatatacttgtagggacatggatgaagctggaaaccatcattctcagcaaactattgcaaggacaaaaaaccaaacatgcatgttctcactcataggtgggaattgaacaataagaacacttggacacagggtggggaacattacacactggggcctgttgtggggtggggggaggggggagggatagcattaggagatataactaatgtaaatgatgagttaatgggtgcagcacaccaacatggcacatgtatacatatgtaacaaacctgcacattgtgcacatgtaccctagaacttaaagtataataaaaaatattt

SEQ ID NO: 16331 - DNA, 663 bp, Homo sapiens
  SIMILAR (561)..(1640): 661254mologous to Homo sapiens debrisoquine 4- hydroxylase,accession number M20403,Smith-Waterman Score=1051.
atgcctaatttctttatcgatcgcccgatttttgcgtgggtgatcgccattatcatcatgttggcaggggggctggcgatcctcaaactgccggtggcgcaatatcctacgattgcaccgccggcagtaacgatctccgcctcctaccccggcgctgatgcgaaaacagtgcaggacacggtgacacaggttatcgaacagaatatgaacggtatcgataacctgatgtacatgtcctctaacagtgactccacgggtaccgtgcagatcaccctgacctttgagtctggttcaggtgcagaacaaactgcagctggcgatgccgtgctgccgcaagaagttcagcagcaaggggtgagcgttgagaaatcatccagcagcttcctgatggttgtcggcgttatcaacaccgatggcaccatgacgcaggaggatatctccgactacgtggcggcgaatatgaaagatgccatcagccgtacgtcgggcgtgggtgatgttcagttgttcggttcacagtacgcgatgcgtatctggatgaacccgaatgagctgaacaaagtggagagaaatagtagaaggcaagatgtaggagagagagatatttcctcaggctccaggaaagtaaataaggagtcaagagaggatgaggaggtgacctga

SEQ ID NO: 16332 - DNA, 978 bp, Homo sapiens
  SIMILAR (130)..(2): 1001254mologous to Homo sapiens GKAP42,accession number AF319476,Smith-Waterman Score=210.
atgggtgccaaggctgaacggggagggtttgtgatttatacgtggctgccaactatcgcccagactattggtctggaagatgcgctgactgccagcctgatgcttaatgcgttgttaattgtgggcgcgctgctgggattagttctgacgcacctgctggcacatcgcaaatttttgctgggaagttttttgctgctggcggcaacgctgtacgcgatgcgtatctggatgaacccgaatgagctgaacaaattccagctaacgccggttgatgtcattaccgccatcaaagcgcagaacgcccaggttgcggcgggtcagctcggtggtacgccgccggtgaaaggccaacagcttaacgcctctattattgctcagacgcgtctgacctctactgaagagttcggcaaaatcctgctgaaagtgaatcaggatggttcccgcgtgctgctgcgtgacgtcgcgaagattgagctgggtggtgagaactacgacatcatcgcagagtttaacggccaaccggcttccggtctggggatcaagctggcgaccggtgcaaacgcgctggataccgctgcggcaatccgtgctgaactggcgaagatggaaccgttcttcccgtcgggtctgaaaattgtttacccatacgacaccacgccgttcgtgaaaatctctattcacgaagtggttaaaacgctggtcgaagcgatcatcctcgtgttcctggttatgtatctgttcctgcagaacttccgcgcgacgttgattccgaccattgccgtaccggtggtattgctcgggacctttgccgtccttgccgcctttggcttctcgataaacacgctaacaatgttcgggatggtgctcgccatcggcctgttggtggatgacgccatcgttgtggtagaaaacgttgagcgtgttatggcggaagaaggtttgccgccaaaagaagccagcccagcaatgcggccttaa

SEQ ID NO: 16333 - DNA, 3396 bp, Homo sapiens
  SIMILAR (600)..(319): 471254mologous to Homo sapiens GKAP42,accession number AF319476,Smith-Waterman Score=134.
tcagggcgaggccgggcggcggctgtactgcacgcggtagcgggtcacgggcaggccgtgcacgtgcactgtctcacacagcgtcttgcagggtaccatgtcctcgtcctcctcacccatcagccagtcctgcaccaggctagccgcctccaccgtcacattgtcctccagccagcggctgtgccactcctcaaagtgctggtggtggcggagcaggaccaggggctgcacctgcttggcccggcagagggtcccgcgacggtacatgtagtcctcggagttcacgatgaacaccatcttgtgagtgctgagcttgaagcggcagtccacgtcgcaggcgctctccacgcccaccagccgcttccaggagctcctggcctcaccgcgcagggcccgcgcctgctcgctctgccaccggcggcggaacttcttgaggttcctctgcaggaacacaggtttcaggaggaagccctcagtgggcgagctggacgcgccctcggtccccacatactgctccacgtaccgagccaggtgctggacctccacagggtcctccgtctgggcctcctcggtgtccaggagctcgatggtcatgatcacctgccctttgcgctgcaggaacatcaccttgaagcagttctcgtcggccatgcagcgctcagccttccactggtagctggtctccctagcagcgcggacgcagcgggaggacaggttcccaccagcggcaccccgcttcttctcgttcaggtagagctccaccaccttcaggcagacgtcatcgctcacgaggtggtgcagctgccgcgcaatgttctgcaccagcttgtccatggtgaagcccacgtaggcatggatggtgaacatctcgcgtagggtgtcctcgtactgcgtggggtcgatgctgccctccagcaggctccgcaccatgtccaggaaggccgggtagtactcctccagctccacttcactgggctgcttcagccgcagctccatggcggggtcgctgcccttctccctgcggccctcacacagcagcttctcccgctccttctcggtccgatactccagaagctgcttctgcgcctggcggtagatcttcagcagcctggagcacagggtctggtgcaggcgcaggaagaagtaccagttgttgttggcaaaaaataggctgtagacatcgtccaggggcttgtgcggggctgggggcggcaggggtggctgctcagtggccggggcatccccgaaggcccccttctcctctggggggctactgtggggtcctggcgccggcttcttccgctcactggggtctgtggtctgcccctgggggctgtcccggtcctcatcagctgactcctcggaggcgcccaggtccagctgctgagagaagaagaggctgggcacgaactggtgcagcagctggtggatggtgccctggtcctccttctggatggccggctgccgcttcacgtagtagctgatgagcgctgctgcgtcctccaggatctgccggtcctcgtacacaaagatgaggtgcggctcgctagagggggcactgcggccctccgagtgctgctcctggtgctcgtcgtagacgctctcgatctcgttgagcaagctcttggagcgcagggccttggtgtcgttctgcttgaagttcacagcctggtggtcaagggacttgaggtacgccttctcatactgctcccgccagatcttgttgaagccctgctgggcctcccgccactcctcttccttggccttcagtcttttcaggacaacggggacagcggtgacagggttcttcttgaggctctcgatgatctccggggccttgtcgccatagatgcgataaatggcacggcgctggatcacctccgacgtgcctcccagggagtcgtccagccggaacttctcctggtcttccggcgccatccgagacagcttcttctgcacactttccaacacacggattgtggccaggttcgtctccaggacatcgtctaactggaagcggcttcgtcctcacagcggtgaagctgctcctcgtacggtgtcttcttggagctgacgaacgtggagtcctcagaccaggaagggaaggagacccaggtgtcgttcagtacctccttgcagatggctgtcctcccactgcacttgggctgctggtaggttttggggagtgcccggtagctggatcctatgcgcttgcaggatgcataatcaatttcccggcttatcccgtccccggatctgtcgctcatgggtggcgcgaaggacagctcttttacccccaggaaggacttgaactgtgcaaagagttctggaaatttccccagaaatgggctgacgagctgcaggagctcagagccagacaccagctcctggttgaagagtgcgatgcagcggaggaagttttcatacacctcctggctcttcagcacccggcggaccttgtcaaagaaagaaaattcctgcagagtcccgtacttccccactgcagcgatggacaggtctttggtaccacgaagtttcatttttttcttggcgggtgcagacacggggcggaggagcgagggccgggagcgcttcctgctgtgctccggggtcttgtcgtgctcgttcttctgcacgctgtgcatctcgcacggcccgtttcctgtgaacagagaccgcttggcttcgggcaggaactgtccaaactctgagagcaggtcctcctggccccggaagaggttggccacctcggtgaacacctcctcttcagacatgcctcggaatggccggcccctcgtgttcagctgctccttctggtacgtgtgcaggatctccaggaatgacctgtagatttctgggtggtctaggaagcgggttttaatcttattcacatagctgatggcgttgttgaattccacggaatcggactccaggggcacctggggtttgtcctctttatacggcacctgctgcttgaagtcctctgcaccgtccccgtggttgtgcgaattctcctggcttgtcagaggcgactgtatgtttaacttgccattcttgggaatgtctattctatatccgaggggaagaaaagcgttgaatccaacaatgaggtcagggtgctcgtggaagagctgcgagacacgtctgatgactccaggagtatcgatgctctggcttttgaactccttcatgatctccaggaagccgttgtaggtggcagggtcgctgccaaagcggatcttcacctggtccagataggtgagggcgtcttctacgtgcaccggcagcttctcgtggcctgcggagcccgagcgaccccagcgggcgccgctcagcccccggcccgcggggccgccggcaccgctgccaccgctgccaccgccagcgtgcgccatg

SEQ ID NO: 16334 - DNA, 768 bp, Homo sapiens
  SIMILAR (767)..(588): 981254mologous to Homo sapiens Protein sequence encoded by clone p199-7 (PL mutet.rsT4),accession number P93369,Smith-Waterman Score=319.
atggagaaccaggtgctggtaattcgcatcaagatcccaaatagtggcgcggtggactggacagtgcactccgggccgcagttactcttcagggatgtgctgaatccactattaaagaacgtggacttcaacgtcaaagggcgaaaaaccgtctatcagggcgatggcccactacgtgaaccatcacccaaatcaagtttttgggggtccagcggtatccagcgcgtttgcaccggtcgccagcttgatccccagaccggaagccggttggccgttaaactctgcgatgatgtcgtagttctcaccacccaggggtaccgagctcgaattcgtaatcatggtcatagctgtttcctgtgtgaaattgttatccgctccagttgggacaacatacgagccggaagcataaagtgtaaagcctgggtgccgcaagccaaaggcaacaatgtggttatcacaagctacatgacaaacagaggcttcttcgaggataaaaaggcaacatttgcgccaagcttcttaatgaacatcaaaggcaataaaacatccgttgtcaaaaacagcatcctggagcaaggacagctgacatggctccaagtagcgaagcgagcaggactgggcggcggccaaagcggtcggacagtgctccgagaacgggtgcgcatagaaattgcatcaacgcatatagcgctagcagcacgccatagtgactggcgatgctgtcggaatggacgatatcccgcaagaagcccggcagtaccggcataa

SEQ ID NO: 16335 - DNA, 2556 bp, Homo sapiens
  SIMILAR (806)..(1243): 331254mologous to Rattus norvegicus 270 kDa ankyrin G isoform,accession number AF102552,Smith-Waterman Score=213.
atgggcggcatggtggagcagcagctttctgatgcaatcaccgcgatgcataaccaggacagcgatctggcgaagcgcgtcatcgaaggcgacaagaacgtcaacatgatggaagtggcgatcgatgaagcctgcgtgcgcattatcgccaaacgtcagccgacggcgagcgacctgcgactggttatggtgatcagtaaaaccattgccgagctggagcgtattggcgacgtggcggacaaaatctgccgtactgcgctggagaaattctcccagcagcatcagccgttgctgatgctgcacgacgtgctggacgggtaccgaatgcgaagtcgcgatccccgtcagcaccgcgccctgcaacaacgaaacaccaagaatgagtttaaaaccgatcgccgcaccaataaattccgccagcttccatacacaacatctgaaagcaggcgatcgcgtagtaataagtgggctgcagaaagtgcgtcctggtgtccaggggggctggcgatcctcaaactgccggtggcgcaatatcctacgattgcaccgccggcagtaacgatctccgcctcctaccccggcgctgatgcgaaaacagtgcaggacacggtgacacaggttatcgaacagaatatgaacggtatcgataacctgatgtacatgtcctctaacagtgactccacgggtaccgtgcagatcaccctgacctttgagtctggtactgatgcggatatcgcgcaggttcaggtgcagaacaaactgcagctggcgatgccgttgctgccgcaagaagttcagcagcaaggggtgagcgttgagaaatcatccagcagcttcctgatggttgtcggcgttatcaacaccgatggcaccatgacgcaggaggatatctccgactacgtggcggcgaatatgaaagatgccatcagccgtacgtcgggcgtgggtgatgttcagtggtaccgagatcgagttgtatcatgccgaaatgacgatctcaatgccgcccaggaggcgctcgaagagcgtgcgcgtaatgaactcagcatgaccagcccgggcgaaactttttatcgtctggtgcctgacgcgtcgaagcgcgcacacccgggaattaacatggcaaccactcatttggatgtttgcgccgtggttccggcggccggatttggccgtcgaatgcaaacggaatgtcctaagcaatatctctcaatcggtaatcaaaccattcttgaacactcggtgcatgcgctgctggcgcatccccgggtgaaacgtgtcgtcattgccataagtcctggcgatagccgttttgcacaacttcctctggcgaatcatccgcaaatcaccgttgtagatggcggtgatgagcgtgccgattccgtgctggcaggtctgaaagccgctggcgacgcgcagtgggtattggtgcatgacgccgctcgtccttgtttgcatcaggatgacctcgcgcgattgttggcgttgagcgaaaccagccgcacgggggggatcctcgccgcaccagtgcgcgatactatgaaacgtgccgaaccgggcaaaaatgccattgctcataccgttgatcgcaacggcttatggcacgcgctgacgccgcaatttttccctcgtgagctgttacatgactgtctgacgcgcgctctaaatgaaggcgcgactattaccgacgaagcctcggcgctggaatattgcggattccagtttgatattggtcggatgcccgcccaaatgttgctgagcaaaattaaaaataacgatcacaaccacaacactgttgacctcgggcaggaaactggaggatatctcatgagtgaacccctgttaattgcccgcacgccggacacagaactgtttttactgccgggaatggctaaccgtcatgggctgattaccggcgcaacggggacgggtaaaaccgttacgctgcaaaaactggcggagtcattgtcggaaatcggcgtgccggtgtttatggctgatgtgaaaggcgatctgaccggcgtcgcgcaggcaggaacggtgtcggaaaaactgctcgcaaggcttaaaaatatcggcgtcaatgactggcaaccgcatgccaatccggtggtggtgtgggatatctttggcgagaaaggccatccggtgcgggcgacggtttcggatctggggccgctgttgctggcacgactgttgaatctcaacgatgtgcaatctggcgtgctgaatatcatcttccgcattgctgacgatcaggggctgttactgctcgactttaaagatctgcgggcaattacccagtacatcggcgataacgccaaaccatcagcccacagctactcaatgcgatcgattaagccatccggcaggtgcgggtttagtggcccgacattcaccggccaggcggtggtgatttcatctggtgcagcggcatggacgattttcacgggcgtcaggggctacctggcccgcatcagctgcggcgtttgcctggccgttattagtttgcgctccgctatcggcagccagtgcggcaccgctggcaaggcttag

SEQ ID NO: 16336 - DNA, 605 bp, Homo sapiens
  SIMILAR (793)..(1167): 931254mologous to Homo sapiens putative p150,accession number U93574,Smith-Waterman Score=649.
cgtgcgagatgcacagcgtgcagaagaacgagcacgacaagaccccggagcacagcaggaagcgctcccggccctcgctcctccgccccgtgtctgcacccgccaagaaaaaaatgaaacttcgtggtaccaaagacctgtccatcgctgcagtggggaagtacgggactctgcaggaattttctttctttgacaaggtccgccgggtgctgaagagccaggaggtgtatgaaaacttcctccgctgcatcgcactcttcaaccaggagctggtgtctggctctgagctcctgcagctcgtcagcccatttctggggtgagcagctgacttcccagggctccctaggggggttctgttcctgtcaactccatctacttggtttttagttactgtttttgagcaatgattgtgcttttctaaaatcctgtttattaattgacgtgattgatataattattgattcccatgcatttgtaaggagcaatacaccacctgggtaccctccagctggttcctttaccagtaacatctgtagtcagtatcctcaccagaatacagtgggtcctcgagtaatgccttttcatttaacactgttttaacaccg

SEQ ID NO: 16337 - DNA, 1350 bp, Homo sapiens
  SIMILAR (436)..(1314): 941254mologous to Escherichia coli acriflavine resistance protein,accession number M94248,Smith-Waterman Score=1347.
atgatcatcatcgccatcattatgatgggcaagaagatccattctgtagatattgggcagcttctttattcagctacaccagttgttgttcagtgtgcccatattgtaactaaccacggcaacagggatggagctatccatgggatcaacaacatggacttccctctgcaaggcagaaaacgcagcctgccaacaagagaagccacacatatggctgtgctcgatatcttcattcttgcggctaaagcggcggcgaaccaccacaaagaataccggaacgaagaagattgccagtaccgttgcggtcaccatcccgcccattacaccgttacctactgcgttctgcgcgccggaaccagcaccagtcctgttaaccagcggcataccgccgaggttaaacgccagcgagaacccccaacttttaagcgggtcctctccagtgactccacgggtaccgtgcagatcaccctgacctttgagtctggtactgatgcggatatcgcgcaggttcaggtgcagaacaaactgcagctggcgatgccgttgctgccgcaagaagttcagcagcaaggggtgagcgttgagaaatcatccagcagcttcctgatggttgtcggcgttatcaacaccgatggcaccatgacgcaggaggatatctccgactacgtggcggcgaatatgaaagatgccatcagccgtacgtcgggcgtgggtgatgttcagttgttcggttcacagtacgcgatgcgtatctggatgaacccgaatgagctgaacaaattccagctaacgccggttgatgtcattaccgccatcaaagcgcagaacgcccaggttgcggcgggtcagctcggtggtacgccgccggtgaaaggccaacagcttaacgcctctattattgctcagacgcgtctgacctctactgaagagttcggcaaaatcctgctgaaagtgaatcaggatggttcccgcgtgctgctgcgtgacgtcgcgaagattgagctgggtggtgagaactacgacatcatcgcagagtttaacggccaaccggcttccggtctggggatcaagctggcgaccggtgcaaacgcgctggataccgctgcggcaatccgtgctgaactggcgaagatggaaccgttcttcccgtcgggtctgaaaattggttacccatacgacaccacgccggttgtgaacatctctattcacgaagtgggtaaaacgctggtcgaagcgaacaatcttgtgttcctggctatgaatttggtcctgcaagaatttcccgcggacgttatttccaccattgccggtcccccaagcctgaggagcagcagggttcctgggctctaa

SEQ ID NO: 16338 - DNA, 2550 bp, Homo sapiens
  SIMILAR (1209)..(1622): 971254mologous to Homo sapiens transcription factor Elongin A2,accession number AB030834,Smith-Waterman Score=722.
atgactgtgtctctccgtgtccgccgggtgctgaagagccaggaggtgtatgaaaacttcctccgctgcatcgcactcttcaaccaggagctggtgtctggctctgagctcctgcagctcgtcagcccatttctgggagcatgcacctcgtcatcgtgcctgtcacctgctctgcacgtgtcttacgctcgattgggctcgtgtgtcatccgtactcacacgctagtcatcctcctctgtatcacaccaggtctgagtgctcactatcgcaaacaccctgatgctgcgctgcacacgtctctcagtcgatgctcacgagaccgagcgcccgtgcacgtccgctctgttctctgcggcgtcgtagtcacgactgcatcttccccgtacggcgccgtgcgctcaggctgtggtccttcgttcttctgttcgaatctacccacgcgtaccgtagaagacgccctcacctatctggaccaggtgaagatccgctttggcagcgaccctgccacctacaacggcttcctggagatcatgaaggatctccacgccgtcattcgcaccgtctgccccgtgcgaggcgatcctcgcgcgctctcccgtcgctcgcttcgctctgtgctgctccgcgccctcaggtgtctctacccggcgactctgtctcccgcctctcgtgtcagtgaggatatctccgactacgtggcggcgaatatgaaagatgccatcagccgtacgtcgggcgtgggtgatgttcagttgttcggttcacagtacgcgatgcgtatctggatgaacccgaatgagctgaacaaattccacgtaacgccggttgatgtcattaccgccatcaaagcgcagaacgcccagacgcgtctgacctctactgaagagttcggcaaaatcctgctgaaagtgaatcaggatggttcccgcgtgctgctgcgtgacgtcgcgaagattgagctgggtggtgagaactacgacatcatcgcagagtttaacggccaaccggcttccggtctggggatcaagctggcgaccggtgcaaacgcgctggataccgctgcggcaatccgtgctgaactggcgaagatggaaccacgcttctactccgcggctggcacgcatgcgcgtagctgtcacgcttacgtgtgtacgcacctgtcacgttgcgatgcgtctgtgcccgatgacctgccgcagcaacgccactccggcaaaatcctgctgcacgtgaatcaggatggttgtccgtgcctggtgcgtggcgctgcgaatcagcgagcgtgccgtgttggtctcggctgtctgctgtggcgtgcttctgtgctctgtgctgcgtgtggcgtcgcgtcgttgcccgtgctctgcgtgttcgtctctctgttcgtgcgcgtgtgcctgctcggccctcgtgtgcacgaggaaccgtcgtcagctccagtgtacctgcaccgcattcgttgtgctctctggagtagagtgtgctatcactggactgtcgagaggttcgtcgtgagccgcggcgtgcctcaattcttacgtgttctgttccagacctacggtccactggttctagatgtctcctcatactcttctcgtattgacacgccacgtatgggtctctatggccttgcaggaaacctacactctcagctcagcgttggtagccctgtgcccatcgggctctcacctcatgccctcgtttcctgctccgttccctgtccccggcaccaccagttctctgagcttcccaagctctcgctcccagcgagtctggaggagccccacgtctggggacagaccgcttctggggatgaccgccgcgacggcaacccgagtcccgtcgtttcctgcatcttggtgctggctggctttctgtactgcagcgctattgtggcgtgcgagtgtgtgttctgtgtcgtcgttcttgcctgttccagacgaatgtgtactccttacatcggcgatacgctggcaacccgtagcgactcgccctgtcggggtgacctgctatacctgctcgtcagcatcatcgtctgtagttcgagctccgttcgcgccaccgcgcggaggcgttactgtgtcgtatctgatctgtctcagtatgacatgctatcaggtagctctttccctacgtgtagtacgctctcgcgtcgagcgtccatcgtcacttcgcgctaccctacgcgtatggcgtatagctccgcgcggctcggtcgattagccctttgcatgcctatacgctacgtctccatatctcctcacgctatcgtgctctatcacatcgcgctgaacgacacttgcattccttcaggctactgtacgagctccctcgaccctgccctctctcctctgcgactcacgtacagtactacgccctctctcggtggtcctgcctgcgtacttgtgtcggggccagtgagtatgcagcgtcagcgtgtgactctcagctcgtgtctctgctccgtatccatctgcgtcttgcgtgctccgaatgccttcgatgcaccagttatgtcgactgactcgacagcggctgtgtgccagtga

SEQ ID NO: 16339 - DNA, 630 bp, Homo sapiens; identical to SEQ ID NO: 6413
  SIMILAR (20)..(535): 331254mologous to Mus musculus neural variant mena+ protein,accession number U72521,Smith-Waterman Score=123.

SEQ ID NO: 16340 - DNA, 486 bp, Homo sapiens
  SIMILAR (354)..(452): 421254mologous to Homo sapiens Human secreted protein encoded by gene 23,accession number Y00280,Smith-Waterman Score=78.
gctcttgtatagaaatatagttgattttgaatattaactttgtacctgcatcttgatgcagtcagtggttctagtagcttgtttgtagaatcctttggatttttctatgcacgtgatgatagagtctataattaaaaagttttactttccagtagatatacctcaataaagctgtttaattgacatatgaccagctatcatatgtcaattaaacagctttattgaggtataattgacatatgatagctggtcatatagatgaagtgtaaagtttgattagttttggcccacctgtaaaaccatcaccagtcaagataatgagcatatccctcatccccgaagtttccctgtcctccttggtaatccctccttccttcgtctctctttgcccacatcccatccctaggaaaccactaatattctctggtcattatggtttagtttgcattttctagaattttatagaaatagaaacagagttgtctg

SEQ ID NO: 16341 - DNA, 1128 bp, Homo sapiens
  SIMILAR (992)..(2014): 981254mologous to Homo sapiens TA2R_HUMAN, BETA ISOFORM; TXA2 -R; PROSTANOID TP RECEPTOR,accession number AC005175,Smith-Waterman Score=1708.
ctcagcagtatgccatctccacctggatacctgatggcctcgtactgctctacacccaaaatgttcaaagtaggatcaccattcaaaacagatcttccctcaacacccccacttctatcgtgaatgccacaattcttctcccctgcctgggctcccactttggtggcatttgaggagcccttcagcctcccccctgcactgtgggagcccctttctgggctggccaaggctggagcccactccctcagcttgcagggaggtgtggagggagaggcacgagcgggaaccggggctgcgtgcggcgcttgcgggccagctggagttccgggtgggcttgggcttggtgggccccgcactcggagcagccggccagccctgctggccccgggcaatgggggacttagcacccgggccagtggctgcggagggtgtactgagtcccccagcagtggctggcccaccagtgctgcgctcgatttcttgccagggccttagctgccttcccatggggcaggactcgggacctgcagcccgccatgcctgagcctcccacccactccatggtttcctgtgcggcccgagcctccccgacgagcaccaccctcctactccacggcgcccagtcccatcgaccacccaagggctgaggaatgcgagcacacggcaccgggactggcaggcagctacccctgcagccctggtgcgggatccactaggtgaagccagctgggctcctgagtctggaactaacatttccattacacctggaaatgccacatttgtgacccgggtgcagggacaggcttggtttgcctcatgtatcactggtcatgatatgtctagtttaaaaacttccagtgtcgtggtattaaggagacaatctgaggcacttctaccagccaatttgacatgcaattggcaagattcttctgcccttgccaccttagaaagtgccctgtcccaggtcagacacaaaagattcacatttacacttatggtctttacaggctcagccatagacattatggcaactgttagcattgctgttgtatctattactgaatcagtacaaacaactgcttttgtagataatctggccaaaaatatatgtgatgaacttctcctaca

SEQ ID NO: 16342 - DNA, 413 bp, Homo sapiens
  SIMILAR (57)..(413): 891254mologous to Homo sapiens unnamed protein product,accession number AX056883,Smith-Waterman Score=572.
gctctgcagccacaaccatgtttggccggaagcgcagtgtctcctttgggggcttcggatggatcgacaagaccatgctggcaagtctgaaggtcaagaagcaggagctggccaacagctcggatgcgaccctcccagaccggccgctctcccctcctctcacggcacctcccaccatgaagtcgtcggagttctttgagatgctggagaaaatgcaggacgactatatcccataccccagcatcgacgaggttgtggagaagggaggcccgtaccctcaggtcatcctgccacagtttgggggctattggatcgaggacccggagaacgtgggcaccccaacatcgctggggagcagcatctgtgaggaggaggaagaggacaacctcagccccaacacatttggctacaag

SEQ ID NO: 16343 - DNA, 507 bp, Homo sapiens
  SIMILAR (61)..(507): 911254mologous to Homo sapiens unnamed protein product,accession number AX056861,Smith-Waterman Score=734.
cgcctgtgtttgctctcgggccctccctgacgcctggatctgggagctgccaccccgacgatcgacaagaccatgctggcaagtctgaaggtcaagaagcaggggctggccaacagctcggatgcgaccctcccagaccggccgctctcccctcctctcacggcacctcccaccatgaagtcgtcggagttctttgagatgctggagaaaatgcaggggatcaagcttgaagagcagaagccgggaccccagaagaacaaggacgactatatcccataccccagcatcgacgaggttgtggagaagggaggcccgtaccctcaggtcatcctgccacagtttgggggctattggatcgaggacccggagaacgtgggcaccccaacatcgctggggagcagcatctgtgaggaggaggaagaggacaacctcagccccaacacatttggctacaagctcgagtgcaagggtgaagccagggcctaccggaggcacttcctggggaag

SEQ ID NO: 16344 - DNA, 540 bp, Homo sapiens
  SIMILAR (346)..(840): 671254mologous to Homo sapiens putative p150,accession number U93572,Smith-Waterman Score=569.
accctggaggaggagctatttgggaacaatgaggagagcccagcttttaaggagttcttggacctgctgggggacacgatcacactgcaggatttcaaaggcccccccacaacatatcccccttgcaagacctggaaacagtggtcagactttacgggcactgccgggactaacggtggcatcatctggtttgtcttgcaggacgactatatcccataccccagcatcgacgaggttgtggagaagggaggcccgtaccctcaggtcatcctgccacagtttgggggctattggatcgaggacccggagaacgtgggcaccccaacatcgctggggagcagcatctgtgaggaggaggaagaggacaacctcagccccaacacatttggctacaagctcgagtgcaagggtgaagccagggcctaccggaggcacttcctggggaagggcatctgcatctcactcatcatggttgtcatcgccaccatcgccatcgtcacagtccatcacggagcacctgcgtatcagatgctccactag

SEQ ID NO: 16345 - DNA, 690 bp, Homo sapiens
  SIMILAR (357)..(211): 481254mologous to Homo sapiens Human secreted protein, SEQ ID NO: 4473,accession number G00392,Smith-Waterman Score=116.
tcaggtctgccacctccgggtgacatcgtcataacagtctgcagcagtagtctgatcccgtggtggcatgctagggtaactcagcagcgccaccacaaagggcccgtcagggaggctggcagcccagcacatccctgtgagaatgacttgactgtcaggctcttgtggtttccactcccggtgcaggccgatggtcaggtctgccttggggccaaggatggaagggtggtgctcgtctgaccgatagatgatccgacaggcgatgcaggcatggtcgtggttcagctcctccttgtacctctggtagaattcggctgtgaatccatctggtcctggactctttttggttggtaagctattgattattgccacaatttcagatcctgttattggcctattcagagattcaacttcttcctggtttagtcttgggagagtgtatgtgtcgaggaatttatccatttcttctagattttctagtttatctgcgtagaggtgtttgtagtattctctgatggtagtttgtatttctgtgggatcggtggtgacatcccctttatcattttttactgcatctatttgattgtgggggtcctggccttcattgtttttctgatgataactttgtacatctttgatgtcatttcttctcaagtgctcctccttaggcaggttacttctcgttaacac

SEQ ID NO: 16346 - DNA, 792 bp, Homo sapiens
  SIMILAR (590)..(429): 371254mologous to Homo sapiens ultra high sulfer keratin,accession number AJ006693,Smith-Waterman Score=74.
atggtgttaaggagaagtaacctgcctaaggaggagcacttgagaagaaatgacatcaaagatgtacaaagttatcatcagaaaaacaatgaaggccagtgtttgcacccaagtcaaacatccagccattgcttccatctgcaaggcagtgctgtgagttgggccatggtctggtcacttcaaatatgcaggcttgccgacactttgaggatgaagtactcaggaagggaggccaagctcagcagaataggctctgaggaaaatccaggtgatgctctccatagtccctctgtggatgcctgggctcttcggtgctctgcttttggctttcttagatgtgaagtggaaagagtatgggctttggagccaaacaggcccgtgtttgaattcctgctcatatactgtgcacttgcccattttaaaagtatgctggctgctgtgcatggcctgatacagcgacttgttccccacactgcagaccctggaccagcagcattgcagcaactgggaaaaagtagtttacaagacagtgaagtacaatatgaaactgaagatgttagagaggaaaacagtgatttgagaaatgtacagtctttagccactgctctcatcccaataacagtccacggttatgggagaaactaccagggtctgggcattgggaatacacacaaccaacagccaaaaggggcaagagtctgtactatcgggattcaaagggaggaaagcagcacactgaccctgaaactgccagcacagagccacatcagcagcaggaaagacactgagtga

SEQ ID NO: 16347 - DNA, 552 bp, Homo sapiens
  SIMILAR (385)..(498): 971254mologous to Homo sapiens myo-inositol monophosphatase 2,accession number AF157102,Smith-Waterman Score=204.
atgaacttgaaactcacaggattgaaagagtctgctgggtaccatgcagcccctgaaggaaacctgctgaccaccagcacctgggagctctgcagacacccccaccccgcgatctttcagtgtaattggcctgaagtgaaaaccacagcctctgatggtgaacagaccacacgtgagcctgtgctcaaagccatgtttttggctgacacccatttgcttggggaattcctaggccactggctggacaaattacgaagagctaaaaatattgtgaatggaaccatattactggtgttaaggagaagtaacctgcctaaggaggagcacttgagaagaaatgacatcaaagatgtacaaagttatcatcagaaaaacaatgaaggccagcttgaattcggagtgatttaccactgcacagaggagcggctgtacacgggccggcggggtcggggcgccttctgcaatggccagcggctccgggtctccggggagacagatggccttcgaggcagcgagaggagctatggccatggcccatctctgctgctgtga

SEQ ID NO: 16348 - DNA, 887 bp, Homo sapiens
  SIMILAR (379)..(855): 911254mologous to Homo sapiens Similar to hypothetical protein FLJ11585,accession number BC002877,Smith-Waterman Score= 768.
  misc_feature (1)...(887): n = a,t,c or g
aactttaatatcttggtgagaaaagcattctaatagctttattctgacatacggaggtatggagagcttgaaggagtcagagaggtgcccagctaagacctgaatgccatcaccctccccaaggctctgcagttttctcgtggtgaacccttgatggatttgttgttgcttgagaaatggcgatgatcgaattggggtttggaagacagaattttcatccattaaagaggaagagttcattgctgttgaaactcatagctgctgtctttgctgtgcttctattttgcgaatttttaatctattacttagcgatctttcagtgtaattggcctgaagtgaaaaccacagcctctgatggtgaacagaccacacgcgatgcctgtgctcaaagccatgtttttggctgacacccatttgcttggggaatacctaggccactggctggacaaactacgaatggtatggcggatggagagagcgctccagacagctctgtggttgctgcagcccgaagaccccctcatcctgcgggatatccttcatgaaggggatcggagcacccctgaggcctgggcggatgatgtgaggcggtttcagaaaatgttcagacacccaagtcatgtacagctgaaggtagttgctggaaaccatgacattggcttccattatgagatgaacacatacaaagtagaacgctttgagaaagtgttcagctctgaaagactgttttcttggaaaggcattaactttgtgatggtcaacagcgtggcgctgaacggcgatggctgtggcatctgctctgaaacagaagcagagctcattgaagtttctcacagactgaactgctcccgagagcangcacgtggctccagcccggtgtgacctgg

SEQ ID NO: 16349 - DNA, 1604 bp, Homo sapiens
  SIMILAR (1198)..(2865): 891254mologous to Homo sapiens putative p150,accession number U93563,Smith-Waterman Score=2651.
cactaatgtcagtacaaccatcgctactgttgtcctcaatgcactggcccgagctacaaagctcctaccacctggccaccgccgcagccccaaccctgccacggctgcagccagcagtcctcctaccactctggcgcactgcagtctccgtagccaccaccaaccattgcgaggtgagcagcagccccaggccatcagaaccacagcgggaagatgcaaggctttatcgtcttgcccgagcttcttcgagtgtgggtcccgcagcagcggtgcacccccaggagcttgtgggcagatcttcagggtcagcaatgccaagctggagccacaggccaggccttccagtcctgtgactggtggacccctcgacctcatggcttgcagagtggttgcggccagcacccgggagatggcgatgctcatagctcaggccttacagacgattaactatgggcgggatgatgagaatggccacacgcacagcgcctgcgaggtgcaccacgggggccgagtccccgagctcagcgtcccatctttcagttggaggaacagaaacaaccccagtttcatcatgggtagcatcacgcccacagactacaccctctccaagtgctacctcccacgtgaggatgtggttttgatcatctactgtggagtgagtacaaatgaacaaccagatgaagaagtacccaggacaagattcccgactgtggcggttagcattggatttgctgttcgacaagagcttgaattcggagtgatttaccactgcttagagttatcggctgtacacgggccggcggggtcggggcgccttctgcaatggccagcggctccgggtctccggggagacagcatcaggaatgctccctggcattcagcagatacacatacagcaggaacagaacctccaagttggagcaagcacagagctgccttgcaatctgcacaccacgcggatacgtgtggcctcagcaccaagttctgccccagaggatgggactgaaagcaagacctgcaacttccgagtcacatcctcaaaaggatactgccttgcacttcctcgtgtcccattccccctcaccacaggctacaaacacttacacaagccaccaactggcacccacagcacttatcactccatgtgtctgctcaaccagcctgggtggttacggaccatttctatcatcttgttcttgaacaacaagatatgctggcagaaaaagtctggcagggaaatcaaaattgaagactatttcccagaatatgcaaattatactgttcctgaagacggccacctcagtgcccatctctacatcctttctgggctgtgtatgtggctgcagcacagtggacaggactctatactctatactgattatagacgcggtggagaaaacagctttgtgatggtcaacagcgtggcgctgaacggggatggctgtggcatctgctctgaaacagaagcagagctcattgaagtttctcacagactgaactgctcccgagaggtaggagagcatctgaatgccacaggtgagctgggggaggaaagggctcatggcagacagcaggcagcctgtggtttcacgatagccgcctga

SEQ ID NO: 16350 - DNA, 651 bp, Homo sapiens
  SIMILAR (430)..(513): 961254mologous to Homo sapiens Similar to threonyl-tRNA synthetase,accession number BC000517,Smith-Waterman Score=142.
atgcctttattgtttctgggtgtgtctgtgagggtgttgccagagagattgacatttgagtcagtggcctgggagaggcagacacaccctctgtgtgcgtgggcaccatccagtcggctgccagtgcagctagaacaaagcgggtggaagaaagtgggattaagttggcttgctgagtcttctggctttcatctttctcctgtgctggatgattcctgcccttggacatcagactccaggttcttcagcttttggactcttggacttatacccgtggtttgccaggggccttctggcctttggccattgactggagatggcactgtcggcttccctgcttttgaggcttggactcggactgaaccactactggcttccttgctccttagcttgcagacagcctatcgtgggacttcaccgtgtgcttgtattggtgctggtgaagagaagcaaaaggaaggaggcaaaaagaagaacaaagaaggatctggagatggaggtcgagctgaggtaaaagttatcatcacagagggctctgttatcagaggacatttggcaatgtctgaaagcagttttggtcatgacaactgggagaagagtgctattgatattcagtgggtagaggtcaaggatcctgctaagcacctatag

SEQ ID NO: 16351 - DNA, 2497 bp, Homo sapiens
  SIMILAR (1)..(3036): 941254mologous to Homo sapiens putative p150,accession number U93563,Smith-Waterman Score=4979.
ggcacgagggtcagcggagagtaggcatgtagcttctgcagttgctcctcctcaccctccgcgacctgatttcctagaagggctctgtcacccgaaaagattttccactggcttagaggagggagggcccgccttcccccgttatccattggctgctcgttccgccgcaagttgggggcggggttagggcgcctttcgattgcatcagctggtccagccgaggccaagtcccgggcgctagcccacctcccacccgcctcttggctcctctcctctaggccgtcgctttcgggttctctcgatcgcttcgtcgttcgccaatgtttgaggagaaggccaagcagtccttcagggaaagatgggaggcgaggagaagccgatttggtgctggtgaagagaagcaaaaggaaggaaggcaaaaagaagaacaaagaaaggatctggagatggaagtcgagctgagttgaatccttggcctgaatatatttacacacgtcttgagatgtataatatactaaaagcagaacatgattccattctggcagaaaaggcagaaaaagatagcaagccaattaaagtcactttgcctgatggtaaacaggttgatgcggaatcttggaaaactacaccatatcaaattgcctgtggaattagtcaaggcctggccgacaacaccgttattgctaaagtaaataatgttgtgtgggacctggaccgccctctggaagaagattgtaccttggagcttctcaagtttgaggatgaggaagctcaggcagtgtattggcactctagtgctcacataatgggtgaaggcatggaaagagtctatggtggatgtttatgctacggtccgccaatagaaaatggattctattatgacatgtacctcgaagaagggggtgtgtctagcaatgatttctcttctctggaggctttgtgtaagaaaatcattaaagaaaaacaagcttttgaaagactggaagttaagaaagaaactttactggcaatgtttaagtacaacaagttcaaatgccggatattgaatgaaaaggtgaatactccaactaccacagtctatagatgtggccctttgatagatctctgccggggtcctcatgttagacacacgggcaaaattaaggctttaaaaatacacaaaaattcctccacgtactgggaaggcaaagcagatatggagactctccagagaatttatggcatttcattcccagatcctaaaatgttgaaagagtgggagaagttccaagaggaagctaaaaaccgagatcataggaaaattggcagggaccaagaactatatttctttcatgaactcagccctggaagttgcttttttctgccaaaaggagtctatatttataatgcacttattgaattcattaggagcgaatataggaaaagaggattccaggaggtagtcaccccaaacatcttcaacagccgactctggatgacctcgggccactggcagcactacagcgagaacatgttctcctttgaggtggagaaggagctgtttgccctgaaacccatgaactgcccaggacactcccttatgtttgatcatcggccaaggtcctggcgagaactgcctctgcggctagctgattttgggggtcttcataggaacgagctgtctggagcactcacaggactcacccgggtacgaagattccaacaggatgatgctcacatattctgtgccatggagcagattgaagatgaaataaaaggttgtttggattttctacgtacggtatatagcgtatttggattttcttttaaactaaacctttctactcgcccggaaaaattccttggagatatcgaagtatgggatcaagctgagaaacaacttgaaaacagtctgaatgaatttggtgaaaagtgggagttaaactctggagatggagctttctatggcccaaagattgacatacagattaaagatgcgattgggcggtaccaccagtgtgcaaccatccagctggatttccagttgcccatcagatttaatcttacttatgtaagccatgatggtgaggataagaaaaggccagtgattgttcatcgagccatcttgggatcagtggaaagaatgattgctatcctcacagaaaactatgggggcaaattggcccccttttggctgtcccctcgccaggtaatggtagttccagtgggaccaacctgtgatgaatatgcccaaaacgtacgacaacaattccacgatgccaaattcatggcagacattgatctggatccaggctgtacattgaataaaaagattcgaaatgcacagttagcacagtataacttcattttagttgttggtgaaaaagagaaaatcactggcactgttaatatccgcacaagagacaataaggtccacggggaacgcaccatttctgaaactatcgagcggctacagcagctcaaagagttccgcagcaaacaggcagaagaagaattt

SEQ ID NO: 16352 - DNA, 456 bp, Homo sapiens
  SIMILAR (45)..(455): 931254mologous to Homo sapiens immunoglobulin-like transcript 11 protein,accession number AF212842,Smith-Waterman Score=658.
  misc_feature (1)...(456): n = a,t,c or g
aaaaggataacctcgggtgaagaacgnnccgnganggtgcagtggggtcgacgctgagattcgacagtttcattctgactgaggaaggagaccacaagctctgggggggcgtggactcacagctgacccccagtgggcagttccaggccctgttccctgtgggccctgtgacccccagccacaggtggatgctcagatgctatggctctcgcaggcatatcctgcaggtatggtcagaacccagtgacctcctggagattccggtctcaggagcagctgataacctcagtccgtcacaaaacaagtctgactctgggactgcctcacaccttcaggattacgcagtagagaatctcatccgcatgggcatggccggcttgatcctggcgggccttgggattctgatatttcaggattggcacagccagagaagcccccaagctgcagctggaaggg

SEQ ID NO: 16353 - DNA, 1415 bp, Homo sapiens
  SIMILAR (294)..(548): 871254mologous to Homo sapiens putative p150,accession number U93574,Smith-Waterman Score=412.
gaccctccaggggccccagccctccacccataggctccttctccatacctgactctcagcaacaccctagtggacagtcccaagctctgtttcctgtgggccccaagaccctcagccacagatggatgttcagatgtcatggcaataacaggaacacccttcaggtgtggtcggaactcaacgactccctgaagctcctgttctcagatggtatatgtgtctcccgtatatgtgtctccctcatgatctgcaccagcagctccatggtcctcgtcctgcatagatacaagcagagagtccaacatgttcgcagccgcaacctctcccgcagaacatctcatgaaaccacaaccacacacaccatcctcatcctggcaccatggtctcatccatctgcacagctgcagccagtgggaggagacgccgtgagccctgccctcatggttctgctctgcctcgggaacctctccaaagccaccctctgggctgagccaggctctgtgatcagccgggggaactctgtgaccatccggtgtcaggggaccctggaggcccaggaataccgtctggttaaagagggaagcccagaaccctgggacacacagaacccactggagcccaagaacaaggccagattctccatcccatccatgacagagcaccatgcagggagataccgctgttactactacagccctgcaggctggtcagagcccagcgaccccctggagctggtggtgacaggattctacaacaaacccaccctctcagccctgcccagtcctgtggtgacctcaggagagaacgtgaccctccagtgtggctcacggctgagattcgacaggttcattctgactgaggaaggagaccacaagctctcctggaccttggactcacagctgacccccagtgggcagttccaggccctgttccctgtgggccctgtgacccccagccacaggtggatgctcagatgctatggctctcgcaggcatatcctgcaggtatggtcagaacccagtgacctcctggagattccggtctcaggtgtgtctagaaagccctccctcctgaccccgcagggccctgttgtggtccctggagagaacctgaccctccagtatcactctgatgttggctatgacaggtttgctctctacaaggaggacagacgagcagctgataacctcagtccgtcacaaaacaagtctgactctgggactgcctcacaccttcaggattacgcagtagagaatctcatccgcatgggcatggccggcttgatcctggtggtccttgggattctgatatttcaggattggcacagccagagaagcccccaagctgcagctggaaggtttttggggaacgtggtgtttggttacttgcagaagttctttagtgatgatttctga

SEQ ID NO: 16354 - DNA, 293 bp, Homo sapiens
  SIMILAR (293)..(51): 981254mologous to Homo sapiens FAA,accession number AC005567,Smith-Waterman Score=398.
tcttcccaaaggaggccttgaaccagtctgcatatgacaggaacgcagaggggccctccaagtgctgcctggcgcacaaccaggaacgcagtgaccatgctgtccagctggcagctctcgaatgcctgggccatcaaacgcgccacccagtcttcaagcagctgctgcgcttctggaaagcagacaaccagggcagacacaaaggagagcactctctgccagtgaacctcctgcgtttccagaacttcttgcaaatggccaaccaactcctctgcactcagcatcacaaagag

SEQ ID NO: 16355 - DNA, 1722 bp, Homo sapiens
  SIMILAR (1263)..(484): 861254mologous to Homo sapiens peptidylglycine alpha- amidating monooxygenase,accession number M37721,Smith-Waterman Score=1147.
atgaagaaacggccgggtcactctctgtttcagtttcagttcctcatgttcagattgttctcagaggcccgacagcctctttctgaggaggacgtagccagcctttcctggagacccttgcaccttccttctgcagactggcagagagctgccctctctctctggacacacagaaccttccgagaggtgttgaaagaggaagatgttcacttaacttaccaagactggttacacctggagctggaaattcaacctgaagctgatgctctttcagatactgaacggcaggacttccaccagtgggcgatccatgagcactttctccctgagtcctcggcttcagggggctgtgacggagacctgcaggctgcgtgtaccattcttgtcaacgcactgatggatttccaccaaagctcaaggagttatgaccactcagaaaattctgatttggtctttggtggccgcacaggaaatgaggatattatttccagattgcaggagatggtagctgacctggagctgcagcaagacctcatagtgcctctcggccacaccccttcccaggagcacttcctctttgagattttccgcagacggctccaggctctgacaagcgggtggagcgtggctgccagccttcagagacagagggagctgctaatgtacaaacggatcctcctccgcctgccttcgtctgtcctctgcggcagcagcttccaggcagaacagcccatcactgccagatgcgagcagttcttccacttggtcaactctgagatgagaaacttctgctcccacggaggtgccctgacacaggacatcactgcccacttcttcaggggcctcctgaacgcctgtctgcggagcagagacccctccctgatggtcgacttcatactggccaagtgccagacgaaatgccccttaattttgacctctgctctggtgtggtggccgagcctggagcctgtgctgctctgccggtggaggagacactgccagagcccgctgccccgggaactgcagaagctacaagaaggccggcagtttgccagcgagtacgtgtgggtgctattggttttccttttcttcttctccttgatgggcctgctgtcgtcacatctgacctcaaatagcaccacagacctgccaaaggctttccacgtttgtgcagcaatcctcgagtgtttagagaagaggaagatatcctggctggcactctttcagttgacagagagtggtaagaaacacgctgctgaggcacaaatgcggagggccgctcttttcagaggcatcttgcaaatggttaagaacgagccctccttgaggttccttgctaatcttctctcctacttccatgaagacgcggccatcagggaagaggccttcctgcatgttgctgtggacatgtacttgaagctggtccagctcttcgtggctggggatacaagcacagtttcacctccagctggcaggagcctggagctcaagggtcaggcagggcaaccccgtggaactgataacaaaagctcgtctttttctgctgcagttaatacctcggtgcccgaaaaagagcttctcacacgtggcagaggtaacgtcaagatgcccaccttgggccatgtgggggacatgagaattgacagctgcctgggccatgtgcctgcctggctggcaatacaactcgactatttctgccagagcccctcccctgtggtctga

SEQ ID NO: 16356 - DNA, 3594 bp, Homo sapiens
  SIMILAR (280)..(2046): 461254mologous to Homo sapiens initation factor 4B,accession number X55733,Smith-Waterman Score=874.
agcagataaaatccccccatctctgtactccacctactgccaggcctgctctgctgctgaagagaagccagaagatgcagccctgggagtgagggcagaacccaactctgctgaggagcccctgggacagctcacagctgcactgggagagctgagagcctccatgacagaccccagccagcgtgatgttatatcggcacaggtggcagtgatttctgaaagactgagggctgtcctgggccacaatgaggatgacagcagcgttgagatatcaaagattcagctcagcatcaacacgccgagactggagccacgggaacacatggctgtggacctcctgctgacgtctttctgtcagaacctgatggctgcctccagtgtcgctcccccggagaggcagggtccctgggctgccctcttcgtgaggaccatgtgtggacgtgtgctccctgcagtgctcacccggctctgccagctgctccgtcaccagggcccgagcctgagtgccccacatgtgctggggttggctgccctggccgtgcacctgggtgagtccaggtctgcgctcccagaggtggatgtgggtcctcctgcacctggtgctggccttcctgtccctgcgctctttgacagcctcctgacctgtaggacgagggattccttgttcttctgcctgaaattttgtacagcagcaatttcttactctctctgcaagttttcttcccagtcacgagatactttgtgcagctgcttatctccaggccttattaaaaagtttcagttcctcatgttcagattgttctcagaggcccgacagcctctttctgaggaggacgtagccagcctttcctggagacccttgcaccttccttctgcagactggcagagagctgccctctctctctggacacacagaaccttccgagaggtgttgaaagaggaagatgttcacttaacttaccaagactggttacacctggagctggaaattcaacctgaagctgatgctctttcagatactgaacggcaggacttccaccagtgggcgatccatgagcactttctccctgagtcctcggcttcagggggctgtgacggagacctgcaggctgcgtgtaccattcttgtcaacgcactgatggatttccaccaaagctcaaggagttatgaccactcagaaaattctgatttggtctttggtggccgcacaggaaatgaggatattatttccagattgcaggagatggtagctgacctggagctgcagcaagacctcatagtgcctctcggccacaccccttcccaggagcacttcctctttgagattttccgcagacggctccaggctctgacaagcgggtggagcgtggctgccagccttcagagacagagggagctgctaatgtacaaacggatcctcctccgcctgccttcgtctgtcctctgcggcagcagcttccaggcagaacagcccatcactgccagatgcgagcagttcttccacttggtcaactctgagatgagaaacttctgctcccacggaggtgccctgacacaggacatcactgcccacttcttcaggggcctcctgaacgcctgtctgcggagcagagacccctccctgatggtcgacttcatactggccaagtgccagacgaaatgccccttaattttgacctctgctctggtgtggtggccgagcctggagcctgtgctgctctgccggtggaggagacactgccagagcccgctgccccgggaactgcagaagctacaagaaggccggcagtttgccagcgatttcctctcccctgaggctgcctccccagcacccaacccggactggctctcagctgctgcactgcactttgcgattcaacaagtcagggaagaaaacatcaggaagcagctaaagaagctggactgcgagagagaggagctattggttttccttttcttcttctccttgatgggcctgctgtcgtcacatctgacctcaaatagcaccacagacctgccaaaggctttccacgtttgtgcagcaatcctcgagtgtttagagaagaggaagatatcctggctggcactctttcagttgacagagagtgacctcaggctggggcggctcctcctccgtgtggccccggatcagcacaccaggctgctgcctttcgctttttacagtcttctctcctacttccatgaagacgcggccatcagggaagaggccttcctgcatgttgctgtggacatgtacttgaagctggtccagctcttcgtggctggggatacaagcacagtttcacctccagctggcaggagcctggagctcaagggtcagggcaaccccgtggaactgataacaaaagctcgtctttttctgctgcagttaatacctcggtgcccgaaaaagagcttctcacacgtggcagagctgctggctgatcgtggggactgcgacccagaggtgagcgccgccctccagagcagacagcaggctgcccctgacgctgacctgtcccaggagcctcatctcttctgacgggacctgccactgcacaccagcccagctcccgtgtaaataatttattacaagcataacatggagctcttgttgcactaaaaagtggattacaaatctcctcgactgctttagtggggaaaggaatcaattatttatgaactgtccggccccgagtcactcagcgtttgcgggaaaataaaccactggtcccagagcagaggaaggctacttgagccggacaccaagcccgcctccagcaccaagggcgggcagcaccctccgaccctcccatgcgggtgcacacgaagggtgaggctgacacagccactgcggagtccaggctgctagaggtgctcatcctcactgccgtcctcaggtgggttcgggcttcaccgcctggccctctgtggtcacagaggggctcggtggcccaggtggtggttccgcctccaggggcagggccttgtcctgggtctgtgtcagcgggtgcaccatggacatgtgtacattgaggttgtgggccttctcaaaccgccggccacactggtcacaggcaaagtccagctcagtctcagccttgtgtttggtcatgtggtacttgagggatgcccgctgcctgcactggaacccacagacctcacacctgggggacagaggcagataagaaggtgcgagggccacagccctgggagggggtcctgactcacacttactgcaaaggcttggctcccgaatgtcgcatttggtggacgagaaggtgcttccgctgcttgaaggtttgtccacattcgtcacagatatagttccgcacctctgagaggggagagtccagtgagtccaggcccctgatgctccaacctcccggggggacgacgatgacaatgtgaaaccatcacagctgggaagacatttctgcacatggttcaccatgcagtgggcccaagcaaggggcctatgagggcctcgtttattaagatctttaaactgctttatacactgtcacgtggcttcatcagctgtgtgcatttcaggatggtttttaaagaaacctcagaaagctatttccttaa

SEQ ID NO: 16357 - DNA, 996 bp, Homo sapiens
  SIMILAR (294)..(701): 401254mologous to Herpesvirus papio NTR,accession number AF200364,Smith-Waterman Score=146.
  misc_feature (1)...(996): n = a,t,c or g
tcagtgtcgtggaattcggggatagtgtggggcgaacagcctgagctgaggatacccaggtacctgtcagcagctgggagaggatgggggggtcgacctcttgcaggagggtgggtgtggtgcagagagaggcagtccccatgataggcccattggtcctggggttgaccagtgagccagtaaattatcttattgctttaaacaagtttgtgcttaatctgtcccaactaaaatggagcttataaacttacttagcaaggaacctcaaggagggctcgttcttaaccatttgcaagatgcctctgaaaagagcggccctccgcatttgtgcctcagcagcgtgtttcttaccactctctgtcaactgaaagagtgccagccaggatatcttcctcttctctaaacactcgaggattgctgcacaaacgtggaaagcctttggcaggtctgtggtgctctgtaaaccgcaggagaccaaccctgagaatggccgacctggtgctcccatgggtaagagggtacagccctcagcacagaagagggcatttcctctttgcttattgtaagtcttaaaactggtgacagttttacctatagaaggtaatactgggcctctggacagaagaggctcaggtaggaggccagggacttcgagcacccacaccaaggctgctgcaccacgtcctcaaataagacattaaaagataagcccacaggccggatgcagtggctcatgcctgtaatcccaacactttgggagnccgaggtcggcggatcactgaggccagttcaagaccagcctggcaatatggtgaaaccccgtctctactaaaaatacaaaaattagccgggtgtgacagactcacgcctgtaatcccagctactcgggaggctgatgcaggagaattgcttgaacccaggaggctgaggttgcagtgagctgagatcacaccactgcactccagcctgggtgacagagtgagacccccatctcaa

SEQ ID NO: 16358 - DNA, 1770 bp, Homo sapiens
  SIMILAR (985)..(1518): 431254mologous to Homo sapiens Spir-1 protein,accession number AJ277587,Smith-Waterman Score=277.
aggccacccccagaggagcgcgtgctcgtacgggacttccagcgcctgcttggtgtggctgtccgccaggaccccaccttgtctccgtttgtctgcaagagctgccacgcccagttctaccagtgccacagccttctcaagtccttcctgcagagggtcaacgcctccccggctggtcgccggaagccttgtgcaaagcatgggcaggaggcactggcgggcattgtcagggcagggccgcatctggtgtgtccacaggaagaagagtctccgtgtggggaggtgacgctgaaacgggaccgctccttctcagagcatgacctggcccagctccgaagtgtggtggccgagcctggagcctgtgctgctctgccggtggaggagacactgccagagcccgctgccccgggaactgcagaagctacaagaaggccggcagtttgccagcgagtacgtgtgggtgcgcgccgagcggagcctaacgccgggtcctctaggaacctcgggccgggcagcacccgcgggattctgctggcgtcctccgctgccatgaagcgggaccggctgggccgcttcctgtctcctgggtcgtcccgacagtgcggggcctcggacggcggcggcggcgtcagccggactcggggccgcccttcccttagcgactgggtggcgcgtttgatggcccaggcattcgagagctgccagctggacagcatggtcactgcgttcctggttgtgcgccaggcagcactggagggcccctctgcgttcctgtcatatgcagactggttcaagaatctacctgaagccaccaaagccagagcaactctggacaggaggcctcaggggcgagcacagcagagggcaagggcgcaggacacagcagggtcaggggtgaacacagcagagggcgagggcgcagggtacagcagggtcagggcaaacacagcagagggcgagggcgcagggtacagcagggtcagggcgaacacagcagagggggagggcacagcagaggatgagggcgcagggtacagcagggtcgggctgaacacagcagagggcgagggcgcagggtacagcgggcgaaactatgagaaccctttaagacatggaacacagcactgtgcagctgagagtgtccgtgtaattgtccatcgacctcctgtgtccgactgtgctgcctctgcctgcctgtcccagcagacctggccacctggggaccacctgggcctgtgggcctggaagtcggtgcagacgatggtgactaggatgctgcagaagcttcgggaggacgagccgcatctggagacgcctcgggcagagctggacagcctgggtcacacagactgggcccgactgtgggttcagctcatgcgggagctccgccgcggagtgaagctgaagaaggtgcaagagcaggagttcaaccccctccccaccgagttccagctcacgcccttcgagatgctgatgcaggacatccgggcccggaactacaagctgcgcaaggtcatgagtgccagccaggatatcttcctcttctctaaacactcgaggattgctgcacaaacgtggaaagcctttggcaggtctgtggtgctctgtaaaccgcaggagaccaaccctgagaatggccgacctggtgctcccatgggtaggaggaaggtaatactgggcctctggacagaagaggctcaggtagcaggccagggacttcgagcacccacaccaaggctgctgcaccacgtcctcaaaggggatctctag

SEQ ID NO: 16359 - DNA, 706 bp, Homo sapiens
  SIMILAR (137)..(433): 371254mologous to Homo sapiens Human potassium channel K+ Hnov28,accession number Y34129,Smith-Waterman Score=182.
taggggcgggcagccaggggcacttccgctggcccaagtgatctgcatgtggcagggctgcgcagtggagcggccagtgggcagtatgacgagccagacccctctgccccagtccccccggcccaggcggccgacgatgtctactgttgtggagctgaacgtcgggggtgagttccacaccaccaccctgggtaccctgaggaagtttccgggctcaaagctggcagagatgttctctagcttagccaaggcctccacggacgcggagggccgcttcttcatcgaccgccccagcacctatttcagacccatcctggactacctgcgcactgggcaagtgcccacacagcacatccctgaagtgtaccgtgaggctcagttctacgaaatcaagcctttggtcaagctgctggaggacatgccacagatctttggtgagcaggtgtctcggaagcagtttttgctgcaagtgccgggctacagcgagaacctggagctcatggtgcgcctggcacgtgcagaagccataacagcacggaagtccagcgtgcttgtgtgcctggtggaaacttgagggagcaggatgcattattattcagaggtcctgtgtttttcttgcaggataagaagatgtttcaagttttgtttgttcaagtttgggccctgggaaggcggtcctagacaacagcgacctcattgcactttt

SEQ ID NO: 16360 - DNA, 1059 bp, Homo sapiens
  SIMILAR (286)..(438): 961254mologous to Homo sapiens retinal degeneration B beta,accession number AF171102,Smith-Waterman Score=269.
atgcataatttgcctctcaatgttattcctggaaggtctctcattgccttggctgtgttagaggctctgcacacagccaagaaacatgaatcagattatgtcacttctggttttagaactctcagtggctcccattgcaaaaaggacatatcccaaactcccagccaggccccgaacgctttccacgccctgtccggtctggcttcccttggtctggcccaactaaattctttcctggcactgactgccaggagacaggaaaactatagaaagcagaagagggagaaccactacaaaattggacagctgtacatgatcagcaaacacagccatgaacagagtgaccggggagaaggggtggaggtcgtccagaatgagccctttgaggaccctcaccatggcaatgggcagttcaccgagaagcgggtgtatctcaacaggacctacactcgcggctcccctggttctaagccttctgacttggactcagccacactactggcaccccagggtctccaacttgcagtggaatatcccaaagccacacaagttctgggcactgagcttattttggggaagatctgggagaacaggaagcagaaatgggaaagagagacccaagccatgaccacaaggttctatcaacaagctgttagctccaaactccagtttcccaacatgattcagcaccaggtctttgctgacaatgcttttgaccagtttggttaactgtctccctcacccttgatactagcacatcagaggaggcaggtctttttgaatttatcacagcacctgtgaatcaggcctagccagaaagcagacactactttaagctgtcttctactaatgattatccgcggtaagttctagcttctttgaatgcagaggtaagctgtgttgtcactatacctctgagaatcagaaagccagcccttgtgtgctggatattctttttgctcatgtgttttttacatgcagctctcagatcacaaattgtaccacaaatagcagtggccacatcgtaaggaatcaaacatgatctgttttccgtcgagc

SEQ ID NO: 16361 - DNA, 1336 bp, Homo sapiens
  SIMILAR (838)..(2523): 331254mologous to Salmonella typhimurium ribonucleoside- diphosphate reductase,accession number X72948,Smith-Waterman Score= 815.
gcggccgctcctaccaccctgggcagccgagcagagtcgtccccagcgggtctccctccctgcctccctgactttgcaacaccgcgttccgggaggaccggcctcggcgagggaggaggcgggggagctgcgaacacccagacccaaaccctgacatgctctggggcggagaggaggaagccaggagctgagcgcagccgcgggggctgcttcgccctccggctccgagcgccgggctccgggcgccctgccctgcgcctgggcagcagccttgctggtcttgggggcgccccccgcttcccgccccgggggtttcgcggccggcaagaccatgctgctgaaagaagtaccggatcttgcatgccgctcaccgtaagacgagtacaaaatttggacagctgtacatgatcagcaaacacagccatggaacagagtgaccggggagaaggggtggaggtcgtccagaaagagccctttgaggaccctcaccatggcaatgggcagttcaccgagaagcgggtgtatctcaacagcaaactgcctagttgggctagagctgttgtccccaaaatattttatgtgacagagaaggcttggaactattatccctacacaattacagaatacacatgttcctttctgccgaaattcttccattcatatagaaaccaagtatgaggacaacaaaggaagcaatgacaccattttcgacaatgaagccaaagacgtggagagagaagtttgctttattgatattgcctgcgatgaaattccagagcgctactacaaagaatctgaggatcctaagcacttcaagtcagagaagacaggacggggacagttgagggaaggctggagagatagtcatcagcctatcatgtgctcctacaagctggtgactgtgaagtctgaggtctgggggcttcagaccagagtggaacaatttgtacacaaggtggtccgagacattctgctgattggacatagacaggcttttgcatgggttgatgagtggtatgacatgacaatggatgaagtccgagaatttgaacgagccactcaggaagccaccaacaagaaaatcggcattttcccacctgcaatttctatctccagcatccccctgctgccttcttccgtccgcagtgcgccttctagtgctccatccacccctctctccacagacgcacccgaatttctgtccgttcccaaagatcggccccggaaaaagtctgccccagaaactctcacacttccagaccctgagaaaaaagccaccctgaatttacccggcatgcactcttcagataagccatgtcggcccaaatctgagtaa

SEQ ID NO: 16362 - DNA, 474 bp, Homo sapiens
  SIMILAR (71)..(352): 961254mologous to Homo sapiens cap-binding protein 4EHP,accession number AF047695,Smith-Waterman Score=489.
atgacgccgtggcaccggcccttgatccccgtcgacccacgcgtccggtggcgacagcggcggcgagaggatgaacaacaagttcgacgctttgaaagatgatgacagtggggaccatgatcagaatgaagaaaacagcacacagaaagatggtgagaaggaaaaaacggaacgagacaagaatcagagcagtagcaagagaaaggctgttgtccctggaccggcagagcatcccctgcagtacaactacactttttggtactccaggagaacccccggccgtcccacgagctcacagagctatgaacagaatatcaaacagattggcacctttgcctctgtgagttcttggtgaattaatggagtgtgccttgatagttcgttcatgcctgtattgatatgatgtttatttactttcctagtaacctatttaagattctggttttcttaattgactgacctgagtctccggag

SEQ ID NO: 16363 - DNA, 489 bp, Homo sapiens
  SIMILAR (104)..(487): 991254mologous to Homo sapiens cap-binding protein 4EHP,accession number AF047695,Smith-Waterman Score=700.
ccagctttccccacacactccctctcccctctgagcctcagttttctcatctgcagagtggggacggtaacaccctttgtcgtagagtttggaggatgcaatgagtttgaaagatgatgacagtggggaccatgatcagaatgaagaaaacagcacacagaaagatggtgagaaggaaaaaacggaacgagacaagaatcagagcagtagcaagagaaaggctgttgtccctggaccggcagagcatcccctgcagtacaactacactttttggtactccaggagaacccccggccgtcccacgagctcacagagctatgaacagaatatcaaacagattggcacctttgcctctgtggagcagttctggaggttttatagccacatggtacgtcctggggacctgacaggccacagtgacttccatctcttcaaagaaggaattaaacccatgtgggaggatgatgcaaataaaaatggtggcaagtg

SEQ ID NO: 16364 - DNA, 201 bp, Homo sapiens
  SIMILAR (106)..(198): 831254mologous to Mus musculus snRNP core protein SMX5d,accession number AF204157,Smith-Waterman Score=133.
atggtgggcaagctcacgggaaagccatgtccccagtactaccagccccagaggcctcctgagcacatcgagcttgacagcctatgcaaaattcttcccccaccatcccttgtgggcatgaatgtggtcatggaactcaagaaagacctgaacatctgtggcaccctccattcggtggatcagtatctcaacatcaaatga

SEQ ID NO: 16365 - DNA, 404 bp, Homo sapiens
  SIMILAR (183)..(365): 1001254mologous to Homo sapiens cytochrome b5,accession number M22865,Smith-Waterman Score=323.
cgcgctctgctccacccgacgggcgtgtgtgtgctgggcctggctcgcggcgaaccgagatggcagagcagtcggacgaggccgtgaagtactacaccctagaggagattcagaagcacaaccacagcaagagcacctggctgatcctgcaccacaaggtgtacgatttgaccaaatttctggaaatgtccaaaacattcatcattggggagctccatccagatgacagaccaaagttaaacaagcctccggaaactcttatcactactattgattctagttccagttggtggaccaactgggtgatccctgccatctctgcagtggccgtcgccttgatgtatcgcctatacatggcagaggactgaacacctcctcagaagtcagcgcaggaagagcctgct

SEQ ID NO: 16366 - DNA, 840 bp, Homo sapiens
  SIMILAR (224)..(550): 731254mologous to Homo sapiens cytochrome b5,accession number L39945,Smith-Waterman Score=386.
cgcccagcccccagtggggttcccggcgcggggaatgtcccgggtggagctggctgagtcgcgcgctctgctccacccgacggggctgtgtgtgctgggcctggctcgcggcgaaccgagatggcagagcagtcggacgaggccgtgaagtactacaccctagaggagattcagaagcacaaccacagcaagagcacctggctgatcctgcaccacaagggggtacgatttgaccaaatttctggaagagcatcctggtggggaagaagttttaagggaacaagcttggaggtgactgctactgagaactttgaggatgtcgggcactctacagatgccagggaaatgtccaaaacattcatcattgggggagctccatccagatgacagaccaaagttaaacaagcctccagaaccttaaaggcggtgtttcaaggaaactcttatcactactattgattctagttccagttggtggaccaactgggtgatccctgccatctctgcagtggccgtcgccttgatgtatcgcctatacatggcagaggactgaacacctcctcagaagtcagcgcaggaagagcctgctttggacacgggagaaaagaagccattgctaactacttcaactgacagaaaccttcacttgaaaacaatgattttaatatatctctttctttttcttccgacattagaaacaaaacaaaaagaactgtcctttctgcgctcaaatttttcgagtgtgcctttttattcatctactttattttgatgtttccttaatgtgtaatttacttattataagcatgatcttttaaaaatatatttggcttttaaagt

SEQ ID NO: 16367 - DNA, 1856 bp, Homo sapiens
  SIMILAR (1132)..(827): 991254mologous to Homo sapiens Human secreted protein, SEQ ID NO: 7552,accession number G03471,Smith-Waterman Score=529.
tcagggcaggtggaggattggggagcccctgccttcctgaggctgatctgagttaggctgaaccccccagtcagatctggactgaggagaccaacatcccctctgggccagcctggagagcaggcagggtcctgcatgccctgagtcctctttatttgggtctagcgccggaagttgcttgtaacggcagccagtaaagagagatgccatcccttctgtccacaggtatcgagtgaacttcagacctagatatgtcactaggtataagacagtgacacagttggaatggaggtgctgtcctggctttagagggggagattgccaagaaggtcccaaagaccccgtgaagaccctccgccccacgccggctcggcctcgaaacagcttgaagaaagccacaggtaacttcttatttgtgctattatgtatggccacctttaatatttccggtgctccttcaaacaacaggatttgtgctttacaatggtgagctttgaatggccttcgaataacacacatagatacccggctaaagtctttgtataataagtctgatctggactttcccagggacagtttttgtccatttattattccattaaatgaacgacagtttcctgtttctttgtatgctttgtgattgttgtcgttgttaattgctgatggctgaaatttgaccagatcttgcaaatcagtagaaatctggaagacgtggctgtagaactgctggactgaattcttcaggccagaaatgtctctggaatgcgacctgagcgttccgttcatctgcctgacacagttccacaggcttgctgacatgcttgttgagcccctccttgatcctctgaagatttcctgagatagagtccagcttgctgcaagttttctccatatgagacaccctgccctccaccatggagacctccctctggaccccctgcgtgcattccttacaagcatccagctccgagatgacctggctctgcaacctctgccacctctcctccagctgactgcagcaatgagccacggggtgctggggggacggcagggtgtccactgtcctttcttgctcacccaccttagtgaacctacccatgccagcgttttcacctgctctacaattgctcatttccttttgaagatgagtcacatcattttctgtgtggtttaattgagaataaagaaaactaaaatcctgttgaagtttctggatggtttgttcggtttcttgaaacttcctgtgcatcgtgtcgttgagagatttcaaaaggtgcaggctgtcgcgtactgcgcggtcttccctgtttggcaaggcaccttccatcccatgaggctttccctggatgttcagcaggcaaatgtcttcaacaacttgaactttgtccttcaggtggtttaattccatcatgacccgttcatctcctgaccctgacactcctggcagggctgctgcccctgggggactgagctttgcaccagtgttattggtcatctgtaggagaacgctccccagacggtcttccagagactgtattttctgatcaacaagctgcttcaagtcacccacctctccattaatggcgccccgaagggtttcctcaatgtaaaagcaatgttcttcagcgttcttctccgtcacattgatccttgcatcgagttcattccattttgcatcaaaatccacatctggctctggaactataaggcggtcaaactcattgtccagtcttccattcagcattctggtggcttcagcaactctctcgattttctggtccaatgtcttgatctgttgaccaatgtcaccattcttttcactgtcgcaacaatttgcctgggctgaaggctcctgt

SEQ ID NO: 16368 - DNA, 485 bp, Homo sapiens
  SIMILAR (294)..(217): 691254mologous to Homo sapiens dJ746J20.1.1 (HSPC274 (isoform 1)),accession number AL121924,Smith-Waterman Score=91.
tttgtgttttaggtgcatccgtgtatttctgtacaacaaaattatttattttaaatgttactagttttttgcttcttacgtgtacagtctcatgatagatagacaaggggactcttcagtccagagtccatgaggccagaagctgacatcctcagttcttattcagaatgaatttaaacaagccagccaagcgccctgccatgaaactcctgtaatttctgctactcggggggctgaggcaggagaatcgctggaagcaaggaggtggagattgcagccagccgagaccatgccaccgccttggcgacagaaggagacaccatttaccttaacaatcccaagttgacggtcaagtccagcgctcgccgatgacatcttatggacccagggctcgcggaaggacccagttggaactttatcacaccaagccggcccacctttgctgccatctaactccgccgacctgcccgcagttccccactctc

SEQ ID NO: 16369 - DNA, 1017 bp, Homo sapiens
  SIMILAR (914)..(1015): 441254mologous to Homo sapiens 36/8-8 fusion protein with epitope for anti-lectin antibody,accession number X58236,Smith- Waterman Score=79.
atgtcctgccgtgctccggaaaccgggatccggtgcagagaaacccccatcctgggaaacgggctgctgccagaaaggcggtcaccccctgacccatcacataacgtgtttgtggggaacctgatgctaaactattcgcagacgtcctgcttctgggtcagggttttccatggagcagagcagctccctcgctgctatctattgaaagtcagacctccacacaaggctctctgcacccgtgtgcggaggacctgcggagagtggggaactgcgggcaggtcggcggagttagatggcagcaaaggtgggccggcttggtgtgataaagttccaactgggtccttccgcgagccctgggtccataagatgtcatcggcgagcgctggacttgaccgtcaacttgggattgttaaggtagaacgggtaactctggcatcatgggcatttgggccactttctcatggaacttacttgtgcttcaggatctgttcggacccaatcaggtccacagcatttctgtgtcatgctggagtgctgctgtgcacacccacttacgcccagtgtgtgatgagcggctcagctcacatgtccgagatgcatcttcaaactctcatgcgccacgggttgtcttttgactcagtcgcagtctatgcagagacacgtttggagaacggtttctgtgaagttggggaggaggggctgcgttttcggcctcaaaaagacttcgactcatggtttgggtttcccagtcatgggctgccctgccatctgggactctggcgcgtcacttgtgagtcagagctggcagtccagggctttgctgggggaggctgtcgcggtgcttccgtgccccagggcagtgtggggctgccctggctggtcgaacagcatgccacaactcctgaggcttggcccgagatccacaaggacgtattgggcatggcgctggtggctggggatgcccttcccggcccagtggcaggccagtgcaggtctgatgcacctgccaagccctag

SEQ ID NO: 16370 - DNA, 1013 bp, Homo sapiens
  SIMILAR (911)..(988): 661254mologous to Plasmodium lophurae histidine-rich protein,accession number M15317,Smith-Waterman Score=123.
tttttttttgacacacttacttaatgggtttattcaaagtaagagtctttatagatcttttcactaattaaatacagttgggtgtctgctgaatttcccttgaaaacattttgaagtgaaaaaagtcagtactgagtactgtacatttgtgttgattaacatttggacacaaatatacttttaacaccaatagagctgaaagactatgcctttatcttggatttcatagatttccccttccccccagtgacttatcttacaacggcaaacaccagcaggcaagggggaatctgtagaaaatgtgcacccctggtttcctcctccatctcttctaccaatgtgggaagaaagccaatgcttcccagcactttctgaaggtggaatctcctcctctttacttaatgttggagaaaagtggccaccagtactcgatcattgtagattcggaatctcgccatctaaaccagacttcaaaagtgctctttcgggtctacttagttaagaaagagaataatggaagatgataagtggttagcaaagccagatgccttatcaccagggtcctgttctgctgatctgtgccaagcaactcatctcaccaaacctaatgtcaaccctcttgatccacaaaccttccttctcttctaacatggtctgcagtctgtcacggaggacatgaaacaagatgcaagcagttccttaatgaccttcagaccaaactgctccaaacagtggccaagacgttgcagtcaggagtaaacccaatccttaggaaaagaactgtgcattccagcatggatgtgtttccaaagaaaggagaacctgcccatgcctccatgtcccaatcaaagctgcctttgtcagataacctgaaaaccaagctaggaaaggccagaagtaaaactgttaaaatcatcatcatgatcatgatgatcatcatcatgatcatgatgatcatcatcatgatcatcatcatcatcgaaaacacagccccagtttgctttacagcccaa

SEQ ID NO: 16371 - DNA, 277 bp, Homo sapiens
  SIMILAR (170)..(253): 671254mologous to Homo sapiens PRO1546,accession number AF116638,Smith-Waterman Score=106.
tttggaggaaatcagaaaggagagaggacaggccaaaagggaaaaggagaaagaggagcaaaaagaaaagatttccctggtgctgtttgcatctctgctctggggctacttgccaagggatgtggatgaagctggaggccatcatcctcagcaaactaacacagaaacagaaaaccaaataccacatgttctcactcacaagtgggagttgaacgatgagaacacattgacacatggaggggaacaacacacactggagtctgttggggagtcgggg

SEQ ID NO: 16372 - DNA, 706 bp, Homo sapiens
  SIMILAR (135)..(521): 631254mologous to Homo sapiens breakpoint cluster region protein 1,accession number AF044773,Smith-Waterman Score=364.
  misc_feature (1)...(706): n = a,t,c or g
ggaaagttctagtggcttgaggtatccgcaggagcggccgggtggcgggaggaaccgttacgggaactgaagttgcggattaagcctgatcaagatgacaacctcccaaaagcaccgagacttcgtggcagagcccatgggggagaagccagtggggagcctggctgggattggtgaagtcctggggcaagaagctggaggaaaggggttttgacaaggcctatgttgtccttggccagtttctggtgctaaagaaagatgaagacctctttccgggaatggctgaaagacacttgtggccgcccaacgccaagcagtcccgggactgcttctgatgccttcgagagtggtgcgacgccttcttgtgatgctctctgagaagctctcaatccccagccctcatccagagtttgcagccgagtagggactcctcccctgtcctcttacggaaggaaaagaattgctattgtcgtactcacctccgacggtactccggggtcttttggggagttttctcccctaaccattttcaacttttttttgggattcttcgctcttggcatgccttcccccgtccttttttcccttggccagtttcctgggtgacagtttaccagcttttcctggaatgggatttcccgggccccatccntcaacccccaccttnaatttnaattccgttttgataacattgggttcctttttt

SEQ ID NO: 16373 - DNA, 834 bp, Homo sapiens
  SIMILAR (556)..(152): 581254mologous to Homo sapiens Human secreted protein sequence SEQ ID NO:195,accession number Y87156,Smith-Waterman Score =387.
atggcagagaaccaggagactcgcttgagtgcctacgacaccagggccctgggtttgaagcacaaaacagagtggccatttgggcagacaccaagctctctgaagagagaagcggatctcccagcacagcactcgagctctgctaagagacagactgcctccttaagtggctccttgacccccgtgcctcctcactgggaggcacttcccagcaggggtcgacagatacctcatacaggagagctctggctggcatctgacaggtggccctctgagaagaaacttccagagaaaaagcaggcagcaatctttgctgttctgcagcctccgctggtgataaccaggaaaacagggtatggagtggaccctcagcaaactcccgcagacctacagcagacgggcttgactgttagaaggacagtaagaaacagaaaggaacatagcatcaatatcaacaaaaaggatgaccatgcaaaaacgacatttgaaggtcaccaacagcaaagaccaaaggtagataaatccacgagcatgaggaaaaaccagtacaaaaaggctaaaaattccaaaaaccagaatgcctcttctcctctcaaggatcacaactgcttgccagcaagggaacaaaacttgatggagaatgagtttgatgaatttacagaagaaggcctcaaaaggtgggtaagaacaaatttccccaagccaaaggaacatgttctaaatcaatgcaaggaacctaagaaccttgaaaaatgggtagaggaattgctaactaaaataacgagtttagagaagaacacaaatgacctgatggagctgaaaaacacagcatga

SEQ ID NO: 16374 - DNA, 679 bp, Homo sapiens; identical to SEQ ID NO: 15379
  SIMILAR (627)..(529): 721254mologous to Homo sapiens Human secreted protein HMDAL49, SEQ ID NO:219,accession number Y86304,Smith-Waterman Score =115.

SEQ ID NO: 16375 - DNA, 755 bp, Homo sapiens
  SIMILAR (113)..(238): 331254mologous to Homo sapiens Human bladder tumour EST encoded protein 50,accession number Y66192,Smith-Waterman Score=64.
ttaactgaatggcacccttaatccagtttatctcccaatcagacctgaacattttcaaaaatgactaagtcagaatcaagtatttatcaggacagaatgaggaaatttatcaggacatattgaacaaccaaaatgtaccaggcacttcacattcattttcttatttaattcaccaaagtcatacaagaaagatcttattagctccattttacagatgagaaaaccgaggctcagggtggtaagaagctcaaccaggccacacagattgtgaatggtaaattcaagattcaaacagccagatgcccagcattgggcatggcacaaagtctgttaatctgcagagtcccaggacccagagacttacctatccaccccactctcaacaccagggctctgtaccctttccatttctaacagcagcaacttgttcgccagctgaatgaaacagggatccaagggttcagtttactttagcacatatttttatgccccagatcagtatttcagaaataagaaagattcctgtatctcctagttccccagctgtctcagaaaatcaggctggtttgatacacggttctttcaaaaacaagaatttacgtttgaggttcagcaggctggggtcattccttctgatttggggaccagggtttcctccacatccctgggtacaaactgcagtagatgggagtccatttgggacaggaactatgattgaactgttaatcgttgtctttacattgctgagcatggtc

SEQ ID NO: 16376 - DNA, 1635 bp, Homo sapiens
  SIMILAR (696)..(872): 441254mologous to Mus musculus proline-rich protein MP- 3,accession number M12100,Smith-Waterman Score=78.
atggcccatcttcggtcatgctgcagttccctctatcaacctggacaccttctacctcctcacaaccccattcaggaccaccctcttacagcaccatccctaactcatctcaccaggagagcctattttacagatgagaagactaagggaggccagtcagcctacgctgtgtccctgctgcgggagtgtgtgaagttgcggccctcggaccccaccgtgcccctgatggccgcgaaggtctgcatcgggtcccttcgctggatggcggccaagcacctggcgggggtcctgctgcactccctgagtgaggagtgctactggagccccctgtcccaccctctgcctgagttcatgggcaaggaggagagttctttcgccactcaggccctgcggaaacctcacctctatgaaggagacaacctctactgccccaaggacaacatcgaggaagccctcctgctcctcctcatcagcgaatccatgctggcgaacaagttgctgctgttagaaatggaaagggtacagagccctggtgttgagagtggggtggataggcagctgagtccctatagtgacacaaatgtaaatgctcaaaatgcccaaatcgtgccagtagcggccaagtctgcacagaatgaagtcccaggatacccagaagagacagaaaaaagtcgggtacagtccaacttgctcacccagtttcaagacctccgcctcctcctggctgcaccagagtgtctgccccctcggatgagcccaccttcggcccatggggagggcctggagtcagggggcccgagcaggacaggcctctctctggaacgcctacccaactccatcgcctcccgcttccgcctgacagagagggaggaggaagtgatcacctgttttgagagggcctcctggatcgctcaggtgttcctgcaggaattggagaagaccacaaataacagcacgtcgaggcatctgaaaggctgtcacccgcttgactatgagctcacctacttcctggaagctgccctccagagcgcctatgtgaaaaacctgaagaaggggtggatggcagagtgcacgggatggccactgatggtgccgtatctggtggcacggtggcccaagggcacggagtcctgccagtgcacagaggaaagggggcaacaaggcggggaccagctgggggacggggccagcatcctgagggatgactttgggaaattgctgctggctgaggccctcctggagcagtgtttgaaggagaaccatgccaaaataaaagactccatgcctttgctggagaagaatgagccgaagatgagcgaagccaaaaattatctaagcagtatccttaaccatgggaggctctcgccacagtacatgtgtgaggccatgctgatcctgggcaaactgcattacgtggagggctcataccgagatgccatcagcatgtacgcacgggccgggattgatgacatgtccatggagaacaagcccctgtatcagatgcggctgctgtcggaggcttttgtcatcaaagattcttcacccctggtagtgcccatgccctggcactggtgtctaaggtggatgccggtggcaaccggccatgttgacattgcctggtgcctgggacgttag

SEQ ID NO: 16377 - DNA, 654 bp, Homo sapiens
  SIMILAR (358)..(474): 1001254mologous to Homo sapiens Human cytoskeletal protein (HCYT) (clone 1274060),accession number Y77569,Smith-Waterman Score =192.
atggccgaggccctcgctgtagctgtgccagtgcctgcaggagcctgggtttcgattcaaggtctgcacgtcaatggggcggggctggctgccccgaggcagttcctgtttcctcaagcagaagtgattgtcaacaaggaggatgatttcactcgctcccagccccggggacatttggccgtgtccagaaacagttttgactgtggtgacgggatgggatactactggcatgtaacagactccacctctgggagctccctttgcaagaaaccgtaccagggacaagggtcttccctacaaggccatgaagcacgcagatatctcctgcgggaggaatctctttccgagcgcccagccatggaggccatcaagaagaaaatgcagatgctgaagttggacaaggagaatgccatcgaccgcgcggagcaggcggaggcggataagaaagccgctgaggacaagtgcaagcaggtgaggtgccctccgctgggccgctccgggctgctgggagtcctctctgtgcggaaggccggggtctggagcccagttgggggtcgcagacacctgcgggaggataggaggctgatgctttggcggaggaagagcgaggggaccattgccttcttggatggtcctgggctggaagaggggtga

SEQ ID NO: 16378 - DNA, 1018 bp, Homo sapiens
  SIMILAR (32)..(1015): 921254mologous to Homo sapiens Human OXRE-10,accession number Y92513,Smith-Waterman Score=1467.
gggggaggcgggaggatgaagttgattgactatggtctctccggctaccaggaagagtctgccgaaggtgaaggccatggacttcatcacctccacagccatcctgcccctgctgttcggctgcctgggcgtcttcggcctcttccggctgctgcagtgggtgcgcgggaaggcctacctgcggaatgctgtggtggtgatcacaggcgccacctcagggctgggcaaagaatgtgcaaaagtcttctatgctgcgggtgctaaactggtgctctgtggccggaatggtggggccctagaagagctcatcagagaactcaccgcttctcatgccaccaaggtgcagacacacaagccttacttggtgaccttcgacctcacagactctggggccatagttgcagcagcagctgagatcctgcagtgctttggctatgtcgacatacttgtcaacaatgctgggatcagctaccgtggtaccatcatggacaccacagtggatgtggacaagagggtcatggagacaaactactttggcccagttgctctaacgaaagcactcctgccctccatgatcaagaggaggcaaggccacattgtcgccatcagcagcatccagggcaagatggagcattccttttcgatcaggcatatgccagccttccaagcacgcaacccaggcttttctttgactgtcttgcggtgcccgagatgggaacagtttgaaattgaggtgaccgtcatcagccccggctacatccacaccaacctctctgtaaatgccatcaccgcggatggatctaggtgtggagttatggacaccaccacagcccagggccgaagccctgtggaggtggcccaggatgttcttgctgctgtggggaagaagaagaaagatgtgatcctggctgacttactgccttccttggctgtttatcttcgaactctggctcctgggctcttcttcagcctcatggcctccagggccagaaaagagcggaaatccaagaactcctag

SEQ ID NO: 16379 - DNA, 1096 bp, Homo sapiens
  SIMILAR (860)..(1009): 791254mologous to Homo sapiens CGI-93 protein,accession number AF151851,Smith-Waterman Score=173.
atggctgactcattcagcgtactagtgcactgcgtgaatgtccctgtcgttgttcctagtcgagcagtgactgcctcccacgtgcactccggcaacaagcccttcgatgtgacctctctcgagctctcgccactgctgctcggtccaagacccatccttcgccaagggaccatcttggagacactctgcttaccaacgtctgcgccaagcctccatcgggagagcaggcggtccgacgcgaagtgtagttcggctgcggtccggggccgctcggcagcggaacccagacccggcggaactaccgtgcccacaagcagcgcgcccgaaagccccccccccggggtccccgggcccctagtctttctgcgagggcgcgaggactccaggagccgtcctggttcgagcatttctgaagaaactgagttcccggcgttcgcagcctgggagtcacaggcgcccacccaccgtgggcacggttcgctatggagacctgctgccttccctgggacagtgtgacgcatggatgtcctacagctcagcagtccaggagtgggccactatctcctcagtgcctacagaagacggcctgcactccttccccatggaaagctacgccctggctcaccttggtggcatgagaagcgactgttgtcgattgctgcagagaccacatctcaatactagcgcgcagctacgaccaattcacgcgcataacacgagattcctcacgaacgagagctgcagagtgagcagattcatcggtctatctcgtgtcgtaggaactctcatacatcgggggcgatggtctatgttctccccgatacaaccatatcgttactgcgcgtgccccaagcgctatgcgtccattcaagcactcctgccctccatgatcaagaggaggcaaggccacattgtcgccatcagcagcatccagggcaagatgagcattccttttcgatcagcatacacgtatgcggcccggcaagatgccacgtgcctgcgagctgaaaggtgcttcagcatcgatcggccgcgacagcctaggctgtcgctgaggcgctgtgactgcatgttactgtcagcgacgcccgcctag

SEQ ID NO: 16380 - DNA, 909 bp, Homo sapiens
  SIMILAR (328)..(861): 651254mologous to Mus musculus GRP1-associated scaffold protein GRASP,accession number AF236099,Smith-Waterman Score=496.
atgaccctccgccgactcaggaagctgcagcagaaggaggaggcggcggccaccccggaccccgccgcccggactcccgactcggaagtcgcgcccgccgctccggtcccgaccccgggaccccctgccgcagccgccacccctgggcccccagcggacgagctgtacgcggcgctggaggactatcaccctgccgagctgtaccgcgcgctcgccgtgtccgggggcaccctgccccgccgaaaggagcccctcgcccgagggacagagacagccccaggcaagttgaaggtccgagagcccccggtgggagaagcgggccggtggctgcgccgcgtgcgttctcactctgaggaagtgcgtggggagccgctgactccggatagcacgcccttccgaggggactccccgattcctgggctgggggcctgccgcctggccccacgtctgacgggtggagaccattttagaataatgatctccccacctgctgccagtgtggaaaccagcaagggcttagaggttcatggatctggaacccaggaggatggttgtgtccctgcagtcccaggtatgaagggctcaggattccgctggaagaatctcagccagagtcctgaacagcagcggaaagtgctgacgttggagaaggaggataaccagaccttcggctttgagatccagacttatggccttcaccaccgggaggagcagcgtgtggaaatggtgacctttgtctgccgagttcatgagtctagccctgcccagctggctgggctcacaccaggggacaccatcgccagcgtcaatggcctgaatgtggaaggcatccggcatcgagagattgtggacatcataaggcctgacatcatcatcatcatcatcatcatcactactaccaatcattga

SEQ ID NO: 16381 - DNA, 371 bp, Homo sapiens
  SIMILAR (7)..(273): 971254mologous to Homo sapiens ribosomal protein S8,accession number X67247,Smith-Waterman Score=478.
cgagcgatgggcatctgtcgggacaactggcacaagcgccgcaaaaccgggggcaagagaaagccctaccacaagaagcggaagtatgagttggggcgcccagctgccaacaccaagattggtccccgccgcatccacacagtccgtgtgcggggaggtaacaagaaataccgtgccctgaggttggacgtggggaatttctcctggggctcaaagtgttgtactcgtaaaacaaggatcatcgatgttgtctacaatgcatctaataacgagtcccactatgcgctgcccctgggccgcaagaagggagccaagctgactccttgggaagaagagattttaaacgctaaacgatctataaaaattcagaa

SEQ ID NO: 16382 - DNA, 346 bp, Homo sapiens
  SIMILAR (29)..(256): 861254mologous to Homo sapiens ribosomal protein S8,accession number X67247,Smith-Waterman Score=329.
  misc_feature (1)...(346): n = a,t,c or g
agttgattaaacatcaaatcagaatctagccaagctgactcctgaggaagaagagattttaaacaaaaaacgatctaaaaaaattcagaagaaatatgatgaaaggaaaaagaatgccaaaatcagcagtctccaggagactgctgattttggcatcgcttcaaggccgggacagtgtggccgagcagatggctatgtgctagagggcaaagagttggagttctatcttaggaaaatcaaggcccgcaaaggcaaataaatccttgttttgtcttcacccatgtaataaaggtgtttattgttttggttccacataatnnnnnnnnnnncgtggacgggggcgggg

SEQ ID NO: 16383 - DNA, 419 bp, Homo sapiens
  SIMILAR (1520)..(1903): 801254mologous to Homo sapiens Human G-protein coupled receptor GRIR-1,accession number Y28279,Smith-Waterman Score=455.
ccgagcgatgggcatctctcgggacaactggcacaagcgccgcaaaaccgggggcaagagaaagccctaccacaagaagcggaagtatgagttggggcgcccagctgccaacaccaagattggcccccgccgcatccacacagtccgtttgtggggagagtgttgtactggtaaaacaaggatcgtccatgttgtctacaatacatctaataacgagctagtccgtaccaagaccctggtgaagaattgcatcgtgctcatcaacagcacaccgtaccgacagtggtacgagtcccactatgcgctgcccctgggccgcaagaagggagccaagctgactcctgaggaagaagagattttaaacaaaaaacgatctaaaaaaattcagaagaaatatgatgaaaggaaaaagaatgccc

SEQ ID NO: 16384 - DNA, 2517 bp, Homo sapiens
  SIMILAR (696)..(884): 871254mologous to Homo sapiens HR21spA,accession number X98294,Smith-Waterman Score=283.
atgattatctcaatagatgcagaaaaagcctttgacaaaattcaacaacccttcatgctaaaaactctcaataaattaggtattgatgggacgtatttcaaaataataagagctatctatgacaaacccacagccaatatcatactgaatgggcaaaaactggaagcattccctttgaaaactggcacaagacagggatgccctctctcactgctcctattcaacatagtgttggaagttctggccagggcaatcaggcaggagaaggaaataaagggtattcaattaggaaaagaggaagtcaaattgtccctgtttgcagacgacatgattgtttatctagaaaaccccattgtctcagcccaaaatctccttaagctgataagcaacttcagcaaagtctcaggatacaaaatcaatgtacaaaaatcacaagcattcttatacaccaacaacagacaaacagagagccaaatcatgagtgaactcccattcacaattgcttcaaagagaataaaatacctaggaatccaagttacaagggatgtgaagcacctcttcaaggagaactacaaaccactgctcaagaaaataaaagaggatacaaacaaatggaagaacattccatgctcatgggtaggaagaatcaatatcgtgaaaatggccatactgcccaaggtaatttacagattcaatgccatccccatcaagctaccaatgactttcttcacagaattgggaaaaactactttaaagttcatatggaaccaaaaaagagcccgcatcgccaagtcaatcctaagccaaaagaacaaagctggaggcatcacactacctgacttcaaactatactacaaggctacagtaaccaaaatagcatggtactggtaccaaaacagagatatagatcaatggaacagaacagagccctcagaaataacgccgcatacgtacaactatcagatctttgacaaacctgagaaaaacaagcaatggggaaaggattccctatttaataaatggtgctgggaaaactggctagccatatgtagaaagctgaaactggatcccttccttacaccttatacaaaaatcaattcaagatggattaaagatttaaactttagacctaaaaccataaaaaccctagaagaaaacctaggcattaccattcaggacataggcatgggcaaggacttcatatccaaaacaccaaaagcaatggcaacaaaagccaaaattgacaaatgggatctaattaaactaaagagcttctgcacagcaaaagaaactaccatcagagtgaacaggcaacctacaacatgggagaaaattttcacaacctactcatctgacaaagggctaatatccagaatctacaatgaactcaaacaaatttacaagaaaaaaacaaacaaccccatcaaaaagtgggtgaaggacatgaacagacacttctcaaaagaagacatttatgcagccaaaaaacacatgattaaatgctccgcatcactggccatcagagaaatgcaaatcaaaaccactatgagatatcatctcacaccagttagaatggcaatcattaaaaagtcaggaaacaacagtgttcttaagagagaaggtcaaagaatagatatttctactgtttcatttccaatctgtttgtccgttgtccattcactgaagaacaggtactctctctacaacatcactgaagctgctcttgccaacgtccccagagaagggaggggattccgatgtattggcgacaaatcaccctattatatatatctgagcccaagagatcatacggtcgctaaaccgttagagcacaaatatttaccacgagggggaaattgcacgatcagtagtgatctccgaacacgtggtactatatcccggacaagaattatgtacactgtgcactgtatatacagtactacatacagatcaagactaacccagcgccgagcgatgggcatctctcgggacaactggcaccagcgccgcaaaaccgggggcaagagaaagccctaccacaagaagcggaagtatgagttggagcgcccagctgccaacaccaagattggcccccgccgcatccacacagtccgtgtgcagggaagtaacaagaaataccgtgccctgagtggtaagatgtcccactacgtgctgcccctgggccgcaagaagggagccaagctgactcctgaggaagaagagattttaaacaaaaaacgatttaaacaaattcagaagaaatatgatgaaaggaaaaagaatgccaaaatcagcagtctcctggaagagcagttccagcaggagctggaactgccgaagacggattcacctgagttggtgaagtcgaaggtcggctttagttccgccctggttgatcaccggctgaacggtatcggtgataaataccagtttgtcattcacggtaatcgccgcactcaacagaatacgcgcgttcggctgaacatcttatcaggacctgactcgtctggacgttga

SEQ ID NO: 16385 - DNA, 978 bp, Homo sapiens
  SIMILAR (287)..(730): 481254mologous to Homo sapiens Human hepatoma-derived growth factor homologous polypeptide mutant,accession number B13522,Smith- Waterman Score=272.
gcgtgagtcaccgtgcccgacctgctctgatctttctgaactctgcagcctgagagattggggctggtaaagactgcgggttgccaaacataactagaaacgtgggttagggggttgtggaagacgaactgatgccccatggcttgtaaaggctgagagttcccttatttctccttaaggcctcatggggctgaagaacctggaggagtgtgccagggccatttgtcctccagtttacttgatgccaaatttctcctgtgagcaggttgtactcgtaaaacaaggatcatcgatgttgtctacaatgcatctaataacgagctggttcgtaccaagaccctggtgaagaattgcatcgtgctcatcgacagcacaccgtaccgacagtggtacgagtcccactatgcgcttgccctgggccgcaagaagggagccaagctggtgcgtgttacttccctgtaggggttgtggggagggcagcctgactccagccttctcgtgatgaaaactctgtccagttctgctactgaagggagagagatgagagccttttaggctgaggaaggccagcactggggtgtgcagggttcgagaaagctcccagggcctgccttccttccctgagctcatatatttgtatccccttttcagactcctgaggaagaagagattttaaacaaaaaacgatctaaaaaaattcagaagaaatatgatgaaaggaaaaagaatgccaaaatcagcagtctcctggaggagcagttccagcagggcaagcttcttggtgagaaggctgatgagttggaggtggggagtcgcagagattgagtgtgccgaggcacttttcccttgactcagttcctttgactgccagccatgcagtctaaagggttcactgataacaggctgcgagcacaaaggggaacgtttggtcaccctattcgtatgaagctgaaatgggaagcattgggtagaagagtc

SEQ ID NO: 16386 - DNA, 857 bp, Homo sapiens
  misc_feature (1)...(857): n = a,t,c or g
gtcacagtggctcaagcttccttccccgcttccacatgcaggcatctctcggtatcaactgggaccaggcgccgtaaaaaaccggggggccaagagaaagcccctaccacaagaagcgggaagtaatgaagttggggcgccccagctgcccaaacacccaaagattgggccccccgccggcatccaacacagtcccgtgtgccggggaggttaacaagtaaatacccgtgcccctgaggtttggacggtgggaaatttcttcctgggggctcatatgtngttgtactccgtaaaacaaggatccatcgattgttgtcttacaatgccatctaaataacggagcttggtttcgtacccaaggaccctgggtggaagaattttgcatcgtggcttcatccgaccagcaacaaccgtaccgaacagtgggtacgaagtcccaacttatgcgcctgccccctggggcccgcaaagaaaggggagcccaagctggactccttgaggaaagaagagatttttaaacaaaaaaacgatcttaaaaaattgcggaaggaaatatgattgaaaaggaaaaagaattgccaaattccagcagttcttcctgggagggagcagtttccagccaggggcaagctttcttgccgtgcattcggtttcaaggcccgggacagttgtgggccgagcaagatggcttttgtgcctaggaggggcaaaagagtttggagtttctatcctttaggaaaaatccaaggccccgcaaagggcaaattaaattccttgtttttgtctttcacccatgttaattaaagggtggtttattgtttttgttcccacaaaaaaaaaaaaaaagggcggccgct

SEQ ID NO: 16387 - DNA, 681 bp, Homo sapiens
  SIMILAR (130)..(1272): 981254mologous to unidentified TPC3,accession number AX022164,Smith-Waterman Score=1953.
ggagcgatggcggtacgcgcgttgaagctgctgaccacactgctggctgtcgtggccgctgcctcccaagccgaggtcgagtccgaggcaggatggggcatggtgacgcctgatctgctcttcgccgaggggaccgcagcctacgcgcgcggggactggcccggggtggtcctgatcatggaacgggcgctgcgctcccgggcagccctccgcgcccttcgcctgcgctgccgcacccagtgtgccgccgacttcccgtgggagctggaccccgactggtcccccagcccggcccaggcctcgggcgccgccgccctgcgcgacctgagcttcttcgggggccttctgcgtcgcgctgcctgcctgcgccgctgcctcgggccgccggccgcccactcgctcagcgaagagatggagctggagttccgcaagcggagcccctacaactacctgcaggtcgcctacttcaaggtgcagacctgcctggaaccaggcggccggggtccttctggggagaggagtgttgcaggggacctgaggagcttgggggatcggggaagtgtccgcagggaggggaaagtggcctcctggctggggagctctcctcggagccggggagagctgctccctggcaggagaccttcctcgcccagttcgcatgggcagatgctaaccccaaag

SEQ ID NO: 16388 - DNA, 694 bp, Homo sapiens
  SIMILAR (51)..(1268): 991254mologous to Homo sapiens pyruvate dehydrogenase kinase,accession number L42452,Smith-Waterman Score=2109.
ttttttttgcaggggaagttcacagagccatttattgagccccacaaccgaccagagggaagggcgtccaccaggctcaggccatggtccttgaggggccggcgctctctacttggcccacatgtgtcctgaggagttgtggccctccgcctccgctcctccctgtgcttctgctcagccagttttatggcttcgattttctgcaaccattgctcacgcctcagcttcattttctccttcttgggcaaaacggtcttggcctctgcacctctcctgacggaagtgacactcctcacgtccagctccagcttctgcaccaaggcgctggggtctatcttggtcctggcaaagatgttggtgttgatgaacgcccagtccttccccgcggccgaggccggcggaggggtcgcctccggggcagggggcgcggggccgggggcggcctcccctttcggcctcacggcagcctggtgcactcgggcgcgcaaccccctcactttccccatcttcccggcggagcacggcaaacgtgcggagcgcctcccggaagctggtcctgcgttctcgccgcccggcggaaacaggagccgcggctgccgggagccccgcggccgccggaagtacccggaagcggctcgggcgggcgcagggtcgcgggtgtagggtggcggcgctccgcctttcaccgacgcac

SEQ ID NO: 16389 - DNA, 407 bp, Homo sapiens
  SIMILAR (202)..(321): 921254mologous to Homo sapiens pyruvate dehydrogenase kinase,accession number L42452,Smith-Waterman Score=191.
cctcctgtgtacaattctttctcttcacttgctactgaatattgacactcagggagatcccagaagctccatgctgaaaatggtggatcctctttcagcctcaatctctgaaagactatgtagacccttctctcctcttctccatcttccagctgcatctgccgggccagcgtctgcccaatggctaacagggggctggctctgtaggccggactggccagcagctcctgaaaccgggtcctttcttcctcgagaaactgctgtctctgggctgcactcatccggctgagctctgagggccagggcttgttgctctccctgctgcaggcctggcgccggctgccagcctcaagccccagtagctcaggcagggcatccctgagcgggtgcaggtcccccaccaccat

SEQ ID NO: 16390 - DNA, 2392 bp, Homo sapiens
  SIMILAR (414)..(485): 791254mologous to Homo sapiens Human secreted protein, SEQ ID NO: 7678,accession number G03597,Smith-Waterman Score=92.
cagggcagactggtagcaaagcccccacgcccagccaggagcaccgccgcggactccagcacaccgagggacatgctgggcctgcgccccccactgctcgccctggtggggctgctctccctcgggtgcgtcctctctcaggagtgcacgaagttcaaggtcagcagctgccgggaatgcatcgagtcggggcccggctgcacctggtgccagaagctgaacttcacagggccgggggatcctgactccattcgctgcgacacccggccacagctgctcatgaggggctgtgcggctgacgacatcatggaccccacaagcctcgctgaaacccaggaagaccacaatgggggccagaagcagctgtccccacaaaaagtgacgctttacctgcgaccaggccaggcagcagcgttcaacgtgaccttccggcgggccaagggctaccccatcgacctgtactatctgatggacctctcctactccatgcttgatgacctcaggaatgtcaagaagctaggtggcgacctgctccgggccctcaacgagatcaccgagtccggccgcattggcttcgggtccttcgtggacaagaccgtgctgccgttcgtgaacacgcaccctgataagctgcgaaacccatgccccaacaaggagaaagagtgccagcccccgtttgccttcaggcacgtgctgaagctgaccaacaactccaaccagtttcagaccgaggtcgggaagcagctgatttccggaaacctggatgcacccgagggtgggctggacgccatgatgcaggtcgccgcctgcccggaggaaatcggctggcgcaacgtcacgcggctgctggtgtttgccactgatgacggcttccatttcgcgggcgacggaaagctgggcgccatcctgacccccaacgacggccgctgtcacctggaggacaacttgtacaagaggagcaacgaattcgactacccatcggtgggccagctggctgcacaagctggctgaaaacaacatccagcccatcttcgcggtgaccagtaggatggtgaagacctacgagaaactcaccgagatcatccccaagtcagccgtgggggagctgtctgaggactccagcaatgtggtccatctcattaagaatgcttacaataagactctcctccagggtcttcctggatcacaacgccctcccccgacaccctgaaagtcacctacgactccttctgcagcaatggagtgacgcacaggaaccaagcccagaggtgactgtgaatggcgtgcagatcaatgtcccgatcaccttccaggtgaaggtcacggccacagagtgcatccaggagcagtcgtttgtcatccgggcgctgggcttcacggacatagtgaccgtgcaggtccttccccagtgtgagtgccggtgccgggaccagagcagagaccgcagcctctgccatggcaagggcttcttggagtgcggcatctgcaggtgtgacactggctacattgggaaaaactgtgagtgccagacacagggccggagcagccaggagctggaaggaagctgccggaaggacaacaactccatcatctgctcagggctgggggactgtgtctgcgggcagtgcctgtgccacaccagcgacgtccccggcaagctgatatacgggcagtactgcgagtgtgacaccatcaactgtgagcgctacaacggccaggtctgcggcggcccggggagggggctctgcttctgcgggaagtgccgctgccacccgggctttgagggctcagcgtgccagtgcgagaggaccactgagggctgcctgaacccgcggcgtgttgagtgtagtggtcgtggccggtgccgctgcaacgtatgcgagtgccattcaggctaccagctgcctctgtgccaggagtgccccggctgcccctcaccctgtggcaagtacatctcctgcgccgagtgcctgaagttcgaaaagggcccctttgggaagaactgcagcgcggcgtgtccgggcctgcagctgtcgaacaaccccgtgaagggcaggacctgcaaggagagggactcagagggctgctgggtggcctacacgctggagcagcaggacgggatggaccgctacctcatctatgtggatgagagccgagagtgtgtggcaggccccaacatcgccgccatcgtcgggggcaccgtggcaggcatcgtgctgatcggcattctcctgctggtcatctggaaggctctgatccacctgagcgacctccgggagtacaggcgctttgagaaggagaagctcaagtcccagtggaacaatgataatccccttttcaagagcgccaccacgacggtcatgaaccccaagtttgctgagagttaggagca

SEQ ID NO: 16391 - DNA, 1207 bp, Homo sapiens
  SIMILAR (74)..(505): 291254mologous to Acanthamoeba castellanii myosin I heavy chain kinase,accession number U67056,Smith-Waterman Score=80.
ttttttttttgggaacggccctggcagtgcaggggaagttcacagagccatttattgagccccacaaccgaccaaagggaagggcgttccacccaggctcaaggccatggtccttaaggggccggcgctctctacttggcccacatgtgtcctgaggagttgtggcatgcccgctgccctggtcagagctggccgccatcttccagctgcatctgccgggccagcgtctgcccgatggccaccaagggggctggcttcttaggcccggcttggccagcagctcatgaaaccgggtcctttcttcctcgagaagctgctgtctctgggctgcgctcatccggctgagctctgagggccggggcttgttgctctccctgctgcgggcttggcgccggctgccagcctcgagccccagcagctcgggcagggcatccctgagagggtgcaggtcccccaccaccaccgtggccctccgcctccgctcctccctgtgcttctgctcagccagttttatggcttcgattttctgcaaccattgctcacgcctcagcttcattttctccttcttgggcaaaacggtcttggcctctgcacctctcctgatggaagggacgctccgtgcactcgagcctgcctcacctctcctgacggaagtgacactcctcacgtccagctccagcttctgcaccaaggcgctggggtctatcttggtcctggcaaagatgttggtgttgatgaacgcccagtcctaatgtccccaacaaaaacggacgaaaagaagagcagggagagcaacaagccccggccctcagagctcagccggatgagcgcagcccagagacagcagcttctccagccgcacgccagagagctgccctgtggaacacaaaaggtggcctgggtcccctctcaggcacagaagcctcgggggcagctcccagacgggctctgccgcagctgccaagaggccctgagcctgaaactcaccgagatcatccccaagtcagccgtgggggagctgtctgaggactccagcaatgtggtccatctcattaagaatgcttacaatggtctgatctcccagtgcaaacagaagcacccggcccctgcctttgtccagcaccttcctggcctggccacgatgctcctggacactttgggccccggttttcctttcttatttcctcaccggaaggaaagctcctga

SEQ ID NO: 16392 - DNA, 440 bp, Homo sapiens
  SIMILAR (11)..(283): 941254mologous to Homo sapiens 20-MAR-1996 DNA encoding novel human cytokine,accession number T88982_cd1,Smith-Waterman Score= 458.
  misc_feature (1)...(440): n = a,t,c or g
tcgtgtcntcttccgggcactcacagaaggagatactcagttgaattggaacatcgtttctttccctgttgcagaagaactttcacatcatgagaatctggtttcatttttagaaactgtgaaccagccacaccaccagaatgtgtctgtccccagcaataatgttcacgcgccttattccagtgacaaagaacacatgtgtactgtggtttattttgatgactgcatgtccatacatcagtgtaaaatatcctgtggagtccatggggagccatccaaatatccgctgggtttcattaatggcctgctgcgagtgcattggtccagaatgtattgactatggtagtaaaactgtcaaatgtatgaactgcatgttttaaagaagacaaatgcaaaccaaagcaacttagtaaaataataggtataaaaagttaaaaaaa

SEQ ID NO: 16393 - DNA, 1959 bp, Homo sapiens
  SIMILAR (1498)..(1734): 981254mologous to Homo sapiens c394H11.1 (similar to SOX (SRY (sex determining region Y))),accession number Z99757,Smith- Waterman Score=431.
aaaatgctgattttttatccctgcgccagactgaactgccaggaaactcttgtgctcaggatccggcatcctttatgcctccacagcagccttgctctttccccagccaatcactttcagatgctgaatcgatttctaaacatatgtctttgtcatatgttgctaatcaagagccaggtattttacaacaaaaaaatgcagttcagattattagttctgctttagatactgataatgaatctacaaaagatacagaaaatacttttgtcctaggagatgttcaaaaaacagatgcctttgtcccagtgtactctgacagcactattcaagaagcatcaccaaactttgagaaagcttatactttacctgtgttaccatcagaaaaggactttaatggaagtgatgcctctacccagctaaatacacattatgcatttagcaaactaacttacaagtcttccagtggccatgaagttgagaatagcacaactgatactcaggtcatttcacatgaaaaagaaaacaaactggagagtttggttttaactcatttgagtaggtgtgattctgatttatgtgaaatgaatgcagggatgccaaaaggaaacctaaatgaacaagatccaaaacattgtcctgaaagtgaaaagtgtttgctttccatagaagatgaggaatctcaacaaagcattttatcaagtctggaaaaccattcacagcagtcaactcaaccagaaatgcataaatatggtcagttagttaaagtagaattagaagaaaatgccgaagatgataaaactgaaaaccaaatccctcaaagaatgactagaaacaaagcaaatacaatggcaaatcaaagcaaacagattcttgctagctgtacactattatcagaaaaagacagtgaatcctcatctcctagaggaagaataagattaactgaagatgacgatcctcaaattcaccatccacggaaaaggaaagtgtcacgtgtacctcagcctgtgcaagtgagtccctctttactacaagcaaaagagaaaactcagcaatctctggcagccattgtagattctctaaaactagatgagattcagccatacagttcagagagagcaaatccatattttgaatacttgcacataaggaaaaaaatagaagaaaaacgcaaattactgtgtagtgtgattcctcaagcacctcagtactatgacgaatatgtaacatttaacggatcatatctcctggatggaaaccccttaagcaagatttgtattcccacaattacaccaccaccttcactgtcagatccacttaaagagctttttcgacaacaggaagttgtaaggatgaaactacgtttgcaacacagtattgaaagggaaaaactcattgtatccaacgaacaagaagttttgcgagttcattacagagctgcaagaacattggcaaatcaaacactgccatttagtgcttgtactgttttgctggatgccgaagtatacaatgtaccattggactctcagtctgatgacagtaaaacttctgtgagggatcgctttaatgcaagacaattcatgtcttggttacaagatgtggatgataaatttgacaaattaaagacctgtcttttaatgaggcaacaacatgaagctgcggctttaaatgctgtccagaggttagaatggcagctcaaactccaggaacttgatcctgccacctataaatctatcagcatttacgaaatccaggagttttatgttccccttgttgatgttaacgacgactttgaattgactcctatatagcagtcagtacttcctgatggtattgtcctaaactggtgatgctcaagcattatactgtggaatactgccttttgacaaaaatactcatgcctttacaattgttagtaaagttcgattatagttggttatgtagtaaacactgtcattttat

SEQ ID NO: 16394 - DNA, 702 bp, Homo sapiens
  SIMILAR (358)..(603): 671254mologous to Arabidopsis thaliana ubiquinone/menaquinone biosynthesis methyltransferase-like,accession number AB019233,Smith-Waterman Score=276.
atgcttggcttaaacacatttccaaaggcccttttgccatataagacaacatattcacaggaaaaactcattgtatccaacgaacaagaagttttgcgagttcattacagagctgcaagaacattggcaaatcaaacactgccatttagtgcttgtactgttttgctggatgccgaagtatacaatgtaccattggactctcaggagctctgccagtgccggccgggagaaggcaattgctcctgctgtaaggagtgcatgctgtgtcttggggccctttgggacgagtgctgtgactgtgttgaatttaggtactccaaaacggactgggagtacttaatccatggacagggcatggaatgtagtttgcctcacgaaaagttgtggaagaagagacagggacctgaaggtataactaccccacagaataggcttgcctctgccactctggcacctccagctcctgagtctcctcagggttctgtggggtgcatggcctgtgtgaagactgctcagtcagaacacatgtgtactgtggtttattttgatgactgcatgtccatacatcagtgtaaaatatcctgtgagtccatgggagcatccaaatatcgctggtttcataatgcctgctgcgagtgcattggtccagaatgtattgactatggtagtaaaactgtcaaatgtatgaactgcatgttttaa

SEQ ID NO: 16395 - DNA, 5954 bp, Homo sapiens
  SIMILAR (82)..(597): 501254mologous to Arabidopsis thaliana ubiquinone/menaquinone biosynthesis methyltransferase-like,accession number AB019233,Smith-Waterman Score=346.
gaaacatgtcattaagtttcttaaatgacgaagaggccaggaagatccttcaggtgctggaaaggaatgaggagttacagagggccgagaaggacaggatcagcaaacttcagaagacaaagagggatatcagatggcttcagggagtgactggtgaatggtttgaagaaattcaaagaaaaaagttttgcaatgaaacagatgttagccaaatgttaaaacaaccacttacatacaggctaagtaaggagatggcaaaaaatgatccgatagaattacctacatcaagatctaaaaatgtaactaatcaaaaaaagccgacacctttttcttcccggatgagcttcagatcgtcatttgcttccctgttctcattcaggaaatctggaaaggagacttcaaagcttccatcactgggacagaaaggatgtgatggccatgcaggacctcctatgcctgtgaggggagctgctgtgcaggcaaaaatatacaattcacctctggaaaatcatctagttgacagtacatttgtcccaaagccagcagtcatgagggaggagagtggcatgcctccaccgtgggatgcttcactgctggagaatgagtttttccaagttttagatgacttggatagcaaattggctcaggaacagtctgcaagctcagtgaataccagaacacccctcaactatggatcaagaacacagttcggtcacttttattccagtggtaacagacatggtaatatcacagaaaggcacaaaaaacactataatgaaacttccaatatgtctatctatgacatcctaagaccaggaactcctagggaaggttttaaaaccttttctcctaggacaagcacaatttatgatatgtataggacaagggagcccagagtctttaaagaagattatgtgcaaaagaatacttttggcagtacttcgctgtgttttgacagcaggcaacggtcggccttaccagccacagggcatttcacagcaagaagcttacattttccagccacaactcagagcaagagtgggtttataccaccaaggcaccagcagagtccaaagagaactcctttatcatccatcatatggaacagatcagattcctctagagacagggagaaccaggaagagttcctgagggcaccatcaccaatggaaattgatcccgctgacaagtatgtgtatcccaggggttttcaggagaataagagatatgaatcgtaccattcacagaatgtttaccaacgtgttagtttaaatgctcccatggagaatgcaatgagtcccgacacttttgagaactcagagaacatgccattctaccatcaaagcaacacatttaccagatctttcttcagcaatacctttggacgaagcggagaacagaggagatttggacaaggtcctttttggggccaagagaaaggacattctttctggtctgactttcatcgaagcaggaaatcattcagttcttctgacagagactttgaaatgatttccatggaagcaaatagtgtatcagccattcatggccataatgtttcttctgaacactgggaatcattttcttctggttatggaacagatgtttccagaggccaagaagagccacatccttggcagtttgattttcagagatccacactggatagcatggtggtatcacatggtaatgagacccagttgactcctcattttggcacaccaaatgtttgctccatgactggttcaagctatcacgtcaaatctagtgagttggtaagtcaacaggacagttctcctgtagaagtacatataaacaaagaagcttcctcatttggaattgctcagactctagcatcctcattcaaaacttccttttcccagatttctgatgacagaaggaatcctcagagtcccaacttgcagaatcccacagtcactttgcagaaaatttttccaaataagcctgcctctcatccaatgagaagccatacagaagtcactgtgaccaacagcaattcagttgactctctgcctcttgccaaaagccagcccaatatcttggtcacagaagtaaataatgagaaagacttaaatgaatctatttcagaagaagacaaacagctaagcaagatggaccagacaaacaaggcaggtgaaataccccaacctgtttcacagacagggatctcaaactctttacctgattttcaaaatcccttatcccaggactcagccaagagcaacgggtttggttttaatgcatctaccataataagttcaaaaaagtcacccagagtcttttccaggaaagatacctccaaaatgtatataccgcacacagataaatccaatgacattaaacaagataagaggtttactgaaaacagaaaacttggctcaacagcttcccttcctttcattcaggaacacagaacaccaccatctttccccaggacagaccaaggttgtcaccaggaattaactgtaaataatgaagatatttcaagaattattacaaataaccactggagctctgcactgactgatactcaaaatgcacaatactcaaaatgcaagttaactcctggccacaagacctcgtgtgattctttagatctgtcatcagctgcactaccagattcctcaccatcaaagaattcttcccttgatgctcctgtggttccatctactacagtgttctccaggagaagtccttcagacaaagatccatcgctaggagaaagagaagaaaaagacaatgctgggaagaaccaaaagaatcagtttattgtaagccactcagaaaaccaagagagaaatgatagtcctgtgcctacacatgatgaagtggttgatgtcaaatgccattcacactctccttttaggaatgaaagaggaaaaggaaaaataaggcatcatatatcctgtattgaaaagttaagcaaaacagaaagtatatcagtacccaccagtgatcacaggagcctcattgaagcaaatcaaagcaattccaaagtttctgaacttgacacaatttattgtaccttgccaagaaaatcaagcagttttctcatacatggcaggcagtcaggaagtaaaataatggctgcttcattgaggaatgggccacctcccttccaaatcaaaaataatgtggaagatgcaatggggaactatatgttaaacaaatttagtcccagttctcctgagtcagcgaatgaatgttccaaagtcctttcagactcagccctggaagcacctgaagccacagagagaatgacaaatgtaaaaagcagtggatctacttccgttagaaaaggaccacttccattcctcatcaacagggctatgtcatgtccctcaggggagccacatgcctcaactggaagagaaggaagaaaaaagccattgacctcaggcatggatgcttctgagctaacaccaagggcttgggagagaatcattagccctgtggaaagtgactcatctgttagagattgttctttaaccaaaagacaacaccaaaaggaaaacttccaagaatacactgagaaagagggtaaaatggctgcctccaggagaagtgtatttgctctttcaaatgaagaccctttacctttttgctcagacttgtcaggaaaagaacgtgggaaaacattacataaagttaagacgactagtacgttttctgtttctggtgatgaagataatgtaaaatgtctggaggtggtctcaatatattacactctaccgaggaaacccagcaaaaaattctgtaacctccttcaacagtatacacaaaatactaatttacttatagaatcacctcaagtggagactgaaacatttcctaacgctttagaaaaagacaaacagaattattctacacgagagcagtcaggaacaccttcatgtgaaaatctaaagatgtccgtcaactctgatcagacgctcaccactgaaaatatgactgccttccgattatcaaatagggggcccctagctcctacattacaggaaatggcttctgttgaggcagctgtttctcttcctgaagaggaatctaaagctagagagattttttcagataatttagctaaaacacctctaggtgattcagaaaacaagaaggaaagaggcaaaaagttgcaaagtgaaaccctgcatacttcattgatgcttcagagaaaaaatgtatccgaagaaaaatctgaaaattgtcaacaatccattaattcaagtaacagtggtccctctagtcttccagctctttcagaagttaatattggaaattcccaaactagaagaagttcttgggagtgtacagggagtggtagagccattccatttactggaagtggcaagtgtccccagaaagatcacacatccacagctgtaggtgatggctccagtggatcacagcctagggaaggcagaggggacattggaaccaactgccaaaaaatgactaataaaacactttctcactcagagagtcaagtctttgcccttactccagcattgcataaactacagcttggtgaggagactcagtcagatgaaccaaacttagagagtctgcagtctgaaccaagagaattacctcaaagaagtcaggaggcaaatatgacagagagcaggaaggctgaagatgaaatgcagaagtcagcttgggatcaaccttcacttcctgaaggaaacaaaaataaaaccaacttggatgacctagtaaagggggaaaatagatcttcagttaaacacagattggcagccatgtctaaagccagcagaaaattcccagctaaagatgtaagccccagaagacatgtagctactatcttcccccaaagtggaagcagatctggctttgaccatttatctcttggcacagtggagtgcaacccactgttccctgagcctactccaaaatctgcagagtccattggcgaaagcaggttgagtgagaacagaaagcatgtgaagaaatccgagaaccttctccccattactgtactacccaacagagaaccttctacacacgtcagcaaccagaagtctaacagcatttcacaacgacatcagaatgagtttaaaaacgtctcagaatcaccatcaaagcatgagaattctaaagacgtcacagcagctcagaatttagtaagagaatcaggagccccatcacccatcacattcaccagcctcagggaagcagaattctctgacaatcagaggaggctgagccctccttttccactggagcctgcacagaaatctagagtaagcagtccactggccagttttctgcagcaacaaaggagtgcttcatctctggagtgggaacctgagccacacctctatcgttcaaagagtttaaaaagcattaatgttcatggcgatctactacgaaaaagccatcctccaaaagtcagggagcgccatttttctgaaagcacttctattgacaatgccctgagtcgactgacccttgggaatgaattctctgtcaacaatgggtacagtcgaagattcagatctttttctgaactcccctcctgtgatggaaatgaaagttgggcttatcgcagcgggacaaaaacaggtcccaggtctgcaatatctatatacagacctatcgactatgggatctttgggaaagaacaacagttagctttcttagaaaatgtaaagaggtcacttacacaaggaagattatggaaaccaagttttcttaagaaccctggcttcctaaaagatgatttgaggaaccctcccaacccctcagagtcattaagctcaaattctcccagtagtcaggtgccagaagatggcttatctccaagtgaaccgcttaatatctatgaggatgacccagtggactcagattgtgacacagacacaaccacagatgatgaatactacctggatgaaaatgacaaagagtcagaactgtga

SEQ ID NO: 16396 - DNA, 588 bp, Homo sapiens
  SIMILAR (292)..(429): 341254mologous to Vicia faba ribosomal protein S14 (not transcribed),accession number X07236,Smith-Waterman Score=68.
  misc_feature (1)...(588): n = a,t,c or g
atgcggcgggggcgcgannnggagaggatctggctgctgctcactccgcggcccgcgcgcacccacgtgctcgcacgggtccgacagagcttccaccctcgcctaacgcagttttccctcggcaccagaggcgaatctccccacccaatgcgggcagtcagcgaagcacgggagagccggcacctcacgggaggcgaaaggtccccaccccaaggcaaacttcagaagacaaagagggatatcagatggcttcagggagtgactggtgaatggtttgaagaaattcaaagaaaaaagttttgcaatgaaacagatgttagccaaatgttaaaacaaccacttacatacaggctaagtaaggagatggcaaaaaatgaccccgtggctctcaaacggcagaggatggtcagtctgaatacttcccctaggaaaaccgagagtacagaagcatcctggagcagggctctgtcctctcagagggcaaagctggatggggagcaggtgtttacagaacatccacggagtttgggccaagcccagagtgaggagctgggcactggggtggcagaagaccaggccttgccttga

SEQ ID NO: 16397 - DNA, 840 bp, Homo sapiens
  SIMILAR (433)..(819): 691254mologous to Homo sapiens L7a protein,accession number X52138,Smith-Waterman Score=453.
atggccctgagtggctgtactccacccttcttagatgctctgcccttctccctgctggagcatgtgagctggagcatccactcaagctcgaaaaagaaccacatggttaaaaagaaactttttaaagtaggatacacagagctcaaggacccacttgaggaggcagtctgtcccttttcaaagcttgaacgctgtgctgggagatctgctgctctctttagagctgccaggcagggacgtttaagtctgctgaagctgtgcccacagccatcctttcccccagactgctgtgctagcagcgagaatttcaagccagtggatcttagcttgctgggctccatgggcatgcgacctgccaagccagactacttggatccctggcttcagccccctttccagggaagtgaatggttccatctcactggtgttccagctgctcagcttcttaagctggcccacgagtacagaccagtgacaaagcaagagaagaagcaggaattgttggcccatgctgacaggaatgctgccagcaatggagacatccccactaagagttcacctgtccttcaagcaggggttaatactgtcaccaactcaatggtgaacaagaagtctcagctggtgctgactgcacaagatatggatcccatcaagctggttgtcttcctgccagccctgtgttgtaaaatgggggtcccttactgtgttatcaaagagaaggcaaggccgggaagtttagtccacaggaggacctgcatcattgtcaccttcacacaggttaaatggaaaaaacaaggagctttagctaaactttgggagcttcaggatcaattacaatga

SEQ ID NO: 16398 - DNA, 1425 bp, Homo sapiens
  SIMILAR (964)..(1404): 671254mologous to Homo sapiens L7a protein,accession number X52138,Smith-Waterman Score=486.
atgtttgccttctgccttaagcaaaagctccctgaggcctccccagaagcagatgctgtcatgcttcctgtaaagtctgagaacgactaccgtagaccacgcgtggcatcgtgttcacttagaaggacacaggacaggaaatacagcttgacagcagatcagcatccggcaaccctcttcagtggaagtaatcccagtagcagtccacctgagctaagtgtagcagcagcaccagggcagggactgactccagcccttggactcaggacatcgcagaccttcccttgcgtgcgtgactcattcgcacatccatttctgtttatgcctggggtggggagaaaaatcccaaaccagctccaattaacagatgcagatgcagatgcagaaattgtgactcagagagaggaagtaacctgtccaaaatcacatgacggtcaggaccctctgctgcaggtctgctggagtttgctggaggtccactctagaccctatttgtctgggtattaccagtggaggctgcagaacaacaaagattgctgcctgttccttcctctggaagctttgtcccagagagacacccgccagatgccagcaagagctctcccgtatgaggtgtctgtcagcccctactgggagtttgaacttcctggaggctttgtttacactgtgagggtaaaaccacctactcaagcctcagcaatggtgggcgcccctcccccaaccaagctcaagcatctctgggcgacctcagactgctgtgctagcagcgagaatttcaagccagtggatcttagcttgctgggctccatgggcatgcgacctgccaagccagactacttggatccctggcttcagccccctttccaggaagtgaatggttccatctcactggtgttccagccacccaagatgctaaaacaaaataagaccaaggggaagaagatggctggggcccctgctgtcatgaagaagcaagaagccaagaaagtgtttacccaggccttggacctcctaacagctgctcagcttcttaagctggcccacgagtacagaccagtgacaaagcaagagaagaagcaggaattgttggcccatgctgacaggaatgctgccagcaatggagacatccccactaagagttcacctgtccttcaagcaggggttaatactgtcaccaactcaatggtgaacaagaagtctcagctggtgctgactgcacaagatatggatcccatcaagctggttgtcttcctgccagccctgtgttgtaaaatgggggtcccttactgtgttatcaaagagaaggcaaggccgggaagtttagtccacaggaggacctgcatcattgtcaccttcacacaggttaaatggaaaaaacaaggagctttagctaaactttgggagcttcaggatcaattacaatga

SEQ ID NO: 16399 - DNA, 390 bp, Homo sapiens
  SIMILAR (120)..(248): 361254mologous to Rattus norvegicus huntingtin,accession number AJ224997,Smith-Waterman Score=49.
ctagtagcatgaaatcttatgtgcttcccacagaattcctggtggaaggaggaattcttcctcctctttctcgtctttctgggcaggtattgtgaggacggtatctgccctgtcagtatctacccaaacaatccagagcaaggacaagtagggcctggttttagctgcaaatgcaacaagtctctccgctgagccgcagctgctaccctctgccttctgctcctccgccagggcacggcccccccaggagagagaaggctctggagacctctgtaacagtcgtgcggagaagacaaagtcagctgcgtgcgtctcctccggcgccggctctgcaaggagggaggagggggcggggccccacaaccaccgcagcctcttaggtttctccat

SEQ ID NO: 16400 - DNA, 2143 bp, Homo sapiens
  SIMILAR (1102)..(3372): 821254mologous to multiple sclerosis associated retrovirus polyprotein,accession number AF009668,Smith-Waterman Score=3109.
tcagttcttatattcaccatgcagctttttcttcccatgaggaacgtggctcagtgaaaatggtgacttgatatttaaccgatccctttcagcctcctcttcctcatcgtatctctcatcctccacttcatcttccacatcactgctctgaggactggaggcctgagaccctgaaggagaaggtggtactgaggaaggcctgggatatttaaatccttctgtcgttggtggtgatgttagttccacatggaatttatctggaaaagctctgcttaatgtcaggtgtctggcatgctggtaatatctgcctaagtatctccaatccagaagatctgagagcctctcagttctgttcctctggataaacctttggcggcgtgacatgttgcaaaatccatagagaaacttagtcagctgattgcaagaatcatctggagaacggaaccgcctgtcaacgatgtaaataccgtaagcagtaggatcagccacgtgctcctgcatgaaacagccaaacccggagagattcgtggtcacactggggatacccatcacagtgcattcagctggagtataaccccagggttcatagtatgatggaaatactccaagatgacaacctctaacaaactcttcatagtccatgggtagtaagggactggtggaggatagaaactctgggtgcaaaatcaccttgactctatctgtgcggttgttgaaaagtccaatccgtctaatggtgctgaggatggggtcggtggagtcatcaatcatgttgtgcgtggtcactggggctaatgactgtcgctgagttgaaaagatggctcttttcataattgttagatcatctcgatctaaaatatcgttcaggtcaggaatttctcctcttaataatgcatcatagagtttttttccaaacttttccttcacagaatgtgcaacatcccacagctgttttcgcactgcttgtcctttcagggtttccacgttgaaattatttgtcttggcaggcataatgaaaaacaccaccactgtgatgtcacttttatgcatcctcagcaggaaatttagcctggataaggaatctaggaagatgtcagctccttttgttttgaaaaactcatacctcccagcaatgaaaaggaacaaagtcttttcaagatcaaagtcgagatgaccatagaaatgacctcgaacaaaatcttggattctggccttgtacatggcatgtagattttgaaactcatgcactgctgaaaatttcttaacattcaagccgtttggagtaactacatcaggctttctcttcagcatatgttcagcttctattgctgttatttcagaaaccgtggtgaacacgtgagcgcaatgaacggaagctcgctccatgcagtaccggtggtaaatctgcctttccccagcctctttgtcaatgttaaacttatcaagatggttgtagaaatcaatatttgctgcacagagatacctcccaagtagtgtagcgtgggttgtaaatattgtggcaataggaagtttcctggctcgagaaaggatcagtccaattccagcctgccattcatggaattgggcaacgacatatttaccatctgcatgatctgtcacctcttttaagaaccaggcagttaaagatccaaatatcagcatatcattggcttctcggtcatgataaggaatgccgacactgcatgcttcccagaggtcacccttccacctgtccagattccaagctgaatagcctatgtcaaaaagtaccacataaggacttccttctatcagccatcttccaaaatgcacctggcagccatgcttattcattgcgtccactgctcttctgacagcatcatttacaggttcacactgttccacctgagtcttcatattatgctcaaaatatggacctatcagaaaatagttctctccccattcatctgctgttgttttggcctttgtctgaatcacagtatagatgcctccaactttattggtcacttcccaagcaacttcaaagagcagtaactcctccacaggaagttcttcgacttcccactggggaagcccacccagggatgttacagagagggatcggcctcgaagcattcttcttacagtcctccgagactccttt

SEQ ID NO: 16401 - DNA, 891 bp, Homo sapiens
  SIMILAR (643)..(759): 1001254mologous to Homo sapiens Human secreted protein, SEQ ID NO: 5001,accession number G00920,Smith-Waterman Score=191.
atgaagactcaggtggaacagtgtgaacctgtaaatgatgctgtcagaagagcagtggacgcaatgaataagcatggctgccaggtaaaggaactgacacttcacttggcaattctcagtaaacttatgggaaaaaagactgtaactaacatgaactcacaagagaagaccattcacttacttaaggaaaactttcaggtttgtgagaaagatgatgaacttgcttttaaatggattgaatttgagacaccttgtgaaaaccgaggaggaaggataattggtttggagttcagcagaagatacagaaattcctggtggaaggaggaattcttcctcctctttctcgtctttctgggcaggtattgtgaggacggtatctgccctgtcagtatctacccaaacaatccagagctgtcaacagaaaaatcctctgattcaggacataggtatttgtgcagagaaaggcagtcatttgtgcaaaaagatttgaagaggaatcagggaaatttctcttcctcccatatccctgaacattctcctttaatgtttgtgctaaaagcacaaattgatgagatgagagctgttgagagcgtagtccccagaaggaggcttgctgcctcgccgttggatcttggactaacgtctctggctgatgaacttgctcttgtggatgttttggaagataagcttaaaggagaaatgatggatctgcagcatgggagcttatttcttcagacacctaaaattgtggcagataaagtgtctgccagagcctgcatcggctcagagatcagggattccaagccagatgcatggagtcaacctgatggccagccagctcaagctgctcatctgcctcctgcaggagaccatcagttggctgccatctag

SEQ ID NO: 16402 - DNA, 531 bp, Homo sapiens
  SIMILAR (150)..(287): 761254mologous to Homo sapiens Human secreted protein, SEQ ID NO: 5001,accession number G00920,Smith-Waterman Score=147.
cggacgcgtgggcggacgcgtgggcggacgcctgggcggacgcgtgggccttgcagagccggcgccggaggagacgcacgcagctgactttgtcttctccgcacgactgttacagaggtctccagagccttcttctcatcctgtgcaaaatggcaactcttaaggaaaaactcattgcaccagttgcggaagagcgaggcgaacagttccaaacaatatggatcactgtactgggtgatggacaagttgggatggcgtgtgctatcagcattctaggaaagtctctgtgctgatgaacttgctcttgtggatgttttggaagataagcttaaaggagggaatgatggttccttccagcatggggagcttatttctttcagacacctaaaaattgtgggcaggataaaggattattctggggaccgcccaattctaaaggattgtagtgggtaactggcagggagtccggtcagccagaagggggaaagtccgctccaatctggtgcagagaaatgttaatgtcttcaaatt

SEQ ID NO: 16403 - DNA, 435 bp, Homo sapiens
  SIMILAR (26)..(403): 1001254mologous to Homo sapiens histone H2B,accession number Z80781,Smith-Waterman Score=629.
attcttactcctttatcttgttgcaatgcctgatccagctaagtccgctcccgccccgaagaagggctccaagaaggcggtgaccaaggcgcagaagaaggatggcaagaagcgtaaacgcagccgcaaggagagctactccgtatacgtttacaaggtgctgaagcaagtccaccccgacaccggcatctcctccaaagccatggggatcatgaattcctttgtcaacgatatcttcgagcgcatcgccggcgaggcttcccgcctggctcattacaacaagcgttcgaccatcacctccagggagatccagacagccgtgcgcctgctgctgcctggggaactggccaagcacgccgtgtccgagggcactaaggccgtcaccaagtacaccagctccaaataaatggacgcatgttcaaacccaaaggctct

SEQ ID NO: 16404 - DNA, 399 bp, Homo sapiens
  SIMILAR (840)..(1067): 891254mologous to Homo sapiens DNA-binding protein,accession number AF038951,Smith-Waterman Score=362.
gttttctgacagggggcctgagccagctaagtcagctcctgctccgaagaagggttccaagaaggctgtgaccaaggcgcagaagaaggatggcaagaagcgcaagcgcagtcgtaaggagagctactccgtgtatgtgtacaaggtgctaaaacaggttcaccccgatactggcatctcatccaaggccatgggcatcatgaattccttcgttaacgacatcttcgaacgcatcgcaggcgaggcttcccgtctggcccactacaacaagcgctcgaccattacctccagggagatccagaccgccgtgcgtctgctgcttcccggagagctggccaagcacgcagtgtccgaaggtaccaaggctgtcaccaagtatccaagctcccagtaaatgtg

SEQ ID NO: 16405 - DNA, 612 bp, Homo sapiens
  SIMILAR (22)..(399): 991254mologous to Homo sapiens histone H2B,accession number Z80779,Smith-Waterman Score=623.
ggcgggattgaatgctttaagatgcctgagccagccaagtctgctcccgccccgaagaagggctccaagaaggcagtgaccaaagcgcagaataaagatggcaagaagcgcaagcgcagccgcaaggagagttactctgtgtacgtgtacaaggtgctgaaacaggtccatcccgacactggcatctcttccaaggccatgggcatcatgaattctttcgttaacgacatatttgagcgcatcgcgggcgaggcttcccgcctggcgcattacaacaagcgctcgaccatcacctccagggagatccagacggccgtgcgcctgctgcttcccggagagctggccaagcacgccgtgtcggagggcaccaaggccgtcaccaagtacaccagctccaagtaactttgccaaatttccaagttgatcgtgatgttgatccgggactcggtgtggtgacggcccgccctgagcacgaaagtgcacgctcttgacaacttccttatgtttggagctttctccaccaccacccccgcccattttcttgtaaaatttttaccatgcagatatgtaataactgcaagtaaaggctgaagacaatgtgagctgaacacg

SEQ ID NO: 16406 - DNA, 895 bp, Homo sapiens
  SIMILAR (86)..(454): 901254mologous to Homo sapiens histone H2B,accession number Z80779,Smith-Waterman Score=541.
cgcgcccctcgagatcgtcgacattagtccgtgcggtggaattctcgatctgctgctcgtctcaggctcgtagttcgccttcaacatgccggaaccagcgaagtccgctcccgcgcccaagaagggctcgaagaaagccgtgactaaggcgcagaagaaggacggcaagaagcgcaagcgcagccgcaaggagagctactccgtatacgtgtacaaggtgctgaagcaggtccaccccgacaccggcatctcctctaaggccatgggaatcatgaactccttcgtcaacgacatcttcgaacgcatcgcgggtgaggcttcccgcctggcgcattacaacaagcgctcgaccatcacctccagggagatccagacggccgtgcgcctgctgctgcccgggggagttgggccaagcacgccgtgtccgagggcaccaaaggccgtcaccaagtaccaccagcgctaagttaaactttgccaaggagggacttttctctgggaatttccctgataatggaccaagaaaagcttcttatcaaaaagaagcaacaattgccttcggttacctcattatctactgcagaaaaagaagaacgagaatgcaaccttaccttagaatggccttttccacaagctaaagctggcctcttgatctcattcagattccaaagagaatcatttacaagttaatttctgtctccttggtccattccttctctctaataatcatttactgttcctcaaagaattgtctacattacccatctcctcttttgcctctgagaaagagtatataagcttctgtgacccactggggggttggggtaatattctgtggtcctcagccctgtaccttaataaatttgtatgccttttctcttaaaaaaaaaaaaaa

SEQ ID NO: 16407 - DNA, 852 bp, Homo sapiens
  SIMILAR (1445)..(2095): 911254mologous to Homo sapiens ornithine-delta- aminotransferase,accession number M23204,Smith-Waterman Score=1053.
cggacgcgtgggtaagcggtaggttgacagaactaccgtcttcctgtttttttcctccaattttccggcagttactcccagtcatgcccgagccctcaaagtccgctcctgccccgaagaaaggctccaagaaggcagtgacaaaggcccaaaagaaggacggcaagaagcgcaagcgcagccgcaaggagagctactccgtgtacgtgtacaaggtgctgaagcaggtccacccctgacaccggtatctcgtccaaggccatgtgcatcatgaactccttcgtcaatgacatcttcgaggcgcatcgcaggcgaggcttcccgcctggcgcattacaacaagcgctcgaccatcacctccagggagatccagacggccgtgcgcctgctgcttccgggggagctggccaagcacgccgtgtcggagggcaccaaggccgtcaccaagtacaccagttccaagtaactttgccaagggagagacatgaagacagaggagaaatgaatgcataaaataaccgattaatatgattctatacatagaacttaggaagtctcatctgcctgaaaatgactgtgtggatcccacccaaatccaactcatcctggtttgctgcacactggttcatcaaaagaaggttaccgaggggaaggaactaaaggtgtttgcacttcatgttactttttgagtttataaacataaaaacagaatttacttctgttacagacctagttactgggaattcattacttgccatggactacctttgctaagaaaagtctgaatgagaagatgccaggacgtctgaaaaaaaaagttataataaataaaatctgcggagaattgtaaaa

SEQ ID NO: 16408 - DNA, 831 bp, Homo sapiens
  SIMILAR (201)..(500): 1001254mologous to Homo sapiens rhabdoid tumor deletion region protein 1,accession number AF133587,Smith-Waterman Score= 511.
gctgtttgcgcctgcgcagtgggtgctgattatgtcgaccgcggcgccgcggacgctgctggagtcgcctggcaacgatgtcgcctggcaactgaataggttggccagtggcgcgggctactggaagcagaaagggctgcggaggcagtgagtggtttctgcagagcttcatttggaaaggcctctgtagttggggaaagatggcccattcccagaactccttggagcttcccattaacatcaatgccacccagattaccactgcctatggccatcgggccctgcccaagctgaaggaggagctgcagtcagaggacctccagacgaggcagaaagccctcatggccttgtgtgacctcatgcatgaccccgagtgtatctacaaggccatgaacataggctgtatggagaacctgaaagctttgctgaaggatagcaacagtatggtgcgcataaagaccaccgaggtgctccacatcacggcaagccatagcgtgggcagtagtgacaggaagggggaatgaggatagcagccctgggcttggcatcttgtcaccttgaggagttaatttgcatgacatcccacggacaagagagcttcctggcagcctgttccctgccctcttgcttgcctctggtgaggaggcacacaggcaaacacaactgactatcaaagcatgagagacatggagtgggtgactagacacggaccaaggaagcccccgtggtcagggaagacccctgcaacttgtgtgtccaacggtgactttctttttccagacgattcaaaacacaccataagtgaaaataaataaataaataaaataaaaa

SEQ ID NO: 16409 - DNA, 807 bp, Homo sapiens
  SIMILAR (489)..(1127): 751254mologous to Xenopus laevis ornithine aminotransferase,accession number AY005479,Smith-Waterman Score= 823.
atggagggttttatgcaggtggtggctgggtctggcttgcttttgagaacagctacgctggccagcagtgtgttgggtccactgcagaggctaacctttgtcattaccaggcgcaaccctgtaaatgattgttcccgctttgcagccggccgcagccttgggctgtttgcgcctgcgcagtgggtgctgattatgtcgaccgcggcgccgcggacgctgctggagtcgcctggcaacgatgtcgcctggcaactgaataggttggccagtggcgcgggctactggaagcagaaagggctgcggaggcagattaccactgcctatggccatcgggccctgcccaagctgaaggaggagctgcagtcagaggacctccagacgaggcagaaagccctcatggccttgtgtgacctcatgcatgaccccgagtgtatctacaaggccatgaacataggctgtatggagaacctgaaagctttgctgaaggatagcaacagtatggtgcgcataaagaccaccgaggtgctccacatcacggcaagccatagcgtgggcagatacgcctttctagagcacgacatcgtccttgccctgtccttcctgctgaatgaccccagcccagtctgccgggggaacctgtacaaggcatacatgcagctggtccaggtgcctagagaatggaatcaagcatcttggcctcccatgagtgtgccccccagtgagcagtcactgaggagagctgggattatcgtgaccactgttgttgacccattgcaccaccagggtgaccacgtgggctataggtga

SEQ ID NO: 16410 - DNA, 615 bp, Homo sapiens; identical to SEQ ID NO: 4586
  SIMILAR (3)..(515): 671254mologous to Mus musculus Pro-Pol-dUTPase polyprotein,accession number Y12713,Smith-Waterman Score=553.

SEQ ID NO: 16411 - DNA, 323 bp, Homo sapiens
  SIMILAR (147)..(22): 881254mologous to Mus musculus Pro-Pol-dUTPase polyprotein,accession number Y12713,Smith-Waterman Score=200.
ctactttaactggaggaccacgtgatgttttgggtcccctggaatcaacgtcagctcagagccagtgtccagttgtccctgaaatgtctgattatttccctttccccagtgcacagttaccctggtaaaaggccagaggtctccttgccttgatgcttgagtgccaccacttggcccatgccacctcaggatccaattattaccattgtatttaaattttgtagttgaatgactgtggttcccactataatatctttcgttgcaggtcagccactcacatgataagagcttgtgtctgattttccgcaatttcagctctttct

SEQ ID NO: 16412 - DNA, 1320 bp, Homo sapiens
  SIMILAR (316)..(465): 721254mologous to Mus musculus Pro-Pol-dUTPase polyprotein,accession number Y12713,Smith-Waterman Score=183.
atgaaaaatgatggttggtggaaggaaaagcagatttattcagatagccagctaactgagaagatggtggaccatcattctaaaaaacttaaacatgctagcttgagcctaaagggagttggggagaggaagcaggagagcagtattagaaagagcacagtaccagacacagttatgcctgtcgttgaaccaggagtcaagactcaagttccagcaggctctagatgtaaggttcagagtgtgaccaatgaggaggtgcgctacactccaaaagaacagagttttctaacttataaagcagaaatctggagaacagtgccagaatgcataattggcatagacatacttagcagctggcagaatccctacattggctccctgactggtagggtgaggcctatcatggtggaaaaggccaaatggaaggcattagagctgcctctacctagaaaaataaacgagcgcacgcgcagaacgagagagcggccacccagggatcggcgctatctgcacagcggttacagtctcggaaaggcctggcttcttcgtggctttgtggagatcccttacagcggccatttgattagcacccgaagagattcaaaggaagcagttgttccgtccccaacatatttccgtttcaaaccacccacttccggtttttcagccggttccggtcccgcccttcacttccggtcgctttcggtctctcagcggccggtttctgcgtccgctgccgcaggttccaccgcgctccagaagtcaagaattgaggtttgggaacctgtgcgtagatttcagaagatatatggaaactcttggacgccctggcaaaagtttgctgcaggggtggggccctcatggggaacttctgctaggacagtgtggaagggaattgtggggtcagagcccccatacagagtccctactggggcactgcctagtggagctgagagaagagggccaccaccctccaggccccagaatggcagatctgacaacagcttgtactgtgtgcctggaaaatccacagacactcaatgccagcccgtgaaagcagctgggagggagggtttaccttgcaaagccacaggggtggagctatccaagaccataggaacccacctcttgcatcagtgtgacctggatgtgagatctggagtcaaaggagatcatttcggagctttaacatttgactgccccgctggatttcggacttgcatgggccctgtaacccctttgttttggccaatttctcccatttggaatggctatatttactcaatacctgtacccccattatacctaggaagtaaatag

SEQ ID NO: 16413 - DNA, 1560 bp, Homo sapiens
  SIMILAR (521)..(2254): 911254mologous to Cricetulus longicaudatus N-ethylmaleimide sensitive fusion protein,accession number X15652,Smith-Waterman Score=2615.
caagtgccaggatgcataattggcatagacatacttagcagctggcagaacccccacattggctccttgactggtagggtgagggctattatggtgggaaaggccaaatggaagccattagagctgcctctacctagaaaaatagtaaatcaaaaacaatatcacatccttggagggactgtggaaattagtgccaccattaaggacttgaaagacacagaggcggtgactcccaccacatccccattcaactctcccatttggcctgtgcagaagacagatggatcttggagaatgacagtggattattgtaaacttaaccaagtggtgactccaattgcagctgctgtaccagatgtggttcattgcttgagcaaatcaacacatctcctggtacctggtttgagtggagtccaaaagaaggctctgcagcaggttcaggctgctgtgcaagctgctctgccatttgggccatatgacccagcagatccaatggtgcttgaggtgtcagtggcagatagggatgctatttggagcctttggaacgccgccattggtgaatcacagcggaggcctctaggattttggagcaaggctctcctgtcttctgcagataactactctccttttgagaggcagctcttggcctcttactgggctttggtggaaactgaacgtttgacggtgggtcatcaagtcaccctgcgacctgaactgcctatcatgaattgggtgctttctgacccatctagccataaagttagtggtgcacagcagcattggaagtgtgctgtgcacacttcatcaaatggaagtggtatatacgtgattgggctcaagcaggtcttgaagggacaagttgattatattggacctcttccatcatggaaagggcagaggtttgtcctccttggaatagacacttactctggatatgggtttgcctatcctgtgtgcaatgcttctgccaagactaccatccatggactcacggaatgccttatccactgttatggtattccacacagcattgcctctgacgaaggcactcactttatggctaaagaagtgcagcagtgggcatacgctcatggaattccgcggatcctctccctatattggcccagggcttcccggtatcaacagggacaccaggatttatttattctgcgaagtgatcttccgtcacaggtatttattcgcgataagctcatggagcggcgtaaccgtcgcacaggaaggacagagaaagcgcggatctgggaagtgacggacagaacggtcaggacctggattggggaggcggttgccgccgctgctgctgacggtgtgacgttctctgttccggtcacaccacatacgttccgccattcctatgcgatgcacatgctgtatgccggtataccgctgaaagttctgcaaagcctgatgggacataagtccatcagttcaacggaagtctacacgaaggtttttgcgctggatgtggctgcccggcaccgggtgcagtttgcgatgccggagtctgatgcggttgcgatgctgaaacaattatcctga

SEQ ID NO: 16414 - DNA, 562 bp, Homo sapiens
  SIMILAR (35)..(535): 431254mologous to Mus musculus MUS MUSCULUS GENOMIC DNA CONTAINING N ALLELE OF FV1 GENE,accession number A67510,Smith- Waterman Score=297.
aataataaggagggcggtcttccgttggttttggggttaaaggagttggggccttaatatgattagaccccaaaatactaaggactctaattctaattgtttggagaagactgatagcccttggtgtgaactgtttaaagagttatacaaaataaatgcctttgacactcctgattcattgctcatgagaggcaacgagtttagtgaccctatacatcatacctttgaccatatgtggagaactaaggaacataatgaagctggttggttgctcctaagttcagtggataaagtgatgaaagaaaatgatgaactcggggattctatctcccagcttcagaagcagatactgagcctcaaatctgccaagattgccctgagtgagagtctaatctcctgtagagaaagaactgaaattgtggaaaaatagacataagctcttatcatgttagtggctgacctgcaatgaaaggtgcatgcacagcctcaccatgcacagcctcgccaagtatctactgttaaagtgagggccttggattggttttgccgggaagtcagggac

SEQ ID NO: 16415 - DNA, 1026 bp, Homo sapiens
  SIMILAR (229)..(522): 791254mologous to Mus musculus Pro-Pol-dUTPase polyprotein,accession number Y12713,Smith-Waterman Score=412.
atggaccatatgtggagaaccaatgaacataatgaagctgatcagttgctcctaaggtcagtggacaaagtgatgaaagaaaatgataaactcagggattctgtctcccagcttcagaagcagatactgagcctcaaatctgctaagattgccatgagtgagagtcttatctcccacagagaaagagctgaaattgtggaaaaactgacacaagctcttatcatgggaactgtgtactggggaaagggaaatgatcagacatttcagggactactggacactggctctgagctgacgttgattccaggggacccaaaacatcattgtggtcctccaggaccaaaagtaagggcttatggagatcaggtaattaacggagttttggctcaggtccaacttatagtgggtccagtgggcccctggactcatcctgtggtcatttccccagtgccagaatgcgtaattggcatagccatacttaacagctggcagaacccccacattggctccctgactggtagggcccaccagaagcaatttgccttcagctggcaaggccagcaatatacctttactgtcctacctcaaagatatatcaactttccagctttgtgtcataaaacagcaaaaagacacacagctaggaggaaactggccagcatctgcaatgccaggatccagacaagcccctgcagacccaggaactacaactgccacaacatgaggccaaacccagactctagaccagactctgtgttctcagagtccagaagacaaagggtccaggattgccctaacagacccaggatccaggcccatcccagtagacccaaataccaggccagttccccatgcactgaggatccagtaccatccctgaagacccatgctcaaggctcatctcagtacttggccagccctttcagactcaggctcaagggccaccccaagagcaagccagcccccatggacccaggcttcaggctagctcctgtgaatacagattccaggcccaaccccacccag

SEQ ID NO: 16416 - DNA, 1886 bp, Homo sapiens
  SIMILAR (1969)..(2175): 981254mologous to Mus musculus SKD2,accession number U10120,Smith-Waterman Score=357.
atgcggaggcttgcattgtacattttagctccagatcgactgcaagaacaaaccagcaatcctgagaggacccacagaccctctgaaggaagcggactgctactgcaggacttgggagagaccccaaatacttctacccaaatgggaaggaaccagaaaaccaatcctggtaatatgacaaaacaaggctcatcaacatgcccctcaaatcacactacttcaccagcaatgaatccaaaccaagaagaaatacctgatttacctgaaaaagaattcaggagtttagttattaagctaatcagggagagaccagagaaagctatgtttgtggccccaccatctactaatctgtgtaagacacttgagggctaccctgaacatttccttttattcccctctcctcattcaatgtactaccaaagttcagtggacaaagtgatgaaagaaaatgatgaactcagggattctttctccaagcttcagaagcagatactgagcctcaaatctgctaagattgccctgagtgagagtcttatctcctgtagagaaagagctgaaattgttgaaaagcagacacaagctcttatcatatctaatggtgggaacagcagtcactcaactacaaaatgtacgtacaatgggaataattggatcctgaggtggcatgggccaagtggcagcactcaactgtcaaaggcccacagaagcaatttgccttcagctggcaaggccagcaatatacctttacaggcctacctcagggatatatcaactctctgtctttgtgttataatcttattccgagagaccttgatcgtttttcgcttccacaagatatcacactggtccattacattgatgacattatgctgactggatccagtgagcaagaattagcatacacactggacttactggtgagacgtttgtgtgccaaaggatgggaaataaatctgactgaaattcaggaagcttctacctcagtaaaatttctacgggtccagtggtgtggggcctgtcaagatattccttctaagatgaaggataagttactgcatttgttccctcctacaaccaagaaaaaggcatccctatttggatttcgaaggcagtgcattcctcatttggagtgtggtccagaacaagagaaggctctgcaacaggcgcaggctgctgtgcaagctgctgtgccacttgagcgatatgacccagcagatccaatggttcttgaggctgacctggctatggccactgctgagtgcccaatttgccagcagcggagaccaacactgagccctccatatggcaccgttccttggggtggtcagccagctacctggtggcaagttgattatattggatatcttccatcatggaaagggcagagttttgttctcactggaatagacacttactccggatatgggtttgcctatcctgcacataatgctattgccaagactaccatctgtgaactcacaaaatgccttatccaccgtcatgccaggattcacaggtccaggaatcaaggggtggaagtggcaccactcaccgtcacccctagtgatccattagcaaaatttttgcttcctgttcccatgacattacgttctgctggcctagaggtcttagttccagaggaaggaaccctgccaccaggagacatgacaatgattccattaaactggaagttaaggttgccaactggacactttgggctcctgctacttttaagtcaacaagctaagaagggagttacagtgttggctggggtgattgacccagactatcaagatgaaatcagtctactactccataacagagaactgctggatgaagagatcccctgtcaaaagaaggaaaatcttagagctggaggaggctga

SEQ ID NO: 16417 - DNA, 405 bp, Homo sapiens; identical to SEQ ID NO: 2148
  SIMILAR (97)..(363): 401254mologous to Homo sapiens PRO2221,accession number AF116695,Smith-Waterman Score=124.

SEQ ID NO: 16418 - DNA, 396 bp, Homo sapiens
  SIMILAR (61)..(261): 801254mologous to Homo sapiens CGI-27 protein,accession number AF132961,Smith-Waterman Score=275.
cccacgcgtccgggagagcggagcgtgcacgttgagattcctcggcgggtaggcagcggtgctgggcatgctcagtgggcaggacccgttagagtggcgagaccgcagctgaatgcacagctagaaggttggctttcacaagtacagtctacaaaaagacctgctagagccattattgccccccatgcaggatatacgtactgtgggtcttgtgctgcccatgcttataaacaagtggatccgtctattacgtcaaaggttccgttacagttactatgatgaatcccagggggagatttatagatccattgaacatctagataaaatgggtatgagtattatagaacaattagaccctgtatcttttagcaattacttgaagaaataccataatag

SEQ ID NO: 16419 - DNA, 358 bp, Homo sapiens
  SIMILAR (179)..(358): 1001254mologous to Homo sapiens CGI-27 protein,accession number AF132961,Smith-Waterman Score=321.
ggcacgaggcaccataggcggcacaggcaccaagatgtccaaccgagtggtctgccgagaagccagtcacgccgggagctggtacacagcctcaggaccgcagctgaatgcacagctagaaggttggctttcacaagtacagtctacaaaaagacctgctagagccattattgccccccggagaattttcatccttgggccttctcatcatgtgcccctctctcgatgtgcactttccagtgtggatatatataggacacctctgtatgaccttcgtattgaccaaaagatttacggagaactgtggaagacaggaatgtttgaacgcatgtctctgcagacagatgaagatgaacac

SEQ ID NO: 16420 - DNA, 769 bp, Homo sapiens
  SIMILAR (442)..(891): 921254mologous to Xenopus laevis bicaudal-C,accession number AF224746,Smith-Waterman Score=715.
ctcctcctgggctgggcccgcggtgtctcgtcccctcgcggagccgctcctgccgccgccgccgccgcctcctcattcatcctcgtgcaccataggcggcacaggcaccaagatgtccaaccgagtggtctgccgagaagccagtcacgccgggagctggtacacagcctcaggaccgcagctgaatgcacagctagaaggttggctttcacaagtacagtctacaaaaagacctgctagagccattattgccccccatgcaggatatacgtactgtgggtcttgtgctgcccatgcttataaacaagtggatccgtctattacccggagaattttcatccttgggccttctcatcatgtgcccctctctcgatgtgcactttccagtgtggatatatataggacacctctgtatgaccttcgtattgaccaaaagatttacggagaactgtggaagacaggaatgtttgaacgcatgtctctgcagacagatgaagatgaacacagtattgaaatgcatttgccttatacagctaaagccatggaaagccataaggatgagtttaccattattcctgtactggttggagctctgagtgagtcaaaagaacaggaattcggaaaactcttcagtaaatatctagcggatcctagtaatcctcttgtgggttcttctgatttctgccattggggtcaaagggtcccgtacagttactatgatgaatcccagggggagaattatagatccattgaacatctagataaaatg

SEQ ID NO: 16421 - DNA, 1020 bp, Homo sapiens
  SIMILAR (577)..(248): 531254mologous to Homo sapiens HSPC300,accession number AF161418,Smith-Waterman Score=213.
acaagaattcgagatgcattgggtgtggggacccaaaaaggctgtcacactgactcttcactgagctgttcagcacttaagccatccgtggatgggaaagctaaaagagcattgtttgtaacacatgctttctggggctccagaggtcgcgggcaactcctagatgctgctgtgggctggctggtgttcaagtttcttttagagctatatactggaatgtctgcagatgaaatgatatgctattcaggtaaaagtactgagttaagtggaaagttggttttaaactatgttttgactgtgatggagggagagaggagcagaggagtgaggccacagcaaggaaatgactgtgatgatggatttttgagtctcagactaggaccgcagctgaatgcacagctagaaggttggctttcacaagtacagtctacaaaaagacctgctagagccattattgcccctgtgggttggacttcagcgactcacatccaaagaacagaatacggcaaaaggaagatagcaactttacaacagacaaacctggcaaacacttactaccttaaccaaacgatcaaaatgcagattctgcccaagaagcccctgcattgcagagggactggagatctgtatgatctgtttatttcgcaattgacaggccataaggatgagtttaccattattcctgtactggttggagctctgagtgagtcaaaagaacaggaattcggaaaactcttcagtaaatatctagcggatcctagtaatctctttgtggtttcttctgatttctgccattgggtttacggagaactgtggaagacaggaatgtttgaacgcatgtctctgcagacagatgaagatgaacacagtattgaaatgcatttgccttatacagctaaagccatggaaaggtgccctgttgatgtagtgagcaggggtcctcagctggtccgtggcctgttaggaactggactgtgcaacaggatgcgaacggtgggccagcgagcattacccacctga

SEQ ID NO: 16422 - DNA, 294 bp, Homo sapiens
  SIMILAR (21)..(200): 381254mologous to Arabidopsis thaliana putative protein,accession number AL031804,Smith-Waterman Score=81.
tgaggtaggaacttttattatcacaagtccagagaggtaaagttacttggcccatgccaaacagcaaggcaattggcttgtcaaggatgtgttctaaggtttgtctgactgcagagcccccaccctcactttccagtgtgtgtgagggggtcaggaacagaggagggcttcatccaggacctgtctttggggcttgttgttctcagctggcagcagaaatcgctggcccaggacagtgcccacacgggcagagtacatgtggtccccaagcacagggcagagctgtagtaccat

SEQ ID NO: 16423 - DNA, 1590 bp, Homo sapiens
  SIMILAR (693)..(85): 841254mologous to Escherichia coli cobalamin-independent methionine synthase,accession number M87625,Smith-Waterman Score= 887.
atgtcccatcaggctttgcagaactttcagcggtataccggcatacagcatgtgcatcgcataggaatggcggaacgtatgtggtgtgaccggaacagagaacgtcacaccgtcagcagcagcggcggcaaccgcctccccaatccagaacattttgaggcatttcagtcagttgctcaatgtacctataaccagaccgttcagctggatattacggcctttttaaagaccgtaaagaaaaataagcacaagttttatccggcctttattcacattcttgtccgcctgatgaatgctcatccggagttccgtatggcaatgaaggacgggtttattgagaatatgtttttcgtctcagccaatccctgggtgagtttcaccagttttgatttaaacgtggccaatatggacaacttcttcgcccccgatttcaccatgggcaaatattatacgcaaggcgacaaggtgctgatgccgctggcgattcaggttcatcatgccgtttgtgatggcttccatgtcggcagaatgcttaatgaattacaacagtactgcgatgagtggcagggcggggcaattactgctctaattcaccaaggggagtcaaagaaacggcacctctcaccagaactaacccttgtaattgaggtagattcatttactccatttcccatgtcgtactgcccccagactcttgtacttttttccccctatggtactgaaagctttagtctcatcaacaaactatacatccttaccacgtctgaggattccccagtcggtgaggtccctctgtactttcataccaaagtcactgtcaagggtctccatgacacctctatgcaggaagagctgaggttaacaagcctacccttgtcaagaacttctggaacctccttgggagtggggctgagcagggtatcccctggcctgggagcagaggacttctggctgactgctgcccgcaacgttctcaagctggtggtgaagtctgagtggaagtcataccctattcaggcagtagaggaagaggcctcaggaataacagaggcaagggactggccctcccacattcaggtgtcctgtagcccaggggtcccaatccgtgagccgcagaccagtaactgtctgtggtttgtgagaaacgaggccacacagcaggagatgaggagcctctgcctagaggagtggtccatgcatgcattctcacagaaaatgaaaggaattgaaattaagagaagggagagattgaagtgtggcgccaagattgaaaggagaaagaggttgagggatagtgtgcgactgctgcgacaagaccccatcgaatgccttttctcttttatctgttcctccaacaacaacatcgcccgcatcactggcatggtggagcggctgtgccaggcttttggacctcggctcatccagcttgatgatgtcacctaccatggcttccccagcctgcaggccctggctggaaacgccaaactgttttccataggaactacaccattttacattctcaccagcagtgtacgagggttccagtttcttcgcatcctcaccaatactcattattattattatttttaa

SEQ ID NO: 16424 - DNA, 1230 bp, Homo sapiens
  SIMILAR (169)..(690): 931254mologous to Homo sapiens putative p150,accession number U93563,Smith-Waterman Score=820.
atggtccgtccctgcctgagacaagcagcccaagaaacaggagaaaaaccagtgttggtgtccccagagtttgtggatgaagctctgtgtgcgtgcgaggagtaccttagcaacttggcccacatggacatcgacaaggacctggaggccccgctgtacctcacccccgagggctggtccctcttcctccagcgctactaccaagtggtccaccccaccccacaccggttccactcttttcccaggtacaacgtggactccaaaaccaacatctccaaaccggtgagcaaacgtttcctcgagggttggcggagcgcacaggaggcacttagatgtgttcaacgactctcaagtaacaccggccaagaaccgcacttgcagcagctgtcggatggattaggcagcacagacagcagcagggactggagagaacatgggaccaagcaaccctcaaactggatggtggcggagctgaacaacgcttcagaggtcacctgtccacatcccagcggctcagacctctgcctaggaggtggtgtaccaggcaagaagtgtgggaccatattgctgactgcagaagagcttagcaattgtcgggacattgccaccatgcagctgtgtgcaaacaagctggacaagaaggacttctttgggaaatcagaccccttccttgtgttctacaggagcaatgaggatggcacgttcaccatctgccacaagacagaggttgtgaaaaacacgctgaatcctgtgtggcagcccttcagcatccctgtgcgggctctgtgcaatggagactatgacagaacggtgaagattgatgtgtacgactgggaccgggatggaagccacgatttcattggtgagttcaccaccagctaccgggagctgagcaaggcccagaaccagttcacagtatatgaggttcttaaccctcggaagaaatgtaagaagaagaaatatgtcaactcaggaactgtgacgctgctctccttctctgtggactctgaattcacttttgttgattacatcaagggagggacacagctgaacttcacagtagccattgacttcacggcttccaatggtgagacacggatgagtgaaaaagtcggagccctcaaccctgtcgctgatgagagatttaacaatgtccagaaatgcactaatcagaagctgctgcagcaacaacagctaacaatgattaaaaaccactgggcttgccagtaa

SEQ ID NO: 16425 - DNA, 2700 bp, Homo sapiens
  SIMILAR (1)..(1935): 901254mologous to Rattus norvegicus myosin I,accession number X71997,Smith-Waterman Score=2995.
atgggggtggactttgatgtgaagactttctgccacaacttgcgggcgactaagccaccatacgagtgcccggtggagacctgccgaaaggtctacaagagttacagtggtattgagtaccacctgtaccactatgaccacgacaacccaccacccccacaacaaactccactccgcaagcacaagaaaaaggggcgccagtcacgcccagccaacaagcagtcacccagcccctcagaggtctcacagtcaccaggccgtgaggtgatgagctatgcacaggcccagcgcatggtggaggtggacttgcatggccgcgtccaccgcatcagcatctttgacaacctggatgtggtgtcagaggatgaggaagcccccgaggaggcccctgagaatggcagcaacaaggagaacactgagacaccagctgctactcccaagtcaggcaaacataagaacaaggagaagcgcaaggactccaaccatcaccaccaccacaatgtttctgcgagcaccactcccaagctgccagaggtggtctatcgggagctggaacaggacacccctgatgccccaccccggccaacttcctattaccggtacatcgagaagtctgcagaggagctggacgaggaagtagagtatgacatggacgaggaggactacatctggctggatatcatgaatgagcgtcggaagacagagggtgtaagtcccatcccgcaggagatctttgagtacctaatggaccgactggagaaggagtcgtactttgagagtcataataaaggcgaccctaatgcgctagtggacgaggatgctgtttgctgtatctgcaatgatggtgagtgccagaacagcaatgtcatcctcttctgtgacatgtgcaacctggccgtgcaccaggagtgctacggtgtcccctatatccctgagggccagtggctgtgccgccgttgcctgcagtcaccctctcgtgctgtggattgtgccctgtgccccaacaagggcggtgccttcaagcagacagatgacgggcgctgggcccatgtggtgtgtgccttgtggatccctgaggtctgcttcgccaacacggtcttcctagagcctattgacagcattgagcacatcccaccagctcgctggaagctcacctgctacatttgcaaacaacggggctcaggggcctgcatccagtgccacaaggccaactgttacacagctttccatgtgacatgcgcccagcaggctggcctttacatgaagatggagcctgtgcgggagacaggcgccaacggcacctctttcagtgtccgcaagacagcctactgcgacatccacacgcctccaggttcagcacgccgactgcctgccctgtcccacagcgagggtgaggaggatgaagatgaggaggaggatgagggtaagggctggagctcagagaaagtcaagaaggccaaggccaagtcccggatcaaaatgaagaaggcacggaagatcctggcagagaagcgggcagcagcacctgtggtgtcagtgccctgcatcccaccacacaggcttagtaaaatcaccaaccgcctgaccatccaaaggaagagccagttcatgcagaggctgcacagctactggacactgaagcggcagtcacggaatggggtcccattgctacgtcgcctgcagacacacctgcaatctcagaggaactgtgaccaagttgggagagattctgaggataagaactgggcccttaaagaacagctcaagtcctggcagcggctccggcatgacttggagcgagctcggctgctcgtggaattgatccgcaagcgggaaaaactcaaaagggagacggacattgccaccatgcagctgtgtgcaaacaagctggacaagaaggacttctttgggaaatcagaccccttccttgtgttctacaggagcaatgaggatggcacgttcaccatctgccacaagacagaggttgtgaaaaacacgctgaatcctgtgtggcagcccttcagcatccctgtgcgggctctgtgcaatggagactatgacagaacggtgaagattgatgtgtacgactgggaccgggatggaagccacgatttcattggtgagttcaccaccagctaccgggagctgagcaaggcccagaaccagttcacagtatatgaggttcttaaccctcggaagaaatgtaagaagaagaaatatgtcaactcaggaactgtgacgctgctctccttctctgtggactctgaattcacttttgttgattacatcaagggagggacacagctgaacttcacagtagccattgacttcacggcttccaatggtgagacacggatgagtgaaaaagtcggagggaatcctctgcagcctacctccctgcactacatgagtccctaccagctcagcgcctatgccatggccctcaaggcagtgggagagatcatccaggactatgacagtgataagctcttcccagcttatggctttggggccaagctgcccccagagggacggatctcccaccagttccccctgaacaacaatgatgaggaccccaactgtgcgggcatcgagggtgtgctggagagctatttccagagcctgcgcacagtgcagctctatgggcccacctactttgctcctgtcatcaaccaagtggccagccttccaagtagctaa

SEQ ID NO: 16426 - DNA, 734 bp, Homo sapiens
  SIMILAR (187)..(546): 291254mologous to Homo sapiens Human normal uterus tissue derived protein 21,accession number Y59858,Smith-Waterman Score=95.
gcctcgagtgacaggtcctgggacagtgggagccaagggcaagtgctagagttgcagtgaatttagagcaaagcctcagtctaagtaacacatctcaaggcatgtagggtatctatctatgttcagtgcgggcctcacgttaattgaccagccttatgaacaatggcggctgtggcatgcgtcaggttacctgccttgatatgggatcgtgacaggcccctccctatgtgcaggagacaagcagcccaagaaacaggagaaaaacccagtgttggtgtccccagagtttgtggatgaagctctgtgtgcgtgcgaggagtaccttagcaacttggcccacatggacatcgacaaggacctggaggccccgctgtacctcaacccccgagggctggtccctcttcctccagcgttactaccaagtggtccagtgagtcccctgcagctgggactttgggctgtgggcaggtgcttagggatagaccctttctgtctcgtgcagcccctaccccttccccaagcctcccgctcgtttaccccgctgttttgctcaggaaccctcgaggactcccactgcctccgtgatagggtctgggccacttttcttggttcttggcatagcatagtcactaagagcatggactgtgccaccaaatggacagcacattacccaaagtgtgtgttgtgtggatgttaattctacaggaagtaaatagattttatgaaaaaaaaaa

SEQ ID NO: 16427 - DNA, 960 bp, Homo sapiens
  SIMILAR (994)..(2): 681254mologous to Homo sapiens putative p150,accession number U93572,Smith-Waterman Score=982.
atgcagctgtgtgcaaacaagctggacaagaaggacttctttgggaaatcagaccccttccttgtgttctacaggagcaatgaggatggcacgttcaccatctgccacaagacagaggttgtgaaaaacacgctgaatcctgtgtggcagcccttcagcatccctgtgcgggctctgtgcaatggagactatgacaggacacagctgaacttcacagtagccattgacttcacggcttccaatggtgagacacggatgagtgaaaaagtcggagggaatcctctgcagcctacctccctgcactacatgagtccctaccagctcagcgcctatgccatggccctcaaggcagtgggagagatcatccaggactatgacagtgataagctcttcccagcttatggctttggggccaagctgcccccagagggacggatctcccaccagttccccctgaacaacaatgatgaggaccccaactgtgcgggcatcgagggtgtgctggagagctatttccagagcctgcgcacagtgcagctctatgggcccacctactttgctcctgtcatcaaccaagtggccaggtgctggaggaacagtggcaagcaagacaaagcctctggattcggggagcttatgtctggagccctggctgtggtcggggggcagtgggccatgctgggggcagtggaaggccccaggtggaagcaggcggaggacattagagacatctacgacttccgagatgttctgggcaccgcgccgttcaagaggctggtcccaggcacctattcacagggcgcgtcggatacccaccccctcggccccccgcacacgccggtcctcgacccctttccgcaggatggtttcccggtcctctggcgaggatcctccaaggcgtctcacatgaaccggctcagaaacgccaaaatctacgtggagagagctgtcaaggtctaa

SEQ ID NO: 16428 - DNA, 2197 bp, Homo sapiens
  SIMILAR (1484)..(1359): 381254mologous to Homo sapiens Ig heavy chain (VH4) V region (VDJ),accession number Z30669,Smith-Waterman Score=71.
atgaggacaacaagaacactaactctatggctgtggtacatcgagaagtctgcagaggagctggacgaggaagtagagtatgacatggacgaggaggactacatctggctggatatcatgaatgagcgtcggaagacagagggtgtaagtcccatcccgcaggagatctttgagtacctaatggaccgactggagaaggagtcgtactttgagagtcataataaaggcgaccctaatgcgctagtggacgaggatgctgtttgctgtatctgcaatgatggtgagtgccagaacagcaatgtcatcctcttctgtgacatgtgcaacctggccgtgcaccaggagtgctacggtgtcccctatatccctgagggccagtggctgtgccgccgttgcctgcagtcaccctctcgtgctgtggattgtgccctgtgccccaacaagggcggtgccttcaagcagacagatgacgggcgctgggcccatgtggtctgcttcgccaacacggtcttcctagagcctattgacagcattgagcacatcccaccagctcgctggaagctcacctgctacatttgcaaacaacggggctcaggggcctgcatccagtgccacaaggccaactgttacacagctttccatgtgacatgcgcccagcaggctggcctttacatgaagatggagcctgtgcgggagacaggcgccaacggcacctctttcagtgtccgcaagacagcctactgcgacatccacacgcctccaggttcagcacgccgactgcctgccctgtcccacagcgagggtgaggaggatgaagatgaggaggaggatgagggtaagggctggagctcagagaaagtcaagaaggccaaggccaagtcccggatcaaaatgaagaaggcacggaagatcctggcagagaagcgggcagcagcacctgtggtgtcagtgccctgcatcccaccacacaggcttagtaaaatcaccaaccgcctgaccatccaaaggaagagccagttcatgcagaggctgcacagctactggacactgaagcggcagtcacggaatggggtcccattgctacgtcgcctgcagacacacctgcaatctcagaggaactgtgaccaagttgggagagattctgaggataagaactgggcccttaaagaacagctcaagtcctggcagcggctccggcatgacttggagcgagctcggctgctcgtggaattgatccgcaagcgggaaaaactcaaaagggagacggggagaaatggatttctctctaacgggagaaatggatgtcagaaaataaatgaacaagttactagtggaaaaccaggagagctgacgttgttctcagtgctgccagagctgagccagtccctagggctcagggagcaggagcttcaggttgtccgagcatctgggaaagaaagctctgggcttgtactcctctccagctgtccccagacagctagtcgcctccagaagtacttcacccatgcacggagagcccaaaggcccacagccacctactgtgctgtcactgatgggatcccagctgcttctgaggggaagatccaggctgccctgaaactggaacacattgatggggtcaatctcacagttccagtgaaggccccatcccgaaaggacatcctggaaggtgtcaagaagactctcagtcactttcgtgtggtagccacaggctctggctgtgccctggtccagctgcagccactgacagtgttctccagtcaactacaggtgcacatggtactacagctctgccctgtgcttggggaccacatgtactctgcccgtgtgggcactgtcctggatgaagccctcctcagacgcctccacctgaccccctcccaggctgcccagctgcccttgcacctccacctacatcggctccttctcccaggcaccagggccagggacacccctgttgagctcctggcaccactgcccccttatttctccaggaccctacagtgcctggggctccgcttacaatagtcctccctctgttcctgaccccctcacacacactggaaagggaaggtggggggctctgcagtcagacaaacctaagatcacatcctggacaggccacttgcttgctgtgtggcattgggcaagtaactttacctctctggacttgtgataataaaagttcctacctcaa

SEQ ID NO: 16429 - DNA, 1844 bp, Homo sapiens
  SIMILAR (261)..(443): 1001254mologous to Homo sapiens Human secreted protein encoded by gene 21,accession number Y76144,Smith-Waterman Score= 306.
aagttctaaactcaggctctagagtcagaaaaggtagagtcaggttctggatccaaaatggggcaaggcatgatcaggttctggaaccagaacaggcctcaagcctaggggctgagcagggtatcccctggcctgggagcagaggacttctggctgactgctgcccgcaacgttctcaagctggtggtgaagtctgagtggaagtcataccctattcaggcagtagaggaagaggcctcaggagacaagcagcccaagaaacaggagaaaaacccagtgttggtgtccccagagtttgtggatgaagcctttctgtgcgtgcgaggagtaccttaacaacttggcccacatggacatcgacaaggacctggaggccccgctgtacctcacccccgagggctggtccctcttcctccagcgctactaccaagtggtccagcatcagaggcaaccccgcggctcctgccaacggtcggggcccctcggggaccagcccttcgcggggctgctgccaaaaaaacctcagtcgggaggagctggttgatgcgctgcgggcagccgtggtggaccggaaaggaaaaccaggagagctgacgttgttctcagtgctgccagagctgagccagtccctagggctcagggagcaggagcttcaggttgtccgagcatctgggaaagaaagctctgggcttgtactcctctccagctgtccccagacagctagtcgcctccagaagtacttcacccatgcacggagagcccaaaggcccacagccacctactgtgctgtcactgatgggatcccagctgcttctgaggggaagatccaggctgccctgaaactggaacacattgatggggtcaatctcacagttccagtgaaggccccatcccgaaaggacatcctggaaggtgtcaagaagactctcagtcactttcgtgtggtagccacaggctctggctgtgccctggtccagctgcagccactgacagtgttctccagtcaactacaggtgcacatggtactacagctctgccctgtgcttggggaccacatgtactctgcccgtgtgggcactgtcctgggccagcgatttctgctgccagctgagaacaacaagccccaaagacaggacattgccaccatgcagctgtgtgcaaacaagctggacaagaaggacttctttgggaaatcagaccccttccttgtgttctacaggagcaatgaggatggcacgttcaccatctgccacaagacagaggttgtgaaaaacacgctgaatcctgtgtggcagcccttcagcatccctgtgcgggctctgtgcaatggagactatgacagaacggtgaagattgatgtgtacgactgggaccgggatggaagccacgatttcattggtgagttcaccaccagctaccgggagctgagcaaggcccagaaccagttcacagtatatgaggttcttaaccctcggaagaaatgtaagaagaagaaatatgtcaactcaggaactgtgacgctgctctccttctctgtggactctgaattcacttttgttgattacatcaagggagggacacagctgaacttcacagtagccattgacttcacggcttccaatgggaatcctctgcagcctacctccctgcactacatgagtccctaccagctcagcgcctatgccatggccctcaaggcagtgggagagatcatccaggactatgacagtgataagctcttcccagcttatggctttggggccaagctgcccccagagggacggatctcccaccagttccccctgaacaacaatgatgaggaccccaactgtgcgggcatcgag

SEQ ID NO: 16430 - DNA, 189 bp, Homo sapiens
  SIMILAR (71)..(187): 411254mologous to Human endogenous retrovirus K env protein,accession number Y17832,Smith-Waterman Score=73.
tgaccttctacgccaatcttggcacgagggccaaaggaatcccaaaaatgactggtaatataattctggctgcctttatggtagtcagtgcagcgtctgcagatgcctctaaggagtccgaaaccaagtccgaagtcaacaacaagcaatgatggcgatggcgattctagttaataaaaaggggggaga

SEQ ID NO: 16431 - DNA, 2037 bp, Homo sapiens
  SIMILAR (1963)..(2235): 351254mologous to Homo sapiens DNA cytosine methyltransferase 3 alpha,accession number AF067972,Smith-Waterman Score=143.
atgaacgattcacgaattgggcagcccccagaatcacagcagattcagagagactccagcacaggcacatggtgggagatttatggacagcaaaaggaaagtgagcctccctgccgtcctgcggcacaaaatcagctacagcccgctgatgttgctcagcaagcagctgatctcgcggcaaattctcgctctgtgttaatatcttgtttttctgcagtacaaaaagcagttgcagcagccggtttagttattgccccagaaaaaatccaaacttcttctccttatcactatttaggaatgcagctagaagacaaggacaggccttggtggaacgagccaataaaacactcaaagatcaacttcgaaaacaggacactaaaacagagggatgctgccactcctcatgctcagttaaatctggctccttttacactaaatttcttaaacctagcaagaaatcaaccttttacagtggcagaacaacatttcactggaagtaaatttgatccacaaaaaggaatgcggatgaaacgttcccagaaacaaaaggcaaagacccctcaaaaaccgaggaggaaatttcgcctcctgacacataaacttcatgacctcgacattgagacaaaatctcgctgtgtgacctacaacaccactcgttcaactccaccaacatggggtcaaataaaggtcttatcccatcacacagaaaatttattaaaagaaaaaggaatcccaaaaacgaccagtaatataattctggctgtctttatggtagtcagtgcagcagtaagtataccaccagttggggcaactcaaaattatacctactgggcatatgttccttttccccctttaatttggtctgtctcctggatggactcctcagtagaagtttacactaataatagtgcattcatgccggtccctaatgatgataggtttccagctcaaccggaagaagaagtctgcagatgcctccaaggagtccggaaacaagtccaaagtcaacgacaagcaatgatggtgatggcgatcctagttaataaaaagggggcagatgtgggtggcaagccaatcaggattgctacacttgtctatttaccatcaaaattgggcaagagagcaccaagaggcactaaagtagatcttctgagttcagtgcatgggtatggggtgccacctaacatcacgcttaatcagagacacacacaggagacaaaggaattggctcatggccgcaccagcaggcaagaaaaggagtcaccatcatggcttggtaatgctgatcacggatttgaccccgaccatcaggaggacgtagaaggagataggcctactgatacatatgataggggcaggaaggaatatgctggcactgccctcactctcagccatggcagggtccctgaatgtgaaggcgagcaggccagcgcacaggcacagagttcagcagtgaaggtgcagaagtggtttgtgtcaagccatagaaaagagaagcagcaaacagtggtcaacaccctattccaaagtctggttccagaaccagcaacatcaggatgctctggcctctacatagttcaagaccgaaagaaaacactccattttgcccacaaactacaggtctgctgggcattgcagggttgtgggactgagacacagttgtctcaacaaccacttctatgcacttgggagagggatggggtagcgattgtgagcctttccattgaactcagtgctgccctgtcacagtggaaagcagaacggggctgtactcagcttatgcctgcacgtggagcaaacattccgggcaggccctcgccagaggggaattgccatcccagcagtcagagcttgaattccaaaacactgaggttccaagcaaagagaaattgcaactctacacctcatgcaagcctaaacccaaaaggtactccttctgtagcaggggatgcagtcaccctgaagtgttccaaaaaggctacctgtaccagtgccagctctgatgagggtggcaggggagtgatgtacattctgtga

SEQ ID NO: 16432 - DNA, 855 bp, Homo sapiens
  SIMILAR (667)..(1230): 661254mologous to Homo sapiens p40,accession number U93566,Smith-Waterman Score=636.
atggatcccttgcacatgtgccttccgtggcatgaagactgtcagcacctggcaggactggagcgactagtgaaacaccagacaccagcccctcggccaaggtctcgcccagcacctccttctgaaccctgccctgccccggaggctgctggctccagtgcaggcctgactgtcacgggcacctacagcataaccctgccagtgacctcgcagcagctgcagcaccaagctctccaggcagcgccctggcgcagcttgcagacggcctattgtgggacttcaccttttgatcccgtgggccaattttccctaataaactccttttcatatagacatgtatcttacatttctgtccctctggagaaccctgacttatactccggccaaccacagatcagtgagaaagagaagaaaatgcttgttgctgatgtttgtgtagtcatgacagcctcgcggaaagccttgggagcatggggcgtcctaatcatcctgacaactccgggtggagggtacaccgccgtgctccatgccatcgggacagagctgggatatgcaggccatggcgaacaagcacacagcacaaacctgtgccgcactgtccagggctccctgctgctgccaggagcaattcctggagtccagcatgtggaggtagcagggcctctgctggctttgggactggaccagcagcactgcagccctagtccaatcatgagaaaaatatccgacagtctcaatcgagggatacgctacgaaatgctcgaccagccctcctcaaaactgtccaggtcatcaaaacaaggaaacaaagggaactgccacagccaccaggagctaaggaggcctgacaagtaa

SEQ ID NO: 16433 - DNA, 837 bp, Homo sapiens
  SIMILAR (742)..(1041): 731254mologous to Homo sapiens PRO2221,accession number AF116695,Smith-Waterman Score=357.
cgcttggaatcacaaggaggaagaagaaagagacagatggtttcaacccatgaggaaagagaaagggtcagatactttcatgatgatgataatctaagcctaaatgatttagtcaaaaatgaaaagatgggaacagcagaaaatcaaaacaagctctttatgagaatggcatctaaggtaactgcagccacaggaagtaaaaccacagatgcccagactggtaccagtcacaagtctgggcttccagaacttctgaccacccagcttcaagttggggttcacatgacccccccacttcgggtacgattaatttgctggaacagctcacagaattcagggaaacacttaaattacatttactggtttattataaaggttatcataaaggatataggtgaagagacgcgtagggcgagaattggttccttccggtgggttcttggtctcactgacttcaagaatgaagctgtggaccctcgtgatgttcagatgtgcctggagtttcttccttccagtggttttatggtcttgctgacttcaggagtgaagatgcagaccttcgcagtgagtgttacagctcttaaaggtggtgcatctggagttgtttgttcctcccggtgggttcgtggtctcgctgacttcaggaatgaagccacagaccctcgtgaaaaagaaaagcaaatgaaatgcatagtaagccgaagaaaggaaacaaagctcagagcaggaatcaatgaaacagaaaacagaaaagcaatagagaaaaccattgaaacgaaaagcatactcttggagaattctgataaaatcaatgaacttctagcctcactgagttga

SEQ ID NO: 16434 - DNA, 525 bp, Homo sapiens
  SIMILAR (195)..(67): 881254mologous to Homo sapiens PRO2852,accession number AF130079,Smith-Waterman Score=184.
cccccttttttcttcttttttggggtcagaacatttaagctgaaagggaataagagtagtctaacccagccgggcgtggtggctcacacctgtaatcccagcactttgggaagccaaggcaggcagatcacctgaggtcaggagttcaagagtagcctggccaacatggtgaaaccccgtctctactaaaaatacaaaaaattagctggacatggtggtgggcacctgtaatctcagctactcaaggaggctgaggcaggagaattgcttgaacccaggaggcggaggttgcattgagccaagatcacgccactgcactccagcctgaatgactgagtgaaactctgtcttagaaaaaaaaaaaaagtagtctaatccaacttcttattttgcagctgaaaaaactgagggtcagcaaatttaaataaaatctgaaatgaaaacttatgtttcgtgactcacaatccaatgtgatctctgctaggtattctgattctatctttgcttgactgatacaagataatg

SEQ ID NO: 16435 - DNA, 429 bp, Homo sapiens
  SIMILAR (276)..(1): 481254mologous to porcine endogenous retrovirus REVERSE TRANSCRIPTASE,accession number A66553,Smith-Waterman Score=209.
tgtgtcctcactcaagagcaggacagctggctgcactggccaagtgtgtctgaaagttgacaggaacattcattccagcattagaaggaagtgggccaggtgtggtggctcacactagcagctgttattcctgttaatatcctggtcaagcctgttccaggcacctgagtgacacagacatgaagggacacgccctgtccctgcgctcaccctgcaagggcaaggggagagacagcaacaccagggagagctgatgcaactgacccggtgcaactaactgttgtccctggtgcttgtcacagcaccagttagtgcattgagagtatggttcatggaggagaaaatattttcccagccgggcatggtggctcccacctgtaatcccagcactttgggaggccaaggcaggtggatcacttgaggtcagga

SEQ ID NO: 16436 - DNA, 692 bp, Homo sapiens
aatatgctactttcagagaataaagtcattgacccattacttcggcttggcatactattcagaaaaggtatagaggagcagttggaaccagcagttgaaaagataagcatcatggcggaagagattggccaatcagttggcaattaataaacctgtcactgattttttccttcaacttgtggatgcaggcaaggtggatgatgccagagctctcctacagagatgtggtgcaattgctgaacaaaccccgattttgttgttgttcctccttaggaattctaggaaacaaggaaaggtactgtgctttacctgcttacaaatcaatgatactgtacgtgccttgctcagaagtattgaatttaacataaaagcctgttgtttcaggaccttatttgagaatactatagagattcaagactttgcttgtctctacttagagtcagttttgtcgtctgttagctgtactggaaatgtaaaacaagttcacgcaggaattttccacttacacaggtatgcattgagagccccaagaaaaggcccttaaaaaatgcaagattaggctgggcatggtggctcacacctgtaatcccagcactttgggaggccgaggcgggtggatcacttgaggtcaggagtttcagagtttgagaccagcctggccagcatggcgaaacctggtctttacaaaaaaa

SEQ ID NO: 16437 - DNA, 5367 bp, Homo sapiens
  SIMILAR (343)..(753): 281254mologous to Caenorhabditis elegans weak similarity to regions of guanine-nucleotide releasing factors,accession number U58746,Smith-Waterman Score=134.
catggaggcagtgttaactaaaattaagcttagatttagctcctgtattattcataatatgagaaattttaggaaaggcggactttggtaaaggtgccaaggcacttacttgtatagaaaagacttcactctatgggatttatataagtaagtgctttctctatattcaaaatatttcataaggacctgtggtttttttccccttaaaaagcaactctaggccgggcacagtggctcatgcctgtaatcccagcactttgggaggccaaggcaggtggatcacttgaggtcaggagttcgagaccagcctggccaacatggtgaaaccccatctctactaaaaatacaaaaattagccaggtacggtggcgggtgcctgtaatcccagctactcgggaggctgaggcaggagaatcacttgaaccttgggggcggaggttgaagtgagccaagatggtgccactgcactccagcctaagaaattgagcaagaccctatctcgaaaaaataaaataataacataaagaaatgatcacaggcagaaactgtatgcacacaccgagtgtggaaaagccctcttgtggaagtcagttatttgtgtacatcagaaaattctggaaggagagaaaccttgtgaaggtactaaatatgacaacatcttcagtaacagaggatgtccccctgtacccagaatggtgcatgctgtggagataccctgcaagtagaccgaatgtgagaaagccacaggagtacatgggcctcgcggtgcatcagagttcctgccagagaggcccacaggcatgaacatggcagagtgtgaaagtcgtctgcgggaagccaggactctatgccagaaacttcacactggggagatatcctcagtgcaatcagtgtagaaatgcctctactaagaactgcttctgattctgaatcacagagttcacagtggagaaaaccacatgaatgtaaaactgtggaaaagttttcagctagaagccagagaattcacactgggagagacatgagaaaacagcaaatgcaggaaaactttcccttggagatcagagctcactgatctcagagttcatacaggagaagagccctatacaatcacgagggtggaaccgcctttggcaagaaaacacgccccattacccatgagagagctgcacaggagagaaaccctatggaataaataattctggaaagcattcagcaacaaatgaaacgtcctaatgtgcactatagagaagccctaggaacacaacaaatgtggagaaggagagtcagtagcgcaacagaaatgtttctcagaggagaagcttttaagttaattacttaaaacctgcagaagcacctagtcccacggtcaaaaccaactgcgcaccagagaagctgcatgggaaagtttgtatgttggataaagtgtggttcaccctcaaaactagctccagacatcacagactagagaatgtatactgatcttaaacagtggtcaatttaacaaatgtaaattctactcccagggacataaaattccataacttaaaccaagctttttgtaaaaactatcagtgaaaaacaaatgtgcgtgcatctgcagcccaagcctcttcctccccaggcctggcgctcagcttgcaaatggacttcccagtacctatgaggaatgaagggtttccatacccgtcctgagccatccacttgggattcaccctcaccacggccatgactctctgtcactgctcccaacctggagctcctaaacccatccccaacccgaacacaacacaaatgcacccctgctccttgttctcacatcactaacattacacacgtgtatctgaatttcttcaggtttgggggtttttttggtgtttttttgttttgtttttttgagacagagtttcactcttgttgcctgggctggaagtgcaatggcgtgatctcggctcaccacaacctctgtctcccggtttcaagcaagcgattctcctggtctcagcctcccgagtagctgggactacaggcgtctgccaccactatgcctggctaattttgtttttttgttttttttttagtaaagatggggtttcaccatgttgggccagggggggtctcgaactcctgacctcaagtgatccacctgcattggcctcccaaagtgctgggattacaggcatgagccaccgtgcccggcctctggttttgttttgttttttttttttaatgggggacaaaagagagggaaagacccctataaatctatatataacaatgtaaccatatacttgcatgtctaatacaaactgaagaaattagcctaactgccaatatcaagttgcagattttaatccatggaaattgtgttttgtgctgaattgtatttgctgattacctgaaattggcttctttttattgggcttctctggagaatttctcccactccccacctctgcagaagaaaattttgctcttataaaacctcatgttttcatcattcccatcttttctttttattgcctcttatatctctgctctttgacctcaaggtctagaggtctgcagtaagccaagaaacaaaggtggggtggatgaggcaaggtttgcaggagaaagaggaattgagaaatggggtatttttgctatcagctcttctgctatgaagtagtaaaaggcagtctataattaactgacagacctaactgaagcacagagaatacatcagacttatgcatccaagacatcagaacttggattttatcaaacttgatgacttctctaaaaggagctttggaaacttcaaattcagctataggatagtaccaatgaacacatccagctgatcccaaaagctgttttcaggtataaggacaaggagaggagacaagtgacgacagccattcccctttgcagctatctactgtagtgacagccatttcttggttgatgggttggaagtcatcagaggtttgaagaattacactggcctttgtttttctggaaatgccgaccatggagatgctttagagtcttctcaaatagcttagatgttgtaatgaggttagctttgcttcataaaacaggggccctcagaagttctccttaaatttttcaataaaaatttagctcttaaaaaaataacagtgtgactgagtgaatgaagataagttggattctttcagagcattcttttcctcaaaacgagctgcataattcttggaatttatgtcttaccacatggtggagggatggaggaactacaggatgcaattcttcttctaccaatgggcaatagaggttgagagagattcagcatctttctgggattagaattcaagtctctttactcctacagcagctgtgtctccaacgttgagactttgcagatggcacagactccatggataataggtaaacttggggccgggcgcagtggctcacgcctgtaatcccagtattttgggaggccgaggtggaaagatcgcttgagcccaggagttcaagaccagcctgggctacatgacgaaactccatctctatcaaaaatacaaaaaattaactaggtgtggtgctgcacgcctgtggtcccagctattcaggaggctggggcaggagaattggttgaacccaggaggcggaggttgcagtgagcccgagattgtgccactgcactccagcctgggcaacaagagttgaaactctgtctcaaaaattaattaattaattaattaaaataaactaggtaaacttggataggcagtagatatttttgcccacctgaggaggaactcagtcaagctgttgcttaacagcttgatccagggcgtgaaaggttagttgagactgaagtgttcacttccatagaagaacatcacttttaaccttgctttggcgaagggagtcggaaagctgagtctctatggacgggggggtgatcttgctttcagtgttccctcagcttttgtggatttaaaaccattctgctccccctaaaccttttgtttgatttcagcccatgttcttgacaatgcagagcaattctgagcagtcacaaagcctactctctgttcttgtccctgccaacccccaccccccataatctgactcacaacttcaccatcagttggggtcataccactagtctctgtcctataccccatgaaatgtaaatactgtatcataagtagaagaaaataatttttgttttctaaaaatgcattttgagatagtttaatgtaaatctgacaggagcattctgaagccccattaggaaaaaatttaaatggttcctcttcatcgccttaatgtctaaagatcagaaatcgctgagcaaacccgcttttgtttccttcccagaaacaatgcaaaacaacaggtggagatagtctggtctttgccctgctgtgtgtgcctctgtagctcctcctgacaaacgtctgggaaaacagcctcaccccactctcctctctcttccccatttccttgtagctttattccttgcatctttgggtctactgagcagtgggtgctgaggtgacaggggaggaaccagttgttctgtagcctaggaactgcctcagtgtctttgccagaaaaaggcaaagaggcggacagtgcagggctcctccctcctacctcaggcctgatccatcgtgcccttgactttgccgtctcaaagtttcttagctgactttggctttcacatttgttctttccagagctaactgataagagtggaggaggaatgccttctcctaagagtcagttgaaagaaagacaagagagtcacatcttagcttttgcacaaggcattcgtggtcaggaataggttagggaatggtcacttctgattttccaacagttgctccttctctgaagagatcttgattcctttgggaagacaagaatttttcttaataacaaaggtccctttatgagttattccttctttcagttcatctcactggagcacagccaagatggacatgtttatggacagtgctctagatgtgaaaacagatagaactggtttgtgggacaggggcagcttgctcaggagagggaataacgcaggtcccttttcttggaaggcttgtactatggccatgacagtgacattgccctcaccatgatccctctccaaagtggttgtctttctttaccttgtgtcttctcttgtaaaaatgaaactcaaaaataaaataaatgtgtcaaattttgaaaaaaaaagaaaactgaaaaagctaacatgaattgtgtgaaattgcataatgctgtaatgctaatctacaatatgtaatgctatcttgtatgttgaatttgttaatgcaccacacaagtgcaaaataaagactgattcacatt

SEQ ID NO: 16438 - DNA, 434 bp, Homo sapiens
  SIMILAR (48)..(395): 831254mologous to Rattus norvegicus membrin,accession number U91539,Smith-Waterman Score=489.
tatccaagaaagccagagctggagttggggccagctgggccggtgacatggagcccctgaaccagcaaacgcacaagcaggtccatgagatacattctcacatgggacacctggagacggcagacaagcagtctgtgcacttagtagaaggtgaaatccaagcaagcacagaccagatattcagccatctagaacatcgggagattttgtccagcaaggagccccctaataaaaggcagaatgccaaacttcgggttgaccagtttaagtatgatgttcagcacctgcagactgctctcagaaacttccagcactggtgctatgcaagggagcagcaggagggacagcaagaagagcttctatctcgaaccttcaccactaacaattctcaatcacaatcctctgacaactattggagattattatctgtttaa

SEQ ID NO: 16439 - DNA, 499 bp, Homo sapiens
  SIMILAR (55)..(396): 981254mologous to Homo sapiens golgi SNARE isoform B,accession number AF229796,Smith-Waterman Score=569.
gcacgaggttccgaggaagccagacccggagccgtggcctgccgggccggcgacatggatcccctgttccagcaaacgcacaagcaggtccacgagatccagtcttgcatgggacgcctggagacggcagacaagcagtctgtgcacatagtagaaaacgaaatccaagcaagcatagaccagatattcagccgtctagaacgtctggagattttgtccagcaaggagccccctaacaaaaggcaaaatgccaaacttcgggttgaccagttaaagtatgatgtccagcacctgcagactgcgctcagaaacttccagcatcggcgccatgcaagggagcagcaggagagacagcgagaagagcttctgtctcgaaccttcaccactaacgtaagccaggcccgtggtgagggtcggcctgcacttgacagatcgtgggggctggagttcagatctctgagcgccatctgttttgggggtgtctgaagaagactgatga

SEQ ID NO: 16440 - DNA, 681 bp, Homo sapiens
  SIMILAR (1886)..(3124): 921254mologous to Homo sapiens tyrosine kinase,accession number X78549,Smith-Waterman Score=2027.
ctatggctggagtgactgggatgcagttctgagactgcttacagcaagggcaccctggatgtagaccaggaagccatttttgttcctagtctgggcctgtgatgggaggagctgctttgaagacctctgatgtgccctggaaacatatttcttattttcttggtgattaacatttggcttctcatcacttatgcaaatttctgcagccagcttgaatttcccctcaaaaaatgggtttttctttcctattgcattgtcagactgcaaattttctgaactttcatgctctgtcacctcttgactgttttgctgcttggaaatttcttctgccagataccctaaatcatctctctcaagttcaaagttccacagatctctacagcaggggcaaaatgccagcagtctctttgctaaagcataacaagagtcacctttgctccacttcccaacaagttcctcatctgcgtctaagaccacctcagtctggactttattgtccatatcaggtgacagcaggggtacactcccttccaaggctccgggagagaatctttccttgcctcttccagcttctggtggcttctggtcttccttggcttgcagcagcctgacttcaggctctaactccctcttcacacagccttctctcctatctgtgttctcttctcttctgccatccat

SEQ ID NO: 16441 - DNA, 634 bp, Homo sapiens
  SIMILAR (673)..(978): 1001254mologous to Homo sapiens dJ697K14.1 (novel tyrosine kinase),accession number AL121829,Smith-Waterman Score=534.
caaatgcccccggtaattctatacctcttttcccaaccaggcttctttgaccggttccaacctttggtcttccggcccggcacaccggggcagaaaaacggcggaaaaacagcggcggggaacagttgagtaaaaacaacctgtacattcgaggcctcccaccaggcggcactgatcaggacctaatcaagctgtgccaaccgtatggaaaaattgtatctaacaagggcatttcttgacaaaaccacaatccggtgcaagggttatggttttgtagattttgacagtcctgcagccgcacagaaagcggtagcatctctcaaggcaaatggcgtgcaggcacagatggctaagcttcaagagcgggacccagctgtgactaagcgtctcaagtctgttacttttctatgtatgagcaggagcttgagaatatgctgaaaccctttggacatgtcatttccacaagaatactaagagacgctaatggagtcagcagaggtgttggctttgccagaatggagtctactgaaaaatgtgaagtggtaattcaacattttaatggaaaatatctgaaaacaccaccaggcatcccagcccccagtgagcctttgctgtgcaaaatcgctgatggagg

SEQ ID NO: 16442 - DNA, 762 bp, Homo sapiens
  SIMILAR (424)..(618): 561254mologous to Homo sapiens RNA-binding protein,accession number AF023259,Smith-Waterman Score=162.
atggacaataaagtccagactgaggtggtcttagacgcagatgaggaacttgttgggaagtggagcaaaggtgactcttgttatgctttagcaaagagactgctggcattttgcccctgctgtagagatctgtggaactttgaacttgagagagatgatttagggtatctggcagaagaaatttccaagcagcaaaacagtcaagaggtgacagagcatgaaagttcagaaaataagcagtctgacaatgcaataggaaagaaaaacccattttttgaggggaaattcaagctggctgcagaaatttgcataagtgatgagaagccaaatgttaatcaccaagaaaataagaaatatgtttccagggcacatcagaggcctggaggcataggagggaaaaaatggtttcctgagctgggcccagggctcccctgctctgtgcagcctagggatatggtaccctgcatcccaagtgcttcagctccagctttggctaaaagggtccaaggttatggttttgtagattttgacagtcctgcagccgcacagaaagcggtagcatctctcaaggcaaatggcgtgcaggcacagatggctaaggtgactcagcgcaaagacagagattccatttgtttgggagaaagtaaaggaaaaggagaagagtctctgcctggtaatccagagaattcttccagatcttacccaagaccaccaaggtggtacctctatgagtctgcaaaaaccacagaaatattgggctga

SEQ ID NO: 16443 - DNA, 352 bp, Homo sapiens
  SIMILAR (41)..(316): 351254mologous to Streptomyces coelicolor A3(2) putative DNA- binding regulator,accession number AL109989,Smith-Waterman Score= 85.
ttagagtacttcttggggaagccgtctcttgggagattgacgctggacaagcaagaaggagccagaaatgtgaagagctctccgggccgtgacagctccacctgccaccgctgcccgggtcgccgcccccgcactcaccacccagctggctcccgtgcgagcagcggatcgagctcggagagcggcgccggaatcccgcacgcgcggtagcggaacacgaggggctgtttcttccttcctccccggcactctgggagtcctgagattgccttgctcggttcgtctcagacttgctagatctgagcagctgctgctcctccaccaagggtgctcacattctccaggaaactcc

SEQ ID NO: 16444 - DNA, 747 bp, Homo sapiens
  SIMILAR (1)..(405): 501254mologous to Drosophila melanogaster CRAG protein,accession number Y17918,Smith-Waterman Score=319.
ggatcagcagtatacttgtgttataaaaaatcggtggcaaagacgaacactgtatcttacaaagctggcctaatttgtagatatcctcaagaagattatgagtcattctcactaccggaatctgttcctctattttgtttaccaatgggtgcaaccattgaatgttggccatcaaatagcaaataccctctgcctgtattttctacttttgttttaactggagcctcagctgaaaaggtttatggtgctgctattcagttttatgaaccatactctgaggagaatctcacagaaaagcagagacttcttttgggtttaacatcagcagatgggaagtctgatagttccaaaacaattcatactaacaaatgcatctgtcttctttctcactggcctttttttgatggcattcaggaagtttctgacttttctgtatcgttaattccatctctggggctcatgtccttccaattgagaagcatatttctcattttatgcataaagttccttttccatctcctcagagaccacggattttagttcagttatcaccacatgataatctgattctcagtcagcctgtgtcttcacctcttccactaagtggtggcaagttttcaacactactgcagaatttaggccctgaaaatgctgtgacactactggtgtttgcagtaacagaacataaaattcttatccattccctacggccatccgtgcttactagtgtgacagaagcattagtgg

SEQ ID NO: 16445 - DNA, 972 bp, Homo sapiens
  SIMILAR (1)..(2847): 811254mologous to Rattus norvegicus inositol polyphosphate 4- phosphatase,accession number U26397,Smith-Waterman Score=3691.
gcggccgcggagtggagggggagtcccgtctgacgtgagacggcaggcctgggcgggcgggcgggggtgccgcgaagggcggatcgtccgggcatggggatgagctaagcgggctcagagcgccgcgcgcattcagcccctcggggttccgctaccgcgcgtgcggagttccggcgccgctctccgagctcgatccgcttctcgcacgggagccagctgggtgttatttctcaaactctgaggctgcggagttcacacattgaaatctgtcatctttttcagagagaaactttcggtaatgtatgtaaccttctgtaatggaagatgattgaagacaaggggcctcgtgttgctgactactttgttgtagcaggattaactgatgtttcaaagcctctagaagaagaaattcacttcaatgatgcttgtcataaagtagctaaaccaaaagaacctattacagatgtttcagttattatcaaatctcttggggaggaagtcccacaggattatatctgtattgatgttaccccaactggattgtcagctgatcttaataatggaagtcttgtggggccacagatttacctttgctatagaagaggaagagataagcctccacttacagatctgggtggggatcagcagtatacttgtgttataaaaaatcggtggcaaagacgaacactgtatcttacaaagctggtttatggtgctgctattcagttttatgaaccatactctgaggagaatctcacagaaaagcagagacttcttttgggtttaacatcagcagatgggaagtctgatagttccaaaacaattcatactaacaaatgcatctgtcttctttctcactggcctttttttgatgcattcaggaagtttctgacttttctgtatcgttattccatctctgggcctcatgtccttccaattgagaagtattttcaggatagttacaaatgttag

SEQ ID NO: 16446 - DNA, 368 bp, Homo sapiens
  SIMILAR (1)..(108): 1001254mologous to Homo sapiens inositol polyphosphate 4- phosphatase,accession number U26398,Smith-Waterman Score=177.
ggcacgagatggaaaggactagacattgtatgtatgagactgttctcccccttttcaacttagaagaatgagaggtctgggttctgacctgtgctaaatctgtgtggcccaataaagagcacttgcttgaaattcagacatgggtctgaatctaggctctgccttgactggatgaccttgggtagctattgaattctgctgctttggcttcttccagataataatagtattttcttgtctcctggggtggctgtaagtagctcctcatcccaaccttccttcttctcctgcagaatatatggatttcagagaggcacaagaaggaactgatgtcatttattgaaaagcttcataataacctaattctg

SEQ ID NO: 16447 - DNA, 1089 bp, Homo sapiens
  SIMILAR (274)..(816): 921254mologous to Cloning vector pZC320 SopA,accession number U26464,Smith-Waterman Score=869.
atggacgatatcccgcaagaggcccggcagtaccggcataaccaagcctatgcctacagcatccagggtgacggtgccgaggatgacgatgagcgcatttgggaccgtggtccagaccgatatcagaccgacacaccagtggatcggggtcccgactattatcagacgacgatcgattgggaccggggccagacttatatcgacggacacccagtgggaccggggttcgacttttatcgaccccattcaatgaaccggttaggttgcaacccgcttcgacttaaagatcccctgctttcttcttggggaaaagacgatgtcacttatgcaataaagcccacttgctggccggggcttgacattattccttcctgtctggctctgcaccgtattgaaactgagttaatgggcaaatttgatgaaggtaaactgcccaccgatccacacctgatgctccgactggccattgaaactgttgctcatgactatgatgtcatagttattgacagcgcgcctaacctgggtatcggcacgattaatgtcgtatgtgctgctgatgtgctgattgttcccacgcctgctgagttgtttgactacacctccgcactgcagtttttcgatatgcttcgtgatctgctcaagaacgttgatcttaaagggttcgagcctgatgtacgtattttgcttaccaaatacagcaatagtaatggctctcagtccccgtggatggaggagcaaattcgggatgcctggggaagcatggttctaaaaaatgttgtacgtgaaacggatgaagttggtaaagcctcccggcgccgcggcagctctgggcagggagcgccgccgccgccgccgccgccgccgcttcctcgtctgcagccgttcggccgctgcgtgacgcgtcgtttcctcccaacatggcggccggggcaggtcggcggtgatgggggccagttcgcggccgcggcggggaagaagacgaagaacatgttcctgacccgggctctggagaagatattgggcgacaaggaagtgaagaaggcgcatcactcccagctgcgcaaagcttgcaaggtggcgttagggtga

SEQ ID NO: 16448 - DNA, 762 bp, Homo sapiens
  SIMILAR (505)..(684): 1001254mologous to Bos taurus guanine nucleotide-exchange protein,accession number AF023451,Smith-Waterman Score=295.
  misc_feature (1)...(762): n = a,t,c or g
atgcggctggggcggatcctcccgcgccgccctcggccccaagcctccgggggccgcggcagctatgggcagggagcgccgccgccgccgccgccgccgcggattcatggtctgcagccgttcggccgatgcgtgacgcgtcgtttcctcccaacatggcggccggggcagatcaacgtccaaaccaatagtggagtagcgagggcatttacctttaataccaatactacggtctctgctgtatccacggaattgcctaaatcagcatgtggtacaattaaagtgtttccagggctgttcgctgctcctatcgggttctgcctactcatccaacataatgaacagttactgaacaatgcatttgtaagtaagtgtgctgtatttgttacacccaagacagctctagctgtgttcaagcccagctggatgctagaactgcgagccactgtgaccttgccgtgtgaggnatatcacaggatctacaaggctagatggaatgccatggctttacttactgcagtaacatcacaacacatagaaattcatgaagggactgtactgcaagctgtgagaacatgttacaatatctacttagcaagcaaaaatctcatcaatcagacaacagccaaagctactctcactcagatgctaaatgttatctttgcacgcatggaaaaccaagcaaatatatggatttcagagaggcacaagaaggaactgatgtcatttattgaaaagcttcataataacctaattctgtga

SEQ ID NO: 16449 - DNA, 599 bp, Homo sapiens
  SIMILAR (153)..(356): 971254mologous to Homo sapiens villin-like,accession number BC000243,Smith-Waterman Score=324.
cagctaagtaccttcttccagaggtgacggggcttgactatggaaagaaatgtgtggtcattgatttagatgaaacattggtgcacagttcgtttaggcctattagtaatgctgattttattgttccggttgaaatcgatggaactatacatcaggggctggctttgacctacagcctccgggacagggaacgtggtggtggtcgtgcacagaatggtgtggtggatgatgaggccaaagccccggacctcatgcagatcatggaggctgtgctgggccgcagggtgggcagcctgcgtgccgccacgcccagcaaggatatcaaccagctgcagaaggccaatgttcgcctgtaccaggcagaagttatggcctgtgccttcagtctcccccagtgccgggcccttgccaccccttctaaggcagacttccccaagcgactcacgggggaggatgacatagcaagggttcctcaaaaaagttcccccagccctgacacaggagatttatcgtgcaagcatccaggttactccacaactcggccacaagccctcaatgcactccttatccataagctcaacagaatgttcgtcagctga

SEQ ID NO: 16450 - DNA, 846 bp, Homo sapiens
  SIMILAR (295)..(3108): 1001254mologous to Homo sapiens inositol polyphosphate 4- phosphatase,accession number U26398,Smith-Waterman Score=4856.
atggaagggcatagggacaaaaacacacaaacaaaaactttcaccgatatcattggaaccacagcaaaaacaaatacaaagcacctaccgtatgcaggaaacctgctgggccctggggtacctgctccagctaatttccatgacaacccgaaagaccaggacacagatgaggagactgaaggtcaaagaggtgagatcctgtggcaggtggcagaactagggctgaacaaggtttgcttgctccaaagcccaggttgtggggtggagagcaagggccacggaaggcctgtgccctcctcagagaagagtcccgctgctacctgccctctgcagcccacctggaagcagcctctccccagccgcagcaaggccagcagggccagcacggggccatctgagtcctcaggagagggctaccagcagggacttgtgggcctcatccaggtggccaccagggtgttggccaccagaaggtgcgatacgtcctccacatccaactcattggcagtgtggccagctggtgcacgccgtggggcttccctgtggggagagtgcctcaggatgggctggccccttccccacaccgcctcacctacccagctgattgggccacagcctccatgcagtgacacagtccagtgtgcccagaacacagtccggccagcacctgcagcagcccgaagctgcacagttacacacagctgtctgggtgtggcgccccctgttccaccacctcttggaagtcttcctggatgcaccaggaatttcctgctggccagcaacgtcctcggcctttgggtgcacctagatgaagtcctggagggtgctggccacatcaggaggtag

SEQ ID NO: 16451 - DNA, 1816 bp, Homo sapiens
  SIMILAR (1322)..(1588): 761254mologous to Homo sapiens unnamed protein product,accession number AK024120,Smith-Waterman Score=352.
ctttttctggagttacttgtacaagtgtcattgatatagggtaaagccgggtctatatggtggagtgttactgcagtaatgtatgaaaatatgaaagcagcagatgtccaaattacaagggctgaaggaaggaaactgagggccttgctgaaaccaccacatttctaacaggttttctgttttacaacttcacaaaatgttagtcttcagacctgctcatacctgcaccttttgtaaatccagaggaattaattagaccgctgattttctccggaagcgcgaagcactaggccgtttgaggatctccgctccgctttgcctgggaccaggaaaagacgcgagacacggaactcggcatcaggcacttaccaaaccgactcagcgctggccgctggcgccgaagcccctatgctaaaaggagacagggctgggccacggggcgcgctcccgagcagaccggccggccccggggcgcgctcacggcaccgaggagcgcgcctgcggcgctgctcgttcaaaccttgttcccctttacggcaatcgcgaaagtgtcgtgaaacgtgctgccgccgatcagtcacccagtcggctggagtcggaggcgatatttctaggggtgtacttgttggggtcagggatgtatgacaggggtgtggctcatctgctcaactgccttgcactcaaaccccttatgagagggggagcacgcagatggcaggtgcaggaaccagggcgagcacttatgggctctgtccccatggcaacatctagggtgctggatactaaatgtggtacttactttcaacagactcaagaactggttttaattgaaaccataaccctacaaacaccagattttgagatcagcattgaacatccacaatcagatgtggtaaaacataccaagttaggtgcagcccttgtagctcctgtcaccacagggttggagttgagtgcctttagcttttccaggctcaggatgcaagctgccggtgctggatcattctcaggtctaaagggcagtgatcctcttcccacagcttcactaggcagtgccctgaaaacaaccctttttgctgcacatggttatgtgcttcacatgatcactactgcagcagaatggtctatgtcattttccttctttggttttttcctgacttacattcgtgattttcaggtgtgccaagtgtcatggccacctccagataacactatgtgttcaaaacatcatggccccctgcgtttgcatattaaaaggctaagatttcagaagatgtatgggaatgcctggatgcccaggcagaagtttgctgtaggggtggggtcctcatggagaacctctgctagagcaatgcagaagggaaatgtggggtgggaaatcccacacagagtccctactggggcaccacctagtggagctgtgagaagagggccaccatcctccagaccccagaatggcagatccactgacagcttgcactgtgtgcctggaaaagctgcagacactcaacaccagcccatgaaggcagcagggagggaggctgtaccctgcaaagccacagggctggagctgcccaagactatggaaacctacctcttgcatcagtgtgacctggatgtgagacatggagtcaaaggagatcattttggagctttaagatttgactgccctgctggatttcaaacttgcatggggcctgtagtccctttgttttggccaatttctcccatttggaatggctgtatctacccaatacctgtatccccattgtatctaaaaagcaagcaacttgcttttgattttacaggctcatag

SEQ ID NO: 16452 - DNA, 867 bp, Homo sapiens
  SIMILAR (168)..(37): 651254mologous to Homo sapiens Human secreted protein 2 derived from extended cDNA,accession number Y25451,Smith-Waterman Score=118.
ccccaaattagccatttttctggaagcctactggtacccaatgtccactgaatatagggtaaaaccggggtctatagggtggagtgttactgcagtaatgtatgaaaatatgaaagcaagcagatgtcccaaatttacaagggctgaaggaaggaaactgaggcccttgcctgaaaacccacccacattcctaacaggttttcctgttttacaacttccacaaaatgttagtcttcagacctgactcatacctgcacctttttgtaaatcaacaggaacgtgtactcaacaaggaacgtgtactcaattagcttttgtgggaaagggttgaagattcttggtaacttgcttcaacaaaccagaggaattaattagaccgctgattttcctccggaacgcgcgaagcactaggccgtttgaggatctccgctccgctttgcctgggaccaggaaaagacccgagagacggaactcggcatcacggcactgcttaccagaccgactagcgctggccgctggcgccgaagcccctatgctaaaaggagacagggctgggccacggggcgcgctcccgagcagaccggccggccccggggcgcgctcacggcaccgaggagcgcgcctgcggcgctgctcgttcaaaccttgttcccctttacggcaatcgcgaaagtgtcgtgaacgtgctggctgagttctttctgaaaagtatatttcagtgttgtaaatccagttattcagtggcagtaatgatggctttgaggacaaattcatagggagggatattctgcatcttttttcaaaataaccttggaatgtggaaaatacagttgtccctccatatctgtgaggaattggttccacaat

SEQ ID NO: 16453 - DNA, 1419 bp, Homo sapiens
  SIMILAR (381)..(1271): 301254mologous to Homo sapiens Protein polymer adhesive substrate PPAS1-C,accession number W49717,Smith-Waterman Score=170.
ccatctgctgcgtgcatagagccgggtgtgaatgcggagtcgtccgacggtggcctgggcggcagccacggctcttccagtgcctccaaactctcttggactgggcatttcacagctggaacccctgtccctgaccagtctccatctatgctggcggcttccactgttggtaattatgaaaccccacccccagctgtggctgcaggtactgacagcagcacccaggcacccaacaaggctgacaagcagaatctgctgatgcccaccagaggtcaggcagacatgccacagacgctgagtgcctccgacatggtcaccccaggcagcctcagcccaccccccaccgagcccacagatggcgaacaggctgggcagcccctcctggatggagcgccatcctcagcctccctggaaacactgatccagcacctggtgcccacagccgactactaccccgagaaagcctacatcttcaccttcctgctgagctctcgcctcttcatcgagccccgggagctcctggcccgggtctgccacctgtgcatcgagcagcagcagctggacaagccggtgctggacaaggcccgggtccggaagttcggccccaaactgctgcagctgttggccgagtggaccgagaccttcccaagggacttccaggaggagtcgactatcgggcaccttaaggacgtcgtgggccgcatcgccccctgtgacgaggcataccggaagaggatgcatcagctcctacaggctctgcaccagaagctggcggctctgcgccaggggccagaaggtctggtgggtgccgacaagcccatctcctacaggaccaagccaccagcctccatccacagggagctccttggtgtctgcagcgacccctacacactggcccagcagctgacccacgtggaactggagcggctgcggcacatcgggcctgaggagtttgtccaggcctttgtgaacaaggaccctctggccagcacaaagctcgggggcgcaccacgacaaccgagtcccgagtccccggaaagcctggacgtgcgggacgtgggggtcacccacccagcgagggaggaggagtgggccaggaaccaggccgtgggccgcgctgctcgggtgactgatgggcgctaccgtcagccactccagtcctggaaagttagggcattttacgggagtacgtcacaggagatccatctccctacagggctccggagcctgaccgaccttctccgaggattccgagccagccctctctccccagcccacgtgcagtggcggtggccagggcggtggagcgtgctgagtgacctgctgcagctcagagctgcggcttctcctggcttctccacctgcctttcttgtgcttcaggtctgctgaaggttgacaggaaaatcgggaaatggctg

SEQ ID NO: 16454 - DNA, 3127 bp, Homo sapiens
  SIMILAR (1886)..(3124): 921254mologous to Homo sapiens tyrosine kinase,accession number X78549,Smith-Waterman Score=2027.
cccttgtggaggcgacgggggcgccgggcgggccaaaaagtgctacgtgcgcggagccctccggcccggcctccagggacttcgcagccagaggaacctggatctctcccgagtccccctcacagctctggcagctccggaacctgcaccccggttgcccagccccaggacgcgcctgctgcccgcagggggcggtgaaagggggaaatcggcctgcccctacggaaatcccgtttctttatacacccggtcctggctgggcggtgtcttccccgtggaagagagggtccgggaggtccgtggggcggaacagtccgagggcttcgggagtcagcccgggtggatttgtttcgtggctctcgttgctggctgggacggccgtgtgcccgtgttgttccggagatcgaggccaacggatgccgtactctgtcctcgccgggtgctcagtgaggacccacagctgggcagggaccctgggaggcccctgagcaagacttggagggacgcccttgtgccccctgagcacgtggggaaggcgctgtcctgggccctgcaccgctctgtgtgttcattgcacgagtgtggaagcctcagagacgctgcatggtgttcccggggcatcctggccaaggtgggagaacgcagcctccgtgaggacccgcgggatgccctcgggggccgcctcctggttctcgtctcctctgaagtgcagacgacgctggcccacatccttgtcgggcagaggggctgccgactggcccctggccatggctcttgctgggagccgtgtggcctgggcttggacccacatccacctcttgctggctgcctgctcttgccagtggctgagcctggcttctcccatgacagtggccgcagacagaggggacccgtgccaccaggcaaggatgtgatcattggcagggatgagattgacggggacggtgtctgggggcgaggtgagagttctgccaaagccggagccagggttggacccccggagctcgttggtcggcccctggagggagagtgctggtactttagcggggtcagtcggacccaggcacagcagctgctcctctccccacccaacgaaccaggggccttcctcatccggcccagcgagagcagcctcgggggctactcactgtcagtccgggcccaggccaaggtctgccactaccgggtctccatggcagctgatggcagcctctacctgcagaagggacggctctttcccggcctggaggagctgctcacctactacaaggccaactggaagctgatccagaaccccctgctgcagccctgcatgccccagaaggccccgaggcaggacgtgtgggagcggccacactccgaattcgcccttgggaggaagctgggtgaaggctactttggggaggtgtgggaaggcctgtggctgggctccctgcccgtggcgatcaaggtcatcaagtcagccaacatgaagctcactgacctcgccaaggagatccagacactgaagggcctgcggcacgagcggctcatccggctgcacgcagtgtgctcgggcggggagcctgtgtacatcgtcacggaactcatgcgcaaggggaacctgcaggccttcctgggcacccccgagggccgggccctgcgtctgccgccactcctgggctttgcctgccaggtggctgagggcatgagctacctggaggagcagcgcgttgtgcaccgggacttggccgcccggaacgtgctcgtggacgacggcctggcctgcaaggtggctgacttcggcctggcccggctgctcaaggacgacatctactccccgagcagcagctccaagatcccggtcaagtggacagcgcctgaggcggccaattatcgtgtcttctcccagaagtcagacgtctggtccttcggcgtcctgctgcacgaggttttcacctatggccagtgtccctatgaagggatgaccaaccacgagacgctgcagcagatcatgcgagggtggttctttggctgcatctcccgctcggaagctgtgcgtcggctgcaggccgagggcaacgccacgggcgccttcctgatcagggtcagcgagaagccgagtgccgactacgtcctgtcggtgcgggacacgcaggctgtgcggcactacaagatctggcggcgtgccgggggccggctgcacctgaacgaggcggtgtccttcctcagcctgcccgagcttgtgaactaccacagggcccagagcctgtcccacggcctgcggctggccgcgccctgccggaagcacgagcctgagcccctgccccattgggatgactgggagaggccgagggaggagttcacgctctgcaggaagctggggtccggctactttggggaggtcttcgaggggctctggaaagaccgggtccaggtggccattaaggtgatttctcgagacaacctcctgcaccagcagatgctgcagtcggagatccaggccatgaagaagctgcggcacaaacacatcctggcgctgtacgccgtggtgtccgtgggggaccccgtgtacatcatcacggagctcatggccaagggcagcctgctggagctgctccgcgactctgatgagaaagtcctgcccgtttcggagctgctggacatcgcctggcaggtggctgagggcatgtgttacctggagtcgcagaattacatccaccgggacctggccgccaggaacatcctcgtcggggaaaacaccctctgcaaagttggggacttcgggttagccaggcttatcaaggaggacgtctacctctcccatgaccacaatatcccctacaagtggacggcccctgaagcgctctcccgaggccattactccaccaaatccgacgtctggtcctttgggattctcctgcatgagatgttcagcaggggtcaggtgccctacccaggcatgtccaaccatgaggccttcctgagggtggacgccggctaccgcatgccctgccctctggagtgcccgcccagcgtgcacaagctgatgctgacatgctggtgcagggaccccgagcagagaccctgcttcaaggccctgcgggagaggctctccagcttcaccagctacgagaacccgacctga

SEQ ID NO: 16455 - DNA, 993 bp, Homo sapiens
  SIMILAR (673)..(978): 1001254mologous to Homo sapiens dJ697K14.1 (novel tyrosine kinase),accession number AL121829,Smith-Waterman Score=534.
atggaagactctaaggccattaaaaatgagcacacggccaacacgctcacacgggctgagtgtgacaccacgggacagagttccacgtacacacagcacacggccaacaacacgctcacacgggctgagtgtgagaccacgggacagagttccacgtacacacagcacacggccaacaacacgctcacacgggctgagtgtgagaccacgggagagagttccacgtcctcctcacccagcgtccctgccagtgggttccatggccccccagtgccagcctgccgtctgctgccctctgccgtctgccatcacctgaaccctgcaggaaaacgtacacactgtccccagcgtcacgaagcagaccctatcacctcctccactcaaggtgtgagcttttggctgagacacccgccggttcacagcagccccattcccagcagccccagactgaaaacagctccaatgcgtatcaccaggcggctgaataaacaaaccgtggaacgtctgtacgacacaacactactcagacaaaaccaaaaccgaacacgtccgacccacacagaagcatggaggaatctcagaaacagttcagtgaaagaggccaaacacagacgagtattaaatgtgcggttccgtttctatgaagctcaggaacagacgaattctaaaaaccagaaggccccgaggcaggacgtgtgggagcggccacactccgaattcgcccttgggaggaagctgggtgaaggctactttggggaggtgtgggaaggcctgtggctgggctccctgcccgtggcgatcaaggtcatcaagtcagccaacatgaagctcactgacctcgccaaggagatccagacactgaagggcctgcggcacgagcggctcatccggctgcacgcagtgtgctcgggcggggagcctgtgtacatcgtcacggaactcatgcgcaaggggaacctgcaggccttcctgggcaccttctataaagtgtga

SEQ ID NO: 16456 - DNA, 2850 bp, Homo sapiens
  SIMILAR (1)..(2847): 771254mologous to Rattus norvegicus inositol polyphosphate 4- phosphatase,accession number U26397,Smith-Waterman Score=3691.
atgacagcaagagagcacagccctcgccatggtgccagggcccgtgcaatgcagcgggcttccaccatcgacgtggcggccgacatgctgggcctctctctggcaggtgagcctcacagggcctgcaccgggctccagactacagggtaccctggtttggcatccttctggttgaaccaggaaatagggaagggggatgtcagccctcttcctgtgaaccgcttctgctggagcctgactacattagttttccagtttggtggcaggggcaccaccagggtagtgtgggaatgtccaagtgttttgctggcccatgcccaggccatgggaaccaacaatcctatatttctaagcagtattgccttctttcaagactctcttatcaatcagatgacacaagtcaaactctccgtgtatgatgtcaaagatagatctcagggaacagttaagtctgcagagagtgaccgtgtaggtaacatcaccgtgattggctggcagatggaggagaagtcagaccaacggccccctgtgacccggtctgtggacactgtcaatgggaggctacaccctcctgcacccactgtcatgcatagtctctcacacagacactcaaagaaaaattctaatttcagagccctagcgctgatggttcttcctgtcgatgagagcttgacggaggcgttaggaatccgatccaaatacgcttcattgcgaaaggacactttgctgaaatcggtgttcggtggtgccatctgccgcatgtaccggtttccaaccactgatggtaaccatttgcggatcctggagcagatggcagagagcgtgctctccctgcacgtgccccggcagttcgtgaagctcctactagaggaagatgcagccagagtgtgtgagctggaggagctgggagagctgtccccttgctgggagagcctccggcgccaaattgtcacccagtaccagaccatcatcctcacataccaggagaacctgaccgacctccatcagtacagagggccctcgtttaaagcaagcagtttgaaagcagataaaaagttagaatttgttcccacaaacttgcacatacaaaggatgagagttcaagacgatggaggatcagatcagaactacgacatcgtcaccattggggcgccagcagcacactgccaaggttttaagtcaggaggtctccgcaaaaagctgcacaaatttgaagagaccaagaaacaagtgactgttgctcagcagttaccagcagttcctggccagggccacaagactccacccttacgctctcatggcatcttcagtttagcccatgaccccagctctggtacatcatctggctgccagtccataatctacataccccaggatgttgtcagagccaaggagatcatcgcccagatcaacaccctgaaaacccaaacacggcagctggtcacggtctgcgactgcaagctcctggccaactccatccatgggctgaacgctgcacggcctgactacattgcctccaaggcctctcccacttcgactgaggaggagcaggtgatgcttagaaatgaccaggacaccctcatggcccggtggacagggagaaacagccgatcttccctgcaggtggactggcacgaggaggagtgggagaaagtgtggctgaacgtggacaagagcctagagtgcatcattcagcgtgtggacaagctgctgcagaaggagcggctgcatggcgagggctgtgaggatgtcttcccctgtgcaggcagctgcaccagcaagaaaggtgaatggagtgaggccctttacccgctgctgaccactctcaccgactgcgtggccatgatgagtgacaaggccaagaaggccatggtattcctgctcatgcaggacagcgcgcccaccatagccacctacctgagcctgcagtaccgccgtgacgtggtcttctgccagacgctgaccgccctcatctgcggcttcatcattaagctgaggaactgcctgcatgacgacggcttcctgcgccagctctacaccatcgggctgctggcccagttcgagagcctgctgagcacctacggggaggagctggcaatgctggaggacatgagccttgggatcatggacttgaggaacgtgaccttcaaagtcactcaggccacttccagcgcctccgcagacatgctgcccgtcatcacaggaaatcgcgacgggtttaacgtgcgggtccctctgccgggcccgctgtttgacgccttgccccgggagatccagagtggcatgctgctgcgagtgcagcccgtcctcttcaacgtgggcatcaatgagcagcagacactggccgagaggtttggcgatacgtctttacaagaagtcatcaacgtggagagtttggtgcggttaaattcctactttgagcagtttaaggaagttttgcctgaggattgcctgcctcggtctcgcagtcagacgtgcctgccagagctgctgcggtttctgggtcagaacgtgcatgcccggaagaataagaacgtcgacattctctggcaagctgctgagatctgccgccgccttaatggggtccggttcaccagctgcaagagcgctaaggaccgtacagccatgtcggtgacactggagcagtgcctgatcctgcaacacgagcatggcatggccccgcaggtcttcacccaggccctggagtgcatgcgcagtgagggttgtcgaagagaaaatacaatgaagaatgttggaagtcgcaaatatgcatttaattccctgcagctgaaggctttccccaagcattacaggcctcccgaagggacttacggaaaagttgaaacgtga

SEQ ID NO: 16457 - DNA, 327 bp, Homo sapiens
  SIMILAR (1)..(108): 1001254mologous to Homo sapiens inositol polyphosphate 4- phosphatase,accession number U26398,Smith-Waterman Score=177.
atgacagcaagagagcacagccctcgccatggtgccagggcccgtgcaatgcagcgggcttccaccatcgacgtggcggccgacatgctgggcctctctctggcaggtgagcctcacagggcctgcaccgggctccagactacagggtaccctggtttggcatccttctggttgaaccaggaaatagggaagggggatgtcagccctcttcctgtgaaccgcttctgctggagcctgactacattagttttccagtttggtggcaggggcaccaccagggtagtgtgggaatgtccaagtgttttgctggcccatgcccaggccatg

SEQ ID NO: 16458 - DNA, 3217 bp, Homo sapiens
  SIMILAR (295)..(3108): 1001254mologous to Homo sapiens inositol polyphosphate 4- phosphatase,accession number U26398,Smith-Waterman Score=4856.
cgaggaccagcacctgaggccgggccgcaggccgacttcacagccaggcgcgcgcgtcgctgctgctgctgcggggctctggcgcgccagccggcgggacagcgggggctggcgggggccggggagcgccagatgatggatttggacatgcttctatgaagaaatgccacatggtccgagagcaaacatgtccaggctactcactttagtgactagggctcggtgccagcacttcccgggtaatcagacgtggtctgaccgaggatcaagaagcacatcatcaccaatgacatcatgacagcaagagagcacagccctcgccatggtgccagggcccgtgcaatgcagcgggcttccaccatcgacgtggcggccgacatgctgggcctctctctggcaggaaatatacaagacccagatgagcccattttagaatttagcttagcttgcagtgagctgcatactccatcgctagatcgaaagccaaatagttttgttgcggtgagtgtcaccacccctcctcaggcattctggacgaagcatgcacagacggagatcattgagggaaccaacaatcctatatttctaagcagtattgccttctttcaagactctcttatcaatcagatgacacaagtcaaactctccgtgtatgatgtcaaagatagatctcagggaacaatgtatttactgggctctggaacgttcattgtcaaagatctgctccaggacaggcatcataggttgcatttaacactaaggtctgcagagagtgaccgtgtaggtaacatcaccgtgattggctggcagatggaggagaagtcagaccaacggccccctgtgacccggtctgtggacactgtcaatgggaggatggttcttcctgtcgatgagagcttgacggaggcgttaggaatccgatccaaatacgcttcattgcgaaaggacactttgctgaaatcggtgttcggtggtgccatctgccgcatgtaccggtttccaaccactgatggtaaccatttgcggatcctggagcagatggcagagagcgtgctctccctgcacgtgccccggcagttcgtgaagctcctactagaggaagatgcagccagagtgtgtgagctggaggagctgggagagctgtccccttgctgggagagcctccggcgccaaattgtcacccagtaccagaccatcatcctcacataccaggagaacctgaccgacctccatcagtacagagggccctcgtttaaagcaagcagtttgaaagcagataaaaagttagaatttgttcccacaaacttgcacatacaaaggatgagagttcaagacgatggaggatcagatcagaactacgacatcgtcaccattggggcgccagcagcacactgccaaggttttaagtcaggaggtctccgcaaaaagctgcacaaatttgaagagaccaagaaacattttgaggagtgttgtacatcatctggctgccagtccataatctacataccccaggatgttgtcagagccaaggagatcatcgcccagatcaacaccctgaaaacccaagtgagttactacgcagagcggctgtcaagggcagccaaggacaggtctgccactggccttgagaggacactcgccatcttggcagacaagacacggcagctggtcacggtctgcgactgcaagctcctggccaactccatccatgggctgaacgctgcacggcctgactacattgcctccaaggcctctcccacttcgactgaggaggagcaggtgatgcttagaaatgaccaggacaccctcatggcccggtggacagggagaaacagccgatcttccctgcaggtggactggcacgaggaggagtgggagaaagtgtggctgaacgtggacaagagcctagagtgcatcattcagcgtgtggacaagctgctgcagaaggagcggctgcatggcgagggctgtgaggatgtcttcccctgtgcaggcagctgcaccagcaagaaagattgcagtccccctcctgaagagtccagcccaggtgaatggagtgaggccctttacccgctgctgaccactctcaccgactgcgtggccatgatgagtgacaaggccaagaaggccatggtattcctgctcatgcaggacagcgcgcccaccatagccacctacctgagcctgcagtaccgccgtgacgtggtcttctgccagacgctgaccgccctcatctgcggcttcatcattaagctgaggaactgcctgcatgacgacggcttcctgcgccagctctacaccatcgggctgctggcccagttcgagagcctgctgagcacctacggggaggagctggcaatgctggaggacatgagccttgggatcatggacttgaggaacgtgaccttcaaagtcactcaggccacttccagcgcctccgcagacatgctgcccgtcatcacaggaaatcgcgacgggtttaacgtgcgggtccctctgccgggcccgctgtttgacgccttgccccgggagatccagagtggcatgctgctgcgagtgcagcccgtcctcttcaacgtgggcatcaatgagcagcagacactggccgagaggtttggcgatacgtctttacaagaagtcatcaacgtggagagtttggtgcggttaaattcctactttgagcagtttaaggaagttttgcctgaggattgcctgcctcggtctcgcagtcagacgtgcctgccagagctgctgcggtttctgggtcagaacgtgcatgcccggaagaataagaacgtcgacattctctggcaagctgctgagatctgccgccgccttaatggggtccggttcaccagctgcaagagcgctaaggaccgtacagccatgtcggtgacactggagcagtgcctgatcctgcaacacgagcatggcatggccccgcaggtcttcacccaggccctggagtgcatgcgcagtgagggttgtcgaagagaaaatacaatgaagaatgttggaagtcgcaaatatgcatttaattccctgcagctgaaggctttccccaagcattacaggcctcccgaagggacttacggaaaagttgaaacgtgaacacacggtttcctctaattagctgttacataataaatgtgggtacctctagtgtcatatatgaattcttcaggagactgaaggattggtttattttgtgttcttt

SEQ ID NO: 16459 - DNA, 3159 bp, Homo sapiens
  SIMILAR (298)..(3159): 1001254mologous to Homo sapiens inositol polyphosphate 4- phosphatase type I-beta,accession number U96919,Smith-Waterman Score=4915.
cgaggaccagcacctgaggccgggccgcaggccgacttcacagccaggcgcgcgcgtcgctgctgctgctgcggggctctggcgcgccagccggcgggacagcgggggctggcgggggccggggagcgccagatgatggatttggacatgcttctatgaagaaatgccacatggtccgagagcaaacatgtccaggctactgccactttagtggactagggctcggtgccagcacttcccgggtaatcaggcgtggtctgaccgaggatcaagaagcacatcatcaccaatgacatcatgacagcaagagagcacagccctcgccatggtgccagggcccgtgcaatgcagcgggcttccaccatcgacgtggcggccgacatgctgggcctctctctggcaggaaatatacaagacccagatgagcccattttagaatttagcttagcttgcagtgagctgcatactccatcgctagatcgaaagccaaatagttttgttgcggtgagtgtcaccacccctcctcaggcattctggacgaagcatgcacagacggagatcattgagggaaccaacaatcctatatttctaagcagtattgccttctttcaagactctcttatcaatcagatgacacaagtcaaactctccgtgtatgatgtcaaagatagatctcagggaacaatgtatttactgggctctggaacgttcattgtcaaagatctgctccaggacaggcatcataggttgcatttaacactaaggtctgcagagagtgaccgtgtaggtaacatcaccgtgattggctggcagatggaggagaagtcagaccaacggccccctgtgacccggtctgtggacactgtcaatgggaggatggttcttcctgtcgatgagagcttgacggaggcgttaggaatccgatccaaatacgcttcattgcgaaaggacactttgctgaaatcggtgttcggtggtgccatctgccgcatgtaccggtttccaaccactgatggtaaccatttgcggatcctggagcagatggcagagagcgtgctctccctgcacgtgccccggcagttcgtgaagctcctactagaggaagatgcagccagagtgtgtgagctggaggagctgggagagctgtccccttgctgggagagcctccggcgccaaattgtcacccagtaccagaccatcatcctcacataccaggagaacctgaccgacctccatcagtacagagggccctcgtttaaagcaagcagtttgaaagcagataaaaagttagaatttgttcccacaaacttgcacatacaaaggatgagagttcaagacgatggaggatcagatcagaactacgacatcgtcaccattggggcgccagcagcacactgccaaggttttaagtcaggaggtctccgcaaaaagctgcacaaatttgaagagaccaagaaacattttgaggagtgttgtacatcatctggctgccagtccataatctacataccccaggatgttgtcagagccaaggagatcatcgcccagatcaacaccctgaaaacccaagtgagttactacgcagagcggctgtcaagggcagccaaggacaggtctgccactggccttgagaggacactcgccatcttggcagacaagacacggcagctggtcacggtctgcgactgcaagctcctggccaactccatccatgggctgaacgctgcacggcctgactacattgcctccaaggcctctcccacttcgactgaggaggagcaggtgatgcttagaaatgaccaggacaccctcatggcccggtggacagggagaaacagccgatcttccctgcaggtggactggcacgaggaggagtgggagaaagtgtggctgaacgtggacaagagcctagagtgcatcattcagcgtgtggacaagctgctgcagaaggagcggctgcatggcgagggctgtgaggatgtcttcccctgtgcaggcagctgcaccagcaagaaagattgcagtccccctcctgaagagtccagcccaggtgaatggagtgaggccctttacccgctgctgaccactctcaccgactgcgtggccatgatgagtgacaaggccaagaaggccatggtattcctgctcatgcaggacagcgcgcccaccatagccacctacctgagcctgcagtaccgccgtgacgtggtcttctgccagacgctgaccgccctcatctgcggcttcatcattaagctgaggaactgcctgcatgacgacggcttcctgcgccagctctacaccatcgggctgctggcccagttcgagagcctgctgagcacctacggggaggagctggcaatgctggaggacatgagccttgggatcatggacttgaggaacgtgaccttcaaagtcactcaggccacttccagcgcctccgcagacatgctgcccgtcatcacaggaaatcgcgacgggtttaacgtgcgggtccctctgccgggcccgctgtttgacgccttgccccgggagatccagagtggcatgctgctgcgagtgcagcccgtcctcttcaacgtgggcatcaatgagcagcagacactggccgagaggtttggcgatacgtctttacaagaagtcatcaacgtggagagtttggtgcggttaaattcctactttgagcagtttaaggaagttttgcctgaggattgcctgcctcggtctcgcagtcagacgtgcctgccagagctgctgcggtttctgggtcagaacgtgcatgcccggaagaataagaacgtcgacattctctggcaagctgctgagatctgccgccgccttaatggggtccggttcaccagctgcaagagcgctaaggaccgtacagccatgtcggtgacactggagcagtgcctgatcctgcaacacgagcatggcatggccccgcaggtcttcacccaggccctggagtgcatgcgcagcattggaacacgggaggtagtcacccagaaaaacttgagcggcctggtgcccatccgagacttaaggctagaccccagcctcctctgttccatccctttattagctctgagccccaatttactgattgtgtggctctttctgagcatagcatacctggtgaccaaattgcgttgcaaa

SEQ ID NO: 16460 - DNA, 1401 bp, Homo sapiens
  SIMILAR (973)..(1074): 1001254mologous to Homo sapiens inositol polyphosphate 4- phosphatase,accession number U26398,Smith-Waterman Score=167.
atgacccagagaaaggaagatttaagaaaaagcctagacgttgttcatggagaagaagagagtcagcaaatggcaaaagtcacacaggcctgcatgtgcagacatgaatcagttttccacatccctggtgccatgctgcgtgctcgctgtgtgcctcttctgacggtttcactggcccacaaggagttttgtgttccattgtccatttgtatgctggccttttgtcaggctgtgctgcagattcttcaaccagtgctctctggttgcctgttagcttctttccagcctgtgcttcacactaatacgcgaggtgatgcaaagttaccaactgggagcacacctgccccttctcattcactcacgcagcaggtagttttcaggcacaaaggaattgacttgtggagctggccctggggtctgtctgtaggagagcaggaagtagtagccacctgcggagggctcacaggcatgtgcctgcgagactgcttacaagcccctgtgcgggatttagggcagaccagagccatgagcgtccatggtcaagtgaaggggcagagttctcagttcccatgtcagaactcggcaccagcttctctgttgacagttgcaaggcctgtggctgagagaagtacttgtgctgtgtttctgcaagatgatggatttggacatgcttctatgaagaaatgccacatggtccgagagcaaacatgtccagttctaagagacttgccaacagaagagcataataaagagaacaagaaaatctcgaaagccatattttataattatatgaaaaccatcattcactgtggcatatctctgctgaagaggacaggacatcctcaagggatcccatggacaccctgtgttggggagtggggaggaagaagtgaccagaaggggcagggagcagtggacagtccaccccggttcctcacatgctggggaaccctgtcactgtacctcgcccccgcaagagagcacagccctcgccatggtgccagggcccgtgcaatgcagcgggcttccaccatcgacgtggcggccgacatgctgggcctctctctggcaggtgagcctcacagggcctgcaccgggctccaggcttgcacagccactgcaaatgaggagaaaatcatgggacagtcacactcagacaccgacaccacttctgctcacctcatcagcctaacttcaacggtggctgggggagataatgggtgggaagatgtgcacagctcagcccaacccttcccttatgctggaaaaccactccaggcactggcaaaaatgttcttggaattctcttccctgattattagcctgtctttgtatacaacagtcacacgcacaagatttctctcctctgattcagttaggaaagatatggactgtgcttaa

SEQ ID NO: 16461 - DNA, 393 bp, Homo sapiens
  SIMILAR (1)..(123): 1001254mologous to Homo sapiens unnamed protein product,accession number AK001842,Smith-Waterman Score=213.
agagcctttcatcctcaaactggattgcctcttctttcaagccctgttcctcaaagaaaaacacaatcaggttgctttgatctggattcttcattactacatctgaaaagcttctcatctagaaggaatctgtcttgaactatcgtttcgatcctctcggcattgttgatggttttactgccgaggtaggggcaagtggtgctttctgccccacacatttgactcttccagttgaagtgtcattctacagtgtttcagatgacaatgctccctctccttatatgggtgtgattactttagagtcccttggtaaaaggggttatcgagtacctccttcaggaacaatacaagtgaccttatttaatcctaataagactgtggtgaagatgtttg

SEQ ID NO: 16462 - DNA, 459 bp, Homo sapiens
  SIMILAR (310)..(408): 511254mologous to Homo sapiens Human secreted protein, SEQ ID NO: 5165,accession number G01084,Smith-Waterman Score=63.
ctggtagttactgggtaacaagactgtgctggagggcaatgaaagctttctgttcgaccttttacagaacattcaggtgttcgtccttctgttatcagcaaggccaaagagaccaagaactcctctgcatcatattcaaaatattcatccagagtatctcggtcaggcttcattttcacatgcaattttcgcccagagtgctgtgaaatgcacctgtgggttctttcaacaggctcgccgatgattatacggcttctgcttcgctttcaaaatgcccttcgtacaaaaacgcctgtggaaacagaggcacctccgcagggttggtatggaaattcttccacctggtgcctgggcgcagccaactcttccagtcgcctgcgcctcccgagccctccggccgcgccgtcgggcctcacctgagtaaataccctctggctagccttcctgcggcaaccgcga

SEQ ID NO: 16463 - DNA, 531 bp, Homo sapiens
  SIMILAR (1)..(162): 1001254mologous to Homo sapiens Protein regulating gene expression PRGE-14,accession number Y58621,Smith-Waterman Score= 285.
cgaaaacataattttcattccttggatggaacttcaaccagagcctttcatcctcaaactggattgcctcttctttcaagccctgttcctcaaagaaaaacacaatcaggttgctttgatctggattcttcattactacatctgaaaagcttctcatctagaagtcctcgaccatgtttaaacattgaagatgatccagatattcatgaaaaaccatttttgagttctagtgctccacctataacaagtcttagtctcctaggaaattttgaggaatctgtcttgaactatcgtttcgatcctctcggcattgttgatggttttactgccgaggtaggggcaagtggtgctttctgccccacacatttgactcttccagttgaagtgtcattctacagtgtttcagatgacaatgctccctctccttatatgggtgtgattactttagagtcccttggtaaaaggggttatcggagtacctccttcaggaacaatacaagtggtatgtgttttatagcctacaattgcaat

SEQ ID NO: 16464 - DNA, 2775 bp, Homo sapiens
  SIMILAR (2348)..(2428): 1001254mologous to Homo sapiens Protein regulating gene expression PRGE-14,accession number Y58621,Smith-Waterman Score= 147.
  misc_feature (1)...(2775): n = a,t,c or g
atggcttctgtaaattctggggaagagaacaaaaacaggtggggaattttaagaagctgctacactccagaaccagaagagcatgcaaaagcagtcagtctgatcatagctcctagacaacctggtgcaagcacaatcctcattgaggtcttagatactctggatgaatattttgaatatgatgcagaggagttcttggtctctttggccttgctgataacagaaggacgaacacctgaatgttctgtaaaaggtcgaacagaaagctttcattgccctccagcacagtcttgttacccagtaactaccaaacatgaatgtagtgacaagctggcccagcactttgtgaggccaaggaatggtgaccgatttattgaagagaagacgcttctgttggctgtccgctcatttgtgtttttttctcagttaagtgcatggctgagtgtttctcatggtgctattccacgaaatattctctacagaatcagtgctgctgatgtagacctacagtggaatttttcacagactccaattgagcatgtgtttcctgttcccaatgtttctcacaatgttgccttgaaagtcagtgttcagtccttgcccagacaatctaattatccagttttgacgtgcagtattcacactaatattggcctttatgagaaaagaattcaacaacataaacttaaaactcatcagcaccataacccaaatgaagcagaacaatgtggtacaaacagttcacagcgtctgtgtagcaaacaaacttggaccatggcacctgaaagtgtgttacatgcaaaaagtggcccaagtccagaatatactgcagctgtcaaaaatatcaaactatatccaggcactggcagtaaatctgaccatgggacatctcaagccaatattctaggctttagtggtataggtgatataaaatcacaagaaacatcagtgagaactttaaaatcattttcaatggttgattccagtatctctaaccgccagagtttctggcagtcagctggtgagactaaccctttaataggctctttaattcaggagcggcaagaaatcattgcaagaattgcccaacatttgattcattgtgatccaagcacttcacatgtttctggaccgtccatttaatactcaagagtctaagttcactccattcaaaacttttccgggtttcacaagaaaatgagaacgtggggaaaaggtaaaagaagcttttctccatgactttttgggtagtccagagtttagttccccagaagacaccaatgagggggaaaattcgactaaaaccagaaactcctcgaagtgaaacttgtatttctaatgacttttattctcatatgcctgttggagagactaatcctttgataggctctttactccaggagcggcaagatgttattgcaaggattgctcagcacttggagcacattgatccaacagcatcacatatcccccggcagtcattcaacatgcatgactccagttcggttgcatctaaagtgtttaggagttcatatgaagacaaaaatttgttgaagaaaaataaggatgagtcctcagtttccatttctcacacaaaatgttccttgttaggagacatcagtgatgggaaaaacttagtacctaataaatgttttacttcttttaaaaataatagtaaagaaaagtgttctttgaaacatcaaacaagaaatcagtgtcagaacaatcctagtgaaatcatccaaagtacgtatcaggagacacagaacaaaagttctagtttatcaacttcctcaattttgtctcagcacaaagaaaataacttagatttgacaagcagattcaaggagcaagaaatgagcaatggaattgataaacagtattcaaattgcaccactattgacaaacagatttgtacaaataagtataaggaaaaaataataaatgagaactataatccaaaattctttggcaatcttcagtctgatgattccaaaaaaaatgactcaaaaataaaagttactgtgttggaaatgtctgaatatttgaacaaatatgaaagcatgtcctcaaataaagactcaaaaaggcctaagacatgtgagcaaaatactcaacttaatagcatagagaattatctcaataaagataatgaaggtttcaaatgtaaaaagtcagaccaattaaaaaatgaacaagataagcaagaagatccaactaatgaaaaatcccaaaactattctcagagaagaagtataaaagactgtttgtctacaatgtgagcaaccaaaaaattcagaggtattgaggacctacacctgaaacattcaaaatgtgtgggggcngaaaacataattttcattccttggatggaacttcaaccagagcctttcatcctcaaactggattgcctcttctttcaagccctgaatctgtcttgaactatcgtttcgatcctctcggcattgttgatggttttactgccgagaccttatttaatcctaataagactgtggtgaagatgtttgttgtgatatatgatttacgagatatgccagccaatcatcagacattcctacgacaaagaactttttctgtacctgttaaacaagaagtgaagagaagtgttaataaagagaacatccgacacacagaagaggggttattacgctacctcatacatctgaggttccagagttctaaatctggaaagatctacctccatagagacgtacggctcctgttctctagaaagtcaatggaggttgatagcgg

SEQ ID NO: 16465 - DNA, 555 bp, Homo sapiens
  SIMILAR (385)..(477): 771254mologous to Mus musculus Kruppel-related zinc finger protein F80-S,accession number AF211869,Smith-Waterman Score=118.
gcgaccgcgtggtatctcccgagggctgcttggaccctggtgggctcgagtgctccaccccgctgtgggcctcagataaccctgtacaaaggggaatggagattgcctgtatccacctagattcataagctgccctgaggcgatcttggcatcaagaaagacagcattgaggcacatctcaccatcagcttcagaggatgtcagcctttgatatgtcccatgggttttttcccagggaaccaatctgtcctttttgaaggaaaaggaccaaagattaggaaccgatggtaggaggaccacccggtcaaaattcttacccagtgaatattggtgggaagtgttcattggctcaaaccagcatgtgtttgatgacttaggattcaggtgacgtttgatgatgtggctgtggagttcaccccagaggagtgggctttactggacacaactcagaaatacctctacagagatgtgatgctgggagaactacatgaacctggcctctgtgggtaagagtaacatcactttgcttggcatggtggcctgcacctgtagtcc

SEQ ID NO: 16466 - DNA, 458 bp, Homo sapiens
  SIMILAR (303)..(431): 671254mologous to Homo sapiens Description: KRAB zinc finger protein; this is a splicing variant that contains a stop codon and frame shift between the KRAB box and the zinc finger region; Method: concep,accession number U37251,Smith-Waterman Score=153.
tgtggctcagcatggtcagtgccgtttaacctttattgtggtggagtccacccctgttgtgggctttagataaccctgtacaaaggggaatggagattgcctgtatccacctagattcataagctgccctgaggcgatcttggcatcaagaaagacagcattgaggcacatctcaccatcagcttcagaggatgtcagcctttgatatgtcccatgggttttttcccagggaaccaatctgtccttttgaagaaaagacaaagataggaacgatggtagaggaccaccggtcaaattcttaccaggattcaatgacgtttgatgatgtggctgtggagttcaccccagaggagtgggctttactggacacaactcagaaatacctctacagagatgtgatgctggagaactacatgaacctggcctctgtggtcaagagacacactgagtttgaatag

SEQ ID NO: 16467 - DNA, 349 bp, Homo sapiens
  SIMILAR (119)..(334): 931254mologous to Homo sapiens Amino acid sequence of a human secreted peptide,accession number Y10943,Smith-Waterman Score=371.
tttaaagctgtgatttaaaaactataaaataaacaatgaaatgagaaatgggcaaattcaaataattttattttaccttgagcaagaagactatgccaatgctaatgctttgctttcccctgcccctgcccttcccaaagagaagagaacagacagcaatggcagagtatatttcgtcaaccacaacacacgaattacacaatgggaagaccccagaagtcaaggtcaattaaatgaaaagcccttacctgaaggttgggaaatgagattcacagtggatggaattccatattttgtggaccacaatagaagaactaccacctatatagatccctggtcgacgcggccg

SEQ ID NO: 16468 - DNA, 2217 bp, Homo sapiens
  SIMILAR (1)..(2217): 1001254mologous to Homo sapiens atrophin-1 interacting protein 4,accession number AF038564,Smith-Waterman Score=4013.
ggtgacaaagagccaacagagacaataggagacttgtcaatttgtcttgatgggctacagttagagtctgaagttgttaccaatggtgaaactacatgttcagaaagtgcttctcagaatgatgatggctccagatccaaggatgaaacaagagtgagcacaaatggatcagatgaccctgaagatgcaggagctggtgaaaataggagagtcagtgggaataattctccatcactctcaaatggtggttttaaaccttctagacctccaagaccttcacgaccaccaccacccaccccacgtagaccagcatctgtcaatggttcaccatctgccacttctgaaagtgatgggtctagtacaggctctctgccgccgacaaatacaaatacaaatacatctgaaggagcaacatctggattaataattcctcttactatatctggaggctcaggccctaggccattaaatcctgtaactcaagctcccttgccacctggttgggagcagagagtggaccagcacgggcgagtttactatgtagatcatgttgagaaaagaacaacatgggatagaccagaacctctacctcctggctgggaacggcgggttgacaacatgggacgtatttattatgttgaccatttcacaagaacaacaacgtggcagaggccaacactggaatccgtccggaactatgaacaatggcagctacagcgtagtcagcttcaaggagcaatgcagcagtttaaccagagattcatttatgggaatcaagatttatttgctacatcacaaagtaaagaatttgatcctcttggtccattgccacctggatgggagaagagaacagacagcaatggcagagtatatttcgtcaaccacaacacacgaattacacaatgggaagaccccagaagtcaaggtcaattaaatgaaaagcccttacctgaaggttgggaaatgagattcacagtggatggaattccatattttgtggaccacaatagaagaactaccacctatatagatccccgcacaggaaaatctgccctagacaatggacctcagatagcctatgttcgggacttcaaagcaaaggttcagtatttccggttctggtgtcagcaactggccatgccacagcacataaagattacagtgacaagaaaaacattgtttgaggattcctttcaacagataatgagcttcagtccccaagatctgcgaagacgtttgtgggtgatttttccaggagaagaaggtttagattatggaggtgtagcaagagaatggttctttcttttgtcacatgaagtgttgaacccaatgtattgcctgtttgaatatgcagggaaggataactactgcttgcagataaaccccgcttcttacatcaatccagatcacctgaaatattttcgttttattggcagatttattgccatggctctgttccatgggaaattcatagacacgggtttttctttaccattctataagcgtatcttgaacaaaccagttggactcaaggatttagaatctattgatccagaattttacaattctctcatctgggttaaggaaaacaatattgaggaatgtgatttggaaatgtacttctccgttgacaaagaaattctaggtgaaattaagagtcatgatctgaaacctaatggtggcaatattcttgtaacagaagaaaataaagaggaatacatcagaatggtagctgagtggaggttgtctcgaggtgttgaagaacagacacaagctttctttgaaggctttaatgaaattcttccccagcaatatttgcaatactttgatgcaaaggaattagaggtccttttatgtggaatgcaagagattgatttgaatgactggcaaagacatgccatctaccgtcattatgcaaggaccagcaaacaaatcatgtggttttggcagtttgttaaagaaattgataatgagaagagaatgagacttctgcagtttgttactggaacctgccgattgccagtaggaggatttgctgatctcatggggagcaatggaccacagaaattctgcattgaaaaagttgggaaagaaaattggctacccagaagtcatacctgttttaatcgcctggacctgccaccatacaagagctatgagcaactgaaggaaaagctgttgtttgccatagaagaaacagaaggatttggacaagag

SEQ ID NO: 16469 - DNA, 1863 bp, Homo sapiens
  SIMILAR (899)..(1096): 1001254mologous to Homo sapiens bB94P8.1 (KIAA1326),accession number AL133274,Smith-Waterman Score=353.
atggcagtggcggctgtctggagtggccactgccatgacaccagctgcagtgggggaggcttgaccagggttgcatgctccatggagcctgtgggaaccaggaacaggtgggagcccctcctccttctgaattggaggggtgacagcctcgccttcccaggtgcagttgcaggggcccagctgggactgctgccccaggtatcctgtgctcttggggatccaggaagccctcctgccccagcaggcttgaaagagcctgcacctgctgcttggcctctcagctctccagctgcccactccaattttggagcaaagttgaggccaagcctgggcactgtggcaacctggactcaggacccaccaaatggcagggctgaaagagctgtaacacaaacagggctgaaacaccacccccccccaccccaacttgccacgttgggggtgatgaggatagaagagagcataagagaagagctgtgccctttggggagcctggacctaggagctccctgagccagggctgtgacaccctttttggggctctgtgggtcctggcatctccaagattccaggtgccaccatgttccctggtgcccaattcacttgcagtacagttggttcagctgcagccttgcagggatccagtgcccacgctggcacctgcagctgcccacctcaccacagccagtgtacctggttatgcgcagtggccggaacttgtgcttgctcactcacacacccctctcctccctgcatttgacttgcctttggcaggcatgggatccgggctggtagtgagacctgagtgcagcctgccaagccgagtgggtggaataagccctgtgggcccgagcaaaactcgagcaaaggcaccatcggccacagaggattctgtctgtcccagcggcgtgtcacatttcacctgccagaaggctctcaggaaagcagcagtgatggtggactgggagaccatgatgcaggcagccttaccagcacatcccatggcctgccccttggctatcctcaggaggagtactttgatcgtgctacacccagcaatcgcactgaaggggatggcaactccgatcctgaatctaagaaaagaagagagagagaagaagaagaaaaagaagaagaagaagagggaagaggagtgggaggaggaggagtgggaggaggaggagtgggaggaggagggggtaggaggaggaagaagaagaagaagaagaagaagaagaagcaacagcagcagcagcacaagcaacagcagcagcagcggaggaggaggaggaggaggaggaggaggaagaaaaaggagagagagagatttccccgttgccaaaataaggattttgctttaccttcaactgcttaagctaaaggggttggaacagtttgtaggactcagaagaagacaggaagatgtgggaaagtttggaacttcctagagacttgttgaatggctttgaccaaaagcctgatagcaatatggacaataaagtccaggctgaggtgttctcagatggaaatgagaaactttttgggaaatgcagcaaaggtgactcttttcaattaaatgaaaagcccttacctgaaggttgggaaatgagattcacagtggatggaattccatattttgtggaccacaatagaagaactaccacctatatagatccccgcacaggaaaatctgccctaatcaagatttatttgctacatcacaaagtaaagaatttgatcctcttggtccattgccacctggatgggccagatgtggaagtgattattttcaagcaccagtggtattgtagcaactacagcttcaagaagtacggaattgaatgcaaagggaaaagaggttga

SEQ ID NO: 16470 - DNA, 696 bp, Homo sapiens
  SIMILAR (696)..(553): 1001254mologous to Homo sapiens Secreted protein 33-58-3-C8- FL1,accession number Y59707,Smith-Waterman Score=235.
tcagcccttgagtggtagatgagactgggcgccgtggagcagggggtggcgctcatcggggaagcttgggcggcacaggagcccacggaggcagggggtaggcttaggcatggagggctgcaggtcccgagccttctgtgggttccaaatgtggatctcagaatcaagaaaacctcctaggttctgtaaacgagaatgattcacatcaccagtgtttactcgcaccctcaccaggcacaactccggggctgtgaggttctcaggcacaaggcacaccttgtcctgcctgcctgtccacgtcatgctcagggatcccaaggggccagcaaacagctcagcagggctacagcaggtgcttcctcgcttggtctttggaggcctgagaccctcgtcctgggccagggcctcccaagtctcccgctccttccagcgcctcagctgctcctcccgcattttgtagaagaggatgtgcttctgcacatcgctgagctcggcaaggagctcggggtcgatgtacatgtcgtgcaggatctgctgcagcatgatgccacccttctccagtgttttcaggtctatatcctccaggtactccagggccgctttctggggcttggacagaaacacgtctgtgttggcaagcagcaatgccaaggcagcagcccccagggctcctgcaccaatggaccacatccccat

SEQ ID NO: 16471 - DNA, 601 bp, Homo sapiens
  SIMILAR (67)..(600): 981254mologous to Homo sapiens Human secreted protein encoded by gene 10 fragment,accession number Y76266,Smith-Waterman Score= 936.
cttcctcggccgagccgggccgcgccgtcgctgtcgccgccgcgcgcggattctgcttctcagaagatgcgctatgatagatactctaacgccaaggtcagctgctggtacaagtacctccttttcagctacaacatcatcttctggttggctggagttgtcttccttggagtcgggctgtgggcatggagcgaaaagggtgtgctgtccgacctcaccaaagtgacccggatgcatggaatcgaccctgtggtgctggtcctgatggtgggcgtggtgatgttcaccctggggttcgccggctgcgtgggggctctgcgggagaatatctgcttgctcaactttttctgtggcaccatcgtgctcatcttcttcctggagctggctgtggccgagctggccttcctgttccaggactgggtgagggaccggttccgggagttcttcgagagcaacatcaagtcctaccgggacgatatcgatctgcaaaacctcatcgactcccttcagaaagctaaccagtgctgtggcgcatatggccctgaagactgggacctcaacgtctacttcaattgcagcggtgccagctacagccgagaga

SEQ ID NO: 16472 - DNA, 1214 bp, Homo sapiens
  SIMILAR (786)..(1208): 951254mologous to Homo sapiens Similar to transmembrane 4 superfamily member 9,accession number BC002920,Smith-Waterman Score =701.
tgggaccctccgggccggacggtttggtctattatttcccgggcgccggcgcggcaaaaggggggaagaggggaggcacttgagaaatgtctttcctccaggacccagagtttcttcaccatggggatgtggtccattggtgtaggagccctgggggctgctgccttggcattgctgcttgccaacacagacgtgtttctgtccaagccccagaaagcggccctgggagtacctgggaggatatagacctgaaaacactggagaaggaaccaaggactttcaaagcaaaggagctatggggaaaaaaatggagctgttgattattggccgtgcggaggccagggcttgttttcctcttgttcgagagggaagcatgcggatcttgtcctccctgaaaagcatgtttggaccagctgggcgtccccctctatgcagtgggaaaaggagcacatcaggactgaagttgaaggatttccagccttatttcaaaggagaaatcttcctggatgaaaagaaaaagttctatggtccacaaaggcgggaggatgatgtttatgggatttatccgtctgggaagtgtggtacaacttcttcccgagcctggaaccggaggcttctctgggaaacctggaaggaagaaaggcttcatccttgggggagttttcgtggtgggatcaggaaagcagacaaggaacttagaactgaaaagggatgagcagctgcacaaggagcacagctcatcggtggctctgctaggcctgaactcagattctgcttctcagaagatgcactattatagatactctaacgccaaggtcagctgctggtacaagtacctccttttcagctacaacatcatcttctggggtgtgctgtccgacctcaccaaagtgacccggatgcatggaatcgaccctgtggtgctggtcctgatggtgggcgtggtgatgttcaccctggggttcgccggctgcgtgggggctctgcgggagaatatctgcttgctcaactttttctgtggcaccatcgtgctcatcttcttcctggagctggctgtggccgtgctggccttcctgttccaggactgggtgagggaccggttccgggagttcttcgagagcaacatcaagtcctaccgggacgatatcgatctgcaaaacctcatcgactcccttcagaaagctgtaagcacctccccagcgggcccccgatag

SEQ ID NO: 16473 - DNA, 406 bp, Homo sapiens; identical to SEQ ID NO: 12970
  SIMILAR (50)..(304): 531254mologous to Mus musculus protein kinase,accession number U02313,Smith-Waterman Score=202.
  misc_feature (1)...(406): n = a,t,c or g

SEQ ID NO: 16474 - DNA, 443 bp, Homo sapiens
  SIMILAR (1260)..(2780): 261254mologous to Saccharomyces cerevisiae mal5, sta1, len: 1367, CAI: 0.3, AMYH_YEAST P08640 GLUCOAMYLASE S1 (EC 3.2.1.3),accession number Z38061,Smith-Waterman Score=228.
tttgagctttggatatgttttatttaatgtggtggcaattcatccaaggggtgatgttctcccagcatttggacacacagggctccaaaagtgaaaggccaagagaggactacaaggactgcctgggctggatggggttggactcaggctcctgggagtgagatccaaggtcagccccggaatctgtagcctttcccgctgggctttcatggttgttatatgttagcacactctattgtaaccatgacacacactccctgccagcgtcccggtgatgacagagagccaaaccgaacctctctaaaggactggactaacactctctcgagggggagggggaggctgcaagtttgggtccttccacctctagccgtaatcaagagatgtcagctgctttcctcaggttaacggcagtgcacactgcactgattttgttaaaggaa

SEQ ID NO: 16475 - DNA, 1569 bp, Homo sapiens
  SIMILAR (398)..(195): 331254mologous to Salmonella enteritidis quaternary ammonium compound-resistance protein,accession number AJ237702,Smith- Waterman Score=69.
ctaagtcaaatcagtggcgttgatagcaagcggagtattgagtttaaaacgctgaccatcgtgctgaagctcgataccaaaaccgggtacatcagtttcaattgctgcatcattaaaactggtttgtgtaccagtccaggtgagggtcatctcccaatctggatgacgggtcgtcgagtcacaagtgagttcatatggcacctctttacgaccatagttgccgttgatgtcgtcgataatgagatcgcgaaattcgacttcaatggttttaccaccgctgatgctacaggttggcggtgacaataatgtcccgtgaaaggtgatgtcttcatcagcagcatgagctatggcgctactgacacaaagcagggttaagaaagtcatggtcaaactggcgttaaactcgcccgcagcaagttgcgccccgcttgccttcacaggtacagccttcaactgtggctggttattgatattaaatggcgtccagctattttcaccgacggcaaacaatgagttatcggcgctattttctatccgaatgcccagcccggtgatattggtactgagtaccgtttcgccgttaatcgttgaggtattgcccttaagttgcatccgcaagtcgttagcaagactgtttgtgcagttcaacgtgtatttcgcatcttgccgataattggtgccatcaacgttatcagcaatcatattggcgaactctaactggctggccttgattgaaccaggtggcggagcatcgaccaaaaggcccgaattaatccacgggttcttacaccaagagattaataagaccttcattgttgtatcagactcaggcaatgtagcaatcattacagcatgatgtaaccctctgagtcccagtattactgagctatcccgaacccgcaccaagtggtcatggcctactaaggggctcggcacagatagccttatagaccatacctgcagatccagcggggacttatctaaagacccgggagccaacacttggttgtcaaacagttcctttgcctgctccgcatctgtctgtcgacaccgtatgccgatgcttgagttcttctgtgtggccacagtgacactacaggtagcgcatctcatcatcctgagaatctgaaaatctcggatagctgtgacactgggatctctttccctttttcttttcctctccccatttctcatgctttcttttcttccctctgcaccctttcttcttcttcctttttccttctcccacctcctcagctgccacacgtcaggcctctggtgtctggttgggttcagccccatggggagatcgtgggccgctttgaacgatggcatctggggtgcaatgaggtgatcagtgctttgagaggctacctgcgctgtgcaagcaatcgagtgcttaagatttagtatacacatcgggtctgtgttgctctgaaaatagcagcggattgaggcacagtctagagtcagggcgtgaatgtaggtccgcttgtattgatttctctcctgactctgcccctcctcctcctcctcactgcctcttccttgttcctggccctcagccat

SEQ ID NO: 16476 - DNA, 1359 bp, Homo sapiens; identical to SEQ ID NO: 12972
  SIMILAR (254)..(874): 491254mologous to Homo sapiens E2IG3,accession number AF191018,Smith-Waterman Score=419.

SEQ ID NO: 16477 - DNA, 1260 bp, Homo sapiens
  SIMILAR (595)..(966): 551254mologous to Mus musculus protein kinase,accession number U02313,Smith-Waterman Score=289.
  misc_feature (1)...(1260): n = a,t,c or g
atggtcgtctgtctggcagctctcctctggctgctgctcttaatacaacagaaggtcacaggtcctgtctcacgtcttcgcgtctccgggttctataactgttccctctctcacccctttaggcctagaggtggtaatggctccctgtcacttctagctcctgacttcttccctatagccagtcagagtcttcaaatgaatatagacagagtaatactcccatgtaatgatcctactattgaatttcagaactgctcagaacagagtgagcagccttgccctgagtcatttcacctaaaaggaaagagaattaaggagttgccttcaatggatctccccatggggctgaacccaaccagacaccagaggcctgacgtgtggcagctgaggagggctgtcagatatgcctatgccatattcagcacatccgtggagcacgcgtatcatgtgtggcctgagacccgctgctttccatacgtgttggctggaaggtctgaagtaatccggcaattaagtgttggaggcccagtttctcttaagatgcttgaagccccctttgcagagcaaaagcttgaccacatattatcccctccacccatgccgtttcggaaatgcagcaacccagatgtggcttctggccctggaaaatcactgaagtataaaagacagctgagtgaggatggaagacagctaaggcgagggagcctgggaggagccctgactgggaagtaccttcttccaaacccggtggcgggacaggcctggccggcctctgcagagacgtccaacctcgtgcgcatgcgcagccaggccctgggccagtcggcgccctcgctcaccgccagcctgaaggagctgagtctccccagaagaggaagtttgatagattcccagaagtggaattgcttggtcaaacgtctcactcccaggagcctgagtccaaccccatccagcccaggcagtccttgtagtcctctcttggcctttcacttttggagggaatgatctgcactgaattctccctgtgtgtccaaatgctgggagaacatcaccccttggatgaattgccaccacattaaataaaacatatccaaagctcnnnnnnnnnnnnnggggggggccgttttaaaggacccttgggggggccaaagttaacgggggcgggcagaggaatagttttttccttatagggagccgaattaaaacctacctgggaattttgggaaaggaccctttttttgggggggggacatattggcc

SEQ ID NO: 16478 - DNA, 581 bp, Homo sapiens
  SIMILAR (2909)..(1317): 901254mologous to Homo sapiens putative p150,accession number U93564,Smith-Waterman Score=2552.
  misc_feature (1)...(581): n = a,t,c or g
ccagccccggggaaaaaaattttcaaaaaacaaacccaggaaacaaaactttccaacccccaagcatatgcgagttgttttacccccctttcccctttaaaattttttattttccctaaaggccttaaatttctggagggaggttgtcccaatatttcccccccccaaaaaaaaggttcccttccaaaaatccccaggtaggttttaatacggccccccataaggaaaaaactatttccttgcacagcccgcgtaaaacttgggcccccccaaggatcctttaaaacggccgcccccnnnnnnnnnnnnnngtaaagcgctgatcctgtttatttggcaggaaaacgagacaatccagcagcccaggagggacaggtggacttaatcctcctcctcgtcgtctccagccccagccccaccctggcccttcttggcattcttcctcttcacgcggcccgggcggccacccccgtagggagagcgcagagagaagtcgatgtgcttctgggaatccaggcggacaatgaaggacgggatgttcaccacctgcttgcggaccctgatatggcgctggcggatca

SEQ ID NO: 16479 - DNA, 513 bp, Homo sapiens
atggaagaagcagaagacagaattattaagcttgaagacagctatttgaaaacacacagtcagatgagacaaaacaagaacaaaacaaacaaaataaaaaatgaagcaccgctacagaatctagaaaagtgcctcaaacaggcaaatctaagagttattggccttaaagtggagatagagaaaaagcccaaacgacgacaacaaaaatgtatcctactaacgtacacaactgtgaaaccgagcaccataattcacccacagctatgggtgacaggattagccatgtacaggatcaccggacatggggagattttttctctccccaaaagagaacacttgagagccgatggggctgccagaaaagatcctttcatgacccacaagcagctgcctgaacttttgattcagcatcactgcaatggaccagaaagacatatttattcactggtgtcctacacagacctacaacccatgacagctctgtctgtcctcaggctagaagacaaaaaatga

SEQ ID NO: 16480 - DNA, 567 bp, Homo sapiens
  SIMILAR (235)..(519): 761254mologous to Mus musculus Pro-Pol-dUTPase polyprotein,accession number Y12713,Smith-Waterman Score=393.
tcattttttgtcttctagcctgaggacagacagagctgtcatgggttgtaggtctgtgtaggacaccagtgaataaatgtctttctggtctaccgtgtgtgtgtgtccttgttgtgcatcattacaatgcatacactgtactttatataatgattttatagaaattgtagaagtgtagaagagcctctctctctctcgttcctcctcctcttcctcctcctcctcttcctcctgctcctcctcttcctcctcctcctcccctacatctggggcatcctggcgctggcagcgggtaccacccaggcgggtatggagggactcctggagggcctgcatttcccagaaaaactcaggatccactatatgattactttgctgctgtagctggacatgatgggcaaatagatgctgatgaattgcagagatgtctgacacagtctggcattgcaaattatccttataaaccccatcctgagtttttcgggagactgacatcagtaataataaaattttggtctccagtatagccagttctgcacgaattaaactctttattgcaattcccat

SEQ ID NO: 16481 - DNA, 594 bp, Homo sapiens
  SIMILAR (118)..(591): 771254mologous to Homo sapiens sorcin CP-22,accession number M32886,Smith-Waterman Score=625.
  misc_feature (1)...(594): n = a,t,c or g
atggcgtacccggggcatcctggcgccggcggcgggtactacccaggcgggccctcagtggtgaaagaagaaaacttgattcggcagaatgacgtgtatgtgtttcctgtttcacagtatggaggggctcccggagggcctgcgtttcccggacaaactcaggatccgctgtatggttactttgctgctgtagctggacaggatgggcagatagatgctgatgaattgcagagatgtctgacacagtctggcattgctggaggatacaaaccttttaacctggagacttgccggcttatggtttcaatgctggatagagatatgtctggcacaatgggtttcaatgaatttaaagaactctgggctgtactgaatggctggagacaacactttatcagtcttgacactgacaggagtggaaccagtagacccacaagaattgcagaaggccctgacaacaatgggatttaggttgagtccccagggctgtgaattcaattgcaaaacgatacagcaccaatgggaaagatcaccttcgacgactacatcgctgccttgcgtcaactgagggctcttacagacagcttncgagac

SEQ ID NO: 16482 - DNA, 297 bp, Homo sapiens
  SIMILAR (61)..(294): 781254mologous to Homo sapiens Human secreted protein encoded by gene 108 clone HEBEK93,accession number W74836,Smith-Waterman Score=297.
atgatgctgagggcttcagtatttaaagggaaaaagtgggctaaaggtgaaaagaggaaagagcagagcttctctagggaacttggatgcgaaacaactatggtaaaggacatcctggctgaagagggactgcactttgatgagttgaacaagctgtgggtgttggactcagaggttacccagcagaccacagagctcaaagaagagtgcaagaactttgcggacaaaactggccagtttcagaaaacagttggtggtttaattgagcttgttgataaacttgcaaaaaaagcgtaa

SEQ ID NO: 16483 - DNA, 484 bp, Homo sapiens
  SIMILAR (455)..(387): 561254mologous to Elephantulus edwardii reverse transcriptase,accession number U62039,Smith-Waterman Score=69.
tttttttttttttttttaaatcttgggggaaagtgaccacatactgtacaccaaaaattatctgacacaggtctaaaacaatttagaagttaattttgccaaggttaaggacatgcctggaagaactaaatagggaatcccagaaacagtctggtctgtgccttttctccagagatgatgctgagggcttcagtatttaaagggaaaaagtgggctaaaggtgaaaagaggaaaggtatggtaatccgcatgttgcaagaaaaaaggagcagcactgggcacagtggcctcacccctataatcctaggcactttgtaaggccgaggtgtgtcttatactccaaatcctgaagatcccttaatctgctaagcagtctaggtaccacatataaatggaatcatacattattagtctttttgtgactggcttatttcacttagcataacatcctcaaggtcatcgtgttgtatatgtgtcagaatgt

SEQ ID NO: 16484 - DNA, 414 bp, Homo sapiens
  SIMILAR (637)..(1191): 851254mologous to Homo sapiens putative p150,accession number U93565,Smith-Waterman Score=789.
gcctgaatgtctctgaccccagtgacttcatccggaccaaccctgactgccacagtgatggggggtacctggactacctggaaggcatcttctgccacttccctcccagcctcctccctctggctgtcactctctacgtttcctggctgctctacctgtttctgattctgggagtcaccgcagccaagtttttctgccccaacttgtcggccatttctaccacactgaagctctcccacaacgtggcaggcgtcaccttcctggcatttgggaatggtgcacctgacatcttcagtgccctggtggccttctctgacccgcacacagccggcctggcccttgggcgactgtttggttacctgggcttgtatgtgttctatgtggtcactggtgattctctgcacctggatctac

SEQ ID NO: 16485 - DNA, 928 bp, Homo sapiens
  SIMILAR (392)..(484): 961254mologous to Homo sapiens Human antizuai-2 (AZ-2) amino acid sequence,accession number Y78795,Smith-Waterman Score=165.
cttaaggccacacagatagtaagtggccgagacgaatttgaaaccaggggtgtcctgtttgaacttggtgccaaatagagtaactcggactccagttggaggggttcgggagaacatagaagaggaagggccgtgtcttccgtggacaggccaccggagccgccagctgtttggaactgagctactgcagaaagggaagtggagagtaagggccaggccccgtggggcgagatggccggcagaaggctgaatctgcgctgggcactgagtgtgctttgtgtgctgctaatggcggagacagtgtctgggactaggggctcgtctacaggagctcacattagcccccagtttccagcttcaggtgtgaaccagacccccgtggtagactgccgcaaggtgtgtggcctgaatgtctctgaccgctgtgacttcatccggaccaaccctgactgccacagtgatggggggtacctggactacctggaaggcatcttctgccacttccttcccagcctcctccctcttggctgtcaattctctacgtttcctgggctgctctaacctgttttctgaattctggggagtcaaccgcagccaagtttttctgccccaacttgtcggccatttcttaccacactgaagctattcccacaacgtggcagggcgttcacctttcctgggcatttgggaatggtgcacctgacatcttcagtggccctggtggccttctctgacccgcacacagccggcctggcccttggggcactgtttggcgctggcgtgctggttaccacagtggtggccggaggcattaccaccctactcctatttattcagcaccacactacccaggaaatacactagcaaattgtgcaatggataaaaaccacactttagattcttgcaactgtatcatatgtaataggat

SEQ ID NO: 16486 - DNA, 1107 bp, Homo sapiens
  SIMILAR (189)..(416): 591254mologous to Homo sapiens TACC2 protein,accession number AF095791,Smith-Waterman Score=207.
atggtgtgccgcaaggtgtgtggcctgaatgtctctgaccgctgtgacttcatccggaccaaccctgactgccacagtgatggggggtacctggactacctggaaggcatcttctgccacttccctcccagcctcctccctctggctgtcactctctacgtgaggccctgccctggggggctggtttcctggctgctctacctgtttctgattctgggagtcaccgcagccaagtttgccctggtggccttctctgacccgcacacagccggcctggcccttggggcactgtttggtgagagcagccccagcgctggcgtgctggttaccacagtggtggccggaggcattaccatcctacaccccttcatggctgcctccaggcccttcttcagggacatcgttttctacatggtggctgtgttcctgaccttcctcatgctcttccgtggcagggtcaccctggcatgggctctgggttacctgggcttgtatgtgttctatgtggtcactgtgattctctgcacctggatctaccaacggcaacggagaggatctctgttctgccccatgccagttactccagagatcctctcagactccgaggaggaccgggtatcttctaaataccaaacagctaaggactacggtgaatgagtaccggccgctgttcttctacccaggagaccacggctcagatcctggtccgggcccctcaaatcccctggattacatgaagtggagaaggaaatcagcatactggaaagccctcaaggtgttcaagctgccctgtggagttcctgctgctcctcacagtccccgtcgtggacccggacaaggatgaccagaactggaaacggcccctcaactgtctgcatctggttatcagccccctggttgtggtcctgaccctgcagtcggggacctatggtgtctatgagataggcggcctcattcccgtctgggtcgtggtggtgatcaggcaggcacagccttggacatcagtgaccttttatgccacatataacagccagccacccagaaaacactgagctctttgctttcctaggcatatctgaccagcgccctgtggatcaacgcggccgc

SEQ ID NO: 16487 - DNA, 406 bp, Homo sapiens
  SIMILAR (64)..(519): 281254mologous to human herpesvirus 1 infected cell protein,accession number M12240,Smith-Waterman Score=88.
agctgagtttgctgaatatgcctcggtggacagaaacaaaaaatgtcgtcaaagtgttaatgtagagagtatccttggaaattcatgtgatccagaagaggaggccccaccacctgtccctgttaagcttctggacgagaatgaaaaccttcaggagaaggaagggggagaggcggaagagagtgccacagacacgaccagtgaaactaacaaggtgggcactggcgtttttgttttgtctttgtgggttcctgttctggttaggaatctagctggccctggagttgttctgggaaatatctgcaaacactttccagtttgttgaatgatgagagctgttttcatgtaagctgtgtttggctttttccccctccaagtaataaaataccaaaaacttgtatttatc

SEQ ID NO: 16488 - DNA, 1776 bp, Homo sapiens
  SIMILAR (3)..(194): 891254mologous to Homo sapiens initation factor 4B,accession number X55733,Smith-Waterman Score=305.
atggggcccgcggggagcctgctgggcagcggacagatgcagatcaccctgtggggaagtctggctgctgtcgccattttcttcgtcatcaccttcctcatcttcctgtgctctagttgtgacagggaaaagaagccgcgacagcatagtggggaccatgagaacctgatgaacgtgagcaggggttcttctgcagtgtggcctggacctccacccacagcagcagcagcacctgggagctccttagaaatgcgaattttcctgggggtgaggcccagtaaaaggctcgcaagcaccccaggtgatccagttgtatgctcgagtgtgagagccactggcctagagcttgggttcccgctgttctactcaaggtcagcagcagccctgggcgagataggaagagagtggcagccttcagacaaggagatgttcagccgttcagttactagcctggcaacagatgctcctgccagcagtgagcagaatggggcactcaccaatggggacattctttcagaggacagtactctgacctgcatgcagcattacgaggaagtccagacatcggcctcggatctgctggattcccaggacagcacagggaaaccaaaatgtcatcagagtcgggagctgcccagaatccctcccgagagcgcagtggataccatgctcacggcgagaagtgtggacggggaccaggggctggggatggaagggccctatgaagtgctcaaggacagctcctcccaagaaaacatggtggaggactgcttgtatgaaactgtgaaagagatcaaggaggtggctgcagctgcacacctggagaaaggccacagtggcaaggcaaaatctacttctgcctcgaaagagctcccagggccccagactgaaggcaaagctgagtttgctgaatatgcctcggtggacagaaacaaaaaatgtcgtcaaagtgttaatgtagagagtatccttggaaattcatgtgatccagaagaggaggccccaccacctgtccctgttaagcttctggacgagaatgaaaaccttcaggagaaggaagggggagaggcggaagagagtgccacagacacgaccagtgaaactaacaagagatttagctcattgtcatacaagtctcgggaagaagaccccactctcacagaagaagagatctcagctatgtactcatcagtaaataaacctggacagttagtgaataaatcggggcagtcgcttacagttccggagtccacctacacctccattcaaggggacccacagaggtcaccctcctcctgtaatgatctctatgctactgttaaagacttcgaaaaaactccaaacagcacacttccaccagcagggaggcccagcgaggagccagagcctgattatgaagcgatacagactctcaacagagaggaagaaaaggccaccctggggaccaatggccaccacggtctcgtcccaaaggagaacgactacgagagcataagtgacttgcagcaaggcagagatattaccaggctctagcaacccagaagacaaccctgggtagcctgtgatcagtgtctggagacgtttcttctgtggaagagaagaagtgacacamaccctatacttcatatgctgctttagtcacctgaagatgggtggagaggccctgtcgactgttctcccagttgttcagtttctgagacagagaggtacggactaagctgcacctgagtgtgcccctgcctgccagatggacaggtacacccaagcacatctccc

SEQ ID NO: 16489 - DNA, 873 bp, Homo sapiens
  SIMILAR (702)..(391): 721254mologous to Homo sapiens NAG13,accession number AF194537,Smith-Waterman Score=367.
tcacaatagagcttgctgctgctcactctttgggtctgcaccacctttaagagctgtaactctcactgtgtaggtctgcggcttcactcctgaagtcagcgagaccacgaacccaccagaaggaagaaactctggacacatctgaacattgagcttgcctttcacaggcaaacaaaatccattttcttcatctctttgtcctgtgaaaaacaaggagatccaagtcagtgcaccaaaggagacaattttgcccttcaggcttctgatcaaacaaggcttggagcagctctggtcactgcttctcatctttgctgttgacctcagttctttcctttcaggttcttcacttatgagatgtggtatggaacggattccaggaggattccaggctctctggtagaattcagctgtgaatccatctgctcctggactttttttggttggtaagctattaactgttgcctcaatttcagatcctgttattggtctattcagagattcaatttcttcctggtttagtcttgggagggtgtatgtgtcgaggaatttatccatttcttctagattttctagtttatttgtgtagaggtgtttatagtattctctgatgatagtttgtatttctttggtccttgatgatggtgatgtacagatggggttttggtgtggctgtcctttctgtttgttagttttccttctaacagtcaggaccgtcagctgcaggtctgttggagtttgctggaggtccattccagaccccgtttgcctgggtatcagtagtggaggctgcagaacagcgaataatgctgaacagcaaacgttgctgtgtgatcgttcctctggtggtttcctctcagaggggtacccggccat

SEQ ID NO: 16490 - DNA, 1737 bp, Homo sapiens
  SIMILAR (1948)..(986): 681254mologous to Homo sapiens protein A1-alpha (AA 1- 320),accession number X06747,Smith-Waterman Score=1004.
ctattcagtcactcctacataatagggtacactcaggttttctgcaacaattttcaatagttttaggtgggtaataagtatgtagtgctctatccatgatttatgttccttttccatggagtaaagttgttggttggcaatggcttccatgatgtgactacatttcccatccacttttgcttcaacaattataaattctatactgattatgtcatatagaactgtaaaagaatcaagatcttcatcagacatcaataatttttcagcaacagttgaagagtctgaccctgtaaactctttccctgctgcaacacctgctattctcagtgtataggactttttcagggtagcaggcaagaggagcctggttgaacaattacacatcttgggtaaatacctcaatgttggttccccgtgttgcttttgcttgtgggtttccgctccagcaagctgcagttctctgcgttcacctgttgggctctccaatattaggagcagcagatagctctgtgactccacctttttgttggatggcaaatgctcacatttgtggacttcagttgcaaaatactctgagttttgctgagcccatctatttaggccaagagcatgctcaactctcttgatgcttaataactcagacctcttagtcaataaccagtattcaggatcctgcaaccgccaaggctctgtgctcatcccatggctggtacgggatatgccgcgataggcttccacctccggcgtcagtgtctggactatagggagcctgcaatgcctgaaaacttggagatggcagaaactgtgaggctgagtccagggtttatatgtgctcagaatggaggagtgcatgctgattggtccttgggcaggtctggaaaaagcaccatttgattggctaaaaggcatccaggaagtaaagaagttcttactccggtgacgggctccacccaaaacggcactgcgctcgatttctcgccgggccttagctgccttcccgcggggcacggctgaggatccgcagcccgccatgcctgagcctcccaccccctccgtgggctcttgtgcggcccgagcctccccgacgagcgccgccccctgctccagggcgcccagtcccatccaccatccaaaggggctgaggagtgccagcacatggcgcgggactggcaggtagctccactctgatgtttgccacacattcacccttgcttgcttcagaaatattcgtgggccttggagatgctgggcatgaaggtctgcggcttcactcctgaagtcagcgagaccacgaacccaccagaaggaagaaactctggacacatctgaacatctgaaggaacaaactcctgacacaccatctttaagagctgtaacactcaccgtgaaggtccatggcttccttttgaagtcattgagaccaagaactgggcacatcttggtgaccactaagggactatcacctgtcagccagttaaaagcgactagtacggccactggactaaagacacgggtgtcaggcttactgggaaagggctctctaacaacccccgactctttggagttgggaccattggtttgcctagaaccagcttccgcttttcctgtacttcttccttggtcctccttgtggtctaggaggaaaactagagtttctgctgctgcatcagtgagtgcaactattccgatcaacagggtccagggaatgctgcaggttcttgggcaagaggtgttcat

SEQ ID NO: 16491 - DNA, 651 bp, Homo sapiens
  SIMILAR (601)..(1071): 651254mologous to Homo sapiens FLJ00061 protein,accession number AK024468,Smith-Waterman Score=540.
ctaggagtcaaactgccgggttacaggatatagatgcttggctaagctcttgggggtgactacgggatgaccacagaatggaccacccccaagggcagcactaccagtgaggccaccactggggctactcagaccacagacctgctgctcccgccatgactgcctcttgatacccagggagttggacacttggtatagtaatgccaaactctcacatttccatgaccttacttgtcggtaatatttttctttgactatggcataaatgaggaacaatgccagagacccatccagggcgacggtcagaatttccacagacacaatggttggatcaaaataaacccatcttgcatcagctttgccatattctttcccttcggtgctgagaagaacatgtggtccactcccgtaactgaggcttttaatcttctttccacataagccttctagctttttgggtacaagtgtactctggttatctccagttcctagacagttactatagttcagtccaaatacaaagacctcatcattgtcagtaacgtacagtgcttcactggctgaggtgccgaagacacacgccttccgaatagacgcgatctcttgaggggagagtagagtgaagatgggccactttccgacatccaccat

SEQ ID NO: 16492 - DNA, 1347 bp, Homo sapiens
  SIMILAR (343)..(684): 871254mologous to Homo sapiens Amino acid sequence of a human secreted peptide,accession number Y12916,Smith-Waterman Score=520.
atggggaagctggtttcagtggaactgacagtaaagggagggtctgcagcttcattcctgaagtcagcgagaccacgaacccaccagaaggaagaaacaacatcagatgcaccacctttaagagctgtaacactgactgtgaagatctgcagcttctctcctgaagtcagcgagaccacgaacccaccagaaggaagaaactctggacacatctcaacatctgaaggaacaaactccagacacaccatctttaagagctgtaacactcaccgcgaaggtctaagtcatcagaaaagaacattagaacattctcacagagccttacaatctgaaaacccactgcctttcgaaaggatcaggcaagtaggaaacgttgcaaattccgatggcttgattgcttctttatggaaagaatatggcaaagctgatgcaagatgggtttattttgatccaaccattgtgtctgtggaaattctggccgtcgccctagatgtgtctctggcattgttcctcatttatgccatagtcaaggaaaaatattaccggcatttcctgcagatcaccctgtgcgtgtgcgagatgtatggctgctggatgaccttcctcccagagtggctcaccagaagccccaacctcaacaccagcaactggctggctgtactgttggctttacctgttttttttttaacgtgtttcctgggagatccaatgaacacggaacgtccaaaattgcctgccattaaaggtgatataatgggagtaacctcgggaaaaggtgtgaaatatccgcagtacgtcttgcccgtgtgttgccagtatgttatattgaaaagccaatctgacgtcaagggggtgtacatggggtctgcaagtgatgctcgggaattacaaggtagtgtgggaaattttgacgttgtaggagttagaagattgaaggttggggtgaacgcacacgggtttttcaccagtgcacagacagttgtaaatacagacaggccaagtgcacaagcattgcatgcactgcaggtgtggcgcaaaaagaacgtcctcaacaatctgtgggcggccccgctgctggtgctgtatcgcattatcaccgaatgctttttcggttatgaaatccaggctgccgcgaccattggccgccgctttactatccatcacggttacgccgtcgtgatcaataaaaatagtgtaaagggattattggacttagaacagcaattagcacgggtccaggctcatcatcgatgccccttgcaacccggcacacaactcggaaccacccccgcaatccaacggccgaccacaccccggacaacccccaagcgggatcggcgccaatag

SEQ ID NO: 16493 - DNA, 824 bp, Homo sapiens
  SIMILAR (1)..(1239): 991254mologous to Homo sapiens Membrane-bound protein PRO1124,accession number Y66749,Smith-Waterman Score=2133.
cggaagcctgaagcatgggcgctgagtgggagctgggggccgaggctggcggttcgctgctgctgtgcgccgcgctgctggcggcgggctgcgccctgggcctgcgcctgggccgcgggcagggggcggcggaccgcggggcgctcatctggctctgctacgacgcgcatggtgcacttcgcgctgggaaagaatatggcaaagctgatgcaagatgggtttattttgatccaaccattgtgtctgtggaaattctgaccgtcgccctggatgggtctctggcattgttcctcatttatgccatagtcaaagaaaaatattaccggcatttcctgcagatcaccctgtgcgtgtgcgagctgtatggctgctggatgaccttcctcccagagtggctcaccagaagccccaacctcaacaccagcaactggctgtactgttggctttacctgtttttttttaacggtgtgtgggttctgatcccagggactgctactgtggcagtcatggctagaactcaagaaaatgcatccagaaagaaaccagttcagtgaagaagtttcaagtgaactttcaaaaccataaacacccttattcttaactttcatggaaccagaatgaattcaaatctttttgtttggccaaaatgtaatacattccagcctacactttggttttgtattgtagctcccgaacaacctgtttcaaaatgggttttaaggcgaccagttttcgttgtattgttgttcaattaaatggtgatatagggaaaagagaccaaatttgaatttgtaataataaaatgtttaattatacattttaaa

SEQ ID NO: 16494 - DNA, 463 bp, Homo sapiens
  SIMILAR (267)..(392): 691254mologous to Homo sapiens Amino acid sequence of a human secreted protein,accession number Y10816,Smith-Waterman Score=154.
cccacgcgtccggaaacctctgttttcttagatttggagcaggatggtcacactgaccttgcagagttctgagaatcagagacagaacataaaaggcctggaaaacattctccaaaaagaagctgcaacatgtgtggacaatgggcttttcatgcctctcttactgtctcttactgtctattgacctggtgcaacgaaacatgctctggtgatggctgtgagggaggaatgaggatagacatagaccctcctgtgtctcaaacacgcttctttattactctgctatgactctgccttccctggggcaggaccccagcctgcctacttttgcacacagacacagtgccatgtggagacaccacgtgtgtcccaatgatttttcctttacccccttcactgtacgacatatcttcgctgtcatgggtgaccattaatatctacctggcccacttgcctatttttc

SEQ ID NO: 16495 - DNA, 669 bp, Homo sapiens
  SIMILAR (85)..(303): 471254mologous to Homo sapiens dJ979N1.1 (dJ979N1.1),accession number AL035659,Smith-Waterman Score=198.
atggaggattcggcctcggcctcgctgtcttctgcagccgctactggaacctccacctcgactccagcggccccgacagcacggaagcagctggataaagaacaggtatatttgcgtgctctcgtgagaaatctttttaatgaaggaaatgacgtttatcgggaacatgattggaacaactcgataagccagtacacggaagccttgaatatagctgattatgcaaaatctgaagaaattttaatccccaaagaaataattgaaaaactatatataaatcgtattgcctgctattctaatatgatccccccttctgcaagaaaggctctttgcaactggatttggagcagggtggtcacactgaccttgcagagttctgagaatcagagacagaacataaaaggcctggaaaacattctccaaaaagaagctgcaacatgtgtggaccatgggcttttcatgcctctcttactgtctgttgacctggtggcagaacatgctctgatcatcatggaggaacagggcttcaaacagaaggaagacgtggctgaagtgttgctaacgccggtatcccaatatctagggagccatagctggggatatgaggagttcgagaccagcgtggccaacatggcgaaaccccatgtctacggaaaacacaagaattag

SEQ ID NO: 16496 - DNA, 1840 bp, Homo sapiens
  SIMILAR (736)..(1539): 851254mologous to Homo sapiens cytokeratin 18,accession number X12881,Smith-Waterman Score=1137.
gcggccgccgccgccgctgcggacgggttgggggagtgagttgggagtttagcgcagtcgccggagtgcgaggacaacgaccatccggccctagcctggccgtgcgggtgccgggagcttccctttctcagcgcggcgcgaaggtggctcgccgtcagcgcctgcttccctcgacctcgtcctcctccccgctccggaggagctgcgagatgtggcgcctctgactccacttctccccgcccctgtcaccgagagggggaaccgagctctcgcccactcgccggaggagacggcccctggactcccaaccccgcgcggcgaaaccatgagctccgtccagcagcagccgccgccgccgcgtaggatcaccaacgtggagtctctgttgctcaccccgcaggagaacgagtccctcttcactttcctcggcaagaaatgtgtgactatgtcttcagcagtgctgcagttatatgcagcagatcggaactgtatgtggtcaaagaagtgcagtggtgttgcttgtcttgttaaggacaatccacagagatcttattctttaagaatatttgacattaaggatgggaaactattgtgggaacaagagctatacaataactttgtatataatagtcctagaggatattttcatacctttgctggagatacttgtcaagttgctcttaattttgccaatgaagaagaagcaaaaaaatttcgaaaagcagttacagaccttttgggccgtcgacaaaggaaatctgagaaaagacgagatcccccaaatggtcctaatctacccatggctacagttgatataaaaaatccagaaatcacaacaaatagattttatggtccacaagtcaacaacatctcccataccaaagaaaagaagaagggaaaagctaaaaagaagagattaaccaagggagatataggaacaccaagcaatttccagcacattggacatgttggttgggatccaaatacaggctctgatctgaataatttggatccagaattgaagaatctttttgatatgtgtggaatcttagaggcacaacttaaagaaagagaaacattaaaagttatatatgactttattgaaaaaacaggaggtgttgaagctgttaaaaatgaactgcggaggcaagcaccaccacctccaccaccatcaaggggagggccacctcctcctcctccccctccacatagctcgggtcctcctcctcctcctgctaggggaagaggcgctcctcccccaccaccttcaagagctcccacagctgcacctccaccaccgcctccttccaggccaagtgtagaagtccctccaccaccgccaaataggatgtaccctcctccacctccagcccttccctcctcagcaccttcagggcctccaccaccacctccatctgtgttgggggtagggccagtggcaccacccccaccgcctccacctccacctcctcctgggccaccgcccccgcctggcctgccttctgatggggaccatcaggttccaactactgcaggaaacaaagcagctcttttagatcaaattagagagggtgctcagctaaaaaaagtggagcagaacagtcggccagtgtcctgctctggacgagatgcactgttagaccagatacgacagggtatccaactaaaatctgtggctgatggccaagagtctacaccaccaacacctgcacccacttcaggaattgtgggtgcattaatggaagtgatgcagaaaaggagcaaagccattcattcttcagatgaagatgaagatgaagatgatgaagaagattttgaggatgatgatgagtgggaagac

SEQ ID NO: 16497 - DNA, 2027 bp, Homo sapiens
  SIMILAR (134)..(3): 901254mologous to Homo sapiens DREV1 protein,accession number AJ278578,Smith-Waterman Score=203.
agcggccgccctttttttttttttttacatgtgatacctttttttaatggcttataattttagtttaaaaaaattttaatacacaataactgtacatatttatgggggtacatagtgatgttgcaatacatataacatatagtgattagggtaattagcatatctatcatctcaaaaacttatgtctttgttttgggaacatgcaatatccttcttctagctatttgaaactatacaatattgttaactatagtcattctacagtgctacagaacactaggaacttatacctcctatctagttgtaattgtgtattttacaactttgaagtaggtgtaattatccctatttagactatacctgtatgaaacagaaattattttcattttacagatgaggaaacagacgcagagaagtaatttgtccaaagtccatagggttgtaagactcataacaagaactacaacttgggcctatctgaatcttatacttctggtactatacttgttcacaggtttgaaaagagctttaatttctattatttctcaagaatttgtaatgctttctcttgtcactgtgctttcaacttagaggagttgcagttttgataaaagacaaactgatttagcttctaggtttgttaaatatgtaattcacaggtcttctccttgcttatatttctacgactgctttctaaatctaattattttataaatagtcctgttgctttaattcactttttaccctaacataattaatcaagtttaactttgaaatctccatattttatgtgagaactcccaaggctatccacttttattttcctttgtaaatttattgctgctcagcctatttcattaatggcagctttaattataatattttattatattttcaaagtgcatgataatggtttaccagtctggttaatacatcagagatttctattgtgagctatcagagatgttaccatccaacacatttaccaaagtgtaattgttatagacgtcttaccatgaatttacgccccaaacatatgtttaatggggacgaacagtgacatgcctatctgataattccctgcacgctgcattatcatctctatattccaaaatttcgtcttaagccgtttagtatttaacttacagaagaaagggggttatcttagataacttttaatatcctaagggtattttccaattcacgatacagggagaaaagaaatgtgtccaggcccttagaagaaaatactttgaatttaaatgtgacacatacattaaacccgcgtgacacgccaggcaggcggtggaagtcaagtgcatttgtttttgtttcatccaccagggcgatctctttcacaattctgggagaggcctgtttgttcctccactcccacagctgaagtttgggacaaaagtttgaaaaaatcccaggcacctgcggctcctatcgaagccggcgaggagcacagggtagagcgtctcttcccagttttcagtcttcagatcgcaggcctctcggacccgcagagcgagcttcacgctgcagcgcttgagaaataagagctattccaaggaggggccctgggtcctcactgacgcttcgcaaaggtgtacgtccgcccagggaaggccggcggcgcagcgacggcgaggagtccccaaccatcttctcttcaagcagcagtagctgggttcgggtacccaccccccgagccgagacgccagaggccagagtaagaaaatggaagcctgcgccccaagccaaccgggattccacttagctccgcgcgggggaacgagctctcgcccactcgccggaggagacggccctggactcccaaccccgccggcgaaaccatgagctccgtccagcagcagccgccgccgccgcggagggtcaccaacgtggggtccctgttgctcaccccgcaggagaacgagtccctcttcactttcctcggcaagaaatgtgtgggtgcgggccgtggcggtcgggcgccgccttcccgagctgctggagaataa

SEQ ID NO: 16498 - DNA, 487 bp, Homo sapiens
  SIMILAR (51)..(404): 981254mologous to Homo sapiens G protein-coupled receptor kinase,accession number L15388,Smith-Waterman Score=618.
  misc_feature (1)...(487): n = a,t,c or g
aggggnattgatnaccnttgcaggatcgagnnccgtagtcccggctcgacccacgcgtccggttgcttttccggcagttttgtgaaaccaggcctgggctggagtgttacattcagttcctggactccgtggcagaatatgaagttactccagatgaaaaactgggagagaaagggaaggaaattatgaccaagtacctcaccccaaagtcccctgttttcatagcccaagttggccaagacctggtctcccagacggaggagaagctcctacagaagccgtgcaaagaactcttttctgcctgtgcacagtctgtccacgagtacctgaggggagaaccattccacgaatatctggacagcatgttttttgaccgctttctccagtggaagtggttggaaaggtctgtgcctgccaggttcgggccacgggtaaaaatgtatgcttgcagccgcttggagaagaagaggatccaaaagaggaaagg

SEQ ID NO: 16499 - DNA, 594 bp, Homo sapiens
  SIMILAR (166)..(309): 831254mologous to Homo sapiens G protein-coupled receptor kinase,accession number L15388,Smith-Waterman Score=219.
atggagagcacactagaatatgggaatgagcagacaatgcaggcagggggagaagctgagtccaggacagggctcacacttgccaagttgtcagccaacagagggtacgtcaaccaacagagggcacagcaagccaaggggcccctgtcctcaccaccttcacctgacagagattactgcagtttatgtgacaagcagccaatcgggaggctgcttttccggcagttttgtgaaaccaggcctgggctggagtgttacattcagttcctggactccgtggcagggcagcagaatcccacaaagcagctccatctggaaaagaccccatcaaagcccccttttaatgcaacctgtgatgaccacaacccccgacaccaccagcctcagaacaggtctatcaatgcgagaacaagtgacacagacaactgtgaatatctgacagataggctgtggcaacggccaccaagagctccaagtttccctccaccagcttggcaaccccagcagcagaagagcagcccttttggaaccaagaatcccatccccatccctgaggccaagcagagaatcaaggctctgcacagccagggctga

SEQ ID NO: 16500 - DNA, 1996 bp, Homo sapiens
  SIMILAR (754)..(1122): 711254mologous to multiple sclerosis associated retrovirus polyprotein,accession number AF009668,Smith-Waterman Score=449.
cagagggaggaagaagcggcggcgcggcggcggcggctcctctttgcagagggggaaactcttgggctgagagcaggaacaacgcggtaggcaaggcgggctgctggctcccccggctccggcagcagcggcggcagcccgagcagcggcagcagcagcggcagcaccccaggcgctgacagccccgccggccggctccgttgctgaccgccgactgtcaatggagctggaaaacatcgtggccaacacggtcttgctgaaagccagggaagggggcggaggaaagcgcaaagggaaaagcaagaagtggaaagaaatcctgaagttccctcacattagccagtgtgaatactctccgaaggaccatagacagagattactgcagggtatgtgacaagcagccaatcggggaggctgcttttccggcaattttgtgaaaccagggcctgggctggagtgttacattcagttcctggactccgtggcagaatatgaagttactccagatgaaaaactgggagagaaagggaaggaaattatgaccaagtacctcaccccaaagtcccctgttttcatagcccaagttggccaagacctggtctcccagacggaggagaagctcctacagaagccgtgcaaagaactcttttctgcctgtgcacagtctgtccacgagtacctgaggggagaaccattccacgaatatctggacagcatgttttttgaccgctttctccagtggaagtggttggaaaggcaaccggtgaccaaaaacactttcaggcagtatcgagtgctaggaaaagggggcttcggggaggtctgtgcctgccaggttcgggccacgggtaaaatgtatgcctgcaagcgcttggagaagaagaggatcaaaaagaggaaaggggagtccatggccctcaatgagaagcagatcctcgagaaggtcaacagtcagtttgtggtcaacctggcctatgcctacgagaccaaggatgcactgtgcttggtcctgaccatcatgaatgggggtgacctgaagttccacatctacaacatgggcaaccctggcttcgaggaggagcgggccttgttttatgcggcagagatcctctgcggcttagaagacctccaccgtgagaacaccgtctaccgagatctgaaacctgaaaacatcctgttagatgattatggccacattaggatctcagacctgggcttggctgtgaagatccccgagggagacctgatccgcggccgggtgggcactgttggctacatggcccccgaagtcctgaacaaccagaggtacggcctgagccccgactactggggccttggctgcctcatctatgagatgatcgagggccagtcgccgttccgcggccgtaaggagaaggtgaagcgggaggaggtggaccgccgggtcctggagacggaggaggtgtactcccacaagttctccgaggaggccaagtccatctgcaagatgctgctcacgaaagatgcgaagcagaggctgggctgccaggaggagggggctgcagaggtcaagagacaccccttcttcaggaacatgaacttcaagcgcttagaagccgggatgttggaccctcccttcgttccagacccccgcgctgtgtactgtaaggacgtgctggacatcgagcagttctccactgtgaagggcgtcaatctggaccacacagacgacgacttctactccaagttctccacgggctctgtgtccatcccatggcaaaacgagatgatagaaacagaatgctttaaggagctgaacgtgtttggacctaatggtaccctcccgccagatctgaacagaaaccaccctccggaaccgcccaagaaagggctgctccagagactcttcaagcggcagcatcagaacaattccaagagttcgcccagctccaagaccagttttaaccaccacataaactcaaaccatgtcagctcgaactccaccggaagcagctag

SEQ ID NO: 16501 - DNA, 966 bp, Homo sapiens
  SIMILAR (523)..(810): 511254mologous to Homo sapiens triple LIM domain protein,accession number AJ011654,Smith-Waterman Score=260.
atgaaagaacaaatgtggcaaaaggttaacaatggatcaatctacgtaaagagtacattacagatcagcagctccaagagggcagaaactgtgctcctgtttgctagccctgacctcatacctggtattcagtatgcaggaagaaggtttaggtcacatggagaaaaggaaatcgcccacaccagccgccaacatactacaagtgacattgggcacaatcgagctaactaccccgaaataggagcaacagggcgcacgcaagcacaactcgccatatccattatccaagacaccaacaacaccccctcccaatcttcccgacctccgaccgactcccacgaaacgggaagccaccaaacagacgacatctcaaacccctcgcgtgaaacccaggcaccgccccccccagttccaacctccctccgaaccgaaccccccacaccccacaccactccaaaccgcgcgcgcacaccaggacaaacctcagccccgcgaacaccctcgtgcgtcgccaacggcacacaagcggaggccaaccaggaaaataggacgcgcggtgcccgttgcacgctcacccgcctgcccatactaaacgtcttcataaataaacaaaatgacaggaagatctgcctgcactgcaagtgtccccaggaggagcacatggtgacagtgatgccgctggagatggagaagaccatcagcaaactcatgtttgactttcagaggaactcgacctcagatgatgactcaggctgtgctttggaagagtatgcctgggtcccgccgggtctgaagcctgaacaggccttctgctgtgggattgttataaagatacaagttcgtcccagtggagttctctggctctgtggagcctgtggaagttattcagggccccagatggagcctcttgattctgaatcctctaatgccccaagcaggctttgggattatctgctgaagtactga

SEQ ID NO: 16502 - DNA, 609 bp, Homo sapiens
  SIMILAR (307)..(606): 751254mologous to Homo sapiens triple LIM domain protein,accession number AJ011654,Smith-Waterman Score=439.
atgtgcagtgcacatgcactgacacctgccctgaggaccgggggcctattgtctttcttagagtccaggaggaaaaggaggaagaaaaggcacaagaggaaggcccaggtagtaggcttgggggtcccgggcgctcccccactattgactgccccagagggtgactcaggagggggcctgcttcctcgtagaggcccaagggtgcccgagagctgcgtcttcatccagggcctaggtatgggagaaccagcccccaaaactgcccatgggccagacctggatgtcttcatgaggccctctagggataggaagatctgcctgcactgcaagtgtccccaggaggagcacatggtgacagtgatgccgctggagatggagaagaccatcagcaaactcatgtttgactttcagaggaactcgacctcagatgatgactcaggctgtgctttggaagagtatgcctgggtcccgccgggtctgaagcctgaacaggtacaccagtactatagctgtctcccagaagagaaagtcccttatgtcaacagtcctggagagaaactgcgaatcaagcagctactacaccagctgccgccacatgacaatgaggtt

SEQ ID NO: 16503 - DNA, 918 bp, Homo sapiens
  SIMILAR (231)..(608): 1001254mologous to Homo sapiens histone H2B,accession number Z83336,Smith-Waterman Score=628.
atgctcactcagaacagcagagtgaacctacaggaggaagcaatagtcgggggttctctgatagctcccttcttcctggtgctagtgtttgagctgctgtatgtgtttgagctgctgtatctccacgaaggcaggcatgttgtctgtcttaatgactgtcgtgtgcccagcatcttagtgcagtgcctaacacacagtagctgctcagtcaatgttggtgggaagatctgcctgcactgcaagtgtccccaggaggagcacatggtgacagtgatgccgctggagatggagaagaccatcagcaaactcatgtttgactttcagaggaactcgacctcagatgatgactcaggctgtgctttggaagagtatgcctgggtcccgccgggtctgaagcctgaacagtgcccgtgtgggcttttcctcctccaccccttcctcatgcacagtgaagagcatgcacattgctccactcagggaatcagatccaagaaagcagacttggtctgccccagctgtgatgagttgagcagagaggacgctgccagccccccgccccccagcagggctctgtgtgctccatttaagggaagaggaatgtggtgcctgacggatgagtcagaggctgctacctcgccctgtggtacccctgccacatactgcccctcccccaactacacacacacaacgcagatcagtgtgatggaaactccactctggaattcgcctttggcacaatttcctcataccatgcacttgctgtcaccctattttaaaggtacagcctttgtcaatgcagagttcaaagatctaagccttgatgataatgaggggaaatgtttggtgcttttctcctatcctttggatttcacctttgtgtgtcgacaacaatttcttgctgttagtgataaagaatga

SEQ ID NO: 16504 - DNA, 1597 bp, Homo sapiens
  SIMILAR (163)..(273): 861254mologous to Homo sapiens syntaxin 3,accession number U32315,Smith-Waterman Score=147.
gcacgaggtggcgcccgagtgcactgaagatggcggctgctgtaagacgtgttgctccgagcgtcggctgccccgacattgtgagtgccattccttggggcatttctgccactgcagccctcaggcccgctgcatgtggaagaacgagcttgacaaatttattgtgttctggttccagtcaagcaaaattattcagcaccagttcctcatgccatgcacctgctgtcacccagcatgcaccctattttaagggtacagccgttgtcaatggagagttcaaagacctaagccttggatgactttaagggggaaatatttggtgcttttcttctatcctttgggatttcacctttgtgtgtcctacagaaattgttgcttttagtggacaaagcttaacgaattttcacgatgtggaactgtggaagttgtcgcagtcttcagtgggatttcccactttagcccatcttgcctggataaatacacccaaagaaaagaatggtgggtttgggccacattgaacatcgcactccttgtcagacttaactaaggcaggttttcccgaggattacggtgttgctgtttaggaagggttttggtcttggcactaaggaggtctcttcataatttgaccccaatgggagtcatcaagcatttgagcgtcaacgatctcccagtgggccgaagcgtggaagaaaccctccgcttggtgaaggcgttccagtatgtagaaacacatggagaagtctgcccagcgaactggacaccggattctcctacgatcaagccaagtccagctgcttccaaagagtactttcagaaggtaaatcagtagatcacccatgtgtatctgcaccttctcaactgagagaagaaccacagttgaaacctgcttttatcattttcaagatggttatttgtagaaggcaaggaaccaattatgcttgtattcataagtattactctaaatgttttgtttttgtaattctggctaggaccttttaaacatggttagttgctagtacaggaatcgtttattggtaacatcttggtggctggctagctagtttctacagaacataatttgcctctatagaaggctattcttagatcatgtctcaatggaaacactcttctttcttagccttacttgaatcttgcctataataaagtagagcaacacacattgaaagcttctgatcaacggtcctgaaattttcatcttgaatgtctttgtattaaactgaattttcttttaagctaacaaagatcataattttcaatgattagccgtgtaactcctgcaatgaatgtttatgtgattgaagcaaatgtgaatcgtattattttaaaaagtggcagagtgacttaactgatcatgcatgatccctcatccctgaaattgagtttatgtagtcattttacttattttattcattagctaactttgtctatgtatatttctagatattgattagtgtaatcgattataaaggatatttatcaaatccagggattgcattttgaaattataattattttctttgctgaagtattcattgtaaaacatacaaataacatatttaaacaaaaaaaaaaa

SEQ ID NO: 16505 - DNA, 282 bp, Homo sapiens
  SIMILAR (138)..(257): 851254mologous to Homo sapiens Polypeptide with transmembrane domain,accession number W85737,Smith-Waterman Score=165.
  misc_feature (1)...(282): n = a,t,c or g
aggtttttcgtcagtactgggatatccccgatggcaccgattgccaccgcaaagcctacagcaccaccagtattgccagcgtcgctgtangggactgaaggttggagaagcatattaactgctccagggtcatttgaagctgggctgcaagtccaggcctgaccgccgctgcctacagagtcacactcaatcctccgggcaccttccttgaaggagtggctaaggttggacaatacacgttcactgnagcccgtgtccacagtnctggccatccggagaaag

SEQ ID NO: 16506 - DNA, 717 bp, Homo sapiens
  SIMILAR (853)..(794): 431254mologous to Homo sapiens Human secreted protein, SEQ ID NO: 4506,accession number G00425,Smith-Waterman Score=57.
atggctgatgggcgcccagcaggtgctctgcaggagccagtactggtcaggcttgagaaagtggccaaggaaggcctggcggggagtggggaaggaagcctgaccgccgctgcctacagagtcacactcaatcctccgggcaccttccttgaaggagtggctaaggttggacaatacacgttcactgcagtgctggccatccggagaaagtggggtgttcctttatcaggaatacatgtagggtggggaggcccaggagaacagctccaggactggggccaggaggctgccatgcacagcgagcagccgactcgtggcatctctctccatccagacactggcactgctgtcggggccgtgtttggcctcaccacctgcatcagcgcccatgtccgcgagaagcccgacgaccccctgaactacttcctcggtggctgcgccggaggcctgactctgggagcacgcaccacacgggcctcctcactgctcctcccacatgccaggctgaggatgcagcgctggaaggcggcggccttggcctcagtgctctgcagctccgtgctgtccatctggatgtgtcgagagggcctgcttctcagccaccgcctcggacctgcgctggtccccctgcaccgcctgcctcgaaccctggacgcccggattgcccgcctggcccagtgtaagctcctcctctgtgtggggtcagatacccccaac

SEQ ID NO: 16507 - DNA, 713 bp, Homo sapiens
  SIMILAR (55)..(141): 961254mologous to Homo sapiens Polypeptide with transmembrane domain,accession number W85737,Smith-Waterman Score=155.
  misc_feature (1)...(713): n = a,t,c or g
ttcccgagctggcggggtccgtggtgcgggatcgagattgcgggctatggcgccgaagtttttcgtcagtactgggatatccccgatggcaccgattgccaccgcaaagcctacagcaccaccagtattgccagcgtcgctgttagnggactgaaggttggagaagcatattaactgctccagggtcatttgaagctgggctgcaagtccaggtcggctgacctgcgtcctaggggtctctgaagcaaggaatgttcccatcaggcctgaaccgccgcttgcctacagagtcaccacttcaaatcctccgggcaactttcctttgaaaggaagtggcctaaggttgggacaattacacgttcaattgcaagcttgctgtcggggcccgtgtttggccttcaccaccttgcattcagcgcccatgttccgcgagaaggcccgacgaccccctggaactacttccctcgggtggctgcgccggacgctggactcctggggagcacgcacgcacaactacgggattgggcgccgcgccttgcgtgttactttgggcatagcgggccttcctgggttcaagatggggccggttggaagggctgggaaggtgttttgcaaaacccaaggtgttaagccctggtgcctgccgggaaccttccaagcctgcagaatgcgtccagaaataaattctgtgtctgtgtgtgtgtcaaaaaaaa

SEQ ID NO: 16508 - DNA, 507 bp, Homo sapiens
  misc_feature (1)...(507): n = a,t,c or g
tttcctgcttttgctcaaatacaatgccgctgctcatgccctgagtgcatctgtcagcatatggcagtttttgagcaaaagcaggaaaaaaaccaaacaggaaaacaaatttggaaagcccaggccataaaattatgtatatcaaaataaaaccaagaagctttgggattattcacaatcttccttctaaacctggccctcttttcctgcctcattcactcattgggtggtttgacttcactgctagtttcctctaccccatgaactgctctgccatgcatcatanggtaaggaaaagcagcagtgccacagccataaccaagatcggcaagacgggatagagctttaatgctacctggaggtctgcctgggctgactttgtatcccgcagctttagttgtccccaaaggtctgcctggacttggtggttcccgaaggccggccacgcttaccagatcggttgagattcttctttttctttagttcatcttttatttctatgcttct

SEQ ID NO: 16509 - DNA, 450 bp, Homo sapiens
  SIMILAR (313)..(1497): 561254mologous to Homo sapiens bA12M19.1.3 (novel protein),accession number AL161656,Smith-Waterman Score=986.
  misc_feature (1)...(450): n = a,t,c or g
ctggtgccgctcactgagaggatgacaagagggccagcttgctttgggagagcactgggaatatctgccgcatcatcacctctggaagaatttcctttgccctgatgaatacaccgctgtctaaattaatccatcgacatcacacttaccccacagtggggctcctgagccatggacaatgatccatccctttgagctttttttggttttaaagtgcgtagtggnnnnnnnnnnnnnnnnnnnnnnnnnnnnnnnnnnnnnnnnnnnnnnnnnnnnnnnnnnnnnnnnnnnnnnnnnnnnnnnnnnnnnnnnnnnnnnnnnnnnnnnnnnnnnnnnnnnnnnnnnnnnnnnnnnnnnnnnnnnnnnnnnnnnnnnnnnnnnnnnnnnnnnnnnnnnnnnnnnnnnnnnnnnnnnnnnnnnnnnnnnnnnnnnnnnnnnntccccgaccga

SEQ ID NO: 16510 - DNA, 547 bp, Homo sapiens
  SIMILAR (2)..(82): 571254mologous to Homo sapiens PRO2829,accession number AF116715,Smith-Waterman Score=75.
cagctgctttggtggttccccaggggtctgcctgtgctggtccggtatcctgctgatttggtggttcccgaaggccggccacgcttaccagatcggttgagattcttctttttctttagttcatcttttatttctatgcttctgccacttgtagtctgcaagtgtgtttcaatttaatgggtcttgcctctgacaaaccattggtttgtggttgactgtgtggctgtattttgctttgctgggaggaatatatgtcaaactgatcagcagctctcatggcatcttcattgaggcaggaaggcttgccaggcccacagaaagctggattactgctggcaacaggatgcatcattttctcgagccgctcgtagcccggcccctcggcgcgtctaggggcttcccagcggctgggaacctcgtgctggcgccgctccctccccagcccgccgcctctgcacggtgcggagaacgggccaagacggagtggcaggccagcgagggcggcggcgaggcaggcgctggctcccacgcactccgccgcggccgc

SEQ ID NO: 16511 - DNA, 2338 bp, Homo sapiens
  SIMILAR (895)..(350): 391254mologous to Homo sapiens bA12M19.1.1 (novel protein),accession number AL161656,Smith-Waterman Score=184.
  misc_feature (1)...(2338): n = a,t,c or g
gtcagctctctggagctaaagacagctacgtttcccttaccagaggcggcgggctggggagggagcggcgccagcacgaggttcccagccgctgggaagcccctagacgcgccgaggggccgggctacgagcggctgagggtggcgtgcatcttctgcaaacttgttattgccaatacgctaatagtcgctttcagcacacaacagaaaatgatgcatcctgttgccagcagtaatccagctttctgtgggcctggcaagccttcctgcctcaatgaagatgccatgagagctgctgatcagtttgacatatattcctcccagcaaagcaaatacagccacacagtcaaccacaaaccaatggtttgtcagaggcaagacccattaaatgaaacacacttgcagactacaagtggcagaagcatagaaataaaagatgaactaaagaaaaagaagaatctcaaccgatctggtaagcgtggccggccttcgggaaccaccaaatcagcaggataccggaccagcacaggcagacccctgggaaccaccaaagcaagctggatttaagacaagtccaggcagaccttgggggacaactaaagctgcgggatacaaagtcagcccaggcagacctcagggtagcattaaagctctatcccgtcttgccgatcttggttatggctgtggcactgctgcttttccttaccctatgatgcatggcagagcagttcatggggtagaggaaactagcagtgaagtcaaaccacccaattgagtgaatgaggcaggaaaagagggccaggtttagaaggaagattgtgaataatcccaaagcttcttgggtttattttgatatacataattttatggcctgggcttttccaaatttgttttcctgtttggtttttttcctgcttttgctcaaaaactgccatatgctgacagatgcactcagggcatgagcagcggcattgtatttgtacataggttcaagtgtaacacctaactaaactcatttttccttttcctttagagttatggtcatgtctcatgtttcattactactttggggctgttctaaatagatgctttatgtgataaacaactgaaaccattatacctattagtttgtgaagtaagcctacagtataataaagacactaacgtatttttaactgatggagcaaaaaagcaaactaatgaatcaggattacttgaggtaatggctgtgtgaatttttgtaacatttattttcacaagatgggacacatatttgtatgctttggcatttacatccacttcaaatgttaaaaaacttatttttaatgttttaggtttaagcagcttgtaatttattgatctacatggcattaattgatttaaccattatacctgaaataattcttcagtgtttgcctttgagcagtgataggttgtgtattttttaattgcctaagagcatatataccaaacaccacgcccagccaccactacgcactttaaaaccaaaaaaaagctcaaagggatggatcattgtccatggctcaggagccccactgtggggtaaagtgtgatgtcgatggattaatttagacagtggtgtattcatcagggcaaaggaaattcttccagaggtgatgatgcggcagatattcccaagtgctctcccaaagcaagctgaccctcttgtcatcctctcagttgggcggcaccaagctgcccctccttccacaagtactcaagcctgtttgtaaaatactgaaggaattgatggggttgaggaaaggacggtgcatgtgaccagggtcccaaggccacagcttttcagactcctaggaagcaagtggcatttgcttgagttgtggcctcgaaaggagaatgtttatctgttttctaactttgctgacgaccaggattctccctgtcattgagaagaaagcattatctaattaccttcaggtggtttacttattctgtaaagaatatgtgtaaatattttgtacagagccctgtatcaaataaacagccatatgtggttactaatcacctcttctgtcattccgtccttgggncaccgctcagtgggaatggtctctgatctggatgctcccaccttccatgttcaggcccagaactgttgcaatggtctgtggactcctggtcagccttgactggctaggagaccttgggcagtacctacagtcttgctgtttctgtttcatctgcaagaattatgacccacacactccagctgcagcccagggcactgtgatattctatacgtgtgtagatgtttttgtccacagttcctggttcatcactcccataaccctttgttt

SEQ ID NO: 16512 - DNA, 1818 bp, Homo sapiens
  SIMILAR (1425)..(913): 671254mologous to Mus musculus Pro-Pol-dUTPase polyprotein,accession number Y12713,Smith-Waterman Score=553.
ttagtctgggtcaatcaccccagccaacactgtaactcccttcttagcctgttgagttaaaggtagaaggagcccaaagtgtccaggtagcaaccttaacttccagtttaatggaatcattgttgtgtctcctggtggcagcattcctgtctctggaactaagacctctaggtcaacagaacgtaatgttgcaggaacaggaagcaaaaattttgctagtggatcactagggatgatggtgagtggagccacttctacatccaacccttgatgcctggacccatgaattctggctatgggagaaagagtaccatatattgcatgctgattcagagcattcacggccgtctggagaactttgccccagccctgcaaactattgttaccttgtttacgttgtaattgtgacttcaaaaggccattcccccataagtgctggcaaattgggcacttagcagtggccatagccaggtcagccttggtgagtggaagtccatgttgctgagcccatccataacctccatctgtgccactatggcccctttgttcgtgggcccactgggcgatgacaggggtggctggggaaagaggctgaatggtgtccacagaacaggtcatcctatccacttgattattaaaatcctcctctgctgaggtcacccattggtgagcactcacatggaatacaaatatcttcacagttgttgaccactcagagagtttcatccatacacctcttccccaaatttctttgtcaccaattttccagtcatgcttcttccaagtccctgaccatccagccaaaccattgggtataatcaaacgttcaatttccaccaaagcccagtaacaggccaagagctgtctctcaaaaggagagtagttatctgcagaagatggcagggccttgttccaaaatcctagaggcctctgatgtgattcacctatgggggcctgccaaaggctccaaacagcatgcctatctgccactgacacctcaatcaccattggatatggggggtcgtatggccaggtgtcaggagatgtgttaatttgcttaagcaatgaagccacatctggtatagcagctgcaattggagttgccacttgattaatctgacgataatccactgtcattctccaagatccatctgtcttctgcacaggccaaatgggagagtcgaacagggatgtggtaggaatcaccacccctgcgtctttcaggtccttgatggtggcactaatctcctcaatccctccagctatgcgatattgtttttgatttaatatttttctaggtagaggcagctctaatggcttccgtttggcctttcccaccataatagccctcaccctaccagtcagggagccaatgtgggggttctgtccgctgctaagtatgtctatgccaattatgcattctggccctctaggggcctgccaggactttagtctagttgtaggtctagaagcaaacaggggtgttgggggtggctcctgaggagaatcaacattatcttgcctggcaactgcctcaggggaggccatcactgttgcctcaggcagtgcagggtttatctcctcagacaaaggtggaaaggctgatggcagcatgggttggggagtggatgttgtcactactggggatggggaagctttttcttctggcaaaaaagattcatcagagtttacaaactcagtgtccccagcttcatcagggtccccccacacgtctgcattccaagttgcagggtcccattcttttccaatcaatgccctcactttaacagtagacacctggtgaggctgtgcatgcat

SEQ ID NO: 16513 - DNA, 2094 bp, Homo sapiens
  SIMILAR (213)..(3887): 981254mologous to Homo sapiens stromal antigen 3, (STAG3),accession number AJ007798,Smith-Waterman Score=6245.
atgacctccaattccatccatgttgttgaaaatgataagattttggagatggggatgtttggtgaagatcgtctactagaagcagctagggtgtgcctctctcatggagaggaaagggaggggtctgggcctccaaccaccccctactggggctatggagccaataacagctctgcaactccctggacagagctcccagtgggaggtgtcctggttgcgtgggtccgcaagtgggatcttccaatctgtgggttgcaaagttacgtggaaaaagcacagttttcccagcagggtggctggggggtggtatttcctcttccccgtgtggctctcagggcaaggaaaacaacaccagcccacacagacacttgccagcaaagtgagttgtcatgggccatggggaagctgcaatttgtggaggaagtgtactggctggaccctgcaacttggaatggtgacgtgtgggagcaccctgatgaagctggggacactgagtttttaaactctgatgaacctttcttgccagaagaaaaaactttcccatccccagtagtggcaacatcacctccccaacccatgctgccatcagcctttcaacctttgtctgaggagataaaccctacgctgcctgaggcaacaatgatggcctcccttgtggcagttgccaggcaagataatgttgattctcctcaggcgccacccccaacatctctgtttgcttctagacctataactagactaagtcctcaccgagagaaaaatagtaaatcaaagcaatatcacatccgtggaggaattgcggagattagtgccaccatcaaggactcgaaagacacaggggtggtgattcccaccacatccccattcaactctcccatttggcctgtttggaagacagatggatcttggacaataacagtggattatcataagcttgaccaagtggtgactccaattgcagctgctgtaccagatgtggtttcattgcttgagcaaattaacacatctcctggtacctgttatgcagccattaacttggaaaatgcctttttctccattcctgtccataaggccaaccagagcaatttgccttcagctggcaaggccagcaatataccattgctgtcctaccacagggtaaaatttctagggatccattgttttgtggcctgtcaagatattccttctaagataaaggataagttgctacatttggcccctcctacaaacaagaaagaggcacaatgcctggtcggcctatttggattctggaggcaacacattcctcatttgcgtgtgttactccagcccatttatcaagtgaccctaaaggctgccatttttgagtggggtccagaacaggagaaggctctgcaacaggtccaggctgctgtgcaagctgctctgccacttggaccatatgacccaacagatccaatggtgcttgaggtgaccttagcagaagaggattttaataatcaagtggataggatgacccattctgtggacagcactcagcctctttccccatccacccctgtcatcacccaatggacccttgaagaaagtggccatggtggcagggatggaggttatgcatgggctcagcaacatggacttccactcaccaaggctgacctctctacagccactgctgagtgcccaattttccagctgcagagactaacaccgagcactagatatggcaccattccttggggtgatcacccagctacctggtggcaggctaagaatggagttacagtgttggctggggtgattgacccagactatcaagatgaaatcagtctactacttcacaacggaggtaaggaagagtatgcatggaatacaagagatccattagggcatcgcttagtattaccatgccctgtgattaaggtcaatgggaaactacaacagcccaatccagacaggactacaaatggcccagacccttcaggaatgaaggcttgggtcactctacccagaataaaaccaggacctgttgaggtgtttgctgaatgcaaagggaatacagaatgggtagtagaagaaggtggtcatcaataccagctacaaccacgtgactag

SEQ ID NO: 16514 - DNA, 1126 bp, Homo sapiens
  SIMILAR (732)..(1124): 801254mologous to Mus musculus Pro-Pol-dUTPase polyprotein,accession number Y12713,Smith-Waterman Score=539.
tttgtggtgataactgtgtgtttgaaagctggattggagacatcatattggacatggacaatgagtttagtgactctatacataatacctttggccatatgtggagaaccaaggaacataatgaagctggttggttgctcctaagttcagtggacaaagtaatgaaagaaaatgatgaactcagggattctatctcctggcttcagaagcagatactgagtctcaaatctgctaagattgccctgagtgagagtcttatctcctgcagggaaagagctgaaattgtggaaaaacagacacaagctgttatcatgcgaatggctgacccgcaaggaaaggtgcatgcgcagcctcaacaggtgtctactgttaaagggaggacattgattggaaaagaatgggaccccgcaacttggaatggggacgtgtgggaggaccctgatgaagctggggacactgagtttgtaaactctgatgaaccttttttgccagaagtaacagcttccccatccccagtagtgacaacatccactccccaacccatgctgccatcagcctttccacctttgtctgaggagataaaccctgcactgcctgaggcaacagtgatggcctcccctgaggcagttgccaggcaagataatgttgattctcctcaggagccacccccaacacccctgtttgcttctagacctacaactagactaaagtcctggcaggcccctagagggccagaatgcataattggcatagacatacttagcagcggacagaacccccacattggctccctgactggtagggtgagggctattatggtgggaaaggccaaacggaagccattagagctgcctctacctagaaaaatattaaatcaaaaacaatatcgcatagctggagggattgaggagattagtgccaccatcaaggacctgaaagacgcaggggtggtgattcctaccacatccctgttcgactctcccatttggcctgtgcagaagacagatggatcttggagaatgacagtggattatcgtcagattaatcaagtggcaactccaattgcagctgctataccagatgtggcttcattgcttaagcaaattaacacatctcctgacacctg

SEQ ID NO: 16515 - DNA, 931 bp, Homo sapiens
  SIMILAR (667)..(888): 931254mologous to Homo sapiens stromal antigen 3, (STAG3),accession number AJ007798,Smith-Waterman Score=375.
gtcctggttgcgtgggtccgcaagtgggatcttccaatctgtgggttgcaaagttacgtggaaaaagcacagttttcccagcagggtggctggggggtggtatttcctcttccccgtgtggctctcagggcaaggaaaacaacaccagcccacacagacacttgccagcaaagtgagttgtcatgggccatggggaagctgcaatttgtggaggaagtgtactggctggaccctgcaacttggaatggtgacgtgtgggagcaccctgatgaagctggggacactgagtttttaaactctgatgaacctttcttgccagaagaaaaaactttcccatccccagtagtggcaacatcacctccccaacccatgctgccatcagcctttcaacctttgtctgaggagataaaccctacgctgcctgaggcaacaatgatggcctcccttgtggcagttgccaggcaagataatgttgattctcctcaggcgccacccccaacatctctgtttgcttctagacctataactagactaagtcctcaccgagagaaaaatagtaaatcaaagcaatatcacatccgtggaggaattgcggagattagtgccaccatcaaggactcgaaagacacaggggtggtgattcccaccacatccccattcaactctcccatttggcctgtttggaagacagatggatcttggacaataacagtggattatcataagcttgaccaagtggtgactccaattgcagctgctgtaccagatgtggtttcattgcttgagcaaattaacacatctcctggtacctgttatgcagccattaacttggaaaatgcctttttctccattcctgtccataaggccaaccagagcaatttgccttcagctggcaaggccagcaatataccattgctgtcctaccacaggg

SEQ ID NO: 16516 - DNA, 2877 bp, Homo sapiens
  SIMILAR (42)..(188): 751254mologous to Homo sapiens Human membrane channel protein -17 (MECHP-17),accession number Y70467,Smith-Waterman Score=195.
atggtgatggcctcccctgaggcagttgccaggcaagataatgttgattctcctcaggagccacccccagcacccctgtttgcttctagacctacaactagactaaagtcccggtgggcccctagaggggaggttgagtgtgtaacccacgaggaggagacctctggccttttacctggtactttgcactggggaaagggaaatgatcagatatttgggggattactggacagtggctctgagctgatgttgattccaggggacccaaaatgtcactgtggtcctccagttaaagtcggaacttatgaaggctcaccagaagcaatttgccttcagctggcaaagccagcaattatctttactgtcctacctcaagggtatatgaactctctgactttgtgtcataatcttatttggagagaacttgattgctttttgtttctgcaagatatcacactggtccattacattgatgacattatgctaattggattcagtgaacaaaaagtagcaaatatgctggacttattgcctgcactgatggcctcatggggaattccctatgataagttgacagaggaagagaagactaggccctggttcacagagggttctgcacgatatgcaggcaccacccgaaagtggacagctgcagtactacagcccttttctaggacacccctgaaggacagctgtgaaggaaaatctccccaccaccccgtcatcgcccaatgggcccatgaacaaagtggccatggtggcagggatggaggttacttgtgggctcagcaacatggatttccactcaccaaggctgacctggctatggccactgctgagtgcccaatttgccagcagcagaaacgaacattgaaccctcaatatggcatcattctttggggtgatcagccagttatctggtggcaggttgattatatcggacttcttccatcatggaaacggcagagatttgtcctcactgaaataaacacttactccagatatgggttttcctatcctgcacccaatgcttctgccaagactaccatccgtgggctcacagaatgccttattcaccatcatggtattccacacagcactgcctctgaccgaggcactcactttacggctaaagaagtgcagcagtgggctcatgctcatggaattcactggccttaccatgttcctcatcatcctgaagcagctggattgatggaatggtggaatggccttttgaagtcacaattacaatgccaactagccaggattcatgggtccaggaatcaagtggtggaagcagaagtggcaccacttaccatgacacctagtaatccactagcaaaattttttcttcctgttcccacgacattacattctgctggtctagaggtcttagctccagagggaggaacaatgccaccaggagacacaacattaaatccattcaactggaagttaagattgccacctggacactttgggctcctcctatctttaagtcaacaggataagaagggagttacagtgttggttggggtgacagacccggactatcaagatgaaatcagtcttttactccacaacggagacgcaataaaaaatgataaaggggatatcaccaccaatcccacagaaatacaaactaccatcagagaatactacaaacacctctatgcaaataaactagaaaatctagaagaaatggataaattcctcgacacatgcactttcccaagactaaaccaggaagaagttgaatatctgaaaagaccaataacaggatccgaaattgtggcaataatcagtagcttaccaaccaaaaaaagtccaggaccagatggattcacagccgaattctaccagaggtacaaggaggaactggtaccattccttctgaaactattccaatcaatagaaaaagagggaatcctccctaattcattttatgaggccagcatcatcctgataccaaagccgggcagagacacaaccaaaaaagagaattttagaccaatatccttgatgaacattgatgcaaaaatcctcaacaaaatactggcaaaccgaatccagcagcacatcaaaaagcttatccaccatgaacaagtgggcttcaaccctgggatgcaaggctggttcaatatacgcaaatcaacaaatgtaatccagcatataaacagaaccaaagacaaaaaccacatgattatctcaatagatgcagaagaggcctttgacaaaattcaacaacccttcatgctaaaaactctcaataaattaggtattgatgggacatatttcaaaataataagagctatctatgacaaacccacagccaatatcatactgaatgggcaaaaactggaagcattccctttgaaaactggcacaaggcagggatgccctctctcaccactcctattcaacatagtgttggaagttctggccagggcaattaggcaagagaaggaaataaagggtattcaattaggaaaagaggaagtcaaactgtccctgtttgcagatgacatgactgtatatctagaaaatcccattgtctcagcccaaaatctccttaagctgataagcaacttcagcaaagtctcaggatacaaaatcaatgtacaaaaatcacaagcattcttatacaccaacaacagacaaacagagagccaaatcatgagtgaactcccattcacaattgcttcaaagagaataaaatacctaggaatccaacttacaagggatgtgaaggacctcttcaaggagaactacaaaccactgctcgaggaaataaaagaggatccaaacaaatgtaagaacattccatgctcatgggtaggaagaatctatatcgtgaaaatggccatactgcccaag

SEQ ID NO: 16517 - DNA, 402 bp, Homo sapiens
  SIMILAR (67)..(213): 441254mologous to Caenorhabditis elegans Similar to collagen,accession number AF022985,Smith-Waterman Score=101.
aggttgctgcttcaggaacggagggagtgagagccttttctgacgatgccgaagaaggctcatccctcaccccagacgcctgtcgcccgttgtaataaggcgcatccaggtaccacaggacagcctggggcaggccctagcaggccaggccacaccagagatcccattggggctgcagctgcacactgtccttgtccaggagattcaggagctcattgaggcacagtcacgtggtgaggtggcctgcagcctggaagactttgcaggggcggtgcttttgggctggaattcccttaaattcagtgaggtcgtttctgtgtttggaaattccagtggaaagtgactgatgctggtgcaccctttctcctttctcagctcctggtccatgtgcagactcgtgcc

SEQ ID NO: 16518 - DNA, 1107 bp, Homo sapiens
  SIMILAR (37)..(402): 681254mologous to Homo sapiens Human membrane channel protein -17 (MECHP-17),accession number Y70467,Smith-Waterman Score=449.
atgacagaagagcccctgcaggctctggtgctgtcagcagttttactctatcaggaagcctatgtgagaaggtccctcacagctcttggcctggacacatttgccaactttgcacacttttctgaaatgcaaccactttcagatgctccctgtggcctcgtcacaggggtcaccaggcccctggtggcttacagtgtggaagttggaggcttcaccataatctgtggcctgagcttggcctcagggaatatttccgggtggtgtcagctgtatctcctccttactcagtgtcgtaggggagcagcgactctctgggacagtgggatgggtggaggacgtcagtcctccaggcagacgtcagtccccaggtggaccctggactcaaagtgtataccaggccccaagttgacaaccaggccccagatggacaccaaggccctaggtggacagcaggcccatgttgaacaccagactcatgaggacatcaggccgcaggtggacacccaggccccaggtggacacaaggccttaggtgaacaacaagacccagtaggccatcaggcctcagttggatacagtccccaggtaccacaggacagcctggggcaggccctagcaggccaggccacaccagagatcccattggggctgcagctgcacactgtccttgtccaggagattcaggagctcattgaggcacagacacgtgctcctggtccatgtgcagaagtaagagcactgccagcaccagcggcggagccagagccagcatgggaagaggcccctccagagagagcactggagctggagggagctccagccaaggaccagaccaatgaggagctgcctgaaatcacggcacgtactgtagccactggccctaaccctggaactgaaagcgtggctggagagaaaagtgggagggagggggtgaccagcacagccccagccagcagctcccatgctgcccctagtcctgggcacggtggcaaacatgcaggcagagagcagggcatttggcctggcctcctgtacctcgctgcagagaggcttctctcattcactagaaccacagtcctgctgctgcaggtccgtttattctcctga

SEQ ID NO: 16519 - DNA, 795 bp, Homo sapiens
  SIMILAR (494)..(321): 471254mologous to Bombyx mori silk fibroin (AA 37 - 252),accession number X13869,Smith-Waterman Score=105.
atgactctacagatcacgaactggacccatgatcagtcctcgcacagatcactgtggtcaagaggatgctgtcctcccactgatcaagcctacgtgacatgtcacctacggaatggagggagtgagagccttttccgacgatgccgaagaaggctcatccctcaccccagacgcctgtcgcccgttgtaataaggcgcatccaggtaccacaggacagcctggggcaggccctagcaggccaggccacaccagagatcccattggggctgcagctgcacactgtccttgtccaggagattcaggagctcattgaggcacagacacttgctcctggtccatgtgcagaagtaagagcactgccagcaccagcggcggagccagagccagcatgggaagaggcccctccagagagagcactggagctggagggagctccagccaaggaccagaccaacgaggagctgcctgaaatcacggcaccacctggagcagctagcacactgtgggccctgcgtaagtacaccgtggtgatcaagatgtgccattttgagcctgaacaagtgttcactactgtgaggctgtccccttatagagtcagggcctatggccagaccagccctgtgacagagatggagcccggaacgaaggaccctgagagccagatcaagggacacaagagccaggatcatggagaagcggatgttgagaagcccccagccaggctgcacaaaggcagccccgagtcaggtgcctgtggagacagcagtgagaaacagacatttctgccctactga

SEQ ID NO: 16520 - DNA, 966 bp, Homo sapiens
  SIMILAR (1)..(219): 1001254mologous to Homo sapiens Claudin-18,accession number AF221069,Smith-Waterman Score=392.
atgtccaccaccacatgccaagtggtggcgttcctcctgtccatcctggggctggccggctgcatcgcggccaccgggatggacatgtggagcacccaggacctgtacgacaaccccgtcacctccgtgttccagtacgaagggctctggaggagctgcgtgaggcagagttcaggcttcaccgaatgcaggccctatttcaccatcctgggacttccaggaactccaataactccagccagaggctcagggacagacccggatctccctggtactgagcccctatgggggaagggtggccacaacctctgcagaccagcagacttagcctttcctcctggcagttctgaggaatccgagcagcccagacgagtgggtttcccttcaaaaaacaaacaagcagaaagcaacaacaacagcatcatcaacaacaacaaaaaggcccccacaaaaaccccatccaagtttcagcagcctcaaagacagaaactagacaaactcatgaagatgagaaagaatcaatggaaaaatgctgaaaacccaaaaggccagagtgcctcttctcctcagaatgatcacaatgtctctccatcaagggcacagaacagcatggaggatcagatggacaaattgacagaagtaggcttcaaaagatgggtaataaaaaaacccattgagctaaaggagcatgttctaaaccaatgcaaagaagctgagaactttgataaaaggttagaggaattgctaactagaaaaaccagtttagagaggaacataactgacctgatggacctgaaaaacacagcacaagaactctgtgaagcatatacaagtatcaatagccaaattgaccaagtggaagaaagaatatcagagtttgaagaccaccttgctgaaataaggcatgaagacaagaccagagaaaatagaatgaaaaggaatgagcaaagcctccaagaaatatag

SEQ ID NO: 16521 - DNA, 381 bp, Homo sapiens
  SIMILAR (164)..(63): 761254mologous to Homo sapiens Human secreted protein, SEQ ID NO: 7115,accession number G03034,Smith-Waterman Score=138.
atggtgtgtccggagttcattccttcagatgttcagatgtgtccagagtttattccttctggtgggttcgtggtctcgctggcttcaggaatgaagctgcagaccttcctggtgagtgtcacagctcttaaaggcggcgcatctggagttgttccttcctcccgtccagagttgttcatccctcctggtgggtttgtggtctcgctggcttcaggagtgaagctgcagaccttcacagtgagtgttacagctcataaaggcggtgcagacccaaagcagacccaaagcttccacaaagaacaaggcttccacagcctggaaggaaaccccaacacgttgccaccgctggctcgggcagcctccttttattcccttatctga

SEQ ID NO: 16522 - DNA, 585 bp, Homo sapiens
  SIMILAR (266)..(63): 641254mologous to Homo sapiens Human secreted protein, SEQ ID NO: 7083,accession number G03002,Smith-Waterman Score=210.
atgaagccgcggacccttgcggtgagtgttacagttcttaaaggcggcgtgtccagagtttgttccttctggtgttcggatgtgttcagggtttcttccttctggtgggttcgtggtctcgccgactcaggagtgaagctgcggaccttcgcggtgagtgttacacctcttaaggcggcgcgtctggagttgttcgttcctcctggtgggttcgtggtctcgctggcttcaggagtgaagctgcagcccttcgaagtgagtgttacagctcataaaggcagtgtggacccaaagagtgagaagcagcaagatttattgcaaagagggaaagaacaaagctaccacactggagaagggcacccgagcaggttgccactgctggctcaggcagcctgcttttattctcttatctggccccacccacatcctgctgattggtacagccgagtggtctgttttgacagggcgctgattggtgcatttacaatccctgagctagacacaaaggttgtccacctccccaccagattagctagatacagagtgtccacacaaaggtggttctccaagtccccaccagagtag

SEQ ID NO: 16523 - DNA, 372 bp, Homo sapiens
  SIMILAR (967)..(1422): 901254mologous to Homo sapiens dJ1170K4.4 (novel protein),accession number AL022314,Smith-Waterman Score=661.
atggccctgtgttctctgccctgttgtatgctccccactgaggatggagagccctgctctgagactgtgtccggaattggtgggttcttggtctcgctgacttcaaagaatgaagccacggacccccatggagtgaagctgcagaccttcacggtcagtgctacagctcagaaaggcagtgcggacccaaagagtgagcagcagcaagatttattgcaaagagcaaaagaacaaagctcccacaacgtggaaggggacataaaggggttgctgctgctgactcaggcagcctgcttttattcctttatctggccccacccacatcctgctgattggcccattttacagagagctgattggtccattttatag

SEQ ID NO: 16524 - DNA, 2788 bp, Homo sapiens
  SIMILAR (34)..(267): 561254mologous to Rattus norvegicus Doc2B,accession number U70778,Smith-Waterman Score=227.
gaagtatcgctgcgagaagccacccagcgaaaattgcggaggttttccgagctaagaggcaaacttgtagcacgtggagaattctgggacatagttgcaataacagcggctgatgaaaaacaggaacttgcttacaaccaacagctgtcagaaaagctgaaaagaaaggagttaccccttggagttcaatatcacgtttttgtggatcctgctggagccaaaattggaaatggaggatcaacactttgtgcccttcaatgtttggaaaagctatatggagataaatggaattcttttaccatcttattaattcactctgatgaatggaagaaaaaagtcagtgaatcatatgttatcacaatagaaagattagaagatgacctgccgatcaaggaaaaagaactgacagaactaaggaatatatttggctctgatgaagccttcagtaaagtcaatttaaattaccgcactgaaaatgggctgtctctacttcatttatgttgcatttgtggaggcaagaaatcacatattcgaactcttatgttgaaaggggctccgcccatctcgactgacaagaaatggatttacagccttgcatttagcagtttacaaggataatgcagaattgatcacttctctgcttcacagtggagctgatatacagcaggttggatacggtggcctcactgccctccatattgctacaatagctggccacctagaggctgctgatgtgctgttgcaacatggagctaatgtcaatattcaagatgcagtttttttcactccattgcatattgcagcgtactatggacatgaacaggtaactcgccttcttttgaaatttggtgctgatgtaaatgtaagtggtgaagttggagatagacccctccacctagcatctgcaaaaggattcttgaatattgcaaaactcttgatggaagaaggcagcaaagcagatgtgaatgctcaagataatgaagaccatgtcccactccatttctgttctcgatttggacaccatgatatagttaagtatctgctgcaaagtgatttggaagttcaacctcatgttgttaatatctatggagatacccccttacacctggcatgctacaatggcaaatttgaagttgccaaggaaatcatccaaatatcaggaacagaaagtctgactaaggaaaacatcttcagtgaaacagcttttcatagtgcttgtacctatggcaagagcattgacctagtcaaatttcttcttgatcagaatgtcataaacatcaaccaccaaggaagggatgggcacactggattacactctgcttgctaccacggtcacattcgcctggttcagttcttactggataatggagctgatatgaatctagtggcttgtgatcccagcaggtctagtggtgaaaaagatgagcagacatgtttgatgtgggcttatgaaaaagggcatgatgccattgtcacactcctgaagcattataagagaccacaagatgaattgccctgtaatgaatattctcagcctggaggagatggctcctatgtgtctgttccatcacccttggggaagattaaaagcatgacaaaagagaaggcagatattctcctcctaagagctggattgccttcacatttccatcttcagctctcagaaattgagttccatgagattattggctcaggttcttttgggaaagtatataaaggacgatgcagaaataaaatagtggctataaaacgttatcgagccaatacctactgctccaagtcagatgtggatatgttttgccgagaggtgtccattctctgccagctcaatcatccctgcgtaattcagtttgtgggtgcttgcttgaatgatcccagccagtttgccattgtcactcaatacatatcagggggttctctgttctccctccttcatgagcagaagaggattcttgatttgcagtctaaattaattattgcagtagatgttgccaaaggcatggagtaccttcacaacctgacacagccaattatacatcgtgacttgaacagtcacaatattcttctctatgaggatgggcatgctgtggtggcagattttggagaatcaagatttctacagtctctggatgaagacaacatgacaaaacaacctgggaacctccgttggatggctcctgaggtgttcacgcagtgcactcggtacaccatcaaagcagatgtcttcagctatgctctgtgtctgtgggaaattctcactggcgaaattccattcgctcatctcaagccagcggctgcggcagcagacatggcttaccaccacatcagacctcccattggctattccattcccaagcccatatcatctctgctgatacgagggtggaacgcatgtcctgaaggaagacccgaattttctgaagttgtcatgaagttagaagagtgtctctgcaacattgagctgatgtctcctgcatcaagtaacagcagtgggtctctctcaccttcttcttcttctgattgcctggtgaaccggggaggacctggccggagtcatgtggcagcattaagaagtcgtttcgaattggaatatgctctaaatgcaaggtcctatgctgctttgtcccaaagtgctggacaatattcctctcaaggtctgtctttggaggagatgaaaagaagtcttcaatacacacccattgacaaatatggctatgtatccgatcccatgagctcaatgcattttcattcttgccgaaatagtagcagctttgaggacagcagctga

SEQ ID NO: 16525 - DNA, 1224 bp, Homo sapiens
  SIMILAR (255)..(719): 691254mologous to Escherichia coli similar to Wolinella succinogenes FdhD,accession number L19201,Smith-Waterman Score=500.
actagggcctccagctttgtcctaaggccagcgggctggacgctattgcctctcaaaatccaccgacaaatccagccgtggagaaacagccccacggcatcaaactcttccagcagtgcgcttcccgaataagctgtggctgttttagttgtagttgtttggttttgttttgagaggtgacagcgtgctggcagcccttgcagccatcgcttgctctcggtgcctcctcggcctcggcgcccactctggccgcgcttgagaagcccttcagcccgccgctgcactgtgggagccccttcctgggatggccgaggctggagccggctccctcagcctgcagggatgtgtggagggagagggacgggcaggaaccgggggtaagcgcggcgcttgcgggccagccagagttccgggtgggcgtgggcttggcgggcccgcactcggagcggccggccggccccgcaggccccggcagtgaatggcttagcacccgggccagcagcgcggagggtgcgccgggtcccccagcagtgccggcccacctggcgctgggctcgatttctcgccgggccttagctgcctccctgtggagtagggctcgggacctgcagcccgccatgcctgagcctctcccctcttccaccaatcggctctctgtaaaacagaccaatcggctctctgtaaaatggaccaatcagcaggatgtgggtggggccagataagagaagaaaagcaggctgcctgagccagcagtggcaacccgcttgggtccccttccacactgtggaagctttgttcttttgctcttcgcaataaatcttgctgctgctcactctttgggtccacactgcctttatgagctgtaacactcactgtgaagatctgcagcttcactcctgaagccagcgagaccacaaacccaccaggagcaacaaacaactccagatgcgccgccttaacagctgtaacactcaccgcgaaggtctgcagcttcactcttgagccagcaagaccacaaacccaccagaaggaagaaactcaggaaaacagccgaacatcagaaggaataaactctggacacaccacctttaagaactgtgacactcgctgcgagcgtctgtggcttcattcttgaagtcagtgagaccaagaacccaccaattttggacacaattgcactctagcctgggcaacaagagtgaaactccatctcgaaaaaaaaaa

SEQ ID NO: 16526 - DNA, 1557 bp, Homo sapiens
  SIMILAR (746)..(871): 611254mologous to Mus musculus tex292,accession number X80433,Smith-Waterman Score=153.
aaagctatccagtatggtcttcaagataaggaagaagagattaagcaggaaggtccctggacaaaacaaagactttccaaactgagaaaatgggggtcacagaagtgcttagagaaagctggtggaactgaagatgtctggttttcaaacaaggagaatgtagagtgtatggaccaagatgaatggaagaaaaaagtcagtgaatcatatgttatcacaatagaaagattagaagatgacctgcagatcaaggaaaaagaactgacagaactaaggaatatatttggtgggtttgtgatcttgctggcttcaggagtgaagctgcaggccttcatggtgagtgttacagctcataaaggcagtgcggacccaaagagtgagaagcagcaagatttattgcaaaaagcgaaagaacaaagctcccacggcaagaaatcacatattcgaactcttatgttgaaagggctccgcccatctcgactgacaagaaatggatttacagccttgcatttagcagtttacaaggccgagggagccagctccagcctcggccatcccaggaaggggctcccacagtgcagcagcgggctgaagggctcctcaagtgcggccagagtgggcgccaaggccgagaaggcaccaagagcgagcgagggctgcaagagctgccagcacgctgtcacctctcaccatgtcctgtccgctgccgaccggccgcctcctgaaccccttgctgtctgtgatgacgcagaaccactatgggaaaccaaggatgaaggagaggagaatgccttgcccaagacctcagtgctaaaattctcggcagctgtggtttgtattcacctggggctggcagcatcgggaccaccaggagacccggtggaaatgcacacctctggggcgcactccagacttgctgcatcggaagccatggcacaaccaactctccaggtgactgaggctaacacaagtttgagaactactgccctggcccttgctttctcggctgggactgacgttctgcacaggcgtcaccgaaccctctgtggggccgtggatcccggcaccttcccaggcgtcaccgaaccctctgtggggccgtggaacccggcaccttcccaggcgtcaccgaaccctctgtggggccgtggaaccacacagttgagggagcgtgggccagccgagaagcctttccgagaagcagagcagcagctcccagccagagaaagagccgggctgggactctgggagcctccaaaggacagggtgggcctcggggcctcagagcagttccagacggctgcaggagtgggagaagcagcagtttctcaagaagagcgagaaggcttggaccacagcctccgcttcctcttctggagaaaagccacagctcagcgatgctggctgataattctgcagcctctgtccctggagcctgcagcagaggctgggagtttcgaacagccctgggagctcctggaggcacagcctgcgaccctgagggataagctccatctccagaaggaacgagtggatgaggtcagagcccagcagtga

SEQ ID NO: 16527 - DNA, 846 bp, Homo sapiens
  SIMILAR (421)..(1011): 921254mologous to Escherichia coli bioH protein (AA 1- 256),accession number X15587,Smith-Waterman Score=949.
atggcggtggggcctcgacgtgggcgtcgtcagcgggatcaagggcttccacaggacacctccatggtgtggttgacctggcccagcccctcgctgctctctgagtgggtgcaggcctgtgggcggctgccatccaccgagctggcactggtgagggatgcagtgcgggagcgtgccaggcgggtcatgctggctgagggcactgtggacagagacaggatgggcctgaggactggcgggcagggccaggtgcctctggtgggaaaagtaggctgcaagcaaagcggccagcgaaccgttcctcgaaggcacaaagggctcctcctgagtcaggaggctggcgacagctgtcgggctgggggcatgcagggccggcgacatgtgatatgtgaaagtgggacactggtctttttgcaagtaggaaggcagttgtttctgcgcattggcactcgagcaatatgttccaaaacggttcagagtcagagctctaaaatgggcgattcgggctctgaaatgctcatcttccccgacctgctggaggggctggtgctggtgaacatcgaccccaatggcaaaggctggatagactgggctgccaccaagctctccggcctaactagcactttacccgacacggtgctctcccacctcttcagccaggaggagctggtgaacaacacagagttggtgcagagctaccggcagcagattgggaacgtggtgaaccaggccaacctgcagctcttctggaacatgtacaacagccgcagagacctggacattaaccggcctggaacggtgcccaatgccaagacgctccgcttgctccgaaccctggatggctga

SEQ ID NO: 16528 - DNA, 745 bp, Homo sapiens
  SIMILAR (212)..(412): 981254mologous to Escherichia coli K12 putative glucarate dehydratase,accession number AE000362,Smith-Waterman Score=341.
ggagtgctgggatggggaacatgacatcgagacaccctacggccttctgcatgtagtgatccggggctcccccaaggggaaccgcccagccatcctcacctaccatgatgtgggcctcaaccacaaactatgcttcaacaccttcttcaacttcgaggacatgcaggagatcaccaagcactttgtggtgtgtcacgtggatgcccctggacaacaggtgggggcgtcgcagtttcctcaggggtaccagttcccctccatggagcagctggctgccatgctccccagcgtggtgcagcatttcgggttcaaagtatgtgattggcatcggagtgggcgccggagcctatgtgctggccaagtttgcactcatcttccccgacctggtggaggggctggtgctggtgaacatcgaccccaatggcaaaggctggatagactgggctgccaccaagctctccggcctaactagcactttacccgacacggtgctctcccacctcttcagccaggaggagctggtgaacaacacagagttggtgcagagctaccggcagcagattgggaacgtggtgaaccaggccaacctgcagctcttctggaacatgtacaacagccgcagagacctggacattaaccggcctggaacggtgcccaatgccaagacgctccgctgccccgtgatgctggtggttggggataatgcacccgctgaggacggggtggtggagtgcaactccaaacc

SEQ ID NO: 16529 - DNA, 950 bp, Homo sapiens
  SIMILAR (577)..(2): 921254mologous to Escherichia coli Sensor protein FixL (EC 2.7.3.-),accession number D90790,Smith-Waterman Score=920.
aaatgtcaagaccacgattgtgcaagtcaagtgtcagcacactaatcaatcgagctcggtaccgagccttaggttcttcaaaaaccagggctaagctacaagtgcacatcggggatcagggggcaagagcccagatacaaatgggaccatcagggaaccaaaaggagctgtccaacctcaagagaagtgagacgataactagacgtaaaacgcgcagtctcgccgcctcatgtgccgacgctggtaacactgctgtggaccaccgcagaactgccggccacgagcagagagaaagaggcatcaacacgacagagaaaaccacaaatagaaaacagatgtcgataccttcttttgttccgtttctcttcctctgctcgtacaggaaggatgaggtggctcggcagcgccacgtcgcgcgaaccttcggtcaggctgacgtagttttgcaggaagatggacataccgattgcagagatgagtgcaatcaggcgcttagagttacgcaccgggcggtcctagaagcttatggcatgattcagggcattggcctcaacatttaccaccgctactcaccctggtgggaggcacgtggctaccagtggcattacactgctgacatgagcaaccttttccgaagataccagttcaacgtggccacctggctcatcttccccgacctggtggaggggctggtgctggtgaacatcgaccccaatggcaaaggctggatagactgggctgccaccaagctctccggcctaactagcactttacccgacacggtgctctcccacctcttcagccaggttcctggtccaaccactgaccctccaggagatggaactagtcacatccccagcaagaccctctttctccacgttgggccttcagaagagacctcactgagtgtgcagggtgcaactgtagttagtgggatgtcagtgaaatga

SEQ ID NO: 16530 - DNA, 636 bp, Homo sapiens
  SIMILAR (910)..(491): 861254mologous to Escherichia coli K12 orf, hypothetical protein,accession number AE000492,Smith-Waterman Score=612.
atgggatcaactgtaccccaaacttcagcatcacacaatatacccagagtgaagcaacatggatgcagtcagccaagtccccatggaagtcgtgcttcccaagcacatcctggatttctgggtattgtcctcattatctgggcacattgtcatcatgacctcgtggtgctgtgcccagcatgcagaatcatctttgcatgtgactcatcctccttatgggctgttgagagcttccaaaggccgcacggtgatgacaacacaggaaggcatatttcacaagaggccagaaaaagagccaatcagtcagttgctaaacacattaatcagatcttcagtgctccagctcaggctgaggtgatgctggtgtgggagagcccagcccgtttggaatggggccaaggactctccacagtagcttctccccttgctgtgaagatgaacaaattgattgaatattaccagcagcttgctcagaaagagaaggttgagcgagatcgcaagaaactggcacgacgtagaaactatatgcctctggctttttcgagcaggtgctggtatccacaactgagagacctgaagacggactgcatcactggactctttgcagacactccccagtaccagctcggagactga

SEQ ID NO: 16531 - DNA, 1324 bp, Homo sapiens
  SIMILAR (536)..(1195): 881254mologous to Escherichia coli citrate synthase (EC 4.1.3.7),accession number J01619,Smith-Waterman Score=1003.
tttgtgccatgtaagatgttcctacttccacttccgccatgactgtaagtttcctgaggactccccagaagcagaagttgctatgcttcctgtacagcctgcagaactggagttcctcgtaggtctggttggacctttgtatggtaatgaagatttagatcccctgttaggaaacctgctggatctgtctatggcagtgcagaaattttcccagtcattgcaagatttccagtttgaatgtattggtgatgctgaaacagatgatgaaattagtattgactctcaggaaagtcttgaacagtatgagctttggactcaagagattaaacatttaccaagaaggagagtcactttgctagtaaatatttttggtggagacttcattcctttagacacacctaaacagaaaattcctgtggtagtgacaggcatacactaccatttgtcaactaagagtaaaaggagcaaagacagactcaaccaacttaatcttacatttcaagataagaaaacactctacactccatccatgggtcgactaatgcattttcaagcttcaaatatcagctgcattctcagtcgaagaggacgaccatccccgataaaggaggaccagtctcggtcaaggaataattgtggtcctatgcctagacataacgccaggacttactgtggcagccccgacattcatgaaaccccaagtccaagtacctatcaacgtgggcactcaagattgaataggtctccaaacacgaagtgtgttcgggttcttgatcttcttcctatttattctcattttcctaatgccgaagtaatgatgaggtcaaaaaaaccatcaagactacgtctgcacaagcgtcagagagacatggatgccaatccagggatcaccacttactgccatgtgtttcagagcaagtacttagcccctctgaatcataactcatcattttatgatgcagccacagtgcctgccagtcaaggaaaaaactacagtgacaacaaaaatcatcacagtcaaactgtccgtattccaaaaggatggcaccaggttcaagcagctgaagaagagacccagagccagcacacaaaacacagggctttattagtgggaaacttacatacggagtggtccagtgacagtgggatggaacagaagaaccaccaacccacttgtaaaaagcatgcagctgtacaagttccaattaccatgtttcctgtgtttatttatatcgagatagcatgtgacataaacatcccaactcagtcactaaaagaatttgcaagactactcattgcagtagaagaagaaaggcgaagactg

SEQ ID NO: 16532 - DNA, 594 bp, Homo sapiens
  SIMILAR (412)..(1047): 941254mologous to Escherichia coli multidrug resistance-like ATP-binding protein Mdl,accession number U82664,Smith-Waterman Score=996.
atgacaccaagaggcacaggtggagatagtgaagttcctttccaagcagcaaaacctctttctgtgaaacagggggttagctttcggctttgggctcggaggaggccaaggtgcgactttcttcggtcgtcccgaatccgggttcatccgacaccagccgcctccaccatgccgccgaagttcgaccccaacgagatcaaagtcgtatacctgaggtgcaccggaggtgaagtcggtgccacttctgccctggcccccaagatcggccccctgtgtctgtctccaaaaaagaacagacaggcccagattgaggtggtgccttctgcctctgccctgatcatcaaagccctcaaggaaccaccaagagacagaaagaaacagaaaaacattaaacacagtgggaatatcacttttgatgagatcgtcaacattgctcgacagatgcggcaccgatccttagccagagaactctctggaaccattaaagagatcctggggactgcccagtctgtgggctgtaatgttgatggccgccaccctcatgacatcatagatgacatcaacagtggtgctgtggaatgcccagccagttaa

SEQ ID NO: 16533 - DNA, 833 bp, Homo sapiens
  SIMILAR (58)..(567): 971254mologous to Homo sapiens Unknown gene product (partial),accession number AC003007,Smith-Waterman Score=821.
ccaaaccctgataacgctagtgacctgattaacccttgcttggcacgagggttgaagagcccccagaggagtgtgagtcccaggggtcccgccagctccactcccaccttccaaacctgtgaaagtcaggtgcctgagtcgcacagtctctcccacccgaatgccatgagctgcagcgacccagcctgtctctgcaggagggccagacatgccgtgacatcaccagctcctctaggaatatgggatacaaggagtggctgagatcggctgatcaccagctcactccgctgcagccgccccagagcagtggctccccgaagccgtgttctggacccctggcacccatcctgggccccaccccatcatccaggccttgggccttcgacctggggagagtccctgtctcctccatgagccgtccagggcctgaagaggttcatctgacaccagccgcctccaccatgccgctgaagtttgatcccaatgagatcaaagtcatatgcctcaggtgcactgggggtgaagtcggtgccacttctgcgctggcccccaagattagccccctgggtctgtctccaaaaaaggttggtaatgacattgacaaggcaataggtgactggaagggccgtaggattacagtaaaactgaacattcaaaacagacaggcccatattgaggtggcaccttctgcctctgccctgatcatcaaagccctcaaggaaccaccaagagacagaaagaaacagaaaaacattaaacgcagtaggaatatcacttttcatgaggtcgttgacattgctcgacagatgcggcaccaatctttagccagataa

SEQ ID NO: 16534 - DNA, 641 bp, Homo sapiens
  SIMILAR (680)..(1060): 781254mologous to Homo sapiens p40,accession number U93567,Smith-Waterman Score=508.
cggacgcgtgggctcggaggaggccaaggtgcaacttccttcggccgtttctgaatttttgttcatccgacaccagccgcctccaccatgccgtcgaagttcgaccccaacgagatcaaagtcgtatacctgaggtgcaccggaggtgaagtcggtgccacttctgccctggcccccaaaatcggccccctgggtctgtctccaaaaaaagttggtgatgacattgccaaggcaacgggtgactggaagggcctgaggattacagtgaaactgaccattcagaacagacaggcccagattgaggtggtgccttctgcctctgccctgatcatcaaagccctcaagggaaccaccaagagacagaaagaaacagaaaaacattaaacacagtgggaatatcacttttgatgagattgtcaacattgctcgacagatgcggcaccgatccttagccagagaaactctctggaaccattaaagagatcctggggactgcccagtcagtgggctgtaatgttgatggccgccatcctcatgacatcatcgatgacatcaacagtggtgctgtggaatgcccagccagttaagcacaaaggaaaacatttcaataaaggatcatttgacaactggaaaaaaaaaaa

SEQ ID NO: 16535 - DNA, 738 bp, Homo sapiens
atggcttctcatgcttatgataaaaatcaaaatgccaatgtcttagtccacttgtgcttctataacagaatacccaagactggagcatattacctagattctaggagtgtgagcatcagttatttgattggccatcatatagacatgggtcttgagacagccacttccaaaaatgaattcattttcgatagtgcaaataggtatgagaatgccagctccagctacaagggggctgcagtggtagctgctcctcttggagagcatagtggcatggactcagatcagctccatcagctgataccagtgttggcgataactggggagaagggtggtccttggtggcaaaagctgcaggtgtttgcagcggtgcatggatcccccttctgctctctgggaccacactcccttgttaggctaaaggtggctcccatgcctgaaggccttaggctcctactggacaaacacagagaatcaaatacacactcactcttctggacaggaaaagaaacatccagctcatctcacatccaggaaagtgccgcactaaatgcccacatttcaaacacaggcccaagagcttgcagttctcaggaccagctacaagtagggaaaggcccaaagatgagggagtctggaggctttggagaggtgctacttctggaagagaaaaagctacagaggaggggtgctgttgtggcagtgaaggaagaaggagaaattgaaaacactgcacagtga

SEQ ID NO: 16536 - DNA, 346 bp, Homo sapiens
  SIMILAR (651)..(523): 581254mologous to Homo sapiens Human secreted protein, SEQ ID NO: 6874,accession number G02793,Smith-Waterman Score=126.
cgatggcaggtgggggcagcgacctgagcaccagggggctgaacggaggtgtttcacaagtagcaaatgagatgaaccatcttcctgcacacagccaaagtctgcaaaggctgttcacggaagaccaggatgtagatgagggacttgtctatgacactgtattcaagcacttcaaaagacataagctggagatatcaaatgcaataaaaaagacatttccattccttgagggcctccgcgatcgggaactcatcacaaataaaatgtttgaagagaagtgccagaaagcccggaagcaaggaaggaaagtgaccaagcatgtggcaaaatggatactgtggatatt

SEQ ID NO: 16537 - DNA, 649 bp, Homo sapiens
  SIMILAR (253)..(648): 981254mologous to Homo sapiens nuclear autoantigen,accession number M60618,Smith-Waterman Score=671.
gcagccacactgcacgcaggctgggccgactgagggtctcagaggccattctctgaggcccacgcagggcctatggtgggaggatggcaggtgggggcggcgacctgagcaccaggaggctgaatgaatgtatttcaccagtagcaaatgagatgaaccatcttcctgcacacagccacgatttgcaaaggatgttcacggaagaccagggtgtagatgacaggctgctctatgacattgtattcaagcactttcaaaggaaataaggtggagatttcaaatgcaataaaaaagacatttccattcctcgagggcctccgtgatcgtgatctcatcacaaataaaatgtttgaagattctcaagattcttgtagaaacctggtccctgtacagagagtggtgtacaatgttcttagtgaactggagaagacatttaacctgccagttctggaagcactgttcagcgatgtcaacatgcaggaataccccgatttaattcacatttataaaggctttgaaaatgtaatccatgacaaattgcctctccaagaaagtgaagaaaaagagagggaggagaggtctggcctccaactaagtcttgaacaaggaactggtgaaaactcttttcgaagcctgacttggccacctt

SEQ ID NO: 16538 - DNA, 1668 bp, Homo sapiens
  SIMILAR (1500)..(1598): 931254mologous to Escherichia coli K12 putative general secretion pathway for protein export (GSP),accession number AE000379,Smith-Waterman Score=149.
atgcaccatgctccgctggtatatggagaatctgtaggcctctgtgaagaaagcaaagtttctctgatccagaaaacaatgtcagacacactggggttgggaaagggacgggaccacattaagaagacatatccctgtcccctggtaactgacggacagcacagggtcctggtggcccatggacgccacctcatgcctcctttccgaggccacctagccggcgaggcccgccacggacacaccgtgagcacgcgcaacgagcaggggtcggtgatcgccatcccccgtgtccgcctcccgcgttcccgttcccgcggccgccccgcgctcctccgggctccgcccccgcccggccggcgcccagtctcccggcagcgcgtagcgctgcagcctcttcagggctgggcagaaacagaaaccgaaaatcctcctcttatcgggattctagctcaccaaacacttcgaattgtgtgggaacaggttgacatcctatggggccccagcccactaacacaggatgaccgcctggtccggccaggtcatgaagtggccctgggaaccaggttttgctggatatcctgtgtcttaccttgggataaggctctcaggggcaggtgggctataaaactgccagcacaggacaatggcgaaacagttacctgctcctgtgtacccaaggaacttggcatcccccagcaattccacctctctgactggcctggaattgcccctattcctccattagacagcagtggtctaggctgtgagtgtcccaggctgttcacggaagaccaggatgtagatgagggacttgtctatgacactgtattcaagcacttcaaaagacataagctggagatatcaaatgcaataaaaaagacatttccattccttgagggcctccgcgatcgggaactcatcacaaataaaatgtttgaagattctgaagattcttgtagaaacctggtccctgtacaaagagtggtgtacaatgttctcagtgaactggagaagacatttaacctgtcagttttggaagcactgttcagcgaggtcaacatgcaggaataccccgatttaattcacatttataaaagcttcaaaaatgcaatccaagacaaattgtctttccaagaaagtgatcgaaaagaaagggaagagaggcctgacatcaaactaagtcttaaacaaggtaaaaatgacagaataaaaacggtttctcatccgctaagaggaaaaggagacaagggaggagaagtgccagaaagcccggaagcaaggaaggaaagtgaccaagcatgtggcaaaatggatactgtggatattgcaaacaactctactttgggaaaacccaagaggaaaagaaataacagcaaagccgatggccagctggtctcgagtgaaaagaaggcgaacatgaatctgaaagacctttccaagattaggggtcttgctgcttgtcaggcctctcctccaaccgtctgccacatttcagaaaagctgagaaccccttggagtgaaaaaggaggagaaacacggatgcgaactgtccctttatccagcgtatccacaatgtggacaccaccagtccatgagtcactgagtagccatcctggtaatcagatcggctgtcatggtatctcagtgcttgtgttcagagaaccctga

SEQ ID NO: 16539 - DNA, 1535 bp, Homo sapiens
  SIMILAR (435)..(1085): 981254mologous to Homo sapiens Human membrane transport protein, MTRP-11,accession number Y71066,Smith-Waterman Score=1098.
agcttggcgcgccagtgcctcggtttccaggctccgggaataacagaagccagctgagagcgcctgcgcggctgtcggttgatggggaggtcaggtctgggaaactaggccctggggttttccctgagcaagagcggtgcccgagggcctcaggcgtcagtccaggccctgaatggctggtctccagcgggtggcgtcacatctgcctgtgggcgttatgctcccacataatacaacggaagctccagggccccactcatccaagcaagactcttatgaacaaggtgactcttcccagcagtccttgaaggggcacctgaggaacaatttccagaagcagcttttgagcaacaaagagtacgagtctggataaagtctatactcaccccaaatggaccacccaaacaaaagcccggagctactcctatccccactgtactggaatcagccagcaagatccagaaagtgattcccagggccaaggaaatggtttgttttactcgtcaggccctcaatcctggtatcccaaagccaataaccaggactttatcccctttacaaagaaacgagttggagtggaccgggcgttcccattgaaacccatggtccacaggaagtcgtgcagtacaggtgaggctggcactgatggggaccataatgtctacccaaggccccctgagccgagagagttttcatctaggaactttggtgtgaggaaccagggcaacttttctgtggttggtactgttcttgctgccacgcaggcggagaaggccgtggcaaactttgacaggacggagtgggtgcagatccgaagactagaagctgcaggggagagcttagaggaggaaatccgaagaaagcagattctcctgaggggaaagctgaagaagacagaggaggaactcagaaggatccagacgcaaaaggaacaggccaaggaaaatgaaaacggagagctacagaaaattatactccccaggagcagagttaaaggtaataaaagcaacaccatgtacaaacctatcttctccccagaatttgagtttgaggaagaatttagtagagacaggagagaggatgaaacttggggacggtctcaacaaaattcaggtccattccagttctctgattatagaatccagaggctcaaaagggaaaggctggtagcaagcaataataaaattcgagacccagtctcagagccatcggtggagaaattctccccgccttcagaaacaccagtcggtgctttgcagggatccgccagaaattccagcctgtccatggcaccagactcctcaggttccagcggctccattgaagagccacagctgggtgagtgcagccactgtgggcgcaaattcctctcgttcaggctggagagacactccaacatctgcagcaggatgcggggttccaagaggaaagtgtttgactcctccagggcccgggctaagggcacagaactagagcagtacttgaactggaaggggccagcttcagccaaggtaacaagagccttatggatgtga

SEQ ID NO: 16540 - DNA, 630 bp, Homo sapiens
  SIMILAR (109)..(627): 831254mologous to Homo sapiens cytokeratin 18 (424 AA),accession number X12883,Smith-Waterman Score=685.
ctggagacagagatcgaggctctcgaggagctgctcttcatgaagaagaaccacgaagaggaagtaaaagacctacaagcccagattaccagctctgggttgaccatggagctgcctcagaagagccgagaggagccagacaagtactgctctcagcagatggaggagagcaccacagtggtcaccatgcagtctgccaaggttggagctgctgagatgatgctcatgaaactgagacgtacagtccagtccttggagattgacctggactccatgagaaatctgaaggtcagcttgggaaacagcctgagggaggtggaggcccactacaccctgcagatggagcagctcaatgggatcctgctgcacctggaatcagagctggcacagacccaggcagagggacagtgccaggcccaggagtacaaggccctgctgaacatcaagctcaagctggaggctgagatcaccacctaccactgcctgctggaagatggcaaggacttcaatcttggtgatgccctggacagcagcaactccatgcaaatcatccaaaagaacactacccactggatagtggatggcaaagtggtgtctgagaataatgacaccaaagttctgagacattaa

SEQ ID NO: 16541 - DNA, 1412 bp, Homo sapiens
  SIMILAR (2096)..(2260): 921254mologous to Escherichia coli seryl-tRNA synthetase,accession number X05017,Smith-Waterman Score=275.
cggggtcgtccgcaaagcctgagtcctgtcctttctctctccccggacagcatgagcttcaccactcgctccaccttctccaccaactaccggtccctgggctctgtccaggcgcccagctacggcgcccggccggtcagcagcgcggccagcgtctatgcaggcgctgggggctctggttcccggatctccgtgtcccgctccaccagcttcaggggcggcatggggtccgggggcctggccaccgggatagccgggggtctggcaggaatgggaggcatccagaacgagaaggagaccatgcaaagcctgaacgaccgcctggcctcttacctggacagagtgaggagcctggagaccgagaaccggaggctggagagcaaaatccgggagcacttggagaagaagggaccccaggtcagagactggagccattacttcaagatcatcgaggacctgagggctcagatcttcgcaaatactgtggacaatgcccgcatcgttctgcagattgacaatgcccgtcttgctgctgatgactttagagtcaagtatgagacagagctggccatgcgccagtctgtggagaacgacatccatgggctccgcaaggtcattgatgacaccaatatcacacgactgcagctggagacagagatcgaggctctcaaggaggagctgctcttcatgaagaagaaccacgaagaggaagtaaaaggcctacaagcccagattgccagctctgggttgaccgtggaggtagatgcccccaaatctcaggacctcgccaagatcatggcagacatccgggcccaatatgacgagctggctcggaagaaccgagaggagctagacaagtactggtctcagcagattgaggagagcaccacagtggtcaccacacagtctgctgaggttggagctgctgagacgacgctcacagagctgagacgtacagtccagtccttggagatcgacctggactccatgagaaatctgaaggccagcttggagaacagcctgagggaggtggaggcccgctacgccctacagatggagcagctcaacgggatcctgctgcaccttgagtcagagctggcacagacccgggcagagggacagcgccaggcccaggagtatgaggccctgctgaacatcaaggtcaagctggaggctgagatcgccacctaccgccgcctgctggaagatggcgaggactttaatcttggtgatgccttggacagcagcaactccatgcaaaccatccaaaagaccaccacccgccggatagtggatggcaaagtggtgtctgagaccaatgacaccaaagttctgaggcattaagccagcagaagcagggtaccctttggggagcaggaggccaataaaaagttcagagttcattggatgtc

SEQ ID NO: 16542 - DNA, 479 bp, Homo sapiens
  SIMILAR (2)..(298): 291254mologous to Boreogadus saida antifreeze glycopeptide AFGP polyprotein precursor,accession number U43200,Smith-Waterman Score=72.
cagcactgcctcaagtatgcgcacaactggctgggctgcaacagcaccctggctcggccccaaccttgctcctagatcagagcagtctccaggagcagggagaggccaggcagcagaagcagatacctccaagcctgctgaggtgggggtgccttcccaggcccctagagtgcagagatatccaggttggtccgcagccacaacctgggtggctacagctgcacaaaggaggtgggggatgcaggaagggctcatgcctgctccagcactcctgcctgctttggcactcctgcctgctcccagcctccaagaacacggtctgtagcaaggacttgggtggctgcagttgcacccaggagagcagggctcctgcctgctcctggtctccaagaacacagggaggctcagccagcagccatgacttgggcagctgcagaaatgcctgggaaactccctcccgccaacttggaaggagctgg

SEQ ID NO: 16543 - DNA, 678 bp, Homo sapiens
  SIMILAR (169)..(651): 421254mologous to Homo sapiens unnamed protein product,accession number AK000307,Smith-Waterman Score=295.
  misc_feature (1)...(678): n = a,t,c or g
atggcagcttgtcccatcatcgctgcagctgtcagcaaagaggaggccctgaagtgggtagctcctctctgcaggttggtcctcctgttgtctctgcagctctcagcagaaaagaggccctggacancccaaagtctggagggggctgaagcagcagaggaatggcctgtcagcactgcctcaagtatgcgcacaactggctgggctgcaacagcaccctggctcggccccaaccttgctcctagatcagagcagtcaccaggagcagggagaggccaggcagcagaagcagatacctccaagcctgctgaggaaaacccctggagccaagaggtattccggcagaagttcaggcagtttagttactctgactccactggccctcgggaggctctgagccggctgcgagagctttgctgtcagtggttgaggccggaggtgcactccaaggagcagatcctggagctgctgatgttggagcagttcctggccatccttcctgaggagctgcaagcttggctgcgagagcatcggccagagaatggagaggaagctgtgactatgctggaggagctggaaaaagaactggaggagccaaggcaacaggtcttagatccaggccttgttggagagggcacagccacagcccactggatggagatgccactgcagtgctga

SEQ ID NO: 16544 - DNA, 452 bp, Homo sapiens
  SIMILAR (42)..(140): 451254mologous to Homo sapiens Fragment of human secreted protein encoded by gene 2,accession number Y76229,Smith-Waterman Score=64.
  misc_feature (1)...(452): n = a,t,c or g
ggaactggaagaaagggcttttcttcctggttctggcatgttctttgtgtatgtttctgtagcacatgggacacccagcagtgcacatcccaatgagttccaaaggcccctatccctatgggtagcttcccagcaagttctgtaccaggtcagctccccatggggagcttcctagcacccccagagtgtggctccctcagtgagttctgcccagctcagcactgcagtggcatctcccatccagtgggcttgtggctgtgccctctccaacaaggccctggatctaagaccctggcaggaaaggggaagttgtggcaccctcctgcaaatttgttcttacctttgatgttctgcctcagccctagagacactctatatctgttattgctgtattcttttgagtttcactttttgttataacacttagtagttaataattcttaanattaaac

SEQ ID NO: 16545 - DNA, 990 bp, Homo sapiens
  SIMILAR (123)..(302): 901254mologous to Homo sapiens similar to human DNA-binding protein 5,accession number D79986,Smith-Waterman Score=252.
atgcttgaggcagtgctggaagagagccctcgggaggaggcggctttctcctgggtcatgaaggggaatctggctgcaggaaaaaccatccaagcgcaagacagagatgctgtgggcatcctcagttccagaactggggaatccatggaaaacctgcagaaaaacttgctgcccaagcagaggaggcgaacgagggaaactttcacaatgtctggagcgcttgatgtcctgcaaatgaaggaggaggatgtccttaagttccttgtagcaggaacccacttaggtggcaccaatcttgacttccagatggaacagtacatctataaaaggaaaagtgatggcatctatatcataaatctgaagaggacctgggagaagcttctgctggcagctcgtgctattattgctattgaaaaccctgctgatgtcagtgttatatcctccaggaatactggccagagggctgtgctgaagtttgctgctgccactgaagccactccaattgctggtcacttcactcctggaaccttcactaaccagatccaggcagacttctgggagccaaggcttcttgtggttactgaccccagggctgaccaccagcctctcacggaggcatcttatgttaacctacctaccattgctctgtgtaacacagattctcctctgcgctatgtggacattgccattccatgcaacaaccagggagctcgctcagtgggtttgatgtggtggacgctggctcgggaagttctgcgcatgcgtggcaccatttctcgtgaacacctatgggaggtcatgcctgatctctacttctacagagatcctgaagagattgaaaaagaagagcaggctgctactgaaaaggcagtgaccaaggaggaatttcagggtgaatggactgctccagctcctgagttcactgctactaagcctgaggttgcagactggtctgaaggtgtacaggtgccctctgtgcctattcagtag

SEQ ID NO: 16546 - DNA, 494 bp, Homo sapiens
  SIMILAR (4)..(492): 501254mologous to Canis familiaris CfOLF1,accession number U53679,Smith-Waterman Score=444.
atggttgaagaaaatcataccatgaaaaatgagtttatcctcacaggatttacagatcaccctgagctgaagactctgctgtttgtggtgttctttgccatctatctgatcaccgtggtggggaatattagtttggtggcactgatatttacacactgtcggcttcacacaccaatgtacatctttctgggaaatctggctcttgtggattcttgctgtgcctgtgctattacccccaaaatgttagagaacttcttttctgagggcaaaaggatttccctctatgaatgtgcagtacagttttattttctttgcactgtggaaactgcagactgctttcttctggcagcagtggcctatgaccgctatgtggccatctgcaacccactgcagtaccacatcatgatgtccaagaaactctgcattcagatgaccacaggcgccttcatagctggaaatctgcattccatgattcatgtagggcttgtatttag

SEQ ID NO: 16547 - DNA, 1511 bp, Homo sapiens
  SIMILAR (786)..(1370): 981254mologous to Homo sapiens protocadherin,accession number AJ276803,Smith-Waterman Score=982.
atggctgaaaggggccaacataaagcttgggctgtggcttcagagggtggaagccccaagctttggcagtttccatgtggtgttgagcctgcaggtgcacagaagtctagaattgaggtttgggaacctccttctagatttcagaagatgtacggaaatgcctggatgcccaggaagaagtttgctgcaggggtggtgccctcatggagaacctctgctagggcagtgcagaaggcaaatgtggggttggagccccaacacacagtccctactggggtaccgcctagtggagctgtgagaagaggaccaccgtcctccagaccccagaatggcagatccactgacagcttgcactgtgaacctggaaaagccacagacactcaatgccagcccgtgaaagcagccaggaagaaggctgtaccctgcaaagccacaggggtggagctgcccaaggctttgggaacccacctcttgcatcagcaccttgcacttctccttgctgctgccatgtgaagaaggatgtgtttgcttcctcttctgccatgattgtgcatgtaggctggcaacagatcagtatctccctgggatggagcttccagaggaaggatctggctgttatctttgctgtttcatggccttcactggtgatactttcaggatttttaaacttgacctgctttcatttgaacacctgcaagcatgcgttactaaactatctctataagtatggacgaattttgaatagtcacagtgattataaacaaaagaagaaaacagtgagaatcagtcagagagaaagtgttgtgcgggttaatacaacaaactgtcacaagtgtttgttgtccgggacgtacattttcgcggtcctgctagtatgcgtggtgttccactctggcgcccaggagaaaaactacaccatccgagaagaaattccagaaaacgtcctgataggcaacttgttgaaagaccttaacttgtcgctgattccaaacaagtccttgacaactactatgcagttcaagctagtgtacaagaccggagatgtgccactgattcgaattgaagaggatactggtgagatcttcactaccggcgctcgcattgatcgtgagaaattatgtgctggtatcccaagggatgagcattgcttttatgaagtggaggttgccattttgccggatgaaatatttagactggttaagatacgttttctgatagaagatataaatgataatgcaccattgttcccagcaacagttatcaacatatcaattccagagaactcggctataaactctaaatatactctcccagcggctgttgatcctgacgtaggcataaacggagttcaaaactacgaactaattaaggaggcatttaaatcttttaattttgctgtgaggaaagttattcctaagggatcagtcacagatagctatattacccccatcaaatgcatcattttcctagattccaaaccctatgtagaaatctccaagttgaagaagtaa

SEQ ID NO: 16548 - DNA, 2187 bp, Homo sapiens
  SIMILAR (581)..(3019): 1001254mologous to Homo sapiens similar to human DNA-binding protein 5,accession number D79986,Smith-Waterman Score=4237.
tagttcacaaggcaccccttacaagctttttcacctttccaatttgcttcaaatgccgaacgactgtagaatggtcaatgttgagttcttcagcaacttcaggtgtagttataagaggatcagcttcgatgattgctctcaattggtcactgtcaacttccgatggctggccactatgctcctcatcttcaaggctctcctctcctttgtgaaacttcttgaaccaccactgcactgtgcgttcattagcagttcctgggccaaatgtgttgctgatgttgtgagttgtctccgctgctttatgacccattttgaacttgaataagaaaattgctcgaatttgctttttgtctaacatcatttccatagtctgagtcaccgccgccgccgccgccacagccatggccgagagtggtgaaagcggcggtcctccgggctcccaggatagcgccgccggagccgaaggtgctggcgcccccgcggccgctgcctccgcggagcccaaaatcatgaaagtcaccgtgaagaccccgaaggaaaaggaggaattcgccgtgcccgagaatagctccgtccagcagtttaaggaagaaatctctaaacgttttaaatcacatactgaccaacttgtgttgatatttgcttggaaaaattttgaaagatcaagatactttgagtcagcatggaattcatgatggacttactgttcaccttgtcattaaaacacaaaacaggcctcaggatcattcagctcagcaaacaaatacagctggaagcaatgttactacatcatcaactcctaatagtaactctacatctggttctgctactagcaacccttttggtttaggtggccttgggggacttgcaggtctgagtagcttgggtttgaatactaccaacttctctgaactacagagtcagatgcagcgacaacttttgtctaaccctgaaatgatggtccagatcatggaaaatccctttgttcagagcatgctctcaaatcctgacctgatgagacagttaattatggccaatccacaaatgcagcagttgatacagagaaatccagaaattagtcatatgttgaataatccagatataatgagacaaacgttggaacttgccaggaatccagcaatgatgcaggagatgatgaggaaccaggaccgagctttgagcaacctagaaagcatcccagggggatataatgctttaaggcgcatgtacacagatattcaggaaccaatgctgagtgctgcacaagagcagtttggtggtaatccatttgcttccttggtgagcaatacatcctctggtgaaggtagtcaaccttcccgtacagaaaatagagatccactacccaatccatgggctccacagacttcccagagttcatcagcttccagcggcactgccagcactgtgggtggcactactggtagtactgccagtggcacttctgggcagagtactactgcgccaaatttggtgcctggagtaggagctagtatgttcaacacaccaggaatgcagagcttgttgcaacaaataactgaaaacccacaacttatgcaaaacatgttgtctgccccctacatgagaagcatgatgcagtcactaagccagaatcctgaccttgctgcacagatgatgctgaataatcccctatttgctggaaatcctcagcttcaagaacaaatgagacaacagctcccaactttcctccaacaaatgcagaatcctgatacactatcagcaatgtcaaaccctagagcaatgcaggccttgttacagattcagcagggtttacagacattagcaacggaagccccgggcctcatcccagggtttactcctggcttgggggcattaggaagcactggaggctcttcgggaactaatggatctaacgccacacctagtgaaaacacaagtcccacagcaggaaccactgaacctggacatcagcagtttattcagcagatgctgcaggctcttgctggagtaaatcctcagctacagaatccagaagtcagatttcagcaacaactggaacaactcagtgcaatgggatttttgaaccgtgaagcaaacttgcaagctctaatagcaacaggaggtgatatcaatgcagctattgaaaggttactgggctcccagcatcatagcagcatttctgtatct

SEQ ID NO: 16549 - DNA, 745 bp, Homo sapiens
  SIMILAR (296)..(418): 971254mologous to Homo sapiens PLIC-1,accession number AF293384,Smith-Waterman Score=198.
tttcgtgaagggccagggagaaggaagcggtggctgctgcggatgtcggtgtgagcgagcggcgcctgaacacacggcggctgccgagcgcctgacccgtgcctgcgccagagcctgcaccgagctccggggccccacaccccgctacggtggccctgcgcccgttgctactgaggcggcgtgctctgcattcttcgctgctccaggcctgccggctctggtgtctgctggctcctccttgctcgcctgctccctcctgcttgcctgagtcaccgccgccgccgccgccacagccatggccgagagtggtgaaagcggcggtcctccgggctcccaggatagcgccgccggagccgaaggagctggcggccccgcggccgctgcctccgcggagcccaaaatcatgaaagtcaccgtgttgcttcttccagatcccttttgatctactttcagctttgaaatgatgtaatagcaactgcatcttttgttcgtgttccttttgctggagggtcagtctccggtcacactgcaattttagatggtccagtgcagattctaattcacgaaccatattatcccgttccagaactttcattttcatttcttcattatataactgttgtttccgttcagcttctcgcaaattcaccactatctcggtttgaaagcgccacacgcaccaagaaaacaagatagaattcagattctgatccagcaggtccacttggggcctgaggatctgcat

SEQ ID NO: 16550 - DNA, 1044 bp, Homo sapiens
  SIMILAR (3)..(2477): 971254mologous to Homo sapiens putative p150,accession number U93563,Smith-Waterman Score=4283.
tcacttgccagctatgttcagggccttcccaccagggtctgccacatagccctctggaacctctgtctccttggttatgcagaacagggcgagaaggaaagtgctgaaggtgacgccaaatgtgaagagtttccggtgtcgcttcaggacctggaagtcatctgccaggcccgtgatgacagcctccatgcctcccataagaacagagacactttctcctcccgctgactctccaaagatggtcacagagcctgggttccctccaaagctggcaatgttgtcctggacccagcgcagggcagccacctggtccaggtgaccccagttcccccggctgtgttcatcccctgtgcttgcaagcagccagctgtgttgcctatgggtgggacagacagatgcatcaagttcccaggtttgacaaaagagggcctttggctttttctctcccttggccaagggtgaaattaacgtctgaaccttcctggacccctttgtgcgggcacctccatcctttttgctgtcctcatggaagccatcggagtttcctgcatcagacaagctggtggaggccacgtggcaagccacatctactgaggcctcatgctgctcttgctctgtaagacacggagcccagaaacccatctgcacttcctgagacctgcctctgtggttccgggccacaatcacagatgggacaccaaacatcacatctgctatcaagtccaggaacaggtctttctttttgacagtgtcgtctgttcctcctaagtatttctcagtggcttctggaatcagttccttagcaatgcactgaaaccagcagacaaaagccatcagcctctgcttcctacaacactggaacacctcactggtccggaagggctgagaaaccctggggatgcttgttggaagaaaccagccaaattccttcctgttaaatccgacaatgtaggggacagtgtggaacttcctttcagcttgaagctcctcgggtgtttttggcagcaccactccatcaatcaccgtgggtgtgtgggggtaact

SEQ ID NO: 16551 - DNA, 1029 bp, Homo sapiens
  SIMILAR (304)..(387): 921254mologous to Homo sapiens Human secreted protein, SEQ ID NO: 7102,accession number G03021,Smith-Waterman Score=143.
atgcctgtaatttctgagagtgatgtggccctcactcctgctctggtggagaagggtgacgtcaagcccctggctgagcaaattgctatcactgctgggtgtaaaaccaccacctcagctgtgatggttcactgcctgcgacagaagacggaagaggagctcttggagacgacattgaaaatgagttacccccacacacccacggtgattgatggagtggtgctgccaaaaacacccgaggagcttcaagctgaaaggaagttccacactgtcccctacattgtcggatttaacaggaaggaatttggctgcttcttcctggagaagaatatgtttgttttcttcttgaacatcttgcggcaaaagtcgggccgttacgtgtgcgttcagctgctgcagaccttgaacatcctctttgagaacatcagtcacgagacctcactttgtaaggacattccttggtatttgcctctgtgctgctgtgcatgtagcaggatgaaagcgctgtatggcgtggagtcgatgccacaaaccgccgaaaacgtcgctctaaagttcggtattaaccgtcaggatcaggacgcctttgccctgcgtagccagcagcgcaccgccgccgcgcaagaaagcggctttttcgccgaccagttaattgaggtcagtattgcccagaagaaaggcgatccgctgcggttctgtcaggacgaacacccgcgcgccaccacgctggaagccctggcgaagctgaagccggtggtggatccgcagggcacggtgacggccggtaatgcctccgggttgaacgacggggcctgcgcactgctgctggccagcgaactcggggtgactcgccacgggctgcaaccgatggcacgcattgtcgccagcgccgttaccgggatcgaaccctcaattatgggctttgcaccggcggatgcggtacgcaaggtgttgaagattgccggattgagcctcgaccaaatggacgttatcgagcttaacgaagtgccgtgcagagaactagggtga

SEQ ID NO: 16552 - DNA, 2087 bp, Homo sapiens
  SIMILAR (182)..(3): 731254mologous to multiple sclerosis associated retrovirus protease,accession number AF009666,Smith-Waterman Score=209.
agatctggggaaagggagggcttttctgatctctcccaattagaggattaggcaattggcagtgcagggcggtaactgggggccagggtggcgccagggctggacagcacagtccctctgagctgcacggagacctcgcaggcccccggaactgtcgcccttccaggatgtggctccctgctcttgtcctggccactctcgctgcttccgcggcttgggcagggcatccgtcctcgccacctgtggtggacaccgtgcatggcaaagtgctggggaagttcgtcagcttagaaggatttgcacagcctgtggccattttcctgggaatcccttttggcaagccgcctcttggacccctgaggtttactccaccgcagcctgcagaaccatggagctttgtgaagaatgccacctcgtaccctcctatgtgcacccaagatcccaaggcggggcagttactctcagagctatttacaaaccgaaaggagaacattcctctcaagctttctgaagactgtctttacctcaatatttacactcctgctgacttgaccaagaaaaacaggctgccggtgatggtgtggatccacggaggggggctgatggtgggtgcggcatcaacctatgatgggctggcccttgctgcccatgaaaacgtggtggtggtgaccattcaatatcgcctgggcatctggggattcttcagcacaggggatgaacacagccgggggaactggggtcacctggaccaggtggctgccctgcgctgggtccaggacaacattgccagctttggagggaacccaggctctgtgaccatctttggagagtcagcgggaggagaaagtgtctctgttcttgttttgtctccattggccaagaacctcttccaccgggccatttctgagagtggcgtggccctcacttctgttctggtgaagaaaggtgatgtcaagcccttggctgagcaaattgctatcactgctgggtgcaaaaccaccacctctgctgtcatggttcactgcctgcgacagaagacggaagaggagctcttggagacgacattgaaaattggaaattcttatctctggacttacagggagacttcaaagagagtcaccactatttggccaccgtgattgatggggtggtgctgctgaaaacacctgaagagcttcaagctgaaaggaagttccacactgtcccctacatggtcggaattaacaagcaggagtttggctggatgcttccaatgcagttgatgagctatccactctccgaagggcaactggaccagaagacagccatgtcactcctgtggaagtcctatccccttgtttgccattgctaaggaactgattccagaagccactgagaaatacttaggaggaacagacgacactgtcaaaaagaaagacctgatcctggacttgatagcagatgtgatgtttggtgtcccatctgtgattgtggcccggaaccacagagatgctggagcacccacctacatgtatgagtttcagtaccgtccaagcttctcatcagacatgaaacccaagacggtgataggagaccacggggatgagctcttctccgtctttggggccccatttttaaaagagggtgcctcagaagaggagatcagacttagcaagatggtgatgaaattctgggccaactttgctcgcaatggaaaccccaatgggaaagggctgccccactggccagagtacaaccagaaggaagggtatctgcagattggtgccaacacccaggcggcccagaagctgaaggacaaagaagtagctttctggaccaacctctttgccaagaaggcagtggagaagccaccccagacagaccacatagagctgtgaatgaagatccagccggccttggagctggacgaggagcaaagactggggtcttttgcggaaagggattgcaggttcagaaggcatcttaccatggctggggaattgtctggtggtgggggcaggggagagaggccgagaggccatgaaggaggcaagcttttgtatttgtgacctcagcgtttgggaataaaggatcttttgaaggccaca

SEQ ID NO: 16553 - DNA, 1971 bp, Homo sapiens
  SIMILAR (217)..(435): 981254mologous to Homo sapiens dJ29K1.1,accession number Z98745,Smith-Waterman Score=379.
atgagtgaactcccaatcacaattgctacgaagagaataaaatacctaggaatccaacttacaagggatgtgaaggacctcttcatggagaactacaaaccactgcccagggaaataaaagaggacacaaacaaatggaagaacattccatgctcatggataggaagaataaatatcatgaaaatggccacactgcccaagagctctccaactgtcagcagcacctgtactaaagtgctctatttcactgaccggtcacttacgcccttcatggtcaatataccaaagagggcaccgcaaacggcactcagcctccagagaaccgccatctcgttcctgagggctcaaggtcatccaccaacccggaaccacttaggcgacaattcccacccacgacgacgaaagaaaacagggaagaggaaatgctgggtgaaccggaagtcgagaggcggtgcacacccgtcgcgcatgcgcaaacacagctgtcggaaggtggcgagcctgaggcgaacaatggcggagctgggcgaagccgatgaagcggagttgcagcgcctggtggccgccgagcagcagaaggcgcagtttactgcacaggatgccttgcagcagagattgactcagcaggacacatctgttcttcagctcaaacaagagctactgagggcaaatatggacaaagatgagctgcacaaccagaatgtggatctgcagaggaagctagatgagaggaaccggctcttgggagaatataaaaaagagctggggcagaaggatcgccttcttcagcagcaccaggccaagttagaagaagcactccggaaactctctgatgtcagttaccaccagaattttctgccccaccccaccaccaacccggaaccttccaggcttcttcccaaagcatttctgagaggagaactcactcttggacagatacgaagcagtactatgagcaatccagatcactttcctcaactgttactgccaaaagaccaagtttcaggcaaagcagtgtgtctgatagaagagatttccagtactgaaatccaggtggagatgaagatgccagcctatgaactaaaaattgtgcatgatcacagcccctctggaacactcctgccccgtagtgcccctcgtccccgctccgtagagaaagagcgtgcgtgccgcgcatttctggcctggggagcgggtggagtaaacctgcgggaaccattttacgacaacgtgcggctgtgcggtgtggctgacggcaacgccgctgctcttggagaggttccattgccttctctttcccccacaatgcaggcaggcaccatagcccgttgggaaaaaaaagagggggacaaaatcaatgaaggtgacctaattgcagagagggggatttggcagggtcataggacaatagtggagggaaggcctgaggatattgaggcctttaaaaattatacactggattcctcagcagcacctaccccacaagcggccccagcaccaacccctgctgccactgcttcgccacctacaccttctgctcaggctcctggtagctcatatccccctcacatgcaggtacttcttcctgccctctctcccaccatgaccatgggcacagttcagagatgggaaaaaaaagtgggtgagaagctaagtgaaggagacttactggcagagatagaaactgacaaagccactataggttttgaagtacaggaagaaggttatctggcaaaaatcctggtccctgaaggcacaagagatgtccctctaggaaccccactctgtatcattgtagaaaaagaggcagatatatcagcatttgctgactataggccaaccgaagtaacagatttaaaaccacaagtgccaccacctaccccacccccgattttccatgatgatgatgccatccctggatgggaagggaaaattgtagcttgggtggaagaagaccatggagagaattaa

SEQ ID NO: 16554 - DNA, 463 bp, Homo sapiens
  SIMILAR (138)..(350): 1001254mologous to Homo sapiens Human secreted protein, SEQ ID NO: 7170,accession number G03089,Smith-Waterman Score=379.
gacagcgcacgttatgttggatcctccagagcggtcgccgggctggagaccccgcccggggagcccccagcaggaacaatgctagcctgcctgacccgagggaacttactggacgtcctgcaggagggcttcaatgagcaacagctgcaggcctatgtggcctgggtgaatgcacagctgaagaagaggccagcagtgaagcctgtgcaggacctgcgacaagatctccgggatggggtgatcctggcatatctcatcgagattgttgcaggagaaaagctgagtggggtacagctgaatcccggttacccaacaggagatgaagaataatgtgggagaaagtgctacagttttgtgggtctcctaaaaagttcgtatgcaccagactttcggctaaagatattttgggattggaaacctgaagtctatcataaagctgatccttaccttagcagctcatttc

SEQ ID NO: 16555 - DNA, 1026 bp, Homo sapiens
  SIMILAR (303)..(70): 361254mologous to Drosophila melanogaster CG1553 gene product,accession number AE003839,Smith-Waterman Score=110.
tttttttttttagccaaaatgaaggtcctttaattcacatgactttagcactgaaaacccaaaacatatgatgctcttctttcacaccaaaggcattgtgatgattagcgtggatttttctttgataaattttgctggggtcatttcagtatcaataagttttggaagattcagatgtaatctgtacttctcagatacttcaatcaataaatcatcctcagaaacactaaggtcacagagagagacagaattaataccaggtaattcaactttcaactcaattttcagaggtttctcactgtgatcatgcacaatttttaagttcataggctggcatcttcatctccacctggatttcagtactggaaatctcttctatcagacacactgctttgcctgaaacttgggtcttttggcagtaacagttgaggaaagtgatctgggattgctcatagtactgcttcgtatctgtccaagagttagttcccttctcattttttctcttaaatctatggaatcagtttggattcccatcagattttgtttcattctttgaatgcttccttttattctaaatttggtaatatggtaagagtgtgagagggtgaactggaatttctcctcaatgcatttcatggccatctgaattaactgattttttttcacttggtccttttctgctgcatgaagaacatcaggattgtaggcaacatcaatgactgtgtaagcatctgatatctcagttgtatcttctggtttgccaacagttagaggtactggatgagtggttgattggggagctgggatccttgttccactgacacagggttgataaaaagtattttttctttgggtttcaaaatcctggtctgtagacaaagctgtggttctggggcagcacagagctgtttcccttctttcagctgctgctgaataaacttctcatagccctcagggtcactctgagctagatcatctaggaggttccaaaactgagtaacttgggtaagcagaccttttgaggat

SEQ ID NO: 16556 - DNA, 1545 bp, Homo sapiens
  SIMILAR (5)..(1057): 361254mologous to Caenorhabditis elegans proline and glycine- rich,accession number U41557,Smith-Waterman Score=287.
atggcagaaggcaaggaggagcaagtcacattttacatggatggcagcagacaaaaagagagacagagtttgtgcagggaaactctgcctcataagccatcagatatcgtgaggcattgtgccaaggtcagtgcttacaggcacataaataacggacacaaagtgattgctgctacaagagagaaacgtttaaaaaaaaaagctatttatgcagagaaggagcaacaggatggaaggctggaggaatcaggaaaaggtcaacagggaaggagacatctggctggttctttacggatgtctgccaattgcagagaggacaagggcagagatgcttacacagtcattgatgttgcctacaatcctgatgttcttcatgcagcagaaaaggaccaagtgaaaaaaaatcagttaattcagatggccatgaaatgcattgaggagaaattccagttcaccctctcacactcttaccatattaccaaatttagaataaaaggaagcattcaaagaatgaaacaaaatctgatgggaatccaaactgattccatagatttaagagaaaaaatgagaagggaactaacatcattggaccagatacgaagcagtactatgagcaatccagatcactttcctcaactgttactgccaaaagaccaagtttcaggcaaagcagtgtgtctgatagaagagatttccagtactgaaatccaggtggagatgaagatgccagcctatgaactaaaaattgtgcatgatcacagtgagaaacctctgaaaattgagttgaaagttgaattacctggtattaattctgtctctctctgtgaccttagtgtttctgagcaacagctgcaggcctatgtggcctgggtgaatgcacagctgaagaagaggccagcagtgaagcctgtgcaggacctgcgacaagatctccgggatggggtgatcctggcatatctcatcgagattgttggcccctctggaacactcctgccccgtagtgcccctcgtccccgctccgtagagaaagagcgtgcgtgccgcgcatttctggcctggggagcgggtggagtaaacctgcgggaaccattttacgacaacgtgcggctgtgcggtgtggctgacggcaacgccgctgctcttggagagaatgaggtaatgcattctgaagcaacccagatgtcaccatctgatctaactatatttggtttgcagaaggaactgctgaaatgtaaacaagaagccagaaacttacaggggataaagatcaccacatgtcaaaagaacaccaactggggactttcattcaacagacagcacttgacacctatgatacagcttggatgtctgtcccctccaaatctcatgctgaaatatgatccccctgacttccgtttccgggtcagagccatggtggtggcaacttcaagccctgctaaccccatggtgttctttgatgtcagcaatggcagtcaggaagttggccgcacaaagatcgagctctctgcagacgttgtgcctaagacgaccgagaactttgggtag

SEQ ID NO: 16557 - DNA, 453 bp, Homo sapiens
  SIMILAR (37)..(450): 941254mologous to Homo sapiens Human calcium-binding phosphoprotein, CBPP-1, protein sequence,accession number Y22203,Smith-Waterman Score=664.
ttcgaagcaactggtggcaaaaggttagcatttatgatggcagggacagcgcgccattaccgagagatggcgatccaggccaagaaaaaggtgaccacggccaccgaccccattgaaagactccgactgcagtgcctggccaggggctctgctgggatcaaaggacttggcagagtgtttaaaattatggatgacgataataatcgaacccttgattttaaagaatttatgaaagggttaaatgattatgctgtggtcatggaaaaagaagaggtggaagaacttttccagaggcttgataaacatggaaatggaacaatagacttcaatgaatttcttctcacattaagacctccaatgtccagagccagaaaagaggtaatcatgcaagctcttagaaagttagacaagactggagatggtgttataacaatcgaagaccttcgtgaagat

SEQ ID NO: 16558 - DNA, 487 bp, Homo sapiens
  SIMILAR (747)..(1514): 321254mologous to Araneus diadematus fibroin-4,accession number U47856,Smith-Waterman Score=199.
aacggagtggcggcggcatttcctggtgtctgagcctggcgcggaggctatgggcagccaggaggtgctgggccacgcggcccggctggcctcctccggtctcctcctgcaggtgttgtttcggttgatcacctttgtcttgaatgcatttattcttcgcttcctgtcaaaggaaatcgttggcgtagtaaatgtaagactaacgctgctttactcaaccaccctcttcctggccagagaggccttccgcagagcatgtctcagtgggggcacccagcgagactggagccagaccctcaacctgctgtggctaacagtccccctgggtgtgttttggtccttattcctgggctggatctggttgcagctgcttgaagtgcctgatcctaatgttgtccctcactatgcaactggagtggtgctgtttggtctctcggcagtggtggagcttctaggagagcccttttgggtcttggcacaagcacat

SEQ ID NO: 16559 - DNA, 1950 bp, Homo sapiens
  SIMILAR (1336)..(1881): 521254mologous to Homo sapiens NAG13,accession number AF194537,Smith-Waterman Score=405.
atggaggatgctgaggggactgtgactttgctggcagtgacattagtggcaagagacttgaactgtatacagcctcagacaggtccttcaggaggtattccagaagaaagcattgttatcataggagatgtcagctccatgcatgttattgcccctgaagaccttccagtgggacaagatgtggaggtggaagacagtgatattgatgatcctgaccctgtaagagctttgcccttacaaatccacgcatgtggtcgggtaggttttgaagcccatgatgactggtctgaaggaggagatcctgctgctgataccttaatagacccctctcaagatgcaaggtatttaaaatgtgaggggatgcaggcaccccacaattccaacccagttgcccagaaaacagaaattagctatcacatatggattgccaggattcccagggaaaagtctggaaaggtcacggggacactctgtgacctactcaaggacctcactgtcattcattcccttatccccaagcagggctgcagtgatgggctgggagttcttgtccagggcacattccagccgcagggcaatactgacacttgcacctgccaagtttcagcagtggaaggaaaaggagagggcctgatgcaattggccagtctgtcccggagagtgactatctgggcttatggcgactctcaagagagagatctcaagacccaattagaaaagatcacagcaatcaaagacatgaaggaaatgcaggagaaggaatatagaataatggagaaagcccattccaggcagaggaaacagcaccataaaggccctgagaggaaggagcaggcagcaatctttgctgttctgcaacctccactggtgataaccaggcaaacagggtctggagtggacccccagaaaactccagcagacctgcaaaagaggtgccggacagttagaagaaaaactagccaacagaaagcagtagcatcaacattaacaaaaaggataaccacacaaaaactcaatgcaaaggatcacaactcctcaccaacaagggaacaaaactgtacagagaatgagtttgatgaattgacagaagtaggtttcagaaggtgggtaataacaaactcctctgagctaaaggagcatgttctaacccaatgcaaggaagctaagaactttgataaaaggttagaggaattgctaattcaaataaccagtttagagaagaacataagtgacctgatggagctgaaaaacacagcacgagaacgttggaagcatacacaagtatcaatagccaaatcgatcaagcagaaatggaccgctagccagactaataaagaagaaaagagagaagaatcaaatagcacaataaaaaatgataaaggggatatcacaactgatcccacagaaatacaaactaccatcagagaatactataaacatctctatgcaaataaactagaaaatttagaagaaatggacaaattcctggacacatacaccctcccaagactaaaccaggaagaagtcgaacccctgaatagaccaataacaagttctgaaattgaggcagtaattaatagcctaccaaaccaaaaaagtccaggacagacgaattcacagctgacttctaccagagatgcagaaaaggccttcaataaaattcaacaccccttcatgctaaaaacactcaataaactagatattgatggaacatatctcaaaataacaagagctatttatgacaaacccacagccaatgtcatactgaatgggcaaaagctggaagcattccctttgaaaaccggcacaagacaaggatgccctctctcaccactcctattcaatatagtattggaaattctggccagggaaatcaggaattctggaaattacatttggttgaacgagaatggtaaaaaaatagaagaaccatggtctgtctactgctga

SEQ ID NO: 16560 - DNA, 910 bp, Homo sapiens
  SIMILAR (283)..(561): 1001254mologous to Homo sapiens Human transmembrane protein HTMPN-23,accession number Y57899,Smith-Waterman Score=449.
atggacaacttcttcgcccccgttttcaccatgggcaaatattatacgcaaggcgacaaggtgctgatgccgctggcgattcaggttcatcatgccgtttgtgatggcttccatgtcggcagaatgcttaatgaattacaacagtactgcgatgagtggcagggcggggctttccccaactgcaaaagtagcacccgacaacatgcactgaccccccagggctgctgggcgtgcttggctgatggttcactctcagaagtatctgtccctacccacctcgtaggtgtgtatgatatagtgaataatcttggctcccttgtggccagattaattttccagccaatagaggaaagtttttatatattttttgctaaggtgctggagaggggaaaggatgccacacttcagaagcaggaggacgttgctgtggctgctgcagtcttggagtccctgctcaagctggccctgctggccggcctgaccatcactgtttttggctttgcctattctcagctggctctggatatctacggagggaccatgcttagctcaggatccggcaaggactccgcgggctggtgtgccgggggtccggcgccgcgggccacccacgcccccagccagcaactcggcgcggacggccccgaggccgtggcgcaggacacgcggcggcgcctcgggcccccgacggcgctgtggccccgagcggaacggcccggaagaggagacgcgtccccgggaacccagtgctccgccctggcccagccccgatccagcctgcgcctccacctcgggttgtagacagagcggcggggatcccagaggggttcgcgggtcggacctggagtaccggcccggcgaagcgcgcggctgtcgcccgcacgtgactggctcggacaagatggcatga

SEQ ID NO: 16561 - DNA, 969 bp, Homo sapiens
  SIMILAR (205)..(819): 971254mologous to Homo sapiens Human transmembrane protein HTMPN-23,accession number Y57899,Smith-Waterman Score=1044.
atgcatgttattgctcccgaagatcttccagtgggacaggatgtggaggtggaagacaacgatattgatgatcctggtcaggccaagaaaaccatggaggagcagtggaccttggtgtccctgctgagcacaagccagcaacaaggacctgtccccccaggctccacggcatcctcagccacagacaagctcagccgctgggaactaacgctgctttactcaaccaccctcttcctggccagagaggccttccgcagagcatgtctcagtgggggcacccagcgagactggagccagaccctcaacctgctgtggctaacagtccccctgggtgtgttttggtccttattcctgggctggatctggttgcagctgcttgaagtgcctgatcctaatgttgtccctcactatgcaactggagtggtgctgtttggtctctcggcagtggtggagcttctaggagagcccttttgggtcttggcacaagcacatatgtttgtgaagctcaaggtgattgcagagagcctgtcggtaattcttaagagcgttctgacagcttttctcgtgctgtggttgcctcactggggattgtacattttctctttggcccagcttttctataccacagttctggggctctgctatgttatttatttcacaaagttactgggttccccagaatcaaccaagcttcaaactcttcctgtctccagaataacagatctgttacccaatattacaagaaatggggcgtttataaactgggaagaggctaaactggcttggggttttttcaaacagtttttcttgaaacagatttttgacagaaggcgggcgatatgttggaggacattttttgaatgtattgaactttggtgatcagggtgtgtatgatataatgaataatcttggctcccttgtggccagattaattttccagccaatagaggaaagttttatatattcttg

SEQ ID NO: 16562 - DNA, 1665 bp, Homo sapiens
  SIMILAR (6249)..(7895): 971254mologous to Homo sapiens putative p150,accession number U93563,Smith-Waterman Score=2856.
atggcacggacgcagggcgcatgcgcccgcgcccccccacccccagctccgcggtcctccaggcagcctgcgcccctcgcgccgcgcccgtggagctcccgggcccggctgccccgctcccgccccagcgccatccctcctggctggggccgcgcgggaggcaaggactccgcgggctggtgtgccgggggtccggcgccgcgggccacccacgcccccagccagcaactcggcgcggacggccccgaggccgtggcgcaggacacgcggcggcgcctcgggcccccgacggcgctgtggccccgagcggaacggcccggaagaggagacgcgtccccgggaacccagtgcccgccctggcccagccccgatccagcctgcgcctcacctcgggttgtagacagagcggggggggatccccagagggggtcgcggggccggacctgggattccggccccgcgaaacgcgcccgctgtcgcccgcacgtgactggctcggacaactcagcgagggggcacaggacagctgcgaattgggacgaacgagcccagagccccgggaaggatcagaacctcgaaggcggcttcaagtcggccccgcagcccgaggtgaccgtgggcggttacgttgcccgagctcgcccccttcttctgagcgcaggggtgttcccgcgccaccgagaccccgggagctcccgatcagactcccagcccgtgaaaggcgttatcggacagggcccagaggcgcccccacagcaagaagaaagtctggggttctccccgtgtgccagtttccccaactgcaaaagtagcacccgacaacatgcactgaccccccagggctgctgggcgtgcttggctgatggttcactctcagaagtatctgtccctacccacctcgtaggtgcggtcagcctctgccgtcagactgcgcaccagcatctgtgggtgaggagagaacctgggctggggcttgacacaaaaggggctttgcctctggacacccccacctgtgccgcaagtggagggggcggggaaacggggaggagggaaagcgagcgatatgtgatgacatttttgaatgtattgaactttggtgatcagggtgtgtatgatatagtgaataatcttggctcccttgtggccagattaattttccagccaatagaggaaagtttttatatattttttgctaaggtgctggagaggggaaaggatgccacacttcagaagcaggaggacgttgctgtggctgctgcagtcttggagtccctgctcaagctggccctgctggccggcctgaccatcactgtttttggctttgcctattctcagctggctctggatatctacggagggaccatgcttagctcaggatccggtcctgttttgctgcgttcctactgtctctatgttctcctgcttgccatcaatggagtgacagagtgtttcacatttgctgccatgagcaaagaggaggtcgacaggtacaattttgtgatgctggccctgtcctcctcattcctggggttatcctatctcttgacccgttggtgtggcagcgtgggcttcatcttggccaactggtttaacatgggcattcggatcacgcagagcctttgcttcatccaccgctactaccgaaggagcccccacaggcccctg

SEQ ID NO: 16563 - DNA, 1521 bp, Homo sapiens
  SIMILAR (815)..(495): 331254mologous to Mycobacterium tuberculosis PE_PGRS,accession number AL022075,Smith-Waterman Score=107.
atggatgtcagctctcccccgtgtgtggatggtgttagcatcttgcctccgctgctgatacccaggcaaacagggtctggagtggacctccagcaaaatccaacagacctgcagctgagggtcctgactgttaaaaggaaaactaacaaacagaaaggacatccacaccaaaactccatctgtacgtcaccatcatcaaagaccaaagaatatacattcttctcagtacaacaccacacctattccaaaattgaccacatagttggaagtaaagcagtcctcagcaaacgtaaaacaatagaaattataacaaactgtctcccagaccacagtgcaatcaaactagaactcaggattaagaaactcactcaaaaccacaaaactacatggaaacagaacaacctgctcctgaatgactactgggtacataacaaaatgaaggcagaaataaagatgttctttgaaaccaacaagaacaaagacacaacatacaagaatctctgggacacagttaaggcggtgtgtagagggaaatttatagcattaaatgcccacaagagaaagcaggaaagatccaaaattgacaccctaacatcacaattaaaagaactagagaagcaagagcaaacacattcaaaagctagcagaaggcaagaaataactaagatcagagcagaattgaaggagatagagacacaaaaaaccgttcaaaaaatccatgaatccaggagctggttttttgaaaagatcaacaaaattgatagaccactagcaggactaataaagaagaaaagagagaagagtcaaaaagatgcaataaaaaatgataagttggatatcaccaccgatcccacagaaacacaaactaccatcagagactaccataaacacctctacgcaattaaactagaaaatctagaagaaatggataaattcctcgacacatacactctcccaagactaaaccaggaatctctgaatagaccaataacaggctctgaaattgaggcaataattaatagcttaccaaccaaaaaaaagtacaggaccagacggattcacagccgaattctatcagaggtacaaggaggagctgtgttggaagttctggccagggcaatcaggcaggagaaagaaataaagtgtattcaattaggaaaagaggaagtcaaattgtccctgtttgcagacgacatgattgtatatctagaaaaccccactgtttcagcccaaaatctccttaagctgataagcaacttcagcaaagtctcacgatacaaaatcaatgtgcaaaaatcacaagcattcttatacactaataacagacaaacagagagccaaatcatgagtgaactcccattcacaattgcttcaaagagaataaaatacctaggaatccaacttacaagggatgtgaaggatctcttcaaggagaactacaaaccactgctcaacgaaataaaagaggacacaaatggaagagcattccatgcccacggattggaagaatcaatatcatga

SEQ ID NO: 16564 - DNA, 2317 bp, Homo sapiens; identical to SEQ ID NO: 6258
  SIMILAR (183)..(365): 721254mologous to Homo sapiens bK414D7.1 (isoform 1),accession number AL033543,Smith-Waterman Score=189.

SEQ ID NO: 16565 - DNA, 915 bp, Homo sapiens
atgaaagtccagaagcttctggcagccaccttttccatcacagtacagccagccttggggggcagactgacacctcacacggccgggtactcctctgagacaaaacttccagaggaacgatcaggcagcagcatttgctgttcaccaatattcgctgttctgcagcctcaactgctgatatccaggcaaacagggtctggagtggacctctggcaaactccaacagacctgcagctgagggtcctgtctgttagaaggaaaactaacaaacagaaaggacatccaccccaaaaacccatctgtacgtcaccatcatcgaagaacaaagttgcaaagctaacagctccttatgagaactcaaaaggcactccttatgttcccagcaataaagatctaaggcccaacagatttgtgagtatccaagagatcgaattctttcttctgaggggggcaagaattgaggttgttgcagacccgtatagaagtgaatttgccactgatgcagaaaaagcagttgacaaaatccaccatctctttatgattaaaaccctcagcaaaatggacattaaagggacgtaccttaaggtaataaaaatcatctatgacaaacccacagccaacatcatactgaatggggaaaagtttaaagcattccctcagagaactggagcaaaacaaggatgcccactttcacgacttctcaacatagtgctggaagtcctagccacagcagtcagacaagtgaaagaaataaaaggcaccgaaattgctaaagaggaagccaaactgttgctgtttgctgataacatgattgtatatctagaaaatcctaaagactcatctaaaaacttcctagaactggtaaatgaattcagcaaagttttaggatacaaaattaaaatacacagtcagtag

SEQ ID NO: 16566 - DNA, 915 bp, Homo sapiens; identical to SEQ ID NO: 7501
  SIMILAR (424)..(849): 731254mologous to Homo sapiens p40,accession number U93564,Smith-Waterman Score=538.

SEQ ID NO: 16567 - DNA, 619 bp, Homo sapiens
  SIMILAR (32)..(952): 731254mologous to Homo sapiens ATP synthase gamma- subunit,accession number D16562,Smith-Waterman Score=1055.
atgtggaagcctggaagaaataatttttgcacagagatcaagaagaaactctcaaaacgaacaaaggaacactcccccaagtctccatccaggggcagactgacacctcacacggccaggtactcctctgacacaaaacttccagaggaacgatcaggcagcaacatttgctgttcaccaatatccactgttctgcagcctctgctgctggatagccaggcaaatagggtctggagtggacctccagcaaactccaacagacctgcagctgagggtcctgactgttagaaggaaaactaacaaacagaaaggacatccacaccaaaaccccatctgtacgtcaccatcatcaaagaccaaagaacaaagctggatggagaatgactttgacgacttgagagaagaagacttcagacaatcaaactactccaagctacaggaggaagttcgaaaccacggcaaagaagttaaaaaccttgaaaaaagattagacaaatggctaactagaataaccaatgcagagaagtccttaaaggacctgatggagctgaaaaccatggcacgagaactacgtgacgaatgcagaagcctcagtagccgatttgatcaactggaataa

SEQ ID NO: 16568 - DNA, 1815 bp, Homo sapiens
  SIMILAR (1361)..(1789): 851254mologous to Homo sapiens ATP synthase gamma- subunit,accession number D16562,Smith-Waterman Score=597.
aagtgataacagaattcattgaagtgtagaatgtttaaagaatgtcacatatagagaaagagaatgccgaaaccaatcattggaagagatactacaagggatgctgagctggaatttgacattcagcccaatacaactggcaaacaactttttgaccaggcggagaaaacagttggcttgcgtgaggtttggttttttgggctgctgtatgaacacaggaaaggatattctacatggcttaagctaaatataatgggaccacagcatgatgttagaaaagagaatcctttacagctcaagcttagagctaaagtctttcctgaagatgtttctgaggaaataatttaagagataacgcagagactcttcttcttgcatgataaagaagccatcttaaatgatgagatatattgcccgccagaaactgcagttcttttggcttcctatgctgtccaagccaagtatggagattacaataaagagattcataagccaggctacctggctaatgatagactcctaccccagcgtgtattggaacaacacaaactaacaaaagaacagtgggaagaaagaatacagaactggcatgaagaacatagaggaatgttaagggaggattctatgatggaatacctgaagattgcacaagatctagaaatgtatggagtcaactattttgaaataaaaaataaaaaaggaactgaattgtggctaggtgttgatgctttgggtctgaatatttatgagcatgacgacaagttaacacctaaaattggttttccctggagtgaaatcagaaatatttcatttaatgacaaaaaatttgttataaagccaatcgacaaaaaggcacctgattttgtgttttatgcacctcgtctgagaatcaataagcggattttggccttatgtatgggaaaccatgaactatacatgcgaagaaggaagcctgatactattgaagtacaacagatgaaggctcaggctagggaggagaaacatcagaagcagttggaaagggcacaattagagaatgaaaagaagaaaagagaaatagcagaaaaggaaaaggaaagaatagaacgtgaaaaggaagagctaatggaacgtctaaaacaaattgaagagcagacaattaaagctcagaaagaactagaagaacagactcgaaaagctctagaactggatcaagaacgaaaacgagcaaaagaagaagcagaacgacttgaaaaggagcgtcgagctgctgaagaggcaaagtctgccatagcaaaacaagctgccgaccagatgaagaatcaggagcagctagcagcagaacttgctgaattcactgccaagattgcacttctagaggaagccaagaagaaaaaggaagaggaagcaactgagtggcaacacaaagcttttgcagcccaggaagacttggaaaagaccaaagaagagttaaaaactgtgatgtctgccccccctccacctccaccaccaccagtcattcctccaacagaaaacgaacatgatgaacacgatgagaataatgctgaagctagtgctgaattatcaaatgaaggggtaatgaaccatagaagcgaggaagaacgtgtaaccgaaacacagaaaaatgagcgtgttaagaagcaacttcaggcattaagttcagaattagcccaagccagagatgaaaccaagaaaacacaaaatgatgttcttcatgctgagaatgttaaagcaggccgtgataagtacaagactctgcgacagattcgacaaggcaatacaaagcagcgtatcgatgagtttgaagcaatgtga

SEQ ID NO: 16569 - DNA, 542 bp, Homo sapiens
  SIMILAR (745)..(930): 1001254mologous to Homo sapiens leptin receptor gene-related protein,accession number Y12670,Smith-Waterman Score=320.
atgaaattgaaaacctatattaaagggcataagatcaacgtaagagtaactacaatggatgctgagctggaatttgccattcagcccaatacaactggcaaacaactttttgaccagggatatatcggagaatggcaggtggggacccaaactgtatgcattgttccagatgcgctcttgccaaagcagcataaagcaaatgtaacccttaggaagaaggctccctccctcactaggtaagtacaactggcagcctgtgccagggccagctcacctgcccactagacctgccacaccttccactgccaggatgctggtgggacctcataaaatctgaacctgttcatccacaggacctgtggatttcaagtcaaaggaactgaccaagagcaacctctatctttacagcctctgattccatcccttccaggttctttcccaatagtttgcatctcttgggctctttgccaatcaagaacatcatcctccaatttaataattttgaggtgagctagaatttattaaaatgatgttttacctgt

SEQ ID NO: 16570 - DNA, 242 bp, Homo sapiens
  SIMILAR (261)..(467): 501254mologous to Homo sapiens MY047 protein,accession number BC000642,Smith-Waterman Score=148.
tttcgtgaggatgggaagaccgcctgtggccatgagccctccccggtgctcctggggctaaggctggggctgcagccatggggctgggtcagccccagacctggttgctgggtctgcccacagctgtggtctatggctccctggctctcttcaccaccatcctgcacaatgtcttcctgctctactatgtggacacctttgtctcagtgtacaagatcaacaaaatggccttctgggtcgga

SEQ ID NO: 16571 - DNA, 595 bp, Homo sapiens
  SIMILAR (157)..(432): 961254mologous to Homo sapiens kappa B and V(D)J recombination signal sequences binding protein,accession number AF278765,Smith-Waterman Score=456.
  misc_feature (1)...(595): n = a,t,c or g
tgcgcggccttcgtgatcgctgcccggccctggaggagctggatctcaccgcctgncgccagctcaaggacgaggccatcgtgtaccctggcaagaggccggcgctggtttccgcagcctctctctggccgtcaacgccaacgtgggggacgccgcggttcaagagttggctcggaactgcccagaactccaccaccttgacctcaccggctgcctccgcgtcggaagcgacggtgtcaggacattggccgagtactgccccgtgctgcgttcgctgcgggtgccggcatctgccaccatgtggcggagtccagcctgagccgcttgcggaagcgcggcgtggacatcgacgtggagccgccgctcaccaggccctggtgctgctgcaggatatggcggcgttcgcaccttttgtcaacctgcaggtctgacccgcctgccaatcggagcacagctggactgtgtggctggggcctgacactgagctgtagggaaactgaactgtgaggacctctggtgagaggccagtgccctgccccaccctggagcttcaaataaagagctttttaccccctcgaaaaaaaaaaaaaaaaaa

SEQ ID NO: 16572 - DNA, 3113 bp, Homo sapiens
  SIMILAR (844)..(1200): 951254mologous to Homo sapiens kappa B and V(D)J recombination signal sequences binding protein,accession number AF278765,Smith-Waterman Score=597.
cacggtgagtggctggattcagacccctgggtggccgggacaagagaaaagagggaggagggcctttagcggacagcgcctggggctggagagcagcagctgcacacagccggaaagggcgcgcaggcgacgacactcggatccacgtcgacaccgttgtacaaagatacgcggacccgcgggcgtctaaaattctgggaagcagaacctggccggagccactagacagagccgggcctagcccagagacatggagagttgctacaacccaggtctggatggtattattgaatatgatgatttcaaattgaactcctccattgtggaacccaaggagccagccccagaaacagctgatggcccctacctggtgatcgtggaacagcctaagcagagaggcttccgatttcgatatggctgtgaaggcccctcccatggaggactgcccggtgcctccagtgagaagggccgaaagacctatcccactgtcaagatctgtaactacgagggaccagccaagatcgaggtggacctggtaacacacagtgacccacctcgtgctcatgcccacagtctggtgggcaagcaatgctcggagctggggatctgcgccgtttctgtggggcccaaggacatgactgcccaatttaacaacctgggtgtcctgcatgtgactaaggagaacatgatggggactatgatacaaaaacttcagaggcagcggctccgctctaggccccagggccttacggaggccgagcagcgggagctggagcaagaggccaaagaactgaagaaggtgatggatctgagtatagtgcggctgcgcttctctgccttccttagagccagtgatggctccttctccctgcccctgaagccagtcatctcccagcccatccatgacagcaaatctccgggggcatcaaacctgaagatttctcgaatggacaagacagcaggctctgtgcggggtggagatgaagtttatctgctttgtgacaaggtgcagaaagatgacattgaggttcggttctatgaggatgatgagaatggatggcaggcctttggggacttctctcccacagatgtgcataaacagtatgccattgtgttccggacacccccctatcacaagatgaagattgagcggcctgtaacagtgtttctgcaactgaaacgcaagcgaggaggggacgtgtctgattccaaacagttcacctattaccctctggtggaagacaaggaagaggtgcagcggaagcggaggaaggccttgcccaccttctcccagcccttcgggggtggctcccacatgggtggaggctctgggggtgcagccgggggctacggaggagctggaggaggtggcagcctcggtttcttcccctcctccctggcctacagcccctaccagtccggcgcgggccccatgggctgctacccgggaggcgggggcggggcgcagatggccgccacggtgcccagcagggactccggggaggaagccgcggagccgagcgccccctccaggaccccccagtgcgacgcgcaggccccggagatgctgcagcgagctcgagagtacaacgcgcgcctgttcggcctggcgcagcgcagcgcccgagccctactcgactacggcgtcaccgcggaccggcgcgcgctgctggcgggacagcgccacctgctgacggcgcaggacgagaacggagacacaccactgcacctagccatcatccacgggcagaccagtgtcattgagcagatagtctatgtcatccaccacgcccaggacctcggcgttgtcaacctcaccaaccacctgcaccagacgcccctgcacctggcggtgatcacggggcagacgagtgtggtgagctttctgctgcgggtaggtgcagacccagctctgctggatcggcatggagactcagccatgcatctggcgctgcgggcaggcgctggtgctcctgagctgctgcgtgcactgcttcagagtggagctcctgctgtgccccagctgttgcatatgcctgactttgagggactgtatccagtacacctggcggtccgagcccgaagccctgagtgcctggatctgctggtggacagtggggctgaagtggaggccacagagcggcaggggggacgaacagccttgcatctagccacagagatggaggagctggggttggtcacccatctggtcaccaagctccgggccaacgtgaacgctcgcacctttgcgggaaacacacccctgcacctggcagctggactggggtacccgaccctcacccgcctccttctgaaggctggtgctgacatccatgctgaaaacgaggagcccctgtgcccactgccttcaccccctacctctgatagcgactcggactctgaagggcctgagaaggacacccgaagcagcttccggggccacacgcctcttgacctcacttgcagcaccaaggtgaagaccttgctgctaaatgctgctcagaacaccatggagccacccctgaccccgcccagcccagcagggccgggactgtcacttggtgatacagctctgcagaacctggagcagctgctagacgggccagaagcccagggcagctgggcagagctggcagagcgtctggggctgcgcagcctggtagacacgtaccgacagacaacctcacccagtggcagcctcctgcgcagctacgagctggctggcggggacctggcaggtctactggaggccctgtctgacatgggcctagaggagggagtgaggctgctgaggggtccagaaacccgagacaagctgcccagcacaacagaggtgaaggaagacagtgcgtacgggagccagtcagtggagcagaaggcagagaagctgggcccaccccctgagccaccaggagggctctgccacgggcacccccagcctcaggtgcactgacctgctgcctgcccccagcccccttcccggaccccctgtacagcgtccccacctatttcaaatcttatttaacaccccacacccacccctcagttgggacaaataaaggattctcatgggaaggggaggacccctccttcccaacttaaaaaaaaaaaaa

SEQ ID NO: 16573 - DNA, 2711 bp, Homo sapiens
  SIMILAR (125)..(2173): 771254mologous to Homo sapiens ZNF91L,accession number AC003973,Smith-Waterman Score=2895.
  misc_feature (1)...(2711): n = a,t,c or g
gcggcccccatcttctgacttttcctcgtgtgacccatcttttcaaattcccttacctgaggaaggagcccgattacaaggatatttacctgctcccacccggatctagaagaggaagctaaggcctgggttgggtaactgcctgacgttttactgctctctgtttcctcgagtcactcccagattagtggtgtctagctcagcactgtttctgttatacttcattcataattcccagcgctgttggacgaggatgggaagaccgcctgtggccatgagccctccccggtgctcctggggctaaggctggggctgcagccatggggctgggtcagccccaggcctgggttnctgggtctgcccacagnctgtggtctatggctccctggctctcttcaccaccatcctgcacaatgtcttcctggctctactatgtgggacacctttgtctcagtgttacaagattcatcaaaatggccttctgggtcggagagacagtgtttctcctctggaacagcctcaatgaccccctcttcggttggctcagtgaccggcagttcctcagctcccagccccggtcaggcgccgggctctcctcaagggctgtggtgctggcccgggtgcaggccctgggctggcatgggccgctgctggcgctgtcgttcctggcgttctgggtgccctgggccccagctggcctgcagttcttgctgtgcctgtgcctctatgatggcttcctgacgctcgtggacctgcaccaccatgccttgctggccgacctggccctctcagcccacgaccgaacccacctcaacttcgtactgctccctcttcagcgcggccggctccctctctgtctttgcatcctatgccttttggaacaaggaggatttctcctccttccgcgctttctgcgtgacactggctgtcagctctgggctgggctttctgggggccacacagctgctgaggcggcgggttgaggcggtccgaaaggacccagggtgctcaggcctggatgtggatagcggcctgtgtggagaggagctgcttgtgggccgcgaggacggcggacagcatcaccttgggccggcatctccggcagctggcacgccatcgaaacttcctgtggttcgtgagcatggacctggtgcaggtcttccactgccacttcaacagcaacttcttccctctcttcctggagcatctgttgtccgaccatatctccctttccacgggctccatcctgttgggcctctcctatgtcgctccccatctcaacaacctctacttcctgtccctgtgccggcgctggggcgtctacgcggtggtgcgggggctcttcctgctcaagctgggacttagcctgctcatgttgttggccggcccggaccacctcagcctgctgtgcctcttcattgccagcaaccgcgtcttcactgagggcacctgtaagctgctgaccttggtggtcactgacctggtagaccaggacctggtgctgaaccaccgcaagcaggcagcctcggcactcctctttggcatggatgccttggtgaccaagccaggccacacctttgccccgctgctgggcacctggctgctctgtttctacacaggaggctgccacatgacctgttacatgccacacgcgctcccgcccccacgagcacgcggccgcgccaagcacacggccaaggaggcgggtttggtgcggccactccaaggccaaagcgagaaaatcttactgcgcacgcgcaatagacagccgatggagccaccgatggagccgtccggaggggagcaagagcccggagccgtcaggttcctggacctgccctgggaagacgtgctgctcccacacgtcctgaaccgggtcccgctgcgccagctgctgccggctgcagcgcgttagccgggccttccggtcgctggtgcagcttcacctggccgggctgcgtcgcttcgatgccgcgcaggtgggtccgcagatcccgcgggccgcattggcccggctgctgcgggatgccgaggggctgcaggagctggcactggcgccgtgtcacgaatggctgtcagacgaggacctggtgccggtgctggcgcggaatccgaagcttgcgagatgtggcgttgggcgggctgcgggcaactaagtcgccgggcgcttggggctttggccgagggctgcccacgcctgcagcgcctgtcgctcgcgcactgtgactgggtggacgggctggcgctgcgcggcctcgctgatcgctgcccggccctggaggagctggatctcaccgcctgccgccagctcaaggacgaggccatcgtgtacctggcgcagaggcgcggcgctggtctccgcagcctctctttggccgtcaacgccaacgtgggggacgccgcggttcaagagttggctcggaactgcccagaactccaccaccttgacctcaccggtstgyctccgcgtcggaagcgacggtgtcaggtgcctgggcctgatagggcgggaggagggcagtcacttagcctctgctggtgctgacatccatgctgaaaacgaggagcccctgtgcccactgccttcaccccctacctctgatagcgactcggactctgaagggcctgagaaggacacccgaagcagcttccggggccacacgcctcttgacctcacttgcagcaccaaggtgaggccagcccgggactag

SEQ ID NO: 16574 - DNA, 451 bp, Homo sapiens
  SIMILAR (130)..(450): 951254mologous to Homo sapiens HSPC065,accession number AF161550,Smith-Waterman Score=507.
aatttcccgtctgcagattcggacggattggcggggccgcttcggcagagtgatgactgatgatgagtccgagagcgtcctctccgactcccatgaagggtcggagctggagctgcctgttatccagctgtgcgggctggtggaggagctcagtttcgaggcaggcgtagatccaaatcccggacaggtatggaccgtggggtaggcctgactgccgaccaaaaacttgagctggtacaaaaagaggttgcggacatgaaggatgacttacgacacacaagggcaaatgcggaacgcgacctgcagcatcacgaggcgatcattgaggaggctgaaattcgatggagtgaagtttcgagagaagtgcatgagtttgaaaaagatattctaaaagccatatccaagaagaaagggagtattttggccactcagaaagtgatgaaatacattg

SEQ ID NO: 16575 - DNA, 893 bp, Homo sapiens
  SIMILAR (855)..(286): 1001254mologous to Homo sapiens HSPC065,accession number AF161550,Smith-Waterman Score=958.
acagtagctcttttctcagcaagatctccttgtccagattgaggtatatttccattgccttgtgaagcttgcttttgtaggcattgagaacctgcagagtgtttccagatgacagctttagctgggtcaattcttgattccttgcgtcaattgtctcaagaaattgagcgttctctatcttcaactgctgaaaatcaacatcgtgaagggcctcactcacctcttccttctgcctcaattgtaaaagcatttttttcctctgaactttgagagaaacatttttcaaacgtaattctccttcatattatccctccggcggttcatgtcctcaatgtatttcatcactttctgagtggccaaaatactccctttcttcttggatatggcttttagaatatctttttcaaactcatgcacttctctcgaaacttcactccatcgaatttcagcctcctcaatgatcgcctcgtgatgctgcaggtcgcgttccgcatttgcccttgtgtgtcgtaagtcatccttcatgtccgcaacctctttttgtaccagctcaagtttttggtcggcagtcaggcctaccccacggtccatacctgtccgggatttggatctacgcctgcctcgaaactgtgcataatctgctgctgatattttaatttctgataatcgtggaggtcgctgatccctgggctccagtttagcgtaatatttctcaaacatctcagtctcagttttgagagcagagtttacatagctgagctcctccaccagcccgcacagctggataacaggcagctccagctccgacccttcatgggagtcggagaggacgctctcggactcatcatcagccatcactctgccgaagcggcccctgccaatgcgtgtgcccc

SEQ ID NO: 16576 - DNA, 639 bp, Homo sapiens
  SIMILAR (793)..(1188): 871254mologous to Homo sapiens b24o18.4 (protease, serine, 16 (thymus)),accession number AL021808,Smith-Waterman Score=558.
cccgaatccgggttcatccgacaccagccgccttcaccatgccgccgaagttcgaccccaacgagatcaaagtcggatacctgaggtgcaccggaggtgaagtcggtgccacttctgccctggcccccaagatcggccccctgggtctgtctccaaaaaaagttggtgatgacattgccaaggcaacgggtgactggaagggcctgaggattacagtgaaactgaccattcataacagacaggcccagattgaggtggcgccttctgcctctgccctgatcatcaaagccctcaaggaaccacctcgagacagaaagaaactgaaaatccttaaactcagtgggaatatcacttttgatgaaaatggtaacatttgctcgacagatatgcggcccgatccttatccagagaactctctggaaccactaaagagatcctggggactgcccagtctgtgggctgtaatgttgatggccgccaccctcatgacatcatagatgacatcaacagtgagaatgacaaacagccacgaaagagtaagatgagaacttcattcagtccccagattccagggcatgaacactttcactaccttctgcttcttcagcacgttcactgccagttagctttgacattaag

SEQ ID NO: 16577 - DNA, 1103 bp, Homo sapiens
  SIMILAR (350)..(135): 371254mologous to Homo sapiens testis-specific basic protein Y 1,accession number AC006370,Smith-Waterman Score=97.
tttcgtgctcggaggaggccaaggtgcaacttccttcggtcgtcccgaatccgggttcatccgacaccagctctcctccaccatgccgccgaagttcgaccccaacgagatcaaagtcggtgcgtgctctggttgtggccggggctgcgggatggagcatccctcggccctgccgcgcgtgcaaagctttccccgtatggggctcttaaagccgctgcctcccagagaccttcccggtgttgcgccgccccggccaagcctcagcctttctgggccttagcttcttcacgtgtaggtggggagggaggactggaccacctgtggcggcttgggagcccgcacgccctaggtataccttgaggttgcaccgggaggtgaaagtcggttgccactttctgcccttggcccccaaagaatcggcccccctgggtcctgtctcccaaaaaaaagttgggtgaatgacatttgccaaaggcaaccgggtgaactggaaagggccttgaggattacaagtgaaactgacccattcaagaacaggacaggccccagattgcacgcgggtgccttcttgccttcttgcccttgattcattcaaagcccttcaagggaaccacccaagagaccagaaaagaaaccagaaaaaacatttaaacaccagttgggaatattcacttttttgaatgagatttgttcaacattgcttcgacagatgcgggcaccgatcccttagcccagagaaactctcttggaaccccacttaaagagattcctgggggactgccccagtccagttgggctggtaatgtttgatgggccgccattcctcatgacattcatcgatgacattcaacagtgggtgctgtggaaatgcccagccgtaagtgacattttcattgttacagtaggggtgaaaggggggccgcccagtgtattcacagagataagctgggaagttttggaaatggttactggtggggtgggataatccttttaaactttttactgattttttttttctttcccacagagttaagcccaaaggaaaacctttcaataaaggatcatttggccactggtggaaaaaaaaaaaaaaaaaaaaaaaa

SEQ ID NO: 16578 - DNA, 965 bp, Homo sapiens
  SIMILAR (915)..(376): 271254mologous to Polysphondylium pallidum spore coat protein sp45,accession number AF245486,Smith-Waterman Score=138.
gtttaaaaaaattccaaaatcatatctttgtctgcttctgaagcttgctctgttgacgcaaattgtatttttttctttttttggattttagtatgccttgcaattttttccctttattctcatgcatgaagcacccactaaaagtgactgttgttagtatagcttcagtaatgcggtgatgaggtgacagggcaggtgatgctctcttagtctctttaggctactataacaaaatactttagactgagtaattcataaacaacagagattattgctcacagatctggaggctggaaagtccaagactaaagggtcaggatatttggtgtttggtgaaggtcaaacattcagacacttgcaacgactatagcgacagcagcagtcttcaggaatcctatgtgagggacaaacactcagaagccagctggagtgttctagaatcctatgtgagggacaaacattcagaccccagcagtagtgttgtggaatcctatgtgagggacaaactttcaaacccttgtagcagtgttctggaatcctatgtgagggacaaaaattcagaaccttgtagcagtgttctggaatcctatggatattcagacaccagccacagtgttctggaatcctatgtgacagacaaactttcagaccacagcatgaacattctggaatcctatgtgatggacaaacgttcagaccatagcagtagtgttctgcaatccaatgtgagggacaaacatttagagcccagccgcagtgttctggaatcctatgtgacagacaaacattcagaccacagcaggagagttctggaatcctatgtgcggtacaaactttcagaccacagcaggagagttctggaatcctatgtaagggacaaacattcagaccccaggagcagtgttctaaaatcctatgttaagtgcaagcattcacatccccgcgtgaatgttctcgaatcctag

SEQ ID NO: 16579 - DNA, 410 bp, Homo sapiens
  SIMILAR (91)..(14): 341254mologous to coliphage T4 gp65 protein (AA 1- 61),accession number X15728,Smith-Waterman Score=54.
  misc_feature (1)...(410): n = a,t,c or g
cctgtaatgtttctgtggataaggaacagaagctatccaaacgtgaaaaggaaaatggttgcgtccttgagactttgtgctgcgcggggtgctcactcaatcttggctacgtgtacagatgcacgcccaagaagagagacttgttttgcctcagtgttgaagccattgaaagttatgttttagggtcctctgaaaagcaaattgtgtcagaagataaagagctttttaatcttgaaagcagagttgaaatagaaaagtctctaacacagatggaagatgtcttgaaagcattacaaatgaagctgtgggaggcgaatccaaattgtcctttgccncttgtanaagctgactctagntgtgtctccatctgccccgccttnctcccttattgttaatgaancacatatgag

SEQ ID NO: 16580 - DNA, 639 bp, Homo sapiens
  SIMILAR (347)..(559): 431254mologous to Homo sapiens FasL isoform,accession number AF288573,Smith-Waterman Score=125.
ttttttttttttttttttatagagacgacgtctcactatgttgcttcatttaccaaataagggaagaaaggccgggggcagaatggaggacacagactagagttcagcttttacaagtggcaaaggacaatttggattcgggcctcccacagcttcatttgtaatgctttcaagacatcttccattctttcaacggcttcaacactgaggcaaaacaagtctctcttgtaatcaagattcttgggcgtgcatctgtacacgtagccaagattgagtgagcaccccgcgcagcacaaagtctcaaggacgcaaccattttccttttcacgtttggatagcttctgttccttatccacagaaacattacaggaaacacagcgaagcaggatgcagttggtgtcctcctggctggccacccagctcagcgagtcgcccagcggccgccggcagccggagcacaggaacaccagcggcctctcctccgcagccgccgcctcctcctccagctgcgccctctccatgtcggccaccgacgcgtcttcgctcatggagctccacatgctcgcccacttctgcaacagctggtggcggctcgagtcttcggagagtctcttgcccaacagcgaggagtcgctgcat

SEQ ID NO: 16581 - DNA, 418 bp, Homo sapiens
  SIMILAR (302)..(379): 1001254mologous to Homo sapiens unknown,accession number AF231921,Smith-Waterman Score=131.
  misc_feature (1)...(418): n = a,t,c or g
cttgtggtataaatagccttgttgttggatgttaacattttctcattgccagataggtgagatggtgatgattgtataaaagagatgtagattataggttgagaactactgttgatagaattatgctttatttttaaaaaatttatgcctctaaatagttttgttaaacactgaatatctaccttgtaatgtatgacatatccaaaattgcattaagtgtatatcttaattatatttaaccatgtataatttttaattatatgtgtgnnnnnnnnnnnnnnnnnnnnnnnaaattcaatagatggaagatgtcttgaaagcattacaaatgaagctgtgggaggccgaatccaaattgtcctttgccacttgtaaaagctgaactctagtctgtgtcctccattctgcccccgccctt

SEQ ID NO: 16582 - DNA, 1591 bp, Homo sapiens
  SIMILAR (1382)..(1002): 991254mologous to Escherichia coli Orf15,accession number L13279,Smith-Waterman Score=658.
  misc_feature (1)...(1591): n = a,t,c or g
gcgtcgacttttttttttttttttttttttttttggtttaatctttattctcttcaattaagaaaaatacatactacaaaagatttcacatatagaaaacagacaaaaacaaaaattcccccagaaacccaccatcagagatggttactacctcattagtaagtattcctccaggttttttaagcatatagtagtacataagcaggaaaaagtaaaatcctactatatataagcaactgctcttgagcaagttttcaaatggttctgacagatcattctgaccaattttttccagggaactttatggattagtattcagagaagattccatgacactgtgggtagacaaacctctaagaatttttctaatcatttataataaatgttgcccccaaggtgttaaaatgcccaaggtttttaaaaatagtaaataaatgtgatacagaggaaaaaaagttcagaaaattatcccagtttcttatcaaaatcaaaactcctaagtcccaattccaacaagtaccataaaacggtctttaaaatgcgattttgagaaacaatcacctccttatcataaaatatagctatagaagtattcccacaatttggggttttttttttgagagaaggtctcactctgttgcccagactagaacgcagtagtggcatgaccaaggctcactgaagcctcaacctcccaagctcatctgatcctcccacctcagcgtttcgcatgcctggctaatttttttttttctttttttttttgtagagacgacgtctcactatgttgcttccatttaacaaataagctaaggaagggcggggnccagaatggaggacacagactagagttcagcttttaccaagtggccaaaggacaaatttggattcggcctcccacagcttcaagttttgtaatgctttcaagacatcttccattctgtgttagagacttttttctatttcaactctgctttcaagattaaaaagctctttatcttctgacacaatttgcttttcagagggaccctaaaacataactttcaatggcttcaacactgaggcaaaacaagtctctcttgtaatcaagattctttgggcgtgcatctcgtacacgtagccaagattgagtgagcaccccggcgcagcacaaagtctcaaggacgcaaccattttccttttcacgtttggatagcttctgttccttatccacagaaacattacaggaaacacagcgaagcaggatgcagttggtgtcctcctggctggccacccagttcagcgagtcgcccagcggccgccggcagccggagcacaggaacaccagcggcctctcctccgcagccgccgcctcctcctccagctgcgccctctccatgtcggccaccgacgcgtcttcgctcatggagctccacatgctcgcccacttctgcaacagctggtggcggctcgagtcttcggagagtctcttgcccaacagcgaggagtcgctgcatttgcccttgtcgccgcactcacagccgccagcgcatcctctgctacacctcagtgaccgaacgcctgccattacctacaaatcgcccgcgcccca

SEQ ID NO: 16583 - DNA, 465 bp, Homo sapiens
  SIMILAR (49)..(435): 971254mologous to Homo sapiens bA271B5.1 (similar to ribosomal protein S7),accession number AL139378,Smith-Waterman Score=631.
cggcagctaaggaaattgaagttggtggtggtcggaaagctatcataatctttccagaaaatccaagtccggctagtacgcgaattggagaaaaagttcagtgggaagcatgtcgtctttatcgctcagaggagaattctgcctaagccaactcgaaaaagccgtacaaaaaataagcaaaagcgtcccaggagccgtactctgacagctgtgcacgatgccatccttgaggacttggtcttcccaagcgaaattgtgggcaagagaatccgcgtcaaactagatggcagccggctcataaaggttcatttggacaaagcacagcagaacaatgtggaacacaaggttgaaactttttctggtgtctataagaagctcacgggcaaggatgttaattttgaattcccagagtttcaattgtaaacaaaaatgactaaataaaaagtatatattcacagtaaaaaa

SEQ ID NO: 16584 - DNA, 882 bp, Homo sapiens
  SIMILAR (368)..(613): 981254mologous to Homo sapiens dJ671D7.1 (similar to D.melanogaster CG5986 protein),accession number AL133288,Smith- Waterman Score=414.
atgcccatggatggaccactgagcatggccccgggcagcaaggtagctcccagacagagctatccatatcctcaggaaagagctttggatcttcttaagaacttgcttatcagcacagtgccccatgcaattagaaatgatgatggcacagacgaccatcataactgtccagaacagaaagctggaaactataggtacagtaggcagaaattcttgtgtttagtcatccttactacatgggctgagtcagcaagctctgctttaaccacagctgctttcaaatggccaccccagacctttgacacaatccgatcttcagtcttcagggagaacttcactgatctgggaattcacctgcaaactggagggttatcaggaaaatctgtgaatgcagatgaaggagtttggaaaattgctgatacatttcggtcagactgtccccagctttgtcctgacctcctgcaaaggcaacccagcgctcacatggagtccctcatgagctatgctggagataggggaaagcagccgctgcacccagggccagcactcagcaaggagaaggccacgttcagtttgaacactaggatcacgaagcccaacggcaagaagccagacaagttcaagttcggcatctcccaggctcttctggagccaaagatgaacgtggacctcaaggctcagctcagggagctgaatatcacagcagccaaggaaactgaagttggtggtagtcagaaagctatcataatctttgttcctgtttctcgactgaaatcttcccagaaaatccaagtctggctagtatgtgaattggagaaaaagttcagtgagaagcatgttgtctttattgctcagaggagaattctgcctaagccaacttga

SEQ ID NO: 16585 - DNA, 781 bp, Homo sapiens
  SIMILAR (201)..(566): 311254mologous to Caenorhabditis elegans repetitive region; weakly similar to E. gracilis major membrane skeletal protein (PIR:A43417),accession number U41017,Smith-Waterman Score=105.
gcacgaggagaaagccatgttcagttcgagcgccaagatcgtgaagcccaatggcgagaagcccggacgagttcgagtccgggcatctcccagggctctttctggagctggaagatgaactcggaccctcaaggcttcagctcagggaacctgaattattacggccagctaaaggaaattgaaagttggtggttgttcggaaagcctattccattaatcttttgttccccgttccctcaaactgaaaacctttccccagaaaaatcccaaagtccgggcctagttacgccgaattgggaagaaaaaagttccagtggggaaagccatgtccgtcctttatccgccctcagagggagaattcctgcccctaagcccaacctcggaaaaagcccgtaccaaaaaataagccaaaagccgtcccccaggagcccgtactcttgacaagcttgtgcaccgatgcccatcccttgagggactttggtcctttcccaagcggaaatttttgggcaaagagaatcccgcggtcaaacctagatgggcagcccggctcgataaaggttccattttggaccaaagcacagcagaaccaatgttggaacacaagggttgaaacctttttcctggtgtcctataaggaagctcacggggcaaggatgttaatttttggaattccccagagttttcaattgttaaacaaaaattgacttaaataaaaaagtatatattcacagtaaaaaaaaaaaaaaaaaaagtcgacgcggccgcgaatttagtagtagta

SEQ ID NO: 16586 - DNA, 452 bp, Homo sapiens
  SIMILAR (184)..(450): 521254mologous to Homo sapiens p40,accession number U93571,Smith-Waterman Score=233.
actctgctggtgatacccaggaaaatgcggtctgcagtggaactccagcaaacttcaacagacctgcagctgagggacctgactgttagaaagaaaactaacaaacggaaagcaacagcatcaacttcacaaaaaggtcatctacaccaaaaccccatctgtaggtcaccaacatcaaagaccaaagaagtaggcttcagaaggtcggtaataacaaacttctctgagctaaaggaggatgttcgaacctatcacaaggaagctaaaaaccttgaaaacagattagatgaatggctaactagaataaacagtgtagagaagaccttaaatgacctgaaggagctgaaaaccatggcacgagatcttcatgatgcatgcacaagcttcaatagacgatttgatcaagtggaagaaagggtaacagtgactgaagatcaaattaatgaaataaa

SEQ ID NO: 16587 - DNA, 621 bp, Homo sapiens; identical to SEQ ID NO: 7482
  SIMILAR (322)..(600): 721254mologous to Homo sapiens PRO2221,accession number AF116695,Smith-Waterman Score=326.

SEQ ID NO: 16588 - DNA, 455 bp, Homo sapiens
  SIMILAR (455)..(168): 1001254mologous to Homo sapiens Homo sapiens CO1224_2 clone secreted protein,accession number W29663,Smith-Waterman Score=465.
tttaaacatttgtgatttgattttatctcagcttggaatgtggttggagtgtcccacttctaacaactgtttgctaagttaaggctttggtgtttacacagtgttgaatgaagcagcctggtcaccagatgtgatcgcttccccagactgtcgttttttttcaatcagatcactgtcctcatggtcccggttccaaccttcttcctcagtacatccaccagcctttccaacttttgaactttttcattggccacttgggaggcctctctggcatgttgaagttgtaattccatatttgctcgctctgtcagagcttgttgcagttgagtagccagttcctcattttgttgttgagtgatggaaacaatgttctctctgttttttaaagcttcttcatatgtactaagggtatagttaaactgatccttcagattttcttcttgagataaagattt

SEQ ID NO: 16589 - DNA, 465 bp, Homo sapiens
  SIMILAR (97)..(1959): 521254mologous to Homo sapiens gonadotropin inducible transcription repressor-4,accession number AB021644,Smith-Waterman Score=1684.
attaaatatagcagcccaatgaaaagcacctttgtggaccctgtggatcccgtggcagtggcggtcatctactgtcttgcagcaggattggtaatcattcgcattcctttcttccagttagtacccctaaaggaggaaaaaatggttttgcttaacatggactattatgaaatggcatctctctctctggtgactcacaggaatgaggcgcccttctctggaagggtacgcagctccttgccagcaacggaacaaagctggatggagaatgactttgacaagttgacagaagtaggctttagaaggtcagtaataacaaacttctctgagctaaaggagcatgttctaacccatcacaaggaagctaaaaaccttgaaaaaaggttagacaaatggcaaactagaataaacagtgtagagaagaccttaaatgacctgatggagctgaaaaccatggcgtgagaa

SEQ ID NO: 16590 - DNA, 411 bp, Homo sapiens
  SIMILAR (176)..(400): 731254mologous to Homo sapiens PRO2221,accession number AF116695,Smith-Waterman Score=270.
gctggcgctgtctggggaaatgaccttagtcctcttcatgctccttgctgggggctgggttactcatgacaaacctgagcccatgccgagggcagccacaagcgggggcaccagaaaaggtaaaacaaaagctgccctcaaggatctgatagccacgtggaaggaggtgtgtgtctcctcgccagcaacagaacaaagctggatggagaatgactttgatgagttgacagaagtaggcttcagaaggtcggtaataacaaacttcttcaagctaaaggagtatgttctaacccatcacaaggaagctaaaaaccttgaaaaaatgttagacgaatggctaactagaatcaacagtgtagagaagaccttaaatgacctgatggagctgaaaaacatggcatgagaacttcg

SEQ ID NO: 16591 - DNA, 676 bp, Homo sapiens
  SIMILAR (73)..(675): 701254mologous to Homo sapiens p40,accession number U93567,Smith-Waterman Score=709.
atggacatctacaccaaagccccatctgtaggtcaccagtatcaaagacaaaaggtagataaaaccacaaaggtgggaagaaaccagaacagaaaagtggaaaattctaaaacccagagtgccacttctcctctaaaggatcacagctcctcaccagcaatggaacaaagctggacagagaatgactttgacgagttgacagaagtaggcttcagaaggtcggtaataacaaacttctctgagctaaaggagcatgttctaacccatcgcaaggaagctaaaaaccttgagaaaaggttagacgaatggctaactagaataaacagtgtagagaagaacttaaatgacctgatggagctgaaaaccatggcacgagaactttgtgacacatgcacaagcttcaatagccgatgcaatcaagtggaagaaaaggtatcagtgattgaacatcaaattaatgaaataaagcaagaagataaagttagagaaaaaagagtaaaaagaaatgaacaaagcctccaagaaatatgggactgtgtgaaaagaccaaatctatgtttgattggtgtacctgaaagtgatggggagaatggaaccaagttggaaaacactcttcaggatattatccaggagaacttccccaacctagcaaggcaggccaacattcaaattcagg

SEQ ID NO: 16592 - DNA, 1968 bp, Homo sapiens
  SIMILAR (1003)..(1167): 471254mologous to Drosophila melanogaster la costa,accession number AF017777,Smith-Waterman Score=101.
atggtggaaggcaaggaggagcaagtcacatcttacatggatggcagcaggcaaagagagagcttgtgcagggaacctcccccttataaaaccgtcagatctcatgagacttattcactatcacgagaacagccccatgattcaattacctttcactgggtccctccacagcacgtgggaattcaagatgagatttgcgtggggacacagccaaaccatatcatgggttcagggttaggtgtgtctgagctcagactctccttgggtgaggcttaccgaggctgctctggggaatggggtgtggttctcaggccaatggagttatgttcccaggtggattatgggagcctctgctgcatcatgcaggtcaccagggaattttttggctgtctccagaggcctgtagcagcaatccactctcttcaaagggtctgtggactctctctgcttccctggtatattcctgcagtagttcttggagcaaaagtttatgatgtgagtctccacacactactctgttcatccaagtgggagctacagcaggaaaagcaggtgtattggaagctgtgcagaggagctcagttggtacctgacatccctttggccttcacaggctggcggcctctcagtggagatcagaggttggagtatgagagctcagaagatccagggatcctatctcccaagcagctgctgtatgcaggtgtttctcttgtcactcccccactaaaagctttcagtggccccgcactacctccccattccccagggagtgtgcagccaaactggactcatcctgcaagcttgtctccgctggctctaggaaccaagggtgcctatggggactcctgttggaggcagtctgcaaaggaagagcagcttcctagacagtggaaggacagggccattgaagtgagggctccagagggaagagcagcttggtcaccttcgcctcctgatggaagtctcccttcaacactggggattttattaggggaagaccatctgggaccagagggcagtgaagcccacgtggttggaacttcaaggcccagcttcagagttgcagtgacagcaactcatgctgtcaacgggcaaccacaaccaaccctgaggaggtgcaatggaggaaccactaaggaggcagagacccgcaaagcctatgatattgactatttaggcctttgcagaaaaaaattgctgcttctggattcagaacaaccctcatcatgtccccacagaggagtgggagaagtgggtctgaagttctggggaacttcggccaatgggcatcagggcagtcggccaggacagagcactggccagtgccctaggctcccagcccagcagctggacacggtccacactgtcttggcgccaggtgtgaaactgccagcccaggcagctgtgcaggctgtgaatcacagctccttgccagtgatggaacaaagctggacgaagaatgacttcgatgagttgacagaagtaggcttcagaaggtcggtaataacaaacttctccgagctaaaggagcatgttctaacccattacaaggaagataaaaaccttgaaaaaaggttagatgaatggctaactagaataaacagtgtagagaagatcttaaatgacctgacagagctgaaaaccatggcaggagaacttcatgatgcatgcacaagcttcaataggcgatgcaatcaagtgcaagaaaggatatcagtgattgaagatcaaattaatgaaataaaactgtatatgtatctttcggttgtggctaaaactgagcaagaagtttatttcattagttacagcttctgcatggaggaatgggttggaaaggctggtggatgtactgaggaagaaggttggaaccgggaccatgaggacagtgatctgattgaaaaaaaacgacagtctggggaagcgatcacatctggtgaccaggctgcttcattcaacactgtgtaa

SEQ ID NO: 16593 - DNA, 3075 bp, Homo sapiens
  SIMILAR (531)..(695): 411254mologous to Lycopersicon esculentum cell wall hydroxyproline-rich glycoprotein,accession number M11759,Smith- Waterman Score=101.
atggtaaagggatcaattcaacaagaagagctaactatcctaaatatatatgcacctaatacaggagcacctagattcacaaagcaagtcgtgagtgacctaaaaagagacttagactcccacacattaataatgggagactttaacaccccactgtcaacattagacagatcaacgagacagaaagtcaacaaggatacccaggaattgaactcagctctgcaccaagtggacctaatagacatctacagaactctccactccaaatcaacagaatatacatttttttcagcaccacaccacacctattccaaaactgaccacaaacttggaagtaaagctctcctcagcaaatgtaaaagaacagaaattataacaaactgtctctcagaccacagtgcaatcaaactagaactcaggattaagaatctcactcaaaaccggtcaactacatggaaactgaacaacctgctcctggatgacttctgggtacataacgaaatgaagacagaaataaagatgttctttgaaaccaacaagaacaaagacacaatataccagaatctctgggacacattcaaagcagtgtgtagatggaaatttatagcactaaatgcccacaagagaaagcaggaaagatctaaaattgacaccctaacatcaaaattaaaagaactagagaagcaagaacaaacacattcaaaagctagcagaaggcaagaaataactaagatcagagcaaaactgaaggaaatagagacacaaaaaacccttcaaaaaattaatgaatccaggaggtggttttttgaaaggatcagcaaaattgatagaccgctagcaagactaataaagaaaaaaagagagaagaatcaaatagacgcaataaaaaatgataaaggggatatcaccaccgatcccacagaaatacaaactaccatcagagaatactacaaacacctctacgcaaataaactagaaaatctagaagaaatggataaattcctggacacatacaccctcccaagactaaaccaggaagaagttgaatccctgaatagaccaataaaaaaaaatgagggaatcctccctaactcattttatgaggccagcatcatcctgataccaaagcctggcagagacacaaccaaaaaagagaattttagaccaatatccttgatgaacattgatgcaaaaatcctcaataaaatactggcaaaccgaatccagcagcatatcaaaaagcttatccaccatgatcaagtgggcttcatccctgggatgcaaggctggtttaatatacgcaaatcaataaatgtaatccagtatataaacagaaccaaagacaaaaaccacatgattatctcaatagatgcagaaaaggcctttgacaaaattcaacaacgcttcatgctaaaaactctcaataaattaggtattgatgggacgtatttcaaaataataagagctatctatgacaaacccacagccaacattatactgaatgggcaaaaactggaagcattccctttgaaaaccagcacaagacagggatgccctctctcaccactcctattcaacagagtgttggaagttctggccagggcgatcaggcaggagaaggaaataaagggtattcaattaggaaaagaggaagtcaaattgtccctgtttgcagacgacatgattgtatatctagaaaaccccattgtctcagcccaaaatctccttaagctgataagcaacttcagcaaagtctcaggatacaaaatcaatgtacaaaaatcacaagcattcttatacaccaacaacagacaaacagagagccaaatcatgagtgaactcccattcacaattgcttcaaagagaataaaatacctaggaatccaacttacaagggatgtgaaggacctcttcaaggagaactacaaaccagtgctcaaggaaataaaagaggatacaaacaaatggaagaacattccatgctcatgggtaggaagaatcaatatcgtgaaaatggccacactgcccaaggtaatttacggattcaatgccatccccatcaagctatcaatgactttcttcacagaattggaaaaaactactttaaagttcatatggaaccaaaaaagagccagcatcgccaagtcaatcctaagccaaaagaacaaagctgggggcatcacgctacctgacttcaaactatactacaaggctacagtagccaaaacagcatggtactggtaccaacacagagatacagatcaatggaacagaacagaggcctcacaaataacgccacatatctacaactatctgatctttgacaaacctaagaaaaacaagcaatggggaaaggattccctatttaataaatggtgctgggaaaactggctagccatatgtagaaagctgaaactggatcccttccttacaccttacacaaaaatcaattcaaaatggattaaagacttaaacgttagacctaaaaccataaaaaccctagaagaaaacctagacattaccattcaggacataggcatgggcaaggacttcatgtctaaaacaccaaaagcaatggcaacaaaagccaaaattgacaaatgggaactaattaaactaaagagcttctgcacagcaaaagaaactaccatcagagtgaacaggcaacctacaaaatgggagaaaattttcgcaacctgctcatctgacaaagggctaatatccagaatctacaatgaactcaaacaaatttacaagaaaaaaacaaacaaccccatcaaaaagtgggtgaaggacatgaacagacacttctcaaaagaagacatttatgcagccaaaaaacacatgaaaaaatgctcaccatcactggccatcagagaaatgcaaatcaaaaccacaatgagataccatctcacaccagttagaatggcaatcattaaaaagtcaggaaacaacaggaagctgctgaaggatgtgctctacccaaaccggcgagtaaaccaggaaagagacagatatgagatccaggaaacaggatccaacataggagagaagcaaaggaaattcccaggatga

SEQ ID NO: 16594 - DNA, 894 bp, Homo sapiens
  SIMILAR (837)..(67): 861254mologous to Homo sapiens putative p150,accession number U93563,Smith-Waterman Score=1123.
ttattgatttgcgtatgttgaaccagccttgcaacacagggatgaagcccacttgatcatggtggataagctgttgatgtgctgctggattcggtttgccagtattttattgaggatttttgcatcgatgttcattagggatattggtctaaaattctctttttttgttgtgtctctgccaggctttggtatcaggatgatgttggcctcataaaatgagttagggaggattccctctttttctattgattggaaaagtttcagaaggaatggtactagctcctccttgtacctctggtagaattcagctgtgaatccatctgatcctggacattttttggttgggaagctattaattattgcctcaatttcagaacctgttactggtctattcagagattcaacttcttcctggtttagtcttgggagggtgtatgtgtccaggaatttatccatttcttctagattttctagtttatttgcgtagaggtgtttatagcattctctgacggtagtttgtatttctgtgggattggtggtgatatcccctttatcattttttattgcgtctatttgattcttctctcttttcttctttattagtcttgctagcggtctatcaattttgttgatcttttcaaaaaaccagctcctggattcactgattttttgaagggttttttgtttttctatttccttcagttctgctctgatcttagttatttcttgtcttctgctagcttttgaatgtgtttgctcttgcttctctagttcttctgcatctaaaggtaagtctgctaaaatgctcaagtccaagtcatgtgcctctttattgatggtaggaactggaagatgcaactgcttgttctttcctttgaggagatgccccagcat

SEQ ID NO: 16595 - DNA, 954 bp, Homo sapiens
  SIMILAR (331)..(561): 891254mologous to Proteus mirabilis chloramphenicol acetyltransferase (cat),accession number M11587,Smith-Waterman Score=388.
atggcagtgcctggagaggctctgcttttccatgatcctttgaggcagacaggggctatcttggaggaagcagaaaatgcggagtcggagacagaaggggatgacaatgaagcgcggtggaatttggctgtgaatccatctggtcctggactctttttggttggtaaggacacattcaaagcagtgtgtagagggaaatttatagcactaaatgcccacaagagaaagcaggaaagatccaaaattgacaccctaacatcacaattaaaagaacaagaaaagcaagagcaaacacattcaaaagctagcagaaggcaagaaataactaaaatcggagcagaactaaaggaaatagagacacaaaaaacccttcaaaaaattaatgaatccaggagctggtgttttggaaagatcaacaaaattgatagaccgctagcaagactaataaagaagaaaagagagaagaatcaaatagacgcaataaaaaatgataaaggggatatcaccaccgatcccacagaaatacaaactaccatcagagaatactacaaacacctctacgcaaataaactagaaaatctagaagaaatggataaattcctggacacacacaccctcccaagactaaaccaggaagaagttgaatctctgaatagaccaataacaggctctgaaattgtggcaattgtttggttttttaaaaaatatatagtggttggccggaaaaagtacactcgccggcagttttgccacgagagtacactgaacaaaggagacaaagtcatttataacctgacgcatccaccctactgctgtgtccggttttcactggctggaatgggacctcacattctgtatttgtcccaattggctagaaacttagaacttttaaaaagaggcaaaggtagaggagaaaaaaggaaggaggaagtaacttgtggaatgctgagaaag

SEQ ID NO: 16596 - DNA, 2026 bp, Homo sapiens
  SIMILAR (520)..(1128): 461254mologous to Homo sapiens copine III,accession number AF077226,Smith-Waterman Score=507.
gaacaagaggccagctacggcagagacgcctttgccaaggcaatatatgagcgccttttttgttggatcgttactcgcatcaatgatattattgaggtcaagaactatgacaccacaatccatgggaaaaacactgttattggtgtcttggatatctatggctttgaaatcttcgacaacaacagttttgaacaattctgtatcaattactgcaatgagaaactgcagcagctatttattcagctggttctgaagcaagaacaagaggaataccagcgggaagggatcccctggaaacatattgactacttcaacaatcagatcattgttgacctcgtggagcaacagcacaaagggatcattgcaatccttgatgatgcttgcatgaatgtcggcaaagtcaccgatgaaatgtttcttgaagcacttaacagtaaattgggcaaacacgcccatttttccagccgaaagctctgtgcctcagacaaaattctggagtttgatcgagattttcgaattcgacattatgcaggcgatgtagtctattctgtcattggttttattgacaaaaataaagatactttatttcaagatttcaagcgccttatgtataacagttcaaatcctgtgctcaagaatatgtggcctgaaggcaaactgagcattacagaggtgaccaagcgacctctgactgctgctaccttgtttaagaattctatgattgctctagtagacaaccttgcatcaaaggaaccatattacgttcgttgcatcaaacccaatgacaagaaatctccacagatatttgatgatgaacgctgccggcaccaagtagaatatcttggactactggaaaatgtgagagtgcgtcgggcaggatttgccttccgccagacatacgagaagtttcttcacaggtataagatgatctctgaattcacctggcccaaccatgaccttccttcagacaaagaggctgtcaagaaactaattgaacggtgtggttttcaggatgatgtagcttatgggaagaccaaaattttcattcgaacaccccgaacattgtttaccttggaagaactccgtgcccagatgctcataaggattgtcctctttctacaaaaggtgtggcggggcaccctggcccgcatgcggtacaaaagaaccaaggcagctctgacaataatcaggtactaccggcgctacaaagtgaagtcgtacatccacgaggtggccagacgcttccatggcgtcaagaccatgcgagactacgggaagcacgtgaagtggccaagccctcctaaagttcttcgccgttttgaggaggccctgcagacgattttcaatagatggagagcatcccagctcatcaagagcattccggcctcagacctgccccaggtcagggcaaaggttgcagccgtggaaatgttgaagggtcaaagggctgacctcgggctccagagggcctgggagggcaactatcttgcttcaaagccagatacacctcagacctcaggcacttttgtccctgttgctaatgaattgaaacggaaggacaaatacatgaatgtcctcttttcctgtcacgtccgtaaggtaaatcgatttagtaaggtggaagacagagcaatttttgtcactgaccgtcacctgtataaaatggatcccactaaacagtacaaggtgatgaagactatccctctattacaattgacttgtcttaattgtttccaatggaaaggaccaacttgtagtgttccatacgaaagacaacaaagacctcattgtctgcctcttcagcaaacagccaacccatgagagtcgaattggagaacttgttgggagtgctggtgaatcatttcaagagtgagaagcgccaccttcaagtggaacgtcaccaacccagtacagtgcagcctgcacggggaagaagtgcaccgtctccgtggagacgcggctcaaccagccccagcccgacttcaccaagaatcgctcgggcttcatcctcagcgtgcccgggaac

SEQ ID NO: 16597 - DNA, 1668 bp, Homo sapiens
  SIMILAR (574)..(1065): 941254mologous to Rattus norvegicus myosin I,accession number X71997,Smith-Waterman Score=806.
atggagacacaaaaaacccttcaaaaaatcaatgaatccaggagctggtttgttgaaaagatcaacaaaattgatagaccactagcaagactcataaagaagaaaagagagaagaatcaaatagacacaataaaaaatgataaaggggatatcaccaccgatcccacagaaatacaaactaccatcagagaataccataagcacctctacgcaaataaactaaaaaatctagaagaaatggataaattcctggacacatacaccctcccaagactaaaccaggaagaaggaatccaacttacaagggttgtgaaggacctcttcaaggagaacaaaccactgctcaatgaaataaaagaggacaaaaacaaatggaagaacattccatgctcatggataggaagaatcaatatcgtgaaaatggccatactgcccaaggtaaatcgatttagtaaggtggaagacagagcaatttttgtcactgaccgtcacctgtataaaatggatcccactaaacagtacaaggtgatgaagactatccctctatacaatctacgtcttccttttcttttgcttctgtacagatttgaaaaagggcgcatctatacgttcattggagaagtcgtcgtttctgtgaacccttacaagttgttgaacatctatggaagagacacaattgagcagtataaaggccgtgagctgtatgagagaccgcctcacctttttgctattgcggatgctgcttacaaggctatgaagaggcgatcaaaagacacttgtattgtgatatcaggggaaagtggagctggtaaaacggaagccagtaagtacattatgcagtatattgcggccatcaccaaccccagtcagagagcagaggttgaaagagtgaagaatatgttgcttaagtccaactgtgttttggaagcttttggaaatgccaaaaccaaccgtaatgacaactcaagcaggtttggaaaatacatggatatcaactttgacttcaagggtgaccctattggtgggcatatcaataactacttactagaaaaggaaatgagtatttgtgtcttgggctttcccctgtcctatgcatcactcatctccattggccccgtaacatgtcacgcatgcacgcacgcacgcacgcaccacatgccctgccctacctgcttaagagattggatgaacatgactgttccacccagctggcaggagcttagccaaccagatgactgccttgggaaagaagttttttcctacattcaaagtcactggaaaaacagaaatgaacaagtacatatgatacctgtcctcatggagcttgcagtcaaagtgaaggtgtccactcccctgccccataaccagaaccaaacagtgcctgtggcaaaggtgatctaccccaaccagacaaagctgtgtgccatttccaagatgttgctggcactcgaactttcactcaaggtgtcttacataccttctcctcactctcattcagaatgtgcttccacattctatgcgctcagacttcaaaatctcaccaacttcaacatccaggagaatagaagagatggaaataaaggaggcaagaatggtttacagatccagctgaaaccgaatggaaggaaaggcagtggatttcatcaagatcctacagacaaggtgtaa

SEQ ID NO: 16598 - DNA, 2096 bp, Homo sapiens
  SIMILAR (1)..(1875): 991254mologous to Homo sapiens putative 8-hydroxyguanine DNA glycosylase,accession number AF176815,Smith-Waterman Score=3364.
  misc_feature (1)...(2096): n = a,t,c or g
tttttgataaaggggtaagggaagggatgccaggttcagcttcctacatatgggctagccagttttccccagcagccattttataaattagggatgcctttcccccatgcttgtttttctcaggtttgtccaaaggatncagaatagtgtagatatgcggcattatttctgagggctctgttctgtcccattgatngtatatctctgttttggtaccagtaccgatgctgttttggttactgtagccttgtagtatagtttgaagtcaggtagcgtgatgcctccagctttgttcttttggcttaggattgacttggcgatgcgggctcttttttggttccatatgaactttaaagtagtttttttccaattctgtgaagaaagtcattggtagcttgatggggatggcattgaatctgtaaattaccttgggcagtatggccattttcacgatattgattcttcctacccatgagcatggaatgttcttccatttgtttgtgtcctcttttatttccttgagcagtggtttgtagttctccttgaagaggtccttcacatcccttgtaagttggattcctaggtattttattcactttgaagcaattgtgaatgggagttcactcatgatttggctctctgtttgtctgttgttggtgtataagaatgcttgtgatttttgtacattgattttgtatcctgagactttgctgaagttgcttatcagcttaaggagattttgggctgagacaatggggttttctagatatacaatcatgtcgtctgcaaacagggacaatttgacttcctcttttcctaattgaataccctttatttccttctcctgtctaattgccctggccagaacttccaacacatttcctccttgtacctctggtagaattcggctgtgaatctgtctggtcctggacttttttttggttggtaggctattatttattgcctcaatttcagaacctgatattgatctattcagagattcagcttcttcctggtttagtcttgggagggtttatgtgcccaggaatttatacatttcttctagattttctagtttatttgtgtagaggtgtttatagtattctctgatggtagtttgtatttctgtgggatcggtggtgatatcccctttatcatttttttattgtgtctatttgatttcttctctctttttttctttattagtcttgctagcggtctatcaattttgttgatcctttcaaaaataaaaaataaaaaaccagctcctgggattcattgatttttttgaagggttttttggtgtctttatctccttcagttctggctctgattttaaggttatttcttgccccttctgctaggctttnatgaatgtgtttcgcctcttgcttttctaaggttcttttaactgtgattatgttaggggtgtcaattttggatctttccccgctttctcttgtggggcatttagggcttataaatttccctctacacactggctttgaatgtgtcccagaagattctggtatgttggtgtctttgttctcttttggtttcaaagaacatctttctttatttctgccttcctttcgttatggacccaatagtcattcaggagcaggttgttcagtttccatgtagttgagcagttttgagttgagtttcttaatcctgagttctaatttgattggcactgtgggtctgagagatagtttggttataatttctgttcttttacatttgctgacgagagctttacttccaactatgtggtcaattttggaataagtgcaatgtgttgctgagaagaatgtatattctgttgatttggggtggagagttctgtagatatcaattaggtctgcttggtgcagagctgaattcagttcctggatatcattgttaactttctgtctcattgatctgtctattgttgacagtggggtgttaaagtctcccattattaatgtgtgggagtctaagtctctttttaggtcactgaggacttgctttatgaatctgggtgctcctgtattgggtgcataaatatttaggatagttagctcctctcgttgaattgatccctttaccat

SEQ ID NO: 16599 - DNA, 387 bp, Homo sapiens
  SIMILAR (205)..(285): 851254mologous to Homo sapiens HPK/GCK-like kinase HGK,accession number AF096300,Smith-Waterman Score=120.
atggcctgcagggtcctgcaaggtctcccctttgcctgcctgtccagccccatctgttcccactctgcccttactcttgatcattctctcctgtgcctgaactttttcttcaacccttatgcccttctgcctaacttttacttatttggcaagttccagctcagaattccttcctctggaaagccttttctgacttccgaagaccaggaccctgctgggatctttgagcttgtggaggtggtcggcaatggaacctacggacaggtgtacaaggtgagacgaatggtgtggaagtatgacctccacatctgcagggcagtcttgggaggagtggaaggaagtagattcctggtctgcaggtctgaagggggctatgggagatgctag

SEQ ID NO: 16600 - DNA, 639 bp, Homo sapiens
  SIMILAR (235)..(462): 981254mologous to unidentified cloning vector 29kD protein essential for the replication of mini F plasmid,accession number AB015619,Smith-Waterman Score=380.
atggcggggaagtctacttcagagtggcctttgagagctcagaaacctgaaaatgaaataaatgagccacaggttgcagatgctgctaaaaacacagaagtctgtgatgaactaatgagcagacataacatctacgtgcaagcaatcaattaccctacggtgccccggggagaagagctcctacggattgcccccacccctcaccacacaccccagatgatgaactacttccttgcggttatcaatcacaagaaacgtaaaaatagcccgcgaatcgtccagtcaaacgacctcactgaggcggcatatagtctctcccgggatcaaaaacgtatgctgtatctgttcgttgaccagatcagaaaatctgatggcaccctacaggaacatgacggtatctgcgagatccatgttgctaaatatgctgaaatattcggattgacctctgcggaagccagcgagccggggaatccccggcagcaccgatatccgcagagcccaagaagtgggcctctctgccccgcccccccggctcgccgagggctacgcggcgcgcctgcgcagaagaaggcagcgcccaaggcgcatgcgcagcggtcactcccgctgtatattaaggcgccggcgatcgcggcctga

SEQ ID NO: 16601 - DNA, 2613 bp, Homo sapiens
  SIMILAR (1101)..(1844): 501254mologous to Homo sapiens copine III,accession number AF077226,Smith-Waterman Score=703.
ggcacgaggagacagaataggtaactagttaggatgcaagagtaaaagagcaactttctttgaatcttcagtgattaaccaataaagttgagatgggattttactcattaagtagttttggatagttaaggctgaatttgctttgtggaggttttgaaagctgttataaccagaggaagaaatatatgtgtgtttcacaaagttgtagctgcatttactgaaaatgttgtatatgggtcagtgaatgtaatgtatgtgatgcttaacataaagctatctgagaaaacattctgattcaagactggaaatatctactttaagtatagtcaactattctgtcattgcttaaggcagcttgttggttttacccaaaattgtagaacctaaagaaatgaaggtctttggacttttgggggaagagatagtagatttttgtagtcttgttttttaatatgaaatagttttccgggaaaggttatataaataagcatcaaatggttgtttacgtttaagaaattgaattatagatgttaacttaatgtcttctttttttcttccatttctttcaaaggtttgggccccatggtatccctgtgacagtaatttcccaaaagggaatataaaggataaaccagaaaggccatggccggctccaaagtaatacattccccaagaaggggaccagaagtcaaggtgtgaagcaaatgggtgctgttccccgatgaccccttctccctgtccccgcatccccgagctgagcttggcctgaaagcctgtggacttcccaaacccacccacctctcttcccatgaaggagcaccttatcctccccctttgtttatcagggacacatataaccaatcaatacctcagccacctcctcggaaaattaagcgacccaaacgaaaaatgtacagggaagaacccacttcaataatgaatgctattaaactacgacccaggcaagtyctgtgtgataaatgtaaaaacagtgttgttgctgaaaaaaaggaaattagaaaaggtagtagtgcaactgcactcttctaaatatggaagataaaaaacggggaaatgtaagtgtaactactgtgaacaaaaaactgaaaactgaccataaagtggatgggaaaaaccaaaatgaaagccagaaaagaaatgctgtggttaaggtttcaaatattgctcacagcagaggcagagtagtaaaagtttctgctcaggcaaatacatcaaaagctcagttaagtactaaaaaagttctccagagttaaggaacatgggatgcatgcgaaagctcgggaagtgttaaaaattgccaaagaaaaggcacaaaagaagcaaaatgaaacctctacttccaaaaatgcacattcaaaagtccatttcacacgtcgatatcagaatcctagctcaggttcccttccaccccgggttcgtttaaaaccacagaggtacaggaatgaagaaaatgactcttctctgaagacaggacttgagaaaatgcggagtggcaagatggcacccaagccccagtctcgctgcacctctacccgctcagcaggtgaggccccttcagaaaatcagagtccctcaaaaggccctgaagaggccagcagtgaggttcaggacacaaatgaagtgcatgtgcctggtgatcaggatgaaccacagacattgggcaaaaagggcagcaaaaacaatatctctgtttatatgaccctaaatcaaaagaaatcttgactctttccagtggtttcagtgtgtagcattgatagcacagatgatttgaaatcttccaactctgagtgtagttcttctgaaagctttgattttcctccaggcagtatgcatgcaccttccacctcctccacttcctcctcttcaaaggaagagaaaaagctcagtaattccttgaaaatgaaagtcttttccaaaaacgtctctaaatgcgtcacaccagatggcaggaccatatgtgtaggggacattgtttgggccaagatatatggcttcccttggtggccagcccgtattcttactataactgtgagccggaaagataacggccttttagtccgacaggaggcccgtatttcatggtttgggtctccaacaacatctttccttgctctttcacaactctccccctttttagaaaacttccagtcacgctttaataagaagagaaagggcctgtatcgcaaggctatcacagaggcagctaaggctgccaagcagctgacccccgaagtgcgggctttgttgacacagtttgaaacgtgaacatggggcagtaaggtagggcaagaccattgggaagttcaccacagattttctagtctagttaggaataatttctacaaaatagcgcggccagattggagagagaagttgcactcagttggctggctttttaatacttaccttatagccatttttagactgagagcttaaactgaacatataatcaaattttgtgttaaggaagcgagattttagcagtatttttcagttttgaaggtcgaaaccatcccaaggcataggagccatatcctcaactgaaattgaatttttgtagggactgttaattgccatttgtacctaatactg

SEQ ID NO: 16602 - DNA, 409 bp, Homo sapiens
  SIMILAR (357)..(130): 681254mologous to Homo sapiens Human secreted protein sequence SEQ ID NO:103,accession number Y87064,Smith-Waterman Score =263.
cagctctgtgggcagggcatagctgagcaaaaggcagcagaaacttctgtggacttaaacgtccctgtctgatagctctgaagagagcagtggttctcccagcatggtgtttgagctctgagaacggacagacggcctcctcaagtgggtccctgaccccagtgtagcctgactgggaaacacctcccagtaggggctgacagacacctcaaacaggcaggtgtccctctggacaaagcttccagaggaaggatcaggcagcaatatttgctgttctgtagcctctgctggtgatacccaggcaaacagggtctgcagtggacctccagcaaactccaacagacctgcagctgagggacgtgaccattagaaggaaaactagtagacagaaaggaatagcttcaacatc

SEQ ID NO: 16603 - DNA, 274 bp, Homo sapiens
  SIMILAR (1)..(204): 941254mologous to Homo sapiens hepatocellular carcinoma- associated antigen 112,accession number AF258340,Smith-Waterman Score=337.
  misc_feature (1)...(274): n = a,t,c or g
gtgaggnctctgctaacgctggcagctttctccacagccatcgctgccctcaaactttggaatgaagatttccgatatggctactcttattacaacagtgcctgccgcatctccagctcgagtgactggaacactncagcccccactcagagtccagaagaagtcagaaggctacacctatgtacctccttcatggacatgctgangaaaagagaccagaaggaaatgttggaagtgagtggaatctagccatgnctctcctgattattagtgc

SEQ ID NO: 16604 - DNA, 1257 bp, Homo sapiens; identical to SEQ ID NO: 16196
  SIMILAR (526)..(963): 431254mologous to Human endogenous retrovirus env,accession number X82272,Smith-Waterman Score=329.

SEQ ID NO: 16605 - DNA, 1080 bp, Homo sapiens
  SIMILAR (650)..(447): 381254mologous to Arabidopsis thaliana putative protein,accession number AL035523,Smith-Waterman Score=103.
atggagggcttgatcaatcctacactgttgacaaaggcctggattattaccctgaaggaaggggactgcaagtgggaaacactggtcaacgggctgcatgggacccctggcgccctagagtgtcttggtgccctggcagcggctgcgggtctcacccaccccacatggccattgggtgtggcaagtgcatgctgcgaacacaaccaagtaccccagctgggaggggagaaggaaaactcaggtcatgtgaatgaattgaacgatagtaaatatgaagactttattgccaatgaaagtgactctcagctggaaaggagatggagtgggaagtggagcctgggttttttatggatacagcatggggggcagggaggaacatgggtggtttttgaaaaggcaaccattggagcaggaaaacaggaatacatgtcctcaatttgtgctacagttctaggcttgagcgtgggctttgccagactgtgctttcagtggtcaggagcactagttgaaaaatccgagggcttccgttccaagatggccaaacaggaacagctccggtctgcagctcccagtgtgatcaacacagaagacaggtggtttctgcatttccaactgaggtacctggttcatctcattgggactgaaaggaatagcatcaacatcgataaaaaggacatccacaccaaaacaccatctgtaggtcaccatcatcaaagaccaaaggtagataaaacaataaagatggggagaaagcagagcagaaaagctgaaaattctaaacaccagagcacccattctcctccaaaggattgcagctccttgccagaaatggaacaaagcaggaaggagaataactttgaggtgttgagagaagaagccttcagaaagtcagtaacaacaaacttctcagagctaaaggaggatgttcaaacccatcgcaaggaagctaaaaaccttgaaaaaagattagacaaatggctaactagaataaacagtgtagagaagaccttaaatgacctgatggagctgaaaaccatggcacgagaactacatgatgcatgcacaagcttcagtagctga

SEQ ID NO: 16606 - DNA, 1229 bp, Homo sapiens
  SIMILAR (680)..(516): 651254mologous to Homo sapiens Human secreted protein, SEQ ID NO: 7115,accession number G03034,Smith-Waterman Score=173.
ataatccttcgcatttgcaaattaacaatttccaaagaacttttggacagtgggtcatccagactcacaatgacccactataagcacaggtatttttcccactctgcagaggagcagattatttcagaagaattaaatgaaagtgaaatgatttgccagcatcatcacacagctgccaggtgcccctctgagacgaagcttccagaggaaggatcaggaaacaacatttgccgttctgcaatatttgctgttctgcaacctccactggtgatactcaggcaaacagggactggagtggacctccagcaaactccaacagacctgcagctgaaggtcctaactgtaacaaggaaaactaacaaacacaaaggacatccacaccaaaaccccatctgtacatcaccatcaacaaagaccaaagagaatgacttcgacgagctgagagaagaaggcttcagacgatcagtaataacaaacttctccaagctaaaggaggatgttcgaacccatcgcaaagaagctaaaaaccttgaaaaaagattagacgaatggctaactagaataaacagtgtagagaagaccttaaatgacctgatggagctgaaaaccatggcacaagaactacgtgacacatacacaagcttcagtagccgatttgatcaagtggaagaaagggtatcagtgattgaagatcaaatgaatgacatgaagcgagaagagaagtttagagaactcaaagagtacaaagaaatgaacaaagcctccaagaaatatgggactatgtgaaaagaacaaatctacgtttgattggtgtacctgaaaagatacaaacgaccatcagagaatactataaacacctctatgcaaataaactagaaaatctagaagaaatggataaattcctggacacatacacctgcccaagactaaaccaggaagaagttgaatccctgaatagaccagtaacaggctctgaaattgaggcaataattaatagcctaccaacaaaaaaagtccaggaccaggcagattcacagccaaattctaccagagtttttaaaacagtctgcatatcttctcttgggcatacaacagccagtgcagatacccaggatgtctgccagctgccagtcacttctcttctggagcaagggctttcttccaagtcagcaggcttcttagactatgccgtccagcgactttggttgctaggcacagaacccctgtag

SEQ ID NO: 16607 - DNA, 678 bp, Homo sapiens
  SIMILAR (678)..(328): 721254mologous to Homo sapiens Transmembrane domain containing protein clone HP10521,accession number Y32928,Smith- Waterman Score=373.
  misc_feature (1)...(678): n = a,t,c or g
gccctttttttttttttttctgggaacaataacatgagagtttattatcacatgactactcaggaggggacatgaagcggagcaggatggggaaggggtgtaaggaatgggcaagtgctgctggaagcaagggctgtggcccacggtccatgggnccccaggataaactggggctgttgaaagagcctcttttccctcagtctggttcttcttcccagcagtcagatgcagggacgcccggtgcagaagcacccaggcactaataatcaggagaggcatggctagattccactcacttccaacatttccttctggtctcttttcttagggactcacccctttggttgggaacattctcccagntagtacagcccacagaggggccagagatgccagaagcagcagaatccagacacccaagagcatggcctgaaagggttctgaaaaaggccttcagcatgtcccatgaaggaggtacataggtgtagccttctgacttcttctggactctgagtgggggctggagtgctcgcagtcactcgagctggagatgcggcaggcactgttgtaataagagtagccatatcggaaatcttcattccaaagtttgagggcagcgatggctgtggagaaagctgccagcgctagcagagtcctcagtagggcccagtatgtacc

SEQ ID NO: 16608 - DNA, 1757 bp, Homo sapiens
  SIMILAR (1010)..(1597): 771254mologous to Homo sapiens putative p150,accession number U93564,Smith-Waterman Score=774.
cccgggtcgacccacgcgtccgcccgctcgcaggtcccgaggagcgcaggtgaggcggcaccccactcccggtggtcctccgggcctccttccgcacgcaccccgagctgccttcgcacagttggaggagcgtatgagggacccccacccagggatgacactccaggaaggggactgcataggaagccagactgtgtccctgacaatgggaacagccgacagtgatgagatggccccggaggccccacagcacacccacatcggatgtgcacatccaccaggagttttgccctggccaagctcctgctcacctgctgctctgcgctgcggccccgggccacccaggccaggggcagcagccggcctgctggttggcctcgtgggtgatgcagatcgtgctggggatcttgagtgcagtcctaaggaaggatttttctacatccgcgactacaccctcctcgtcacctcgggagctgccatctggaaaaggggctgtggctgtgctggctggagctgctgccttcatttacgagaaacggggtggtacatactgggccctgctgaggactctgctaacgctggcagctttctccacagccatcgctgccctcaaactttggaatgaagatttccgatatggctactcttattacaacagtgcctgccgcatctccagctcgagtgactggaacactccagcccccactcagagtccagaagaagtcagaaggctacacctatgtacctccttcatggacatgctgaaggtaggtggccaaggggaaggggcagcagcaggccttgttcagaacccttcaggccatgctcttgggtgtctggattctgctgcttctggcatctctgacccctctgtggctgtactgctggagaatgttcccaaccaaaggggtgagtccctaaggtgtgtgcctgtgtatttggggcagtggaactgctcaaaggagacaggaatggacagtggacagtttggggaggagaaaggggcccatgacccaagtcccacctattatcatgcctgtctttctacccagtggtggcccagcccagaaagcccctatccccaaccaagtggcccccaagtcaaagagcccaggaatccagggaagtccatatccatgctatgcctttggatcaggtaccatgctgctgattctggtagctccagagctaagctgcccctggaggagagactccgccctttctctcccactcacgattgtcttgcctttcctcttccattagaaaagagaccagaaggaaatgttggaagcaggtgcccctctgggacaaagctaccggaggaaggatcaggcagcaatatttgctgttctgcaatatttcctgttctgcagcctccgctggtgatacctaggcaaacaaggtctggagtggacctccagcaaactccaacagacctgcagctgagggacctgactgatcgcagctccttgccagcaatggaacaaagctggatagagaatgactttgatgagatgacagataggcttcagaaggaggatgttcgaattcatcgcaaggaagctaaaaaccttgaaaaaagattagacaaatggctaactagaataaacagtgtagagaagagcttaaatgacataatggagctgaaaaccatggcacgagaactacgtgaagcatgcacaagcttcagtagccgatttgatcaagtggaagaaagggtatcagtgattgaagatcaaattaatgaaataaagtga

SEQ ID NO: 16609 - DNA, 821 bp, Homo sapiens
  SIMILAR (6)..(719): 831254mologous to Homo sapiens putative p150,accession number U93568,Smith-Waterman Score=1078.
aatcaaaaagagcccgcattgccaagacaatcctaagccaaaagaacaaagctggaggcatcacactacctgacttcaaactatactacaaggctacagtaaccaaaacagcatgctactggtaccaaaacagagatatagaccaatggaacagaacagagccctcagaaataataccacacatctacaaccatctgatctttgacaaacctgacaaaaacaagaaatggggaatggattccctatttaataaatggtgctgggaaaactggctagccatatgtagaaagctgaaactggatcccttccttacaccttatgcaaaaatcaattcaagatggattaaagacttacatgttagacctaaaaccataaaaaccctagaagaaaacctaggtaataccattcaggacataggcatgggcaaagacttcatgacgaaaacacctaaagcagtggcaacaaaagccaaaactgacaaatggcatctaattaaactaaagagcttctgcacagcaaaagaaactaccatcagagtgaactggcaacctacagaatgggagaaaatttttgcaatctacccatctgacaaagggctaataaccagaatctacaaagaactcaaacaaattcacaagaaaaaatcaaacaaccccatcaaaacgtgaatggatgaagctggaaaccataattctcagcaaactatcgcaaggacaaaaatccaaacaccgcatgttctcactcataagtggaaattgaacaatgagaacacatggacacaggaaggggaacatcacacactggggcctgttgtggggtgg

SEQ ID NO: 16610 - DNA, 882 bp, Homo sapiens
  SIMILAR (1501)..(1818): 751254mologous to Mus musculus Pro-Pol-dUTPase polyprotein,accession number Y12713,Smith-Waterman Score=404.
atggcgcgaacctgggaggcagagcttgcagtgagcccagatggcgccactgcactccagcctgggcgacagagcgagactctgtctcaaaaaaaaaaaaaaaaagaagaagaagaagaagaagaagaagaagaggaggaggaggaggaggaggaggaggaggaggaggaggaagaagaagaagaagaagaagaagaagaagaagaagaagaagaagaagaagaagaagaagaagaagaagaagaagaaggagaagaagaagaaggagaagaggaagaagatcaactagacacaatgttatgggactcatcaacaaacctcaccaacacagcgctcagcaaggagaagaccatgttcagttcaagggccaagatcgtgaagcccaatggcgagaagccggatgagtttgaatccggaatctcccaggctcttctggagctggagatgaacttggacctcaaggctcagctctgggagctgaatattacggcagccaaggaaattgaagttggtggtggtcggaaagctatcataatctttgttcccgttcctcaactgaaatctttccagaaaacccaagtccagctaaggagaattctgcctaagccaactcaaaaaagctgtacaaacaataagcaaaagcttcccaggagctgtactctcacagctgtgcatgatgccatccttgaggacttggtcttcccaagcgaaattgtgggcaagagaatccacgtgaaactggatggcagccacctcataaagattcatttggacgaagcacagcagaacaatgtggaacacaaggttgaacccttttctggtgtctataagaagctcatgggcaaggatgttaattttgaattcccagagtttcaattgtaa

SEQ ID NO: 16611 - DNA, 615 bp, Homo sapiens
  SIMILAR (949)..(851): 961254mologous to unidentified cloning vector non-functional lacZ alpha peptide,accession number U13866,Smith-Waterman Score= 165.
atgggcaaggacttcatgtctaaaacaccaaaagcaatggcaacaaaagccaaaattgacaaatgggatctaatcaaactaaagagcttctgcacagcaaaagaaactaccatcagagtgaacaggcaacctacagaatgggagaaaagttttgcaatctactcatctgacaaagggctaatatccagaatctacaatgaactccaacaaatttacaagaaaaaaacaaacaaccccatcaacaagtgggcaaaggacatgaacagacacttctcaaaagaagacatttatgcagccaaaagacacatgaaaaaatgctcatcatcaatggccatcaaagaaatgcaaatcaaaactacaatgagataccatctcacaccagttagaatggcaatcattaaaaagtcaggaaacaacagggacacggatgaagatggaaaccatcactctcagcaaactatcgcaaggacaaaaatccaaacactgtatgttctcactcataggtgggaattgaacaatgagaacacatggacacaggaaggggaacatcacacacaggggcctgttgtggggtggaagacaagggggagggagagcattaggacaaacgcctaa

SEQ ID NO: 16612 - DNA, 1268 bp, Homo sapiens
  SIMILAR (51)..(1268): 991254mologous to Homo sapiens pyruvate dehydrogenase kinase,accession number L42452,Smith-Waterman Score=2109.
gtggaggaacttcgggcgtctaggcgggcctgtgcgccgcccgggcgaggatgcggctgttccggtggctgctgaagcagccggtgcccaagcagatcgagcgctactcgcgcttttcgccgtcgccgctctccatcaaacaattcctggacttcgggagagataatgcatgtgagaaaacttcatatatgtttctacgaaaggaacttcctgtgcggctggctaacacaatgagagaagttaatcttctgccggataatttacttaaccgcccttcagtgggattggttcagagttgggatatgcagagttttcttgaacttttataatatgaaaataagagccctgaggatccacaggtcttggataactttctacaagttctgattaaagtcagagatagacacaatgatgtggttcctacaatggcacaaggagtgattgaatacaaggagaagtttgggtttgatcctttcattagcactaacatccaatattttctggatcggttttataccaaccgcatctctttccgcatgcttattaatcagcacacacttctgtttgggggtgacactaatcctgttcatcctaaacacataggaagtatcgatcccacctgtaacgtggcggatgtggtgaaagatgcatatgaaacagccaagatgctgtgtgaacagtattacctggtagctccagagctggaagttgaagaattcaatgccaaagcgccagacaaacctattcaggtggtttatgtgccctcacatctgtttcatatgctatttgagttgttcaagaactcaatgagagcgacagttgaactctatgaagacagaaaagagggctaccctgctgttaaaaccctcgttactttgggtaaagaagacttatccattaagatcagtgacctaggtggtggtgtcccacttcgaaaaatagatcgtctttttaactacatgtattctactgctcctaggcccagcctggagcctaccagagctgcccctttggctggatttggttatggtttgccaatttcccgtctgtatgctagatattttcaaggagatctgaaactgtattccatggaaggagtgggtactgatgctgtcatttatttgaaggctctttcaagtgagtcatttgagagacttccagtttttaataagtccgcatggcgccattacaagaccacgcctgaagccgatgattggagcaatcccagcagtgaacccagggatgcttcaaaatacaaagcaaaacag

SEQ ID NO: 16613 - DNA, 567 bp, Homo sapiens
  SIMILAR (202)..(321): 921254mologous to Homo sapiens pyruvate dehydrogenase kinase,accession number L42452,Smith-Waterman Score=191.
tcaggatgcagcgaacggcaagtcctcctcccggaaaaggcgcctgcggttgagaagggtcttgagcagcgcggaggatcggattccgggctcctggcctcttcccggtccgcgggcacctcggctacctttcggcagcggagaacccagccagaggcggagccgggcgtctaggcgggtctgtgcgccgcccgggcgaggatgcggctgttccggtggctgctgaagcagccggtgcccaagcagatcgagcgctactcgcgcttttcgccgtcgccgctctccatcaaacaattcctggacttcggtgagtacggggccaagggtccccatgggcccggggccgccgccattcgggctgccaccccggatctccgcagcttcggggtaaagtccggagacacagaaacggcgtctcattgcaggaccctcatcgcaggcgagactccccaaacctgcggtcgttagcttcaaatcggctctgtgaacctcagagcctttagctcttagaaggtagcggccagtttccgcattcttactattcttaaagtttaagggcccagccat

SEQ ID NO: 16614 - DNA, 932 bp, Homo sapiens
  SIMILAR (305)..(367): 801254mologous to Homo sapiens Human secreted protein, SEQ ID NO: 7678,accession number G03597,Smith-Waterman Score=91.
cttatgaatatatgatgagttatttttctctttgatcttgggatgtaagttagtcatcgtttccctttccaaagcatgctgtaggcagttgtaaaacctctcaattcttttcttgttttcctccattttttgatttgccacatttaacaggaagtcaatatattcctctgtcaccatcagttttcccttatggcttaatggaacttctaagccatgtgtactccggacagccaacatagtttttcctctctttcccaccgttatgccagagttcctgaaaccagaatctattgccatggaatgtgcgaaggtctgcagcttcactcctgaagtcagcaagaccacgaacccactggaaggaagaaactccggacacatctgaatatctgaaggaacaaactccggacataccatctttaagaattgtaacactcaccgcgagggtccgcagcttcattcttgatgtcagtgagaccaagaacccactggaaggaataaattccaggcacattttggtgaccacaaagggactttcgcctattgccaagcagtaccaagaggaacaggccaaaaaggaaaagcaagatcagagaaaggccacagccttagtcatgaccctcagacagacaaaccttggtggttcagagaggacagaaaatagagcaggccaatcacctggtagggcttgttaccagtgtggtttggaaggacaccttaaaaaagattgtccatggtatggctttctcaatgttaatctcctgtcccgacagctgtcctcaaggtctattaccatccaaggaattctgggacgggctgtaaccaggtatttctcccacctcctcagttgtaattgggagactttgctacagatagatcaaggccatcaagctacagatggtcttacaaatggaaccccaaatgagctcaactaa

SEQ ID NO: 16615 - DNA, 1527 bp, Homo sapiens
  SIMILAR (328)..(750): 911254mologous to Homo sapiens Human PRO701 protein sequence,accession number Y41740,Smith-Waterman Score=703.
gataccgcacgcggaatttccgggtcgacgatttcgtagagagtgaacttcagccccgtcccctccccactgccacgttttggggcaacccaacccgcgcctgaagcggcttggcttgacctgcggaagcgcgggccgggatggcgtggggagagggaggttgcattggagttttcgaaagacttatctttctgcaggctcgcctctgagctttgtctccttggagccacctcacttagacagcttcggatgtggatgcagatttgaaccatgttgcgtccccagggactgctatggctccctttgttgttcacctctgtctgtgtcatgttaaactccaatgttcttctgtggataactgctcttgccatcaagttcaccctcattgacagccaagcacagtatccagttgtcaacacaaattatggtaaaatccagggcctaagaacaccattacccagtgagatcttgggtccagtggagcagtacttaggggtcccctatgcctcacccccaactggagagaggcggtttcagccaccagaatccccatcctcctggactggcatccgaaatgctactcagttttctgctgtgtgcccccagcacctggatgaaagattcttattgcatgacatgctgcccatctggtttaccaccagtttggatactttgatgacctatgttcaagatcaaaatgaagactgcctttacttaaacatctatgtgcccatggaagatggtgtgtccggaattggtgggttcttggtctcactgacttcacgaatgaagctgccgaccctcgcggtgagtgttacaactcttaaagatggtgtgtccagagtttgttccttcagatactcagatgtgtctggaatttcttccttctggtgggttcgtggtcttgctgacttcaggaatgaagctgcagaccttcgtgttgtgatcattgttgtaagaggagatgggacactgaaggaggatgttactggagttcttcaaagaacagatgaggctaccttcagtaagattcccattggatttatcccactgggacggaccagtagtttgagtcataccctctttgctgaacgtggaaacaaagtccaacatataactgatgccacatttgccattgtgaaaggaaagacagttccacttgatgtcttgcagatgcaagaagaatattacaaagtcttacatcctactgggcacaaccggagcatgccctttcccaagatttatacagcactactactacataatgatgattatgatggtgatgatgaggatggtgatgaggaggatggtgatgatggtgatgatgatgatggttatgatgatggtgatggtgataatatggttgatgaggatggtaaaagtgttggtgattttgatgatgttggtgtagaggatgattacctactagtatcttccttggctgaaaccaagggacagccagaaggcaagagtgaactcacttatttaccttccacagtacagaatagtggagatgagaaagagtaa

SEQ ID NO: 16616 - DNA, 381 bp, Homo sapiens
  SIMILAR (100)..(378): 471254mologous to Homo sapiens PRO2221,accession number AF116695,Smith-Waterman Score=206.
atgaacaaaaaatgtccccacaaaaacctcatccaagggtcagcagcctcaaagatagaaactagacaaattcatgaagatgagaaaggatcaatgaaaaaaaacactgaaaacccaaaagaccagagtgcctgttttccaaataattgcaacacctccccaacaagggtgcagtactggatggagaatgagatggatgaattgacagaagtagacttcagaaggtgggcaagaacaaactttgctgaggtaaaggctcatgttctaacccaatgcaaagaagctaagaaccttgatgaaaggctacaggagatgctaactagaataaccagtttagagaggaacataaatgacctgatggagctgaaaaataaagcatga

SEQ ID NO: 16617 - DNA, 990 bp, Homo sapiens
  SIMILAR (74)..(505): 291254mologous to Acanthamoeba castellanii myosin I heavy chain kinase,accession number U67056,Smith-Waterman Score=80.
atgccgtggccagcagtggttgggatttcacggactttagacagctgccggtgtcagggtcccgggggcttttcccggccgccaccccccccgccaaatggagccatcagctccctctccccagtcatggagaccgcactgctgtccttccttccaggccaggagcagcccccgccatgtgatgagctgggacggaaaatcaaatctcctggggagaaacggcatctgtgtccaaatgagctttccgagtccaggtgcaaatggtttggggagctccaggagcaaaaatacggtttcaattttccaaagcaggccgagatccccgagtttaacccacatggccgagaagcgagcccccgcgcaggctgtgtggtaaccgagggcaccgtggcagtgaggcaggagcagtcggcgcccacacgccggatctgccgcacccgctgccacccacagtcctctggcgagctctcagatgggaggaacaggtgcccccacgatgcctcggaaagtaaccatggccgccctcatggcagctcacctgttttggggtattttattcgcatctgcagagtagagaggaacattccagaatgtgaagacttcagaacgtggaccctgggttctggagagaagcccagctcgggaaacaaatgctccttccagcagcagcagagagctgtagagccggggctctgggcagcttctgaatccagctcccaggccacagatcacagggacaggacgggagcctcccacacagacgccaggcagcaggaccccggaaattcacactcggattttgtccggcattcccactccctgccctgcttggagaggcaggaccgcaggtctgccggccacaacggcagcgccacagtgcccggcacagaggcctgcggtcgcgcatacaaagcacccgccggccattatcattccggagccggccagagcctcccggctgcatctcatcggtcattcagcagcccgtaa

SEQ ID NO: 16618 - DNA, 2055 bp, Homo sapiens
  SIMILAR (1498)..(1734): 981254mologous to Homo sapiens c394H11.1 (similar to SOX (SRY (sex determining region Y))),accession number Z99757,Smith- Waterman Score=431.
atgtccggcaaaggcaggatcaggccgtgccacgcggccgccggcctcaccccagtgccctccacgctgggcggcaaggagggcggccgcgagcccacccggacccccgagcggcaggggcagcccgtcgtgccaccaggcgtcagcaggcttcagtcagaatggaaacagccatgcccttcgcgaatcccgtcgcggcctctgggaaccgagctcctcgtcttccttcctggagggcctccttggcgaatcccagagctggtttctgggtggctgtgcaatgccaggaagccgacggcatctttcgggccttggcatggagccaggctgggagcggatgaaagcgccccgcaggagccggcagagctgtctggttggaggaaagtttctagggagaaaatggctgtgggagtgacagccacgcagacatctaatcagtgtgggattaagccggcacaaacagggagccgggaaggctccggcaggggcgatgaagccccggggcgagagcgccgtacagcacggtgtccggcgcggaagagccccgggcctgggctggcctgcgttctcgtgatcaaccgggaaggagagccccacaggggggaaagtacagtatctgtactgaaaaatctgttgcctgggcttaataacagcttggagcccctggaggctccgggcacccccggcttgtggacgtatcactcgggtccctgccgctttgcctcctcccctttggtctgtctcagggttcctgggccggcagccacgaggggcagacagaggcgccagtgccctcactctcgggtgaagacgcccgttgacccccagcccattcgacccggccacaagcctcgggccaccctgctccccaccttgtccagcctgaagcccccaggaccccggtccctgtccgtcccaggccccagcctcatggccctgccgagctccccagtctggtcccggccacccacagcccacatctgtgcctttggtcatagcctcgtccccatcagaaattcacactcggattttgtccggcattcccactccctgccctgcttggagaggcaggaccgcaggtctgccggccccaacggcagcgccacagtgcccggcacagaggcctgctggtcgcgcatacaaagcacccgccggccattatcattccggagccggccagagcctcccggctgcatctcatcggtcattcagcagaaaaacatggaaacaatgaacagacgcaagcacgcagagccgcacgccctgacggtgcaccccgagccagataagcaaaagggtcatcgcatggcccgaggtggtaataataccaccaacagcacaacagtacgtcaggcacctggggggcactgctgggggaaggtcctgatctcaccaagttccccagaactccagggtcattcccatcgtgcagggcgcagccacggggcgctgtggacggcaggcccctgctcccccaagtcctgccgcacaggcggttggagcttgctgagcgagagcgagaagcggcccttcgtggaggaggcagagcgccttcgcgtgcagcacaagaaggaccaccccgactacaagtaccagccacggcgcaggaagagcgccaaagccggccacagcgactccgactcgggcgcggagctgggaccccaccctggcggcggtgccgtgtacaaggctgaagcagggcttggagatgggcaccaccatggcgaccacacagtttttagagtgattgtgaagatggcctgtggctctccgctcctcagggaccagcatggaaatccaacacgccatgtttgcggctccctctggctgcctgtggagcatgcattccggaaggacagtggtctggagacagcccgcgggctgcgtgggagtccaggtgcccggtgtgccagggtcagcccagaagccacaggggacccagatggccccagtctgcccacagcaccgctcccggcctcacctccccacgacggggaccacagcggggctggcatacactgggcgctcaacgattgctcccacaagctgccctaa

SEQ ID NO: 16619 - DNA, 606 bp, Homo sapiens
  SIMILAR (358)..(603): 671254mologous to Arabidopsis thaliana ubiquinone/menaquinone biosynthesis methyltransferase-like,accession number AB019233,Smith-Waterman Score=276.
atgggggtaggcgatgaactcgggtctctcgtgctctccgtggtgcgacttcaggtacacattcagcatgctgactgccaccccggggagcgcgacgaagaaggccgccccagctgtgggcgggaccgacccagcagccgagaaaccgaggacacaccaactaccgccatttttgatctggactgccgcagcgccggaagcggaagtggaaaattggctctgggggcggtactacaacctccaaaggaagttactattgggcgccgccctcccactggcattaacctgagcactatcatccgggacgacggagtccttgtcaaaatcctcggcatctcgggcaagagagagcatgcgctctgcacctcccttcaggctttaccgtttccttcgctttatgatctatatagcttccaggtcatccctgtcctgggagaggtcatcgctggagactggaagtcctatcagtaccttgtagagagtatccgaaggtttccgtctcaggaagagttcaaggacatgatagaagatgcaggctttcacaaggtgacttacgaaagtctaacatcaggcattgtggccattcattctggcttcaaactttaa

SEQ ID NO: 16620 - DNA, 1108 bp, Homo sapiens
  SIMILAR (82)..(597): 481254mologous to Arabidopsis thaliana ubiquinone/menaquinone biosynthesis methyltransferase-like,accession number AB019233,Smith-Waterman Score=346.
cagcatcagagaaaacagaagaggcagttaagggcccaacaaaatttatcctgggaagaaattgccaaagagtaccagaatgaagaagattccttgggcgggtctcgtgtcgtggtgtgtgacatcaacaaggagatgctaaaggttggaaagcagaaagccttggctcaaggatacagagctggacttgcatgggtattaggagatgctgaagaactgccctttgatgatgacaagtttgatatttacaccattgcctttgggatccggaatgtcacacacattgatcaggcactccaggaagctcatcgggtgctgaaaccaggaggacggtttctctgtctggaatttagccaagtgaacaatcccctcatatccaggctttatgatctatatagcttccagggtcatccctgtcctgggagaggtcatcgctggagactggaagtcctatcagtaccttgtagagaagtatccgaaggtttccgtctcaggaaagagttcaaggaccatgatagaagatgcaggctttccacaaggtgacttacgaaagtctaacatcagggcattgtggccattcattctggcttcaaactttaattcctttcctatcatggagcatgaaccagtcatatcctgtttgaaagcctggaactggaaggataatctggcaaatgggacagcagcagagcatctcctcttaaggatacgtgccttggactcatgtttgaatcgaacagtctcaaagtggaagaacaaattcttgtcacttttttaccagctttctttggagctgcttcagtccatctcccagaggcattttggtctgtatctttgctcaactgctaatttctcttggctgtagggtgtgtggttaaggtacaaccacccctaaagctcagttttgaagtgagtgtatttatagcttctctgctggtgctgccttctagagggatgatagatcatttgaacccagtgacaatttttaaccagaaaatttaattgtacctgaatcaacctttcagcctaggacgaagtctaggcccaagtcagagtattaatgatcatgagaattgtgtgctgaaccagtaaacgagtttaccttttg

SEQ ID NO: 16621 - DNA, 933 bp, Homo sapiens
  SIMILAR (787)..(933): 691254mologous to Arabidopsis thaliana ubiquinone/menaquinone biosynthesis methyltransferase-like,accession number AB019233,Smith-Waterman Score=169.
ttttttttttttttctaagtggaagttatttatttaagccaatctccttgcccaacaaggcaaaagggatggggagacccagttatacccagtcatcattttgataccaagtaaaagaaggtgagcttaaaggtccccatatactttttctggtcccaatgtgcaaaaattaaggtccaaaaccagtgcttgttgggtgcccctggtgccccgggtaatggtcccagattctctttattcatcttcgtaagcccagttggaaagtggattcaacatgagggttatgtgaatagagtaatggttaccatctcccccagggaaaccggcttggtcctgatgtcggagatgctttgtaggcgatgaactccgggtctctccgtgctctcccgtggttgcgacttccaggtacacatttcagcattgctgactggccaccccgggggaagcgcgaccgaagaaaggtgaagagtcttccacatggcgaagctgagccctctttggccatgggcgaccactcgaacatagggccggcccagctggtggggcggggaacgacccagcaagccgagaaaccggaggacaccaccaactaccgccatttttgatctggactgccgcagcgccggaagcggaagtggaaaattggctctgggggcggtactacaacctccaaaggaagttactattgggcgccgccctcccactggcattaacctgagcactatcatccgggacgacggagtccttgtcaaaatcctcggcatctcgggcaagagagagcatgcgctctgcacctcccttcaggctttaccgtttccttcgctttatgatctatatagcttccaggtcatccctgtcctgggagaggtcatcgctggagactggaagtcctatcagtaccttgtagagagtatccgaaggtttccgtctcag

SEQ ID NO: 16622 - DNA, 468 bp, Homo sapiens
  SIMILAR (468)..(376): 1001254mologous to Homo sapiens bA120I11.1 (Novel protein),accession number AL357560,Smith-Waterman Score=158.
ttatttgaaggatcttgcatccatgcaggtcgactctagaggatccctaaagtaggtgatcttttccccattcacagatgggaaactgagcttcaggatagtcacatgacttgtccaagttctcatgattaggaaacgttggagctgggctttgaactggactgcaaagcttgtgctcttgacgaaataggaaggcagaggcttgggtactccctttggagtgtgttgctggaacttgtgcagggacttagggagtctttttcttttggccttgctctcctctctgttgactttgtgcttaggtaggcatcctgtggtggcactaatggctgccagcagctctaggctttcttcctcccattctgcatcacaaagctcctcttcctcgtccccggagtcagactcgggctccaccggcacctcgtcatcctcgcctatggttccgattaagccgaggtccgcaagcat

SEQ ID NO: 16623 - DNA, 677 bp, Homo sapiens
  SIMILAR (524)..(147): 951254mologous to Homo sapiens Human secreted protein, SEQ ID NO: 6288,accession number G02207,Smith-Waterman Score=607.
gggaaaggttcatgtcctggaacgaagaggttttcatcgtactgagatgcatcttcaaaaaatcctcctgcttcctgtcctttcttcttcttcttcttccgatcctttactttgagtgtatctgctttggtgaggatgttctcatcagctgatgagtagtcagtctccgaggcttcatcttctgagccttcctcatcattctctcgaaggtcttcctgctcctttggttcagagccctcctttgcttctttctccttttccagcttcccagacttggcttctttatcctcagttttccttctctttcgagctttctcaatcttctcatgtaatgtagtggctgccctcttcttcatgagtgggctcatgacatcagccagggcccagctgccatcgtacgtcccctccttctcagtgaaaacgaaatcagggttgaaatcagcactgcggttcttccccaaagctttttgtcgtctgcccagcacaatgggcccctcctcttcctcgtccccggagtccgactcggcgctccaccggcacctcgtcatcctagacgtatggttacagattaagccgagagtccgcaagccatgttgtcgcagaagccacttccggaagcgagcacagcctgcggtccggcccttaacttttcgcagcctcctcgtcgtcttacgaaa

SEQ ID NO: 16624 - DNA, 439 bp, Homo sapiens
  SIMILAR (425)..(306): 971254mologous to Homo sapiens Dickkopf-3,accession number AB033421,Smith-Waterman Score=193.
tgccttcttcgtctcccacagatgtgataactgtctctgaaaagaccatttgtccagtctggttgttggttatcttgtgaatttctcggtgcacatggatggtattatttccaaccttcgtgtctgtgttggtctcattgtgatagctgggaggtaagtttgccaggttcacttctgatgatgctttagcagcagcttcttctgcctccatctcttccaccgcgctgcgcaatttgtgctgcgtgtcctccatcagttcctcaacctcgcggaacatctcattgagggtggcctcctcctgcgcggtagctgagagccgggccgggcttgactggagccgaggtcgccgtcggagcgggcgcgggggccgtggggaccgccgccgccagcagcaggcacagcaaagtggccccaagccactgcatctccgctctgcgcc

SEQ ID NO: 16625 - DNA, 949 bp, Homo sapiens
  SIMILAR (154)..(309): 901254mologous to Homo sapiens Dickkopf-3,accession number AB033421,Smith-Waterman Score=243.
atgtcttacatggtggcaggcaaaagagcaggtgcaggggaactgccctttataaaaccatcagacctgctctttaaggtggagtctgtttgctgcagcaaagccaaggggaatgatggttccgggcagtcacagaggcggcctactttaaggagaaacacttctgcaaatatggaggcagaagaagctgctgctaaagcatcatcagaagtgaacctggcaaacttacctcccagctatcacaatgagaccaacacagacacgaaggttggaaataataccatccatgtgcaccgagaaattcacaaggaacatagcactagcttgccccgtggtgtgcaatgtctctgacatgatttggcaggactctgagagcaaactgcctaagactgtgtgctgtgcagatattcagggtcgttgtgagcatcccgttgtgaatatcaaggagcctgccccctcagctcatctcaactcctgtatgcaagggcacagcggcttcacaaaagagcctcacttttattcaagtgcgcaggtggtcatggtcctggtcagagatgagaaagttttaatggtctggatagaagatcaaatcagccacaacgtttccttaagccgaagccagagcaaggctctaactctcttcaattctctgaaagctgagacaggtgagggagctgcagccaaaaagctggaagctagccgagggtggtttatgaggtttaagaaaagaagctatctccgtaacataaaagtactagacgaagcagcaagtgctgatgtagaagctgcagtgagttatccagaagatctagctgggataattgataaagctagctacactaaacaacacattttcactgtaaaccaaatagccatctattggaaaaagatgctgtctaggactttcttagctagagagtacgaggcatcgccttttcttaaagcttga

SEQ ID NO: 16626 - DNA, 381 bp, Homo sapiens
  SIMILAR (223)..(333): 941254mologous to Homo sapiens Human secreted protein, SEQ ID NO: 5937,accession number G01856,Smith-Waterman Score=182.
atgaatctcacagatacaacgctgagtgaaagaagccagacacagaaagatgaacaaacaggaaaaaccgtggtgaccaccagagtggacacctctagcgtccgtaattccaaggcgctggcaggctataacttgaacctcggaatggctttagaagtcatgaactttaccagaaatataggcacttttgggctcagcctttcccaattcagtagccttaagatagtcacaggaatccgatcatgggacacaaacctgattgaatgcaacttggaccaagaactcaaactttttgtatctcgacactctgcaagattctctcctgaagtcccagacatgaactgtgagctgaatagtctggttcacatcctgattccgtag

SEQ ID NO: 16627 - DNA, 7568 bp, Homo sapiens
  SIMILAR (525)..(7565): 1001254mologous to Homo sapiens microtubule-associated protein 1B,accession number L06237,Smith-Waterman Score=12052.
agggggaggcggcgcgcggcgccagaggaggggggacgcagggggcggagcggagacagcaccttcggagataatcctttctcctgccgcagaggagaggagcggccggagcgagacacttcgccgaggcacagcagccggcaggatggcgaccgtggtggtggaagccaccgaggccggagccgtccggcagcatcgccaacccggcggcgtccacctcgcctagcctgtcgcaccgcttccttgacagcaagttctacttgctggttggtcgtcggcgagatcgtgaccgaggagcacctgcgacgtgccatcggaagcatcgagctcggaatccgatcatgggacacaaacctgattgaatgcaacttgggaccaagaactcaaactttttgtatctcgacactctgcaagattctctcctgaagtcccagggacaaaagatcctttcatcaccgaagtgaacgtttttaggaaacagtgggtcctgattcaaaccctttttgatggaaggcagttcaggcaccgaggtgcgcttaatgatcactgatgctgcccgacacaagctgctcgtgctgaccgggcagtgctttgaaaataccggagagctcattctccagtccggctctttctccttccagaacttcatagagattttcaccgatcaagagatcggggagttactaagcaccacccatcctgccaacaaagccagcttaaccctgttctgtcctgaagaaggggactggaagaactccaatcttgacagacacaatctccaagacttcatcaatattaaactcaattcagcttctatcttgccagaaatggaaggactttctgagtttaccgagtatctctcagaatcagtggaagtcccatctccctttgacatcttggaacctcccacatcgggtggatttctgaagctctccaagccctgctgttatatttttccaggagggaggggcgattctgccttgtttgcagtgaatggtttcaatatgctcatcaatggcggatcagagagaaaatcctgcttctggaagctcatccgacacttagaccgagtggactccatcctgctcacccacattggggatgacaatttgcctggaataaacagcatgttacagcggaaaattgcagagctcgaggaagaacagtcccagggctccaccacaaatagtgactggatgaaaaacctcatctcccctgacttaggagttgtatttctcaatgtacctgaaaatctcaaaaatccagagccaaacatcaagatgaagagaagcatagaagaagcctgcttcactctccagtacctaaacaaattgtccatgaaaccagaacctctgtttagaagtgtaggcaatactattgatcctgtcattcttttccaaaaaatgggagtaggtaaacttgagatgtatgtgcttaatccagtcaagagcagcaaggaaatgcagtattttatgcagcagtggactggtaccaacaaagacaaggctgaattcattctgcctaatggtcaagaagtagatctcccgatttcctacttaacttcagtctcatctttgattgtgtggcatccagcaaaccctgcggagaaaatcatccgagtcctgtttcctgggaacagcacccagtacaacatcctggaagggttggaaaagctcaaacatctagactttctgaagcagccactggccacccaaaaggatctcactggccaggtgcccactcctgtggtgaaacaaacaaaactgaaacagagggctgatagccgagaaagtctgaagccagccgcaaaaccacttcctagcaaatccgtgcgcaaggagtcaaaagaagaaacccctgaggtcacaaaagtgaatcacgtggaaaagccacccaaagttgaaagcaaagaaaaggtaatggtgaaaaaagacaagccagtaaaaacagagaccaaaccttcagtgactgaaaaggaggttcccagcaaagaagagccatctccagtgaaagccgaggtggctgagaagcaagccacagatgtcaaacccaaagctgccaaggagaagacggtgaaaaaggaaacaaaggtaaagcctgaagacaagaaagaggagaaagaaaagccaaagaaagaagtggctaaaaaggaggacaaaacacctatcaagaaggaggaaaaaccaaaaaaggaagaggtgaaaaaagaagtcaaaaaagagatcaagaaagaagagaaaaaagaacccaagaaagaggttaagaaagaaacaccgccaaaggaagtcaagaaggaagttaagaaggaagagaagaaggaagtgaaaaaggaagaaaaggaacccaaaaaagaaattaagaagctccctaaagacgcaaagaaatcatctactcctctgtctgaagcaaaaaaaccagctgctttaaaaccaaaagtacccaagaaggaagagtctgtcaagaaagattctgttgctgccggaaagccaaaggagaaggggaaaataaaagtcattaagaaggaaggcaaggccgcagaggctgtcgctgcagctgtcggcactggagccaccacagcagctgtcatggcggcagctggaatagcagccattggccctgccaaagaactcgaagctgagaggtcccttatgtcatctcctgaggatctaaccaaggactttgaagagttaaaggctgaagaggtcgatgtaacaaaggacatcaagcctcagctggagctaatcgaagacgaagagaaactgaaggaaactgagccagtcgaagcctacgtcatccagaaggagagagaagtcaccaaaggtcctgccgagtcccctgatgagggaatcactaccactgaaggggagggcgaatgtgaacagacacctgaggagctggagcccgtcgagaagcagggagtagacgacattgaaaaatttgaagatgaaggagccggttttgaagaatcttcagagactggagactatgaagagaaggcagaaactgaggaggctgaggagccagaagaggatggggaggaacacgtatgtgtgagcgcctccaagcacagccccactgaggatgaggaaagtgccaaggcggaggctgatgcatacatcagggagaagagggagtctgtggccagtggggatgaccgagccgaagaagacatggatgaggccattgagaaaggagaggctgaacaatctgaagaggaggctgatgaggaggacaaagctgaagatgccagagaggaggaatatgagccggaaaaaatggaagctgaagactatgtgatggctgtggtcgacaaggctgcagaggctggtggtgccgaggagcagtatggattcctcaccacaccaaccaagcaactaggagcccagtctcctggccgagaacctgcatcttcaattcatgatgagactttacctggaggctcagagagcgaggccaccgcttctgatgaggagaatcgagaagaccagcctgaggaattcactgccacctctggctacactcagtctactattgagatatccagtgagcccacccccatggatgagatgtctacccctcgagacgtgatgagtgatgagaccaacaatgaagagacggagtccccttctcaggaattcgtaaatatcaccaaatatgaatcttcattgtattctcaggaatactctaaacctgctgatgttacaccgctcaacggattttctgaaggatcaaaaacagatgccactgatggcaaggattacaatgcttcagcctctaccatatcaccaccctcttccatggaggaagacaaattcagcagatctgctttacgtgatgcttactgctctgaagtgaaagccagcaccactttggacatcaaagatagcatctcagctgtttcaagtgaaaaggtcagcccatcgaagagcccgtccctgagtccatctccaccatcacccttagaaaagacccccctgggtgaacgtagtgtgaacttctctctgacgcccaatgagattaaagtctctgcagaggcagaagtagccccggtgtctcctgaggtgacccaagaagtagttgaagaacattgtgctagtcctgaggacaagactctggaagtggtgtcaccatctcagtccgtgactggcagtgctggtcacacaccttactatcaatctcctactgacgagaaatccagtcatctccctacagaagtcattgaaaaaccaccagcagttccagtgagttttgaattcagtgatgccaaagatgagaatgaaagggcttcagtaagccccatggatgagcccgtgcctgactcagagtctcctattgaaaaagttttgtctcctttacgcagcccgcccctcattggatccgagtctgcttatgaaagttttctaagtgctgatgacaaggcttctggcagaggtgccgaaagtccttttgaagaaaagagtggaaaacaaggctctccagaccaagtaagtccagtttctgaaatgacttctactagtctttaccaagacaaacaggaagggaaaagcacagactttgcaccaataaaagaagactttggccaagaaaagaaaactgatgatgttgaagccatgagttctcaaccagcactggctctggatgaaaggaaattaggagatgtttctcccacacaaatagatgtcagtcagtttggatcttttaaagaagacactaagatgtccatttctgaaggtactgtctcagacaagtcagctactcctgttgatgagggcgtagcagaagacacgtactctcatatggagggtgtggcctcagtgtccacagcctcagtggctacgagctcatttccagagccaacaacagatgatgtgtctccatctctgcatgctgaggttggctccccacattccacagaagtagatgactccctttcagtgtctgttgtgcaaacacctaccacattccaggaaacagaaatgtctccatctaaagaagaatgcccaagaccgatgtcaatttctccaccagatttctcccctaaaactgcaaagtccaggacacccgttcaagatcacagatctgaacagtcctcaatgtctattgaatttggccaagaatctcctgagcaatcccttgctatggacttcagtcgacagtctccagatcaccctacagtgggtgcaggcgtgcttcacatcactgaaaatgggccaactgaagtggactacagtccttctgacatgcaggactccagtttatcacataagataccacctatggaggagccgtcctacacccaagataatgatctttctgagctcatctcagtatctcaggtagaggcctccccgtccacctcttctgctcataccccttctcagatcgcttctcctctccaagaagatactctatccgatgttgctcctcccagagatatgtccttatatgcctcactcacctctgaaaaagtgcaaagtctggaaggagagaagctctctccaaaatctgatatctctccactcaccccacgagagtcctctcctttatattcacctactttttcagattctacctctgcagtcaaagagaaaacagcaacttgccacagttcctcttctccaccaatagatgcagcatccgcagagccctatggcttccgtgcctcagtgttattcgatacaatgcaacaccatctagccttgaatagagatttgtccacacctggcctggagaaggacagtggagggaagacacctggtgactttagctatgcctatcaaaagcctgaggaaacaaccaggtccccagatgaagaagattatgactatgagtcttatgagaagaccacccggacctcagatgtgggtggctattactatgagaagatagagagaaccacaaaatctccaagtgacagtggctactcctatgagaccattgggaaaactaccaagacccctgaagatggtgactattcctatgaaattattgagaagaccacacggacccctgaagagggcgggtactcatatgacataagtgaaaagaccaccagcccccccgaagtgagtggttacagctatgaaaagactgagaggtctagaaggcttctggatgacatcagcaatggctatgatgactctgaggatggtggccacacacttggggaccccagctactcttatgaaaccactgagaaaattaccagtttccctgagtctgaaggttattcctatgagacatctacaaagacaacacgaacccctgatacttccacatactgttacgagactgcagagaaaatcactagaacccctcaggcatccacatattcctacgagacttcagacctatgctacactgcagaaaagaagtccccctcagaagcccgtcaggatgtcgatttatgcctcgtgtcctcttgtgaatacaagcaccccaagacagagctttcaccctctttcattaatcccaatcctcttgagtggtttgccagtgaagaacccactgaagaatctgaaaagcccctcactcaatcagggggagccccaccgcctccaggaggaaagcaacagggccgacagtgtgatgaaacccctcccacctcagtcagcgagtcagccccatcccagaccgactctgatgttcccccggagactgaagagtgcccctccatcacggccgatgccaatatcgactctgaagacgagtcggaaaccatccccacagacaaaactgtcacgtacaaacacatggacccacctccagctcccgtgcaagaccgcagcccttcgccacgccaccctgatgtgtccatggtggacccagaggccttggccattgagcagaacctgggcaaagctctaaagaaagatctgaaagagaagaccaaaaccaaaaagccaggtacaaagaccaagtcatcttcacctgtcaaaaagagtgatgggaagtctaagcccttggcagcttcaccaaaaccagcgggcttgaaagaatcctcggataaagtgtccagggtggcttctcctaagaagaaagaatctgtggaaaaggcagcaaaacccaccaccactcctgaggtcaaagctgcacgtggggaagagaaagacaaggagaccaagaatgctgccaatgcctctgcatccaagtcggccaagaccgccactgcaggaccaggaactaccaagacgaccaagtcatctgctgtgcccccaggcctccctgtgtatttggacctgtgctacattcctaaccacagcaatagtaagaatgttgatgtggaatttttcaagagagtgcggtcttcctactacgtggtgagtgggaatgaccctgctgctgaggagcccagccgggctgtcctggacgctttgttggaaggaaaggctcagtggggcagcaacatgcaggtgacactgatcccaactcatgactcagaagtgatgagggaatggtaccaggagacccatgagaaacagcaagatctcaacatcatggttttagcaagcagcagcacagtggttatgcaagatgaatccttccctgcatgcaagattgaactgtaa

SEQ ID NO: 16628 - DNA, 936 bp, Homo sapiens
  SIMILAR (607)..(933): 411254mologous to Mus musculus StAR-related protein 1- 4E,accession number AY007808,Smith-Waterman Score=233.
atgaatttggaccttatccctcactgtgatccttcacttcgccttctgtttcaatttctcccagtcggtttactgcttgacaaaattctttcacaattaagtgatcacaggacaacccaacccaaccaatccaaacctgcaggcaaccccagacatccagggaaccctggcgcggctcgggccagcccacacccacgcggaatcattccatttatcggccaccaatcagccctccacacgctcccgcgccagccaatccgaacaagcgcacgttgttccggccacctcctctcagccccccctccccggagcccccgggatcgggccagggggcggggctgggggctcggcccgccttgccctgaggcgctgggtgccttccagttggctgcgaccagcggtaaaggtaaggagagccacggagccgcggcaggattggggtggcccgtgtggagggcgactgtggcgcccggggcgtcctgccagagagaagtaatggaaggcctgtctgatgttgcttcttttgcaactaaacttaaaaacactctcatccagtaccatagcattgaagaagataagtggcgagttgctaagaaaacgaattgctgtgtgatgcgttacactactgctggtcagctttggaatataatttccccaagagaatttgttgatttctcctatactgtgggctataaagaagggcttttatcttgtggaataagtcttgactgggatgaaaagagaccagaatttgttcgaggatataaccatccctgtggttggttttgtgttccacttaaagacaacccaaaccagagtcttttgacaggatatattcagacagatctgcgtgggatgattcctcagtctgcggtagatacagccatggcaagcactttaaccaacttctatggtgatttacgaaaagctttatga

SEQ ID NO: 16629 - DNA, 2850 bp, Homo sapiens
  SIMILAR (2808)..(2849): 1001254mologous to Homo sapiens putative p150,accession number U93564,Smith-Waterman Score=87.
atggctgaggaggcctcacaatcatggaggaaggcgaaggaagaacaaaggcacatcttacatggcagcaggcaagagagtgtgtgcaagcgaaccgtcctttataaaaccatcaaatttcaattggaaaaaactactttaaagttcatatggaaccaaaaaagagcccacatcgccaagtcaatcctaagccaaaagaacaaagccgtaggcatcacgctacccgatttcaaactatactacaaggctacagtaaccaaaacagcatggtactggtaccaaaacagagatatagatcaatggaacagaacagagccctcagaaataatgccgcatatctacaaccatctgatctttgacaaacctgacaaaaacaagaaatggggaaaggattccctatttaataaatggtgctggcaaaactggctagccatatgtagaaagctgaaactggatcccttccttacaccttatacaaaaattaattcaagatggataaaagacttacatgttagacctaaaaccataaaaaccctagaagaaaacctaggcaataccattcaggacataggcacgggcaaggacttcatgtctaaaacaccaaaagcaatggcaacaaaagacaaaattgacaaatgggatctaattaaattaaagagtttctgcacagcaaaagaaactaccatcagagtgaacaggcaacctacgaaatgggagaaaattttcacaacctactcatctgacaaagggctaatatccagaatctacaatgaactcaaacaaatttacaagaaaaaaacaaacaaccccatcaaaaagtgggcgaaggatttgaacagacacttctcaaaagaagatatttatgcagccaaaagacacatgaaaaaatgctcatcatcactggccatcagagaaatgcaaatcaaaaccacaatgagataccatctcacaccagttagaatggcgatcattaaaaattcaggaaacaacagatgggacacaacagtcatgggctgtctcagctgcccaaagcctgaggcagaccacatgagagctgtggcttcttcttggattcagagagaagtaatggaaggcctgtctgatgttgcttcttttgcaactaaacttaaaaacactctcatccagtaccatagcattgaagaagataagtggcgagttgctaagaaaacgcatgtaaacagaaccaacgacaaaaaccatgtgattatctcaatagatgcagaaaaggcctctggcaaaattcaacaacccttcatgctaaaaactctcaataaactaggtattgataggacgtatctcaaaataataagagctatatatgacaaacccacagacaatatcatactgaatgggcaaaaactggaagcattccctttgaaacctggcacaagacagggatgccctctctcaccactcctattcaacatagtgttggaagttctggccagggtaatcaggcaggagaaggaaataaagggtgttcaattaggaaaagaggaagtcaaattgtccctgtttgcagatgacatgattgtatatctagaaaaccccatcgtctcaccccaaaatctccttaaactgataggcaacttcagcaaggtctcaggatacaaaatcaatgtgcaaaaatcacaagcattcttatacaccaataagagacaaacagagagccaaatcatgagtgaactcccattcacaattgcttcaaagagaataaaatacctaggaatccaacttacaagggatgtgaaggacctcttcaaggagaactacaaaccactgctcaaggaaataaaagaggatacaaacaaatggaagaacattccatgctcatgggtaggaagaatcaatatcatgaaaatggccatactgcccaaggtaatttatagattcaatgccatccccatcaagctaccaatgactttcttcacagaattggataaaactactttaaagttcatatggaaccaaaagagagcccacaattccaagtcaatcctaagccaaaagaacaaagctggaggcatcacactacctgacttcaaactatactacaaggctacagtaaccaaaacagtatggtactggtaccaaaacagagatatagatcaatggaacagaacagagccctcagaaataatgctgcttatctacaactatctgatctttgacaaacctgacaaaaacaagaaatggggaaaggattccctatttaataaatggtgctgggaaaactggctagccatatgtagaaagctgaaactggatcccttccttacatcttatgcaaaaatcaattcaagatggattaaagacttaaatgttcgacctaaaaccataaaaaccctagaagaaaacctaggcaataccattcaggacataggcatgggcaaggacttcatgtctaaaacacgaaaagcaatggcaacaaaagccaaaattgacaaatggaatctcattaaactaaagagcttcttcacagcaaaagaaactaccatcagagtgaacaggcaacctacagaatgggagaacatttttgcaatctactcatctgacaaagggctaatatccagaatctacaatgaactcaagcaaatttacaagaaaaaaacaaacaaccccatcaaaaagtgggagaaggatatgaacagacacttctcaaaagaagacatttatgcagccaaaagacacatgaaaaaatgcccatcatcactgaccatcagagaaatgcaaatcaaaaccacaatgagataccatctcacaccagttagaatggcgatcattaaaagtcaggaaacaacaggtgctggagaggatgtggagaaatag

SEQ ID NO: 16630 - DNA, 536 bp, Homo sapiens
  SIMILAR (301)..(525): 311254mologous to Mus musculus StAR-related protein 1- 4E,accession number AY007808,Smith-Waterman Score=111.
tttcgtgcggggctgggggctcggcccgccttgccctgaggcgctgggtgccttccagttggctgcgaccagcggtgacttacaagttggctgctgtcgcctgcgcatcggcgggccgggaggctgagcagtactgttgagagcggtgtgaggtgcttggtagcgcgccgtagctgcttccacgtccttgcttcacctcaggtaaagagagaagtaatggaaggcctgtctgatgttgcttcttttgcaactaaacttaaaaacactctcatccagtaccatatcattgaagaagataagtggcgagttgctaaaaaaacgaaagatgtaactgtttggagaaaaccctcacaagaatttaatggatatctctacaaagcccaaggtgttatagatgaccttgtctatagtataatagaccatatacgcccagggccttgtcgtttggattgggacagcttgatgacttctttggatattctggagaactttgaagagaatagctgtgtgatgcgttacactactgctggtcagct

SEQ ID NO: 16631 - DNA, 888 bp, Homo sapiens
  SIMILAR (656)..(480): 451254mologous to Homo sapiens Vpr binding protein B29-1 amino acid sequence,accession number W68196,Smith-Waterman Score= 97.
tcataaagcttttcgtaaatcaccatagaagttggttaaagtgcttgccatggctgtatctaccgcagactgaggaatcatcccacgcagatctgtctgaatatatcctgtcaaaagactctggtttgggttgtctttaagtggaacacaaaaccaaccacagggatggttatatcctcgaacaaattctggtctcttttcatcccagtcaagacttattccacaagataaaagcccttctttatagcccacagtataggagaaatcaacaaattctcttggggaaattatattccaaagctgaccagcagtagtgtaacgcatcacacagcaattcgttttcttagcaactcgccacttatcttcttcaatgctatggtactggatgagagtgtttttaagtttagttgcaaaagaagcaacatcagacaggccttccattacttctctaacatcaacaatgcatttggtctgagaactgctaatgaatgtacagtgcaatggtggttcaagaagttttgccaaggagatgagagccttgaagatgaggagcgtagtggctggccattggaaagtgacaacgaccatttgagagtagtcattgaagctgatcctcttacaagtacaagagaagttgcccaagaactcagtgtcaatcattctctgccaaccaactactacttcctcaagcatctcaacaactttttgcagggaaaatgcttccacaaccagcaggatgcagaaaatgcttttcaagagttcattgaatcctgaagcacggatttctatactgaaagtgtttgcctcggccaggtcatcacagtcacagtgagagaaagaatagatgcctgacttcattgttcttgggagcctccatcgaatggccat

SEQ ID NO: 16632 - DNA, 339 bp, Homo sapiens
  SIMILAR (436)..(344): 1001254mologous to Homo sapiens Amino acid sequence of a human secreted peptide,accession number Y12917,Smith-Waterman Score =155.
ggcctgagaaggcgggggtcttaaacgttatccaatcagggacgctgtcctgggaactgtccaatcagacacacagctggagggaacagggcggcttccggtatttggtggggcctttgcctctggcttcagtcgttcctcctggtgttgtcctcattcctctgtgtcttctgcttttagaggcccagcctctgtggccctgtgacctgcagggactgttgacatttagggatgtggccatagaattctctctggaggagtggcagtacctggacactgcacagaagaatttatataggaagatgatgttagagaactacataaacctggccttcctgg

SEQ ID NO: 16633 - DNA, 416 bp, Homo sapiens
  SIMILAR (303)..(416): 1001254mologous to Homo sapiens zinc finger protein,accession number L11672,Smith-Waterman Score=204.
tccaggtctcgacttcactgctctgtgtcctctgctccaggaggcccagcctgtgtggccctgtgacctgcaggtattggagagccacagctaagatgccaggaacccctgcaagcctagaaatgagccttctctgcatgatggcttcttatatgccatgcagaattctcaccatgaatttgtgatctgcaatattaaaaatgttctctttgtggctgttgaacatggaaaggtgtggataatctatttctatggagaaaacctgggattcttagtgaagatggagaacatataatgttgagggactgttgacatttagggatgtggccatagaattctctccggaggagtggcaatgtctggacactgcacagcagaatttatataggaatgtgatgttagagaactacagaaac

SEQ ID NO: 16634 - DNA, 1760 bp, Homo sapiens
  SIMILAR (33)..(662): 971254mologous to Homo sapiens Amino acid sequence of a human secreted peptide,accession number Y12917,Smith-Waterman Score= 1044.
atgcagtggttctgggttcttctgtggcttctctgtctgtggctgatggagtggttttgttggtcttgtgatccaggctttttgaagcacatcttgaccttttgtctttctgttccctgggatgaaaactcatcttcagtgctgtctacaacaaaagagaaacatcatgttactaaaacctcaggaacagagattgcagattgggctaagattgtacactttcttaaggatgatctgcatggaaaagcagcaaacaatttcagaaagatacaagaaaaattgcctctaatgggtacttatactgtagttcaactcgatttgttctggcctgagaaggcgggggtcttaaacgttatccaatcagggacgctgtcctgggaactgtccaatcagacacacagctggagggaacagggcggcttccggtatttggtggggcctttgcctctggcttcagtcgttcctcctggtgttgtcctcattcctctgtgtcttctgcttttagaggcccagcctctgtggccctgtgacctgccccctggaagcctagaaatgggactgttgacatttagggatgtggccatagaattctctctggaggagtggcagtgcctggacactgcacagaagaatttatataggaatgtgatgttagagaactacagaaacctggccttcctgggtattgctgtctctaagccagacctcatcatctgtctggagaaagaaaaagagccctggaatatgaagcgagatgagatggtggatgaaaccccagagaagtcctacaaatgtaaagaacgtggaaaaatctttaattggtcttcaacccttactaatcataagaaaattcatactgaagaaaaaccctacaaatgtgaagaatatagaaaagcttttagtctatcctcaaatcttactacacataagataattcatattggagagaaaccttataagtgtgaagaatgtggcaaaacgtttaacaaatccttaaccctaaccatatataagaggatgcacactgaagagaaactctacaaatgtaaagaatgtggcaaagcatatgtatggtcctcaaacctaactaaacataagaggatgcacgctggagagaaaccctacaaatgtgaagaatgtggcaaagcttttagccaatcctcaacccttactacacataagataattcgtactggagagaaacgctacaaatgtgaagaatgtggcaaagcatatgtatggtcctcaaccctaactaaacataagagaatgcacactgcagagaaaccctataaatgcgaagtatgtggcaaaacttttcatcgattctcaaatcttagtgcacataagataatccatactggagagaaaccttacaagtgtgaagaatgtggcaaagcatttatatggtcctcaacccttactgaatataagaaaattcatactagagagaaaccctacaaatgtgaagaatgtggcaaagcatttagccgatcttcaaccctaactatacataagaggatgcatactagagagaaactctacaaatgtgaagagtatggcaaagcttttagacaatcctcaacccttactgcacataagatgattcatactggagagaaaccctacaaatgtgaagaatgtggcaaagcctttaactcgtcctcaactcttactaaacataagataatccatactgaagagaaaccctacaaatgtgaagaatgtggcaaagcatttagccaatcctcaaccctaag

SEQ ID NO: 16635 - DNA, 1718 bp, Homo sapiens
  SIMILAR (616)..(708): 931254mologous to Homo sapiens calbindin D28K,accession number S46006,Smith-Waterman Score=153.
gcggccgcccgcattctcctgagctttccgcgggccgacgcacagccgcggagaaggagccagcgcccggccagacagtctcagcccgccgtcggcgcccgccgcgctcgcgcccggctgctccgaggggattagtgggccgtccgcgcggctcgtcggcgcgggagccatgttgaccgagggacttggcaacgcgtgagacacccgcgggccctcccgaggctccggacccgcggcgagagccggaaggcggctcgtggcggcggaggcctgcgctcggaagcgcctcacgtctgccgggccgctgagacccggacttgcatccggtcgccgcgggcgtccgcggagcagcttccccccgcgcctctcttcgcctcgcctcgggacccgcggtccccgctcttgctggatttttcaagccacattcaattgataggatgaaaaaatttaagagaaggctatccctcacactccgaggaagtcagactattgatgaatcattgtctgaattggctgaacaaatgactattgaagaaaacagcagcaaggataatgagcctattgtgaagaatggcaggcctccaacgtctcacagtatgcattccttcctccaccagtacacaggatctttcaagaagcccccattgcggagaccacacagtgttattggagggagccttggctccttcatggcaatgcccagaaatggaagcagattagatattgttcatgaaaatctaaaaatgggatcagatggtgagagtgaccaagcttctgggacatcatctgatgaagtccagtcacctacaggtgtttgtctcagaaatcgtatacatagacggatctcaatggaggatttaaataagcggttatcactgcctgcagacatcagaatacctgatggatatcttgaaaagttgcagataaacagtccaccatttgaccaaccaatgagtcgaaggtctcgtagagcttccttagggccgctgtgtttctcggaatgcgcgcgggatgcccggttgccacgagaccgtcgccaggcaaccgcgtgtacacatactccaggcgggccggggcgcgtcaatatggcggcgcagggctccccctcgagctctccgtcagacgactctaccacctcggggtctctgccagaactgccgccgacctccaccgcgacttcgaggtcgcccccagagtcgaaggggagctcccggagctcgctgcttcagtggacctgccccgaggactcattgcccctagccgtgttttatgggccgctggacgcgaaaaacccgctcctggcctcttgtgagaaggagatccaggagttgttaggctttatgaggaaaaagaaggctttagccaccacggaggaagagaagcacgaattccgccggcgttgttcttgggggaatgctttccaacttttgctcattcagtatgatattggctgtgactttgtcattgatggctcttattatcttgaggaatacaaactggcccttttacaatgctatggaagatatcttcagcagttcaataccaattttgatgagaataaagtggatgtaactcaattcaaagctacctttttcccaaaaggctttaaagataaaactgctggacttacatttcatgctttgagtggcaaaaatatgtgcaactaccagctggtctgcgacagtgatgaaaacctgaagaataaagaatctgtggtc

SEQ ID NO: 16636 - DNA, 576 bp, Homo sapiens; identical to SEQ ID NO: 5384
  SIMILAR (19)..(417): 901254mologous to Homo sapiens ribosomal protein S24,accession number M31520,Smith-Waterman Score=620.

SEQ ID NO: 16637 - DNA, 659 bp, Homo sapiens
  SIMILAR (119)..(502): 501254mologous to Xenopus laevis ribsomal protein S19,accession number V01443,Smith-Waterman Score=225.
gactcccgggtcgactactactactaaatttccgacagcgtcgacctgaagatagatcgccatcatgaccgaccaccggaactatcccgcactaagaaaagttcatgacccaaccgacttacttcaggggaaaccaaatgggtcatttgatgtcctttcaccccgggaaggcggacagtgccctaagcacagaaaattcggggaaaaactagcccaaaatgtacamagaccacacccggatgtcatctttgtatttggattcagaactcattttggtggtggcaagacaactggctttggcatgatttatgattccctgggattatgcaaaagaaaaaatgaaccccaaacatagacttgcaaagacatgggcctggtatggaggaaggaaaaagaccttccaagaaaggcaacggaaaggaacgccaagaaccagaattgaagaaaagtccaggggggacttgcaaaaggcccattgttgggtgctgggcaaaaagaagaaatgaagtgtcttggcagtgagctggagattggttcacagccgaaggagttaaaggtgctgccaatgatgttagctgtggccactgtggatttttcgcaagaacattaataaactaaaaacttccaacaacaaaacaaacaaaaaacaaagtcgacgc

SEQ ID NO: 16638 - DNA, 1959 bp, Homo sapiens
  SIMILAR (1271)..(1116): 611254mologous to Homo sapiens Human secreted protein, SEQ ID NO: 7083,accession number G03002,Smith-Waterman Score=144.
atgggcctgctcctgctggttctcattctcacgccttcactagcagcctaccgccatcctgatttcccgttattggaaaaagctcagcaactgctccaaagtacaggatccccttactccaccaattgctggttatgtactagctcttccactgaaacaccagggacagcttatccagcctcgcccagagaatggacaagcatagaggcggaattacatatttcctatcgatgggaccctaatctgaaaggactgatgaggcctgcaaatagtcttctttcaacagtaaagcaagatttccctgatatccgccagaaacctcccattttcggacccatctttactaatatcaacctaatgggaatagcccctatttgtgttatggccaaaaggaaaaatggaacaaatgtaggcactcttccaagtacagtctgtaatgttactttcactgtagattctaaccaacagacttaccaaacatacacccacaaccaattccgccatcaaccaagattccccaaacctccaaatattacttttcctcagggaactttgctagataaatccagccggttttgccagggacgcccaagctcatgcagtactcgaaacttctggttccggcctgctgattataaccaatgtctgcaaatttccaacctcagctctacagcggaatgggttctattggaccaaactcgaaattctcttttttgggaaaataaaaccaagggagctaaccagagccaaacaccctgcgtccaagtcttagcaggcatgactatagccaccagctacctgggcatatcagcagtctcagaattttttggaacctccctcacccccttatttcatttccatatctctacatgccttaaaactcaaggagccttttatatttgtggccagtcgattcaccaatgcctccccagtaactggactggaacttgtaccataggctatgtaaccccagacatcttcatagcccctggcaatctctctcttccaataccaatctatgggaattccccgttgcccagggtgaggagggcaatccatttcattccccttctcgcgggactcggcattctagctggtacgggaaccggaattgctggaatcacaaaagcttccctcacctatagccagctctcaaaggaaatagccaacaacattgacaccatggctaaagccttaacgaccatgcaagaacaaatcgactctttagcagccgtagtccttcaaaatcgtcgaggactagacatgttaacggcagcacagggaggaatttgtttggccttagatgaaaaatgttgcttttgggtaaatcaatcaggaaaagtacaagacaacatcagacaactcctaaatcaagcctccagtttacgggaacgagccactcagggttggttaaattgggaaggaacttggaaatggttctcttgggttcttccccttacaggcccacttgttagtctcctacttttgctcctttttggtccatgtctcctaaatctaataacccaatttgtctcctctcgccttcaggccataaagctccagacgaatctcagtgcaggacgccatcctcgcaatattcaagagtcacccttctaaggaggacccctaggactgctcgctagtgggaacacgacagagggcgaaatcctgccccgttttcccgtgggaccggggtgggatatggttttttggccaatccacagaggccatcctgccctgacagctagcaagaggccaagacccacacgaacaaccactacagcccctctgtcagcaggaagcagttaaagaagactgaccttcgtccattttcccaagataattggggtcttggactcttgagggggggaaatgttggagcaggtagctagtcagacatgagcagggcaggggagggcccccttcaccaggaatgtcagggcaccatcaggtgatggt

SEQ ID NO: 16639 - DNA, 447 bp, Homo sapiens
  SIMILAR (197)..(421): 701254mologous to Homo sapiens Human G-protein coupled receptor GRIR-1,accession number Y28279,Smith-Waterman Score=257.
tggtttcagttccctttatttttatatggcttacatgtaaatcttttttaaaattcgacttaaaatccaatacaaatgttcttcagtcattagtaaatttcaaagcgaagtcagtaaaagacagaagctggcaactgtcttttcatccttcacaagtacaggactatgtcaggggtctgtggccttcatcagcaggtgccctcctttggcgagcggatctgattctgtgtggagaggaggaagtgtcttcttcagtttcagaccctgaaggctcatgatctccctcttgggatcctgtgtctcccaccagttcccggagaaacttgaattttgataaaaaaagatgccatacaaaataccaaccgcacaccatcagcagcaggacgatcagcagcgtggccacgaacacaagcagagtcagcccgacgctgtgccacatcttggggg

SEQ ID NO: 16640 - DNA, 2388 bp, Homo sapiens
  SIMILAR (474)..(644): 361254mologous to Homo sapiens Secreted protein encoded by alternate reading frame of clone ek591_1,accession number W85464,Smith-Waterman Score=68.
atgatccgcagcggctgtggcgcggcgacccgggcgggcggcgatgcgctgtccaggcatattcttcccacgatatttaatgatcgaatggctaaaatttgtgaggctttagagataaaacatttggatcgaaatctgacgagcacctactatgtgatacataaatggacgggcagccagatccgcggctttggagaaggccagcccacggtcgtccgactgaggcgacttgagcaagaccaaaggcagagccgcccgagaatgaaagcagcgaagcccgagtggcggtgcattctgggagttgtagtccctgcgagacaacgccgtcccgactccaccaggctctgcactccatctcccagccgaccccgcgccgcggaggaggcgagcttggtgatgagctgccccagcggtagggggcctggggcggagaagccgctacagccgcggccgggcgacgctgacatctggcatccctggggtctcagagacacgggtggacagcgacgagggccttgtggccgccatgtggcacagcgtcgggctgactctgcttgtgttcgtggccacgctgctgatcgtcctgctgctgatggtgtgcggtttaagtacctcgtggtctgtgtagacaccttcacaggatgggtagaagcctgcctcacaaggactgaaaaggcacaggaggtagctaaattcctcctaaaggaactcattcctcagttcagccaacccaggtcattgcagaatgacaatggtccatccttcatttcccaattaactcaacaggtcaccatgggcctgctcctgctggttctcattctcacgccttcactagcagcctaccgccatcctgatttcccgttattggaaaaagctcagcaactgctccaaagtacaggatccccttactccaccaattgctggttatgtactagctcttccactgaaacaccagggacagcttatccagcctcgcccagagaatggacaagcatagaggcggaattacatatttcctatcgatgggaccctaatctgaaaggactgatgaggcctgcaaatagtcttctttcaacagtaaagcaagatttccctgatatccgccagaaacctcccattttcggacccatctttactaatatcaacctaatgggaatagcccctatttgtgttatggccaaaaggaaaaatggaacaaatgtaggcactcttccaagtacagtctgtaatgttactttcactgtagattctaaccaacagacttaccaaacatacacccacaaccaattccgccatcaaccaagattccccaaacctccaaatattacttttcctcagggaactttgctagataaatccagccggttttgccagggacgcccaagctcatgcagtactcgaaacttctggttccggcctgctgattataaccaatgtctgcaaatttccaacctcagctctacagcggaatgggttctattggaccaaactcgaaattctcttttttgggaaaataaaaccaagggagctaaccagagccaaacaccctgcgtccaagtcttagcaggcatgactatagccaccagctacctgggcatatcagcagtctcagaattttttggaacctccctcacccccttatttcatttccatatctctacatgccttaaaactcaaggagccttttatatttgtggccagtcgattcaccaatgcctccccagtaactggactggaacttgtaccataggctatgtaaccccagacatcttcatagcccctggcaatctctctcttccaataccaatctatgggaattccccgttgcccagggtgaggagggcaatccatttcattccccttctcgcgggactcggcattctagctggtacgggaaccggaattgctggaatcacaaaagcttccctcacctatagccagctctcaaaggaaatagccaacaacattgacaccatggctaaagccttaacgaccatgcaagaacaaatcgactctttagcagccgtagtccttcaaaatcgtcgaggactagacatgttaacggcagcacagggaggaatttgtttggccttagatgaaaaatgttgcttttgggtaaatcaatcaggaaaagtacaagacaacatcagacaactcctaaatcaagcctccagtttacgggaacgagccactcagggccataaagctccagacgaatctcagtgcaggacgccatcctcgcaatattcaagagtcacccttctaaggaggacccctagactgctcgctagtggaacacgacagaggcgaaatcctgccccgtctcccgtggacctggctggatatggtttttgccaatccacagagccatcctgccctgacagctag

SEQ ID NO: 16641 - DNA, 642 bp, Homo sapiens
  SIMILAR (130)..(414): 711254mologous to Mus musculus allantoicase,accession number AF278712,Smith-Waterman Score=362.
atgaccccctggactgggaagcagttagtaactgcatatgctgcccttcagactcataagagcatggcagaacaggctacagtcatcatgcagatgacttacccaatagcaggatggctgctacgttcatgggtagcgacccttccagactgggacagcacagactgggacagcactttatcaaagttggcatgctccaactgcattgtggactgggcccacacctacgctgaggtgaccaatgtctccaactgttggatctgtactacccttccagcagcagctgtggatggcttgccctggcacatgcacccagcttctgtgaaaaactggacacgactagaaacttgtggttccacagacaatttgtgggatgcaacacggcaggctttggacacaataactatccctggagcaggtgtcgttactatagaaatgcaagttacagcccttgcagagcacacagctcgggccctgaattacacccgagttgctctccttttgctaactgatgaggttgatcagatcaggaaggtggtgctgcaaaatcggatggccttaaacatagtcacagttgctcagggtggcacctgtgcccttggagggacacaattttgtacatttatccctgacatccactag

SEQ ID NO: 16642 - DNA, 996 bp, Homo sapiens
  SIMILAR (619)..(915): 861254mologous to Homo sapiens ribosomal protein S8,accession number X67247,Smith-Waterman Score=447.
atgctcatagacttctttgtggagaggaagataatttcttttgatggatgcattgcacagctcttcttcttacactttgctggggcttcggagatgttcttgctcacagtgatggcctttgacctctacactgctatctgccgacccctccactatgctaccatcatgaatcaacgtctctgctgtatcctggtggctctctcctggagggggggcttcattcattctatcatacaggtggctctcattgttcgacttcctttctgtgggcccaatgagttagacagttacttctgtgacatcacacaggttgtccggattgcctgtgccaacaccttcccagaggagttagtgatgatctgtagtagtgaaatacaaactaccatcagagattactacaaacacctctatgcaaataaactagaaaatctagaagaaatggataaattcctcgacacatacactctcccaagactaaaacaggaagaagttgaatctttgaatagaccaataacaggagctgaaattgtggcaataagcaatagcttaccaaccaaaaagagtccaggaccagatggattcacagccgaattctaccagaggtacaaggaggaactgagaaagccctaccacaagaagcggaagtatgagttggggcacccagctgccaacaccaagactggcccccgccgcatccacacagtccgtgtgtggggaggtaacaagaaatactgtgccctgaggctggacgtgaggaatttctcctggggctcagaatgttgtgctcataaaacaacgatcatcgatgttgtctacaatgcatctaataacgagctggttcgtcccaagaccctggtgaagaattgcattgtgctcattgacagcacactgtaccgacagtggcccccatggcacttagtcaagaaggtgccccactgcgactgttccaaaagggaggatgagggctctgaagaagctaaagtcacagtgaaatga

SEQ ID NO: 16643 - DNA, 496 bp, Homo sapiens
  SIMILAR (144)..(500): 1001254mologous to Homo sapiens DNA binding protein p79PIF,accession number AF173867,Smith-Waterman Score=604.
  misc_feature (1)...(496): n = a,t,c or g
gccggttttggcatacagtttgaatctttgccaggctgtttcctgtggttggcagtttaattaacggtgtaacagtgatttcacatctaggtttaccgctgagaaataaggcaagatgtaacgtagtgtactgataaaatcactctcgtctttggtgtctagatgctcactcccaagcctgacaagttgatgacagtgcagtttgagagctcctatggctcaccaatcagctcagtgcttgtgtagttcatccgggcttgtaccaccttcatgtacgctccatctggattccctaccgatgcttattcagcacaatgtgtggtgtttgtcagacatgcactgttgcaatgcagcttgactgtcttgcagacagcttcaatgctgtttttaaattgacagaggcagcaggccatatggctaggtaagatcagtttttccagttcagcagtcatcttgagantgttgtcatggcgatcatcatcattnnnngnagctc

SEQ ID NO: 16644 - DNA, 789 bp, Homo sapiens
  SIMILAR (1)..(384): 291254mologous to Mus musculus receptor-like protein tyrosine phosphatase rho-1,accession number AF162856,Smith-Waterman Score= 101.
tttccctacggttgcagttttattacaagatttctttccaaacgcaagatcaggccaacaagctcagcgactctgacgcttcacatcttcacccactcgcaccgtgttccgaacccacccgcaccaacgtacacacaaaactcccacgcgagcgaccgcagtcccaaattgcatctccatacccactcccaccctgccccgaacgtcttaaaaaacaaacaaacaaaaaaaaaaactggtaagaaccctcaccccacattctcccaccccgcaacgctgcagcgcacacaggacagagccgggcgtccaagtcccttcccgcgcccccgccgacagtctcgccgcgtccccgcccgggcgccccaggcacgtagctgcccgcccggaggcggcggcagagcgcagagagcggggcgagggtccgggtctccggggtccttcttgcagcagcgctggcgagggcggacccagatggcgctcagtacagccccaggatggctgcgcccacgtccttggagggccggcgctcctgcaccagaaagttgatcatgctctcggacttgatgagcaggttgcagcccaggaagaagacgccgaagaccacgaaatttccaaggaaactatatttcttacattgatggaaatgtatggaaagtgtacagttggaccgagaaactgtgagtatattctctccaaatatgacaaaaagctaactgcattgtaagatctttcttggtccagcattttgaggtcggtacctctgaggaaagatatttctcctccatgccc

SEQ ID NO: 16645 - DNA, 364 bp, Homo sapiens
  SIMILAR (16)..(381): 991254mologous to Homo sapiens hepatocellular carcinoma- related putative tumor suppressor,accession number AF205718,Smith- Waterman Score=643.
gggcacaaatgatgaggcatctcctggaagcttaacttcttatccatcccatctcttggacagatgatgccagttaattactttgaatgtggcctagggatttctgggaggatccgaagaacaaggctgtctgcagtaggagcctcctgttcctcgccacctaagcttcagccctgcccaactaacagctctccatgttctaaagaaggtgggagtgctggaccaccccagccttctggaaccccagttctgtgacattatccatctcctgggaaatatgctggttttaaccatgcaaactggccaagcatcaggcagaaatagcagctgtgcctgggaaggacaggtgacatctgtgaaagaa

SEQ ID NO: 16646 - DNA, 663 bp, Homo sapiens; identical to SEQ ID NO: 1136
  SIMILAR (226)..(297): 911254mologous to Homo sapiens Human secreted protein clone dd119_4 protein sequence SEQ ID NO:108,accession number Y53051,Smith-Waterman Score=116.

SEQ ID NO: 16647 - DNA, 548 bp, Homo sapiens
  SIMILAR (40)..(198): 791254mologous to Homo sapiens hepatocellular carcinoma- related putative tumor suppressor,accession number AF205718,Smith- Waterman Score=209.
cggcacgagtcagactcttcttagaagtctagcttctgcctgtatctttcagcccaaagtgagacttttgagtcgggaagagatacctctgaatttaaactactgatcagtgtcacccaattctaatcccaaccacctttattctaggcataccatactcactgccatgcttacccttcagttgggcacctgtgtcctccttcccattggccttctggttccctaccccaactgtcccagtcccacaggccttcaggtaacaccttttctgcccagcccttgtggtagcggttggcctgcctcctttacctactcaagtaaccgctttaccactaatttattgttttgtgttttcatcttataggatcttacctagccatatggcctgctgcctctgcccaatttaaaaatagcattgaggctgtctgcaagacagtcaagctgcattgcaacactgcatgtctgactaacagcatacattgtcctgaagaagcatctgtagggaatccagaaggagcgttcatgaagatgttacaagcccggaagct

SEQ ID NO: 16648 - DNA, 2010 bp, Homo sapiens
  SIMILAR (3)..(515): 671254mologous to Mus musculus Pro-Pol-dUTPase polyprotein,accession number Y12713,Smith-Waterman Score=553.
tcagtacagccccaggatggctgcgcccacgtccttggagggccggcgctcctgcaccagaaagttgatcatgctctcggacttgatgagcaggttgcagcccaggaagaagacgccgaagaccacggtaagcgacagcacgcagagcacggcgatctgcgccacccgcgacacccacaggctgcgctcgtcgggcgccagccccgcggggaccccgtcgctggcggccagcggtgcgccccctggacagcagcccagccacgtgcccagcccgtgggtgcggtttcccagggcggccccggcgccgccgcccacgccgtccacctcctccaagccgctgtggttcaggaaggtcgcgttcatcgccgcgcggcgccgggggtctcggcgcgcatgtcccgggtgcactgggctgctcgccggggtccgcgctctcagggacgctccggacccctcggaccggctcctctccatggtgctgcttgagtgtcctcatgacatggcggctggcttgcctcagagtaactcttgaagaatgtgctagaaggtgagcacctggcaggatgcttcgaccttgttctgatgcctggggacttctggtgagttccctggccatccatcctggtctgttcaccttctcaggactccagttgagttgggctgcgtgtgacagacccctgagtcgctgctgtcctctagtggccactggataaattgcacagcacgccggccttggggaaaacgccgcagctgcaggtgccaccagtgagtcttctattcaaagtaattaactggcatcatctgtccaagagatgggatggataagaagttaagcttccaggagatgcctcatcatttgtgccagtgaccccgcataatttcttgatgaattgtgcaaactgggaagctgatagctctggaaatgagaaagcaggtgttattttctgtttctgaatatccccaacaagggtgcaatgattcttttacttatcggggtcattgttttcctacctattcaaggatataaactgtgtttcttcacagaaatttccaaggaaactatatttcttacattgatggaaatgtatggaaagcatacagttggaccgagaaactaattctcagagaaaataacttgactgaattacacaaggattcatttgaaggcctgctatccctccagtatttagatttatcctgcaataaaatacagtctattgaaagacatacatttgaaccactaccatttttgaagtttataaatcttagttgcaatgtaattacagaactcagctttggaacatttcaggcctggcacggaatgcagtttttacataagttaattctcaatcacaatcctctgacaactgttgaagatccgtatctctttaaattgccagcattaaaatatctagacatgggaacaacgctagtcccacttacaacacttaagaacattctcatgatgactgttgaactggaaaaactgatcttacctagccatatggcctgctgcctctgccaatttaaaaacagcattgaggctgtctgcaagacagacaagctgaattgcaacagtgcatgtttgacaaacaccatacattgtcctgaagaagcataggtagggaatccataaggagcgttcatgaaggtgttacaagcccggaagaactacacaagcactgagctgattgttgagccaaaggagccctcaaacagaactggcatcaacttgtcaggctttgggagtgagcaactatacaccaatgacgagagtgattttatcagtacactacgttgcatgttaccttatttctcagcggttaacctataagtgaaatcactgttactaccgttaattaaactgccaaccacaggaaacagcctggcaaagattcaaactgtaggccaaaaccggcagagagtgaagagagtccttattggccccaaggagcatccagaaaaggcacttcaaagaggtaggaaggcagagcatcaggagggaacagg

SEQ ID NO: 16649 - DNA, 478 bp, Homo sapiens
  SIMILAR (111)..(314): 361254mologous to Salmonella typhi PilNb,accession number AF000001,Smith-Waterman Score=79.
ttgggaaatacatgggggtaacaaccctgcaaacgcctgaaaatatggttatctttagaatttacgaagataaatgtgattaggcacatgtggaagaagttcaagagactgtaaatgagggaggccaggtttcgcgactattaaaccaggtggctttttccttcagcatccccaggagaagtacgaacgcgactacaacagccggcacaaatgggatcatgcctgaagtacccatggggcacagtagaaagagcagcaggaagccgcgggtaaggagaggggatgcctgtgtgcttacatgtaaagagagaagtaagccacctactcacactcgtacttcctattgactggcggatacttggccttgatcgccttctgttcttcagtcaaattgtaatctctaacatcttcctcttcctgcacgaaatcgtcgacccgggacagccgtccatgtcctgcaggcgtacagctttcaatt

SEQ ID NO: 16650 - DNA, 626 bp, Homo sapiens
  SIMILAR (271)..(468): 571254mologous to Drosophila melanogaster CG6353 gene product,accession number AE003735,Smith-Waterman Score=214.
aacgctttgaggaactctgcacgagctcgtgccggtctaatcctgcagtcatggcgcaggaagaggaagatgttagagattacaatttgactgaagaacagaaggcgatcaaggccaagtatccgccagtcaataggaagtacgagtgtgagtaggtggcttacttctctctttacatatttggatcatacagcagatgtccagtgagtatagcgggagttcattcctttgaaaccacgtcagtaggaagactgaatgtttcaatcttggttacacgcatggggagatactctggaggaagcatttgagcaatgtgcaatggccatgtttggttacatgacagatactgggacagtggagcccctccaaacagtagaagtagaaacccaaggagatgacttacagtctcttctgtttcactttttggatgaatggctttataagttcagtgctgatgaattcttcataccccgggtggggagaagaattttcattgtccaagcaccctcagggaacagaagtcaaagcaataacatattcagcaatgcaggtctataatgaagagaacccggaagtttttgtgatcattgacatttaagacaccaaaaaataaaagactcctacga

SEQ ID NO: 16651 - DNA, 668 bp, Homo sapiens
  SIMILAR (354)..(500): 401254mologous to Caenorhabditis elegans C43H8.1 gene product,accession number AF098499,Smith-Waterman Score=106.
tttatgagatcgtatagtcagtgtggtggaattcggtggatgaagggcggaagtagagtgtctaatcctgcagacatggcgcacgaagaggaagatgttagagattacaatttgactgacgaacagaaggcgatcatggtcaagtatccgccagtcaataggaagtacgagtgtgaatttggatcatacagcagatgtccatggattgtattacacagagcatgaatatacttctttaggttacacgcatggggagatactctggaggaagcattcgagcaatgtgcaatggcccatgtttggttacatgacagatactgggacagtggagcccctccaaaccagtagaagtagaaacccaaggagatgacttacagtctcttctgtttcactttttggatgaatggctttataagttcagtgctgatgaattcttcataccccgggaagtgaaagtacttagcattgatcaaagaaatttcaaattacgattcaattgggtggggagaagaattttcattgtccaagcaccctcagggaacagaagtcaaagcaataacatattcagcaatgcaggtctataatgaagagaacccgggaagtttttgtgatcattggacatttaagaccacccaaaaaattaaaagactccctacgggaaaaaaaaa

SEQ ID NO: 16652 - DNA, 942 bp, Homo sapiens
  SIMILAR (2227)..(3171): 641254mologous to Homo sapiens Gag-Pro-Pol-Env protein,accession number AF164611,Smith-Waterman Score=1083.
agagcaagactccgtctcacacacaaaaaaatgaaagattggaatgccacccctttcctagcatgcagaacatatggcaggatcctgctcttctgtcccctgtagcgggttgtcccgtgttccccttaaggaagaaatcacagtttttgtcctcctggtgcttccggctggaggttcacctgctagtccctgatcctctttgcttagtgatgcacatgagtctactcatccccccaccactcccagcccccactggtttaagaataagaggtgataggcagttcggcggtccagtgggtctgtctcttgcttcaacagtgtttggacggaacagatccggggacggtcttccagcctccgaccgccctccaatttcctctccacttgcaacctccgggaccatcttctcggctatctcctgcttctgggacctgccagcaccgtttttgtcgttagctccttcttggcgaccaaccatgagctcccagattcgtcaaaattattccaccgacgtggaggcagccgtcaacagcctggtcaatttgtacctgcaggcctcctacacctacctctctctgggcttctatttcgaccgcgatgatgcggctctggaaggcgtgagccacttcttccgcgaattgaccgaggagaagcgcgagggctacgagcgtctcctgaagatgcaaaaccagcgtggcggccgcgctctcttccaggacatcaagaagccagctgaagatgagtggggtaaaaccccagatgccatgaaagctgccatggccctggagaaaaagctgaaccaggcccttttggatcttcatgccctggattctgcccacatggacccccatctctgtgacttcctggagactcacttcctagatgaggaagtgaagctcatcaagaagatgggtgaccacctgacgaacctccacaggctgg

SEQ ID NO: 16653 - DNA, 419 bp, Homo sapiens
  SIMILAR (6)..(263): 931254mologous to Homo sapiens cyclin H,accession number U11791,Smith-Waterman Score=437.
  misc_feature (1)...(419): n = a,t,c or g
tttcgttgtaccacaacagtagtcagaagcggcactggaccttctccagcgaggagcagctggcaagactgcgggctgacgccaaccgcaaattcagatgcaaagccgtggccaacgggaaggttcttccgaatgatccagtctttcttgagcctcatgaagaaatgacactctgcaaatactatgagaaaaggttattggaattctgttcggtgtttaagccagcaatgccaagatctgttgtggctcacttgtgcatttttggcctgcaaagtagatgaattcaatgtatctaatcctcagtttgttggaaacctccgggagagtcctcttggacaggagaaggcacttgaacagatactggaatatgaactacttcttatacagcaacttaatttccaccttattgtccacaatcn

SEQ ID NO: 16654 - DNA, 781 bp, Homo sapiens
  SIMILAR (408)..(524): 821254mologous to Homo sapiens Human secreted protein, SEQ ID NO: 5630,accession number G01549,Smith-Waterman Score=142.
tcatccacatgcaggcgtccattttccgttgactgaaacagaaatgttagagttgagaattttagttgaaaagaagtacaacgtaaaagcagctgtttctaaggaagtttctgagttacctttgaattcaataagttggcagaaaacagtgtcttctttagaaatagttaacatctgttggttgacctggtgccacgttctgtactctaagcaccgaaaggcaagcaaacacttgagagttgtttgacaaaaataaacatcctgtcgtctcagtgggcgcctaacgaacccgggatacggtctgttcctagtccgctccggaaatgcaacgcgtacgggctggccgcgtaatcgtgacgacagcgcgccagcgccggctgccggacgccctaggcttccgcgagatcttctccagcgaggagcagctggcaagactgcgggctgacgccaaccgcaaattcagatgcaaagccgtggccaacgggaaggtgaggttttcccaacggttgcccagttgcccggtcactaaattctgagcagctgcgggagctctctggctcccaggacaatctcgctccgtcgtttctctgcctctgcggcgcgagtgcgtttttctatcaaaataagcgagcaccttgccaggttccgtgggtacaaagacgaacaacgccatccccgtcgtcgaatggcagacaagtaaccagtctttgtaacgtagtgaagaagagagtaagtagtgtgctaaggtagtgcgtggcaagagccgttcacttgtcaagag

SEQ ID NO: 16655 - DNA, 1389 bp, Homo sapiens
  SIMILAR (229)..(1323): 861254mologous to Homo sapiens putative p150,accession number U93563,Smith-Waterman Score=1605.
acgccagcttgggacgaggctacgaacccgggatacggtctgttcctagtccgctccggaaatgcaactgcgtacgggctggccgcgtaatcgtgacgacagcgcgccagcgccggctagccggacgccctaagcttctgcgagatcttcggtgggggtacgggtgttttacgccaggacgctgatgcgtttgggttctcgtctgcagaccctctggacctggtcacgattccataatgtaccacaacagtagtcagaagcggcactggaccttctccagcgaggagcagctggcaagactgcgggctgacgccaaccgcaaaattcagatgcaaagccgtggccaacgggaaggttcttccgaatgatccagtctttcttgagcctcatgaaggaaatgacactctgcaaatactatgagaaaagggtaattgaaattctgttcggtgtttaagccagcaatgccaagatctgttgtggggtacgggcttgtatgtatttcaaacgtttttatcttaataactcagtaatgggaatatcaccccaggctaaataatgctccacttgtgcatttttggcctgcaaagtagatgaattcaatgtatctagtcctcagtttgttgggaaacctcccgggagagtcctcttggacaggagaaggcacttgaacagatactggaatatgaactacttccttataccagcaactttaatttccaccttattggtccacaatccttaccagaccatttgagggcttcctcatcgacttaaagacccgctatcccatattggagaatccagagattttgaggaaaacagctgatgactttcttaatagaattgcattgacggatgcttaccttttatacacaccttcccaaattgccctgactgccattttatctagtgcctccagggctggaattactatggaaagttatttatcagagagtctgatgctgaaagagaacagaacttgcctgtcacagttactagatataatgaaaagcatgagaaacttagtaaagaagtatgaaccacccagatctgaagaagttgctgttctgaaacagaagttggagcgatgtcattctgctgagcttgcacttaacgtaatcacgaagaagaggaaaggctatgaagatgatgattacgtctcaaagaaatccaaacatgaggaggaagaatggactgatgacgacctggtagaatctctctaaccatttgaagttgatttctcaatgctaactaatcaagagaagtaggaagcatatcaaacgtttaactttatttaaaaagtataatgtgaaaacataaaatatattaaaacttttctattgttttctttccctttcacagtaactttatgtaaaataaataaaccat

SEQ ID NO: 16656 - DNA, 930 bp, Homo sapiens
  SIMILAR (465)..(734): 981254mologous to Escherichia coli yehQ,accession number U00007,Smith-Waterman Score=469.
atgcaaacccccagctgctggtgtgcaggaaaagaatccaggagatcacctgatgaagcccagcattttacagataggcagtggagcaggggaatccagttgacactgtggctaaatttcagaaaacctcccatgagatcttgcaaaggagatggagaaaatatggctgaatgccagcaagaacatctcctctttgaccacaagtactggctcaactgcatattggtggaggatacagagatccaagtgtctgtagatgataaacacctggaaacaatatacctgggactcctgatacaggaaggccacttcttctgcagagccctgtgctccgtgactccaccagccgagaaggaaggggaatgcttgacactttgcaagaatgagttaatctcagtgaagatggcagaagctggctccgagttggaaggcgtgtctttggtgacaggcagaggacgctgtaaggccttgacgggttatgagccaggagaaaaggatgaactgaatttctaccagggagaaagcattgagatcatcggctttgtcatacctgggcttcagtggttcattggaaagtcgacaagttcaggacaagtgggctttgtccccaccaggaacatagatcctgattcttattccccaatatttgcagttgagcttcgagggtgccctggtgacatggagccagaaaagcacatgctgacaccaaggttgatacagagagtgatagaaaggagagaatgcgtcagttcagtttattttaacaggtggtcactgaggacttcctctgtgcaaggagggaagcaaaactccaagacaaagggcatgctgttaggcactgagggtgtggttttggtacttggatcctgctacccaccctgtctaaccacagggccccttcagaggaagggcacacacagggagaaatag

SEQ ID NO: 16657 - DNA, 3990 bp, Homo sapiens
  SIMILAR (508)..(807): 771254mologous to Homo sapiens PRO2221,accession number AF116695,Smith-Waterman Score=387.
atgggtggctgcttctgcatccccagggagcggagtctgacccggggcccaggtaaagaaactccttccaaggatccaactgtatcgagtgagtgtatagcctcatctgaatacaaggaaaaatgttttctgccacagaacattaatccagacctgacactctccttctgtgtaaagagccgctccaggaggtgtgtaaatggacccctacaggaagctgctcggaggcggctctgggcactggagaatgaggaccaggaggtgcgcatgctgtttaaggacctctcagcaaggttggtcagtatccagtctcagagggcccagtttctcatcaccttcaagaccatggaggaaatctggaagttctccacctaccttaatttaggtatggtacaaggcaagcagaaatcttgttggcttgacttcttaggctacgtatccatgtgtctagaacatctcctctttgaccacaagtactggctcaactgcatattggtggaggatacagagatccaagtgtctgtagatgataaacacctggaaacaatatacctgggactcctgatacaggaaggccacttcttctgcagagccctgtgctccgtgactccaccagccgagaaggaaggggaatgcttgacactttgcaagaatgagttaatctcagtgaagatggcagaagctggctccgagttggaaggcgtgtctttggtgacaggcagaggacgctgtaaggccttgacgggttatgagccaggagaaaaggatgaactgaatttctaccagggagaaagcattgagatcatcggctttgtcatacctgggcttcagtggttcattggaaagtcgacaagttcaggacaagtgggctttgtccccaccaggaacatagatcctgattcttattccccaatgagcaggaactctgcctttctcagtgatgaggagagatgctccctgttggccctgggaagtgataagcagactgagtgttccagcttcctccacactcttgctcgcactgacatcacatctgtctaccggctcagtgggtttgaatccatccagaatcctccaaatgatctgagtgcatcccagcctgaaggtttcaaggaggtcaggcctggcagagcctgggaggagcatcaggccgtggggtccagacagtccagcagctctgaggactccagcctggaggaggagctcctctcggccacctcagacagctatcgcctgccggagcctgatgaccttgatgacccggaactgctcatggacctaagcactggtcaggaggaggaggctgagaacttcgcccccatattggcttttctggatcatgagggttatgctgaccactttaagagtctctatgacttctccttctctttcctcacttcttccttttatagcttctctgaggaggatgagtttgtggcctacctggaggcatcaagaaagtgggccaagaagagccacatgacctgggcccatgcccgtctctgcttcctcctgggccggctgagcatcaggaaggtcaaactctctcaggccagggtgtacttcgaggaggccatccacattctcaatggagcatttgaggacctatccttggtggccactctgtacatcaatttggctgccatctacctgaaacagaggctgagacataaaggctccgccctgttggaaaaggcaggtgccctgctggcctgcctgcctgaccgtgagtctagtgccaagcatgaactcgacgtggtggcctacgtgctgcgccaggggattgtggtgggcagcagcccgctggaggccagggcctgctttctggccatccgcttgctcctgagcctaggccggcacgaggaggtcctgccctttgccgagcgcctgcagctcctctctggacaccctcctgcctctgaggctgtggccagtgttttgagttttctgtatgacaagaaatatcttccacaccttgcagtggcctctgtccagcaacatggtatccagagtgcccaagggatgtctcttcctatttggcaggtccaccttgtcctccagaacacaaccaagctccttggctttccttccccaggctggggtgaagtttctgccttggcctgcccaatgctcagacaggccctggctgcctgtgaggaactagcagaccggagcacccagagggccctgtgtctcatcctttccaaagtgtacctcgagcacaggtctcctgacggtgccatccactacctgagccaggccttggtgctagggcagctgctgggtgagcaggaatcctttgagtcttctctctgcctggcatgggcctatctcttagccagccaggccaagaaggctttggatgtgcttgagccactgctatgctccctgaaggagacagagagtctcactcaaaggggagtcatctataacctcctgggacttgcactccaaggtgaaggccgggtgaacagggcagccaagagctatcttcgggccttgaacagagcccaggaggtgggagatgtgcataaccaggcagtggctatggccaatcttggccacctgagccttaagtcctgggctcagcatccagccagaaactatctcctgcaggctgtacgactctattgtgaacttcaggccagtaaggagacagacatggaattagtacaggtgtttctctggttggcccaagttctggtgtctggacaccagctgacccatggccttctttgttatgaaatggcattgctgtttggcttaaggcatcgacatctaaagagtcagcttcaggccaccaaatccctctgccatttctacagctctgtgtccccaaaccctgaggcatgcatcacctaccatgagcactggctggccctggctcagcaactcagggaccgggagatggaagggaggctgctggagtccctggggcagctttatcggaacctaaataccgccaggtccctcaggaggtcactcacatgcatcaaggagagcctgcgtatcttcattgacctgggggagacagacaaggctgctgaggcctggcttggggcggggcgactccactacctcatgcaggaagacgagctggtggagctgtgcctgcaggcagccatccagacagccctgaagtcagaggagcctttgctggctctcaaactttatgaagaagcaggtgatgtgttcttcaatgggacccgccacaggcatcatgcagtggagtactaccgagctggagctgttcctttagcaaggaggttgaaggcggtgagaactgagctccggattttcaataagctgacagagctgcagattagcctcgaaggctatgagaaggctttggaatttgccaccctggccgccaggctcagcacagtcacaggagatcagaggcaagagctggtggcctttctccgcctggctacagtgtactactccctgcacatgtatgagatggctgaggactgctacctgaagaccctgtccctctgtccaccatggctgcagagtcccaaggaggccctgtactatgccaaggtgtattatcgcctgggcagactcaccttctgccagctgaaggatgttacaggcactgcggggaagggattttacccagacagggttacgggcatcaggaagggctttctggaggacgtgatatccaaactgagttctgaaagggacacttacttaattctaactgcagaccagcaggggtgtcttctccccagagaagcagagacaagtgactgcttagggggtggggattctccccagctgccatggtgcaggatcaagaataacttgcgtggccaggactgcacagtggggctgcttggcttggcttcccagtacagactgcgaggcagatgggacactgaggcccaggaaagggaacaccttgacatcagcatcaatgtcaatgccaatgtcaatgtcagagctgggcctgagaccaacatcttctacttgcagacatga

SEQ ID NO: 16658 - DNA, 207 bp, Homo sapiens
  SIMILAR (207)..(49): 731254mologous to Mus musculus Pro-Pol-dUTPase polyprotein,accession number Y12713,Smith-Waterman Score=185.
ttgtgccttcaggacctgctcaagcctgatcacatatacaccacttccatttgatgatggaatgctgctgtgcacaacccactttatggcaggagtcgtgttaatttgctcaagcaatgaaaccacatctggtacagcagctgcaattggagtcaccacttggttaagcttatgataacccactgtcattctccaagatccatctgt

SEQ ID NO: 16659 - DNA, 2703 bp, Homo sapiens
  SIMILAR (181)..(1818): 951254mologous to Homo sapiens putative p150,accession number U93572,Smith-Waterman Score=2753.
cagaaccccttgaatgaaggggaggccgggtccccttgaggaaggatcccactacattaccaacaatttatgcagtgaatctttctcccatccttccccaagacctctggccttttaccagggtaactgtgcactggggaaagggaaatgatcagacatttcagggactacaggatactggctctgagctgatgctgattccaggggacccaaaacgtcactgtagtcctccagttaaagtagggtcttatggaggtcaggtattacacagcaagtgggcaccaatatatcatttcctcagtagtcataactgcaatggattttgttacatcagtatagccaatttaccaaagaagtttggtcaaaacatcaaagaatgccttaccaataatcggatagtgccttttaactgtgtccaagaccctacatactaaccaagcgctgccccgtgagcagtctccaccacctcccctgcaaacgtccagtggtgcagaggtaatggacgttggctctggtggtgatggacagtccgaactccctgctgaggaccccttcaacttctacggagcttctcttctctccaaaggatccttctctaagggccgcctcctcatagacccgaactgtagtggccacagcccgcgcaccgcccggcacgcacctgcggtccggaagttctcccctgaccttaagttgcttaaggatgtaaagattagcgtgagctttaccgagagctgcaggagtaaggacaggaaggtgctgtacacaggagcagagcgcgacgtgcgggcggagtgcggtctgctccttagccctgtcagtggggacgtgcatgcttgtccctttggcgggagtgttggtgacggggtaggcatagggggtgagagtgctgataagaaggatgaggagaatgagctggatcaggaaaagagagtggagtatgcagtgctcgatgagttagaagattttactgacaatttggagctagatgaagaaggagcaggcgggttcacggctaaagcaatcgttcagagagacagagtggatgaagaggccttgaatttcccctacgaggatgactttgacaacgatgtggatgctctgctggaagaaggcctttgtgcccccaaaaagaggcgaacagaggaaaaatatggcggagacagcgaccatccgtccgatggagagacaagtgtgcagccgatgatgaccaagattaaaacagtgctcaaaagtcgtggccgcccacctacagagccgctgcccgacgggtggatcatgacattccataactctggagtcccggtgtacctacacagagagtctcgggtggtcacctggtccaggccatacttcttgggaacgggaagcatacggaaacacgaccctcctctgagtagcatcccttgtctgcattataagaaaatgaaggacaacgaggaacgggagcaaagcagtgacctcacccctagtggggatgtgtcccccgtcaagcccctgagccgatctgcagagctggagtttcccctggatgagcctgactctatgggtgctgacccggggcccccggacgagaaagacccactaggggctgaggcagcccctggggccctggggcaggtgaaggccaaagtcgaggtgtgcaaagatgaatccgttgatctcgaggaatttcgaagctacctggagaagcgttttgactttgagcaagttactgtgaaaaaattcaggacttgggctgagcggcggcaattcaatcgggaaatgaagcggaagcaggcggagtccgagaggcccatcttgccagccaatcagaagctcattactttatcagtgcaagatgcacccacaaagaaagagtttgttattaaccccaacgggaaatccgaggtctgcatcctgcacgagtacatgcagcgtgtcctcaaggtccgccctgtctataatttctttgaatgtgagaacccaagtgagccttttggtgcctcggtgaccattgatggtgtgacttacggatctggaactgcaagcagcaaaaaacttgcgaagaataaagctgcccgagctacactggaaatcctcatccctgactttgttaaacagacctctgaagagaagcccaaagacagtgaagaactcgaggtgagtgttgtggtcctgccctgctgggagctgtgtgtgcagtgcggctaccctgccctgttagtgtgatctatcaggaagaagaagaaagaagaagaagaagaaaaaagaagaagaagaaagaagaagaaaaaggaggagaaggagaagaaagagaagaaggagaagaaggagaagaagggggatgagagtgaccaaagagctccaggagaagggctgtggggcttgtactccctcaccaagtttgtctgagctctgatatttccaccggtgatcggggttgctgcccataaaggtggcgtttacaaaacgtcagtttctgttcatcttgctcaggatatggctctgaaggggctacgtgttttgctcgcgccaggtaacgacccccagggaacagcctcaatgcgtcacggatgggtaccagatcttcatattcatgcagaagacactctcctgcctttctatcttggggaaaaggacgatgtcacttatgcaataaagcccacttgctggccggggcttgacattagtccttcctgtctggctctgcacagatattga

SEQ ID NO: 16660 - DNA, 1120 bp, Homo sapiens
  SIMILAR (1)..(948): 931254mologous to Homo sapiens putative p150,accession number U93564,Smith-Waterman Score=1599.
gaatcttgtaagcaccctgggaccacagagaccacccaggtctagctccctatctcaagattctgaatttattgacaactacaacgtctctcttgcttcatgtgtaacaccaacacccaccgaaaccaaacggctctgggcagaggacacagccattcacgccccctgccaggaaaagctgcagctgacacaggctcctacagcgtcggcgggccacgtgcgggaggaggggccgccttctggttggcgcccggtgtccgttcctcctatcggcgtaggccccgcgaggaagacaagggcgcgccctggctgggagggcgtggccagagacctgtccatcaccgagtccacgagtggcagcacctaccacaccgcagtaccttggcgaggcggagcaggggcaggcagccgccagccgccgtgggagccggaggatggcggcggtagcagcggccgcccgagaggaggcggtgccgagatcgggggcgccgagcgcggcagcagagagcgggcggacatgggcgccaaacagagcggcccggccgccgctaacggccgcacgcgcgcgtactcgggctcggatctaccttccagtagcagcggaggcgccaatgggaccgcgggcggcggcgggggcgctcgggccgccgccgcggggaggttcccggctcaggtgcccagcgcgcaccagcccagcgcctccggcggcgccgcggcggccgcggcggccccggcagccccggcggccccgcgcagccgctccctcggcggggccgtggggagcgtggcgtcgggggcccgcgcggcgcagtcccccttcagcatcccgaacagcagcagcggcccgtacggctcgcaggactcggtgcacagcagccctgaggacggcggcggcggccgggaccggccgtgcactgaaaagaactgtgatgagacgtggacaggagcatgctgctgcttgttcagggaaggaggctgcttcactgttgccacaggggtggtgaaccagttctgtccgcttcactccctggtgttcgcaaggcagttttcggaatcagaaactctagaggaatttgagaacactgatacgcttacttcacagaaaactgaagtctgttga

SEQ ID NO: 16661 - DNA, 1207 bp, Homo sapiens
  SIMILAR (328)..(1233): 751254mologous to Cloning vector pSacBII SacB,accession number U09128,Smith-Waterman Score=1133.
gcacctagtcagtgcggggaattagctcctggggcctaacaaaaagaaacctgccatgctgctcttgctcctctctgcactggtcctgctcacacagcccctgggctacctggaagcagaaatgaagacctactcccacagaacaatgcccagtgcttgcaccctggtcatgtgtagctcactggagagtggcctgcctggtcgcgatggacgggatgggagagagggccctccgggcgagaagggggacccaggtttgccaggagctgcatggcaagcagggatgcctggacaagctggcccagttgggcccaaaggggacaatggctctgttggagaacctggaccaaagggagacactgggccaagtggtgagcaactgggtgtcgacttcaggtgtttccaggtggtggtgcagctgcaaggatatgccagtgggcacgcacagagcccatcccaggaagaaggacctccaggacctcccggtgtgcctggtccagctggaagagaaggtcccctggggaagcaggggaacataggacctcagggcaagccaggcccaaaaggagaagctgggcccaaaggagaagtaggtgccccaggcatgcagggctcggcaggggcaagaggcctcgcaggccctaagggagagcgaggtgtccctggtgagcgtggagtccctggaaacgcaggggcagcagggtctgctggagccatgggtccccagggaagtccaggtgccaggggacccccgggattgaagggggacaaaggcattcctggagacaaaggagcaaagggagaaagtgggcttccagatgttgcttctctgaggcagcaggttgaggccttacagggacaagtacagcacctccaggctgctttctctcagtataagaaagaggggccaggtatgggagtccccagtgatgctgctgcacatcccaaggcagcccagaaaccagatactgttctgggaactaggactggggttctgctctgggggtacaaggcaggtgggggcctgaccttgggctgctctgggtgccaccctgagcccatggagaatcttaaggacgatgagtcagggtgcagcctgcattctgagcagcccaacaaagccaggggcacagccttctctggagcttccagtgtcctttgcggaagatttccatgcatgggcccaagagccacaaagacagactaa

SEQ ID NO: 16662 - DNA, 1651 bp, Homo sapiens
  SIMILAR (1084)..(1533): 281254mologous to Arabidopsis thaliana putative integral membrane protein,accession number AC012395,Smith-Waterman Score= 121.
atggcagccagtcatccacgaaatagccagcaagggcctaatgtggggaagcggaggggcaaggatggcaaaaggagatggattcaaggaatgtttagaagctgcatcaaactgtggctaattggttacatgtctgcatcatacaaaactgagagttccatgaaggtctggcttggaagtttaaagtttgtattgtttaagacagtgattaaaatgtctgtcatggatgaactactcttggatctcttccacaaactgaccagtgggaggcagctggcagcaggcaatgggctttgcggtatatcacataaggaacaggaggtatggaagccaggacataatattttagtgaaaatgagaaaggaagataaatcactggtgtggcttatacattcaacacttgctcgctacacacaagttaccaactttttaggtacctccagatcatcagtcactagatgtaaaccaggagccaactgccccagttcacacagtggcatcagtagacaactgtccccactgtctgtcaccgaagattcctctgctcctattcttgaacttcaaaaccaaggatcctcaggagtttgtggacacagagttgagagacagaacagatcagcagacgatgggacacagactcattctgagaacagcagccaagaaaacagaatcaaggctcgctgcctgtcctgcacgtccatggttctgaagggcatctggggactcttgatcatcttgtcagtatcatcatcttgggttggaactacacagattgtaaaaattacttataagaacttctattgcccatttttcatgacttggttttcaacaaactggaacattatgtttttcccagtctattattctggtcatctagccactgctcaagaaaagcaatctccaatgaaaaaattcagactcattaataccatctgccaagaagttactccagaagttactcccgaagctctcatgactgaacaagggaagaatagagttagtgtggaatgcagtcggatttttggtgaagatggtctgacgctgaaactctttcttaaaagaactgctcccttttctattctatggactttgactaattacctttatttactggctttaaagaagctgacggccacggatgtctccgctctgttctgttgtaacaaagcctttgtcttcttgctgtcatggattgtgctgaaagacaggttcatgggagtgaggatagttgctgcaataatggcaattaccggcattgtcatgatggcatatgcagataatttccacgctgattccatcataggagtggcatttgcggtgggctcagcctctacatctgcattatataaggtcttgtttaaaatgtttcttggaagtgccaactttggggaagctgcacactttgtctccaccttgggtttcttcaatttgatcttcatctccttcaccccagtcatcttgtatttcaccaaggtgggagcactggtcctcttttgctgctctgccatgggggctgtctctgtggggatgggcaggggctgtgggctgggccttcaacatcctgggggaaatgttgggggttggtgctggacataacccaatcctaaatctccaattggggacagtgctcagcgtttccggggaaatgcag

SEQ ID NO: 16663 - DNA, 595 bp, Homo sapiens
  SIMILAR (349)..(495): 481254mologous to Homo sapiens dJ875H3.1 (APK1 antigen),accession number AL049733,Smith-Waterman Score=137.
atgatgaaaagtttaagtaatcaccatggaaacctagagcagattcaaggcgagtcagatccccagcacagtaaccagcagtgggtgggcctggccgggcagcaggcaggaccatctgtgtttgggctcttcagggattcctgtcttctgttgctgctgctgctgctgtttctgcttttgctcaggaaaccaccctgttcactgacaccagacagagacattgaaggccaggttatagccactgcaggagtggcagcagcagcagcagcagctttgaaagccttatataaaacatgctcggtattgcccgtgaggcagcttggccacagatcagctggagaggcagccgatggtttggggagtatagcgatagacacgacccagctcaacatgtccgtgacagatcccacagcctgggctacagccatgaataacctgggcatggttcccgtagggttgcctggacagcagctcgtgtctgacaccttggatcccacatgggccaagtttagctgtattgtagtttatagctcttttgtttttgataaatacaccaaacaggtgcagaaagatgatgcggaagacagttctcctg

SEQ ID NO: 16664 - DNA, 1032 bp, Homo sapiens
  SIMILAR (1)..(366): 841254mologous to Homo sapiens BRCA2,accession number Z73359,Smith-Waterman Score=531.
atgtgcacatgtgtttctccggctgcacagaaggcatttcagccaccaaggaggtgtggcaccaaatacgacacacccatagagaaaagagatgtgaattctcctcagatgactccatttaaaaaattcaatgaaatttctcttttggagagtaattctatagctgacgaagaacttgcattgataaatacccaagctcttgtgtgtggttcaacaggagaaacactatttatatctgtcagtgaatcctctaggagtgctcccaccagttcagaagattatctcagtatgaaacgacgttgtactacatctgtgatcaaagaacaggagagttcccaggccagtacggaagaatgcatccagaatttgctcctccatccacggggactgagagccattactattgctgtatttggtaagcaaaatacgtacatcaggctcgaaccctttaagatcaacgttcttgagcagatcacgaagcatatcgaaaaactgcatgtgagagcggcaaattggtaccacagagaatggggcactgctgtaaagatacccaaagatgtgaaagcaactttggaactgggtaacaggcagagactggaaataatggaagggctcagaagacaggaatatgtggcagctctggctggccaggctaaaaggggtcaatgtacagttcagaccattgcttcagggggtacaagccccaagcgttggcagctgccacatggtgttgcgcctgtgtgtgcacagaagtcaataactgaggtttgggaacctccacttagatttcagaagatgtatggaaatgcctggatttccaggcagaggtgtgctgcaggggtggtgccctcatggagaatctctgctagtgcagtgcagatgggaaatgtggggtcagagcccccacacagaggctccactggggcactgcatagtggagctgtaagaagagggccactgcccaccagaccccagaatggtagatccaccgacagcttgcagcttgtgcctggaaaagccgcagacacttaa

SEQ ID NO: 16665 - DNA, 1435 bp, Homo sapiens
  SIMILAR (2731)..(3558): 861254mologous to Homo sapiens similar to D.melanogaster peroxidasin(U11052),accession number D86983,Smith-Waterman Score= 1178.
ttatgaacctgtaaaatcaaaagcaagttggttacttcctagatacaatgggggtacaggcattgggtaaatacacctattccaaatggaagaaattggccaaaacaaaaaggctataggccccatgcaagcccaaaatccagcagggtagccaaatcttaaagctccaaaatgatctcctttgactccatgtctcatatccaggtcatgctgatgcaagaggtgggctcccatggccttgggcagctccacccctgtggctttgcaaggtacagctccactcctggctgctttcacaagctggcattgagtgtctgcggcttttccaggcacaagctgcaagctgtcagtggatctaccattctggggtctggtgggcagtggccctcttcttacagctccactaggcagtgccccagtggagcctctgtgtgggggctttgaccccacatttcccatctgcactgcactagcagagattctccatgagggcaccacccctgcagcacacctctgcctggaaatccaggcatttccatacatcttctgaaatctaagtggaggttcccaaacctcagttattgacttctgtgcacccacaggcccaacaccatgtggcagctgccaaggcttggggcttgtaccccctgaagcaatggtctgagctgtacattgaccccttttagccatggccagccagagctgctgggaagcagggcacaaagtttcaaggctgcacacagcaggggggcccaggacccatctcatgaaaccatttttccctcctaggtctccaggcctgtgatgggagaggctgccatgaagtcctctgccatgccctgaaaatggggctttcttttctatcacatcatcaggctgcaaattttccaaacttttgtgctctgcttcctcttgaatgctttgctgcttagaaatttcttcaaccagataccctaaattgtttctttcaagttcaaagttccacatgtggatctccacatattcctgtcttctgagcccttccattagttccagtctctgcctgttacccagttccaaagttgctttcacatctttgggtatctttacagcagtgccccattctctgtggtaccaatttgccgttctcacacttccctctgattgttgcatgttgttcactgttatgtaacattgtgttgcagcaagaaaagcaatgaggaatggcatatcccccattattattgataataccaacctccacgcctgggaaatgaagccctatgcagtcatggtaggaagaagtatcattctgaattttcagttatggacattttgtgagaaagttgaagcatctgttctttcctctttttctgatgttccatgatttcatatttgctaacagtggttctcccagggagaaggtaacgaggttttattttagtgtttctctgct

SEQ ID NO: 16666 - DNA, 389 bp, Homo sapiens
  SIMILAR (345)..(220): 401254mologous to Homo sapiens Human HUPF-I mutant protein fragment 53,accession number Y21405,Smith-Waterman Score=63.
tcccctgaaggttatgttcaaagcaggtcagggtgtgattaaatagattaaggaaatatactgtgctgtttgataattcttcactgttgtttgttaaacaatttgcacaatttgcctcctgccatgtggtattaaaaaattctgagagaatcacaactatttgcattctatctgccattaagagacttctggcacaactctgactctctgaagtattccccgcggctcggctgatgttgtccatcttgctgacgacctgttggaagagggggtagcaggtctgacagaggcgcacgggccgggcgctgcgcaccagacaccctgtcagctctgcgctgctgttggcgaagtccagcaggagctcccggcactcaggatccagatccggc

SEQ ID NO: 16667 - DNA, 855 bp, Homo sapiens
  SIMILAR (498)..(854): 361254mologous to Caenorhabditis elegans contains similarity to Pfam domain: PF01484 (Nematode cuticle collagen N-terminal domain), Score=27.5, E-value=0.0001, N=1,accession number Z67990,Smith-Waterman Score=135.
cttcacgccccaacgctttaaacaccgggcccgtcttttgaattattgggtcccaacaaaaaaaatgctttctttcccaccccgggcacgaaatttggaatttccttaagggcgccccccttaattttttttccatcaagtttttattgagcggtgttctcagcctgctatctccaatcgaggttcaactgcctggttccagatcttggaacttgtggtcagtcgtttccatctgactctcctagaatccttgccctctttatcttccacatattcacagccattttcatccctggacagtccccatctactttctgtactctcagtctggttacagaatactactacagaaatttgttggggaaactgaggcccccagcgctgaccatcattacaccctcctcctttcccaactctcctgagccacagtcccggacgtggtcctgtacccacccccgcggctcggctgatgttgtccatcttgctgacgacctgttggaagagggggtagcaggtctgacagaggcgcacgggccgggcgctgcgcaccagacaccctgtcagctctgcgctgctgttggcgaagtccagcaggagctcccggcactcaggatccagatccggcaggtccgggggcagcgacagaggccccagccctccaccctgcaggagggacagggacaagtcctccacctccagcaactgctgctccgacaggaggtcgtggaagaccctgtgcggactgctgccgaaggggagcgcgcccagggccagccccgaccacagcagcagccccagcggcagccacggcggcaacgaacacctccgctgcgcggctgtcgggcccggctccat

SEQ ID NO: 16668 - DNA, 401 bp, Homo sapiens
  SIMILAR (221)..(400): 451254mologous to Homo sapiens unknown,accession number AF007170,Smith-Waterman Score=136.
cccagattttagagcaggagtcggctctgagttccctttttgggttttgggtggcagcagccagaggaggaatatggcgctcttaggcagccgagcggagctggaagcggacgaggacgttttcgaagatgccttggaaaccatctcaatatcttctcactcagatatggcaacaagcagccttcactttgcatcatgtgatacacaacaggcgcccagacagcgcggagcgtctactgtcagcagttcatcatcaaccaaggtggatctcaagagtggcctcgaagaatgtgctgtggcattgaacttatttctaagcaacaaatttacagacgccttagaattgcttcgcccctgggctaaggagagtatgtaccatgccttgggctacagtaccattg

SEQ ID NO: 16669 - DNA, 817 bp, Homo sapiens
  SIMILAR (648)..(370): 431254mologous to Arabidopsis thaliana putative protein,accession number AL035540,Smith-Waterman Score=175.
tcaaatgtagccaacggttgaaaccgtgtcaaataaagcaaactgtgggctgtaaccaatccagctgtctctgtacctcacttccgttttctgcacgtcactttcattctctgtccataatcttcttccaccacatggctgcactgcagtctccgagcctgctctggctccagagatcgactgattcacgaatctttcattgctcaattgaactcctttaaatttaattctgctgaagtttttatcatatgtcatgctaaggtatttgcatgttactttaaaggcaatgagaagctgtgcacagattttaagaggcaaggcgaaaatggacttgcattttagaaagagcagtctattgtcagctgctagcagcaatctgaaatccatgatagccttggccattaattttcctaagaagcgaaacttcatcttaacctttgcgatatgagctggctttgctgtcctaccaaagggaagcgcaaacaggccctggaggttttgaatatacttggtcccttcttggctcccttttggattgctaagagttacttcttcacctctccaaagacccaagtcagctctctgtagttcctgagatacaagcgcataaaactccagtgtaggcccaagacctgtaccaacccctcccgtacccgtagctgtgccctgccaggtcggttcataccccctttctgaattctttggcgtggaaactcctcgtgctcccaggattaccaactgctttttccttactcccctagcattctttccccgggaagccagctgtagtactgcatgttcttcagtaggtggcaac

SEQ ID NO: 16670 - DNA, 768 bp, Homo sapiens; identical to SEQ ID NO: 13538
  SIMILAR (139)..(282): 1001254mologous to Homo sapiens Amino acid sequence of short human FAIM,accession number Y41256,Smith-Waterman Score=254.

SEQ ID NO: 16671 - DNA, 1095 bp, Homo sapiens
  SIMILAR (586)..(1008): 281254mologous to Dictyostelium discoideum cyclic AMP-binding protein,accession number X55975,Smith-Waterman Score=113.
atggagcgtgagaagccctaccatatgctgtctgcaagctggagagctgcagaggctggtagcgtggctcagtccaagcacagaggcctcaaaaccatggaagctgatggtataactcagtctgaggatgaaggcttcagaacctgggggactacaggtaagaagggccgttcagagactttcatgtcagattgtggagatcatggtgtgcatctgcgggtttcactgctagcagctgacaatagactgctctttctaaaatgcaagtccattttcgccttgcctcttaaaatctgtgcacagcttctcattgcctttaaagtaacatgcaaataccttagcatgacatatgataaaaacttcagcagaattaaatttaaaggagttcaattgagcaatgaaagattcgtgaatcagtcgatctctggagccagagcaggctcggagactgcagtgcagccatgtggtggaagaagatttatggacagagaaaggaaagtgacgtgcagaaaacggaaggctaaggagagtatgtaccatgccttgggctacagtaccattgtggtgttgcaggctgtcctgaccttcgagcaacaggacatccagaacggcatttctgccatgaaggacgctttacaaacctgccaaaaaagcaagcagagtccttccacctacagtccaggtgggtggtgtgtcagaggcctctcggggaccagtgaccgtgacccaaggctgccctcaggccacaccatctgcgagatgcggtggccacctggcgagggaaaaggactggcaccggaccaaagaccaggtggatgcttccacggaccccagcagccagaggaggaatatggcgctcttaggcagccgagcggagctggaagcggacgaggtacgatccgatggggattgcgggcccggcccctgaagccctggacaggagtccgggagagaagacgacgcctgggctttacgaagtctgaccctgaagtcctggcactggctctctgggtgttcgtggaatcatccctcgacctgggaatctcaccttctatggaagtttcctggtggcagaaccgaaaggcttacgattga

SEQ ID NO: 16672 - DNA, 396 bp, Homo sapiens
  SIMILAR (301)..(2): 711254mologous to Mus musculus ubiquitin-specific processing protease,accession number AF170563,Smith-Waterman Score=344.
  misc_feature (1)...(396): n = a,t,c or g
nttcaactgctcttgatggatcaacatacttccttttggtaccaacaagaagtgcaaatagatacctcagctcacgcataaaaggcaaattccgatgttccttttggtttcggggtaaatcttgagcatttgatggaggcttgtaattcagaactaatcttctaaattccaaaagattaaataatgattgtatctgcttggcttcccacactgatgtatctatcattgccaggaagtgctgtttggtagtaagttgtctcctcctgctgaggggtcttagcattcttcgcagtaaggaaagccactgctaattccaagtttccattactatccttcaaggcttgctgtagtatctgggtgacattaatccaagtaatttctctccggacgcgtggg

SEQ ID NO: 16673 - DNA, 683 bp, Homo sapiens
  SIMILAR (218)..(682): 1001254mologous to Homo sapiens ubiquitin-specific protease,accession number AF134213,Smith-Waterman Score=773.
gcggccgccgtggccctcacagtcggcgtttcgccgtcatcccgcggtgcccgcgcacgccggccgccatcgccttcgcgcctggctggcgggggcgctgtcctcccaggccgtccgcgccgctccctggagctcggcggagcgcggcagccagggccggcggaggcgcgaggagccgggcgccaccgccgccgccgccgccgccgccgcgggggccatgaccgtggagcagaacgtgctgcagcagagcgcggcgcagaagcaccagcagacgtttttgaatcaactgagagaaattacggggattaatgacacccagatactacagcaagccttgaaggatagtaatggaaacttggaattagcagtggctttccttactgcgaagaatgctaagacccctcagcaggaggagacaacttactaccaaacagcacttcctggcaatgatagatacatcagtgtgggaagccaagcagatacaaatgtgattgatctcactggagatgataaagatgatcttcagagagcaattgccttgagtttggccgaatcaaacagggcattcagggagactggaataactgatgaggaacaagcaattagcagagttcttgaagccagcatagcagagaataaagcatgtttgaagaggacacctacagaagtttggagggattctc

SEQ ID NO: 16674 - DNA, 2706 bp, Homo sapiens
  SIMILAR (1114)..(1905): 851254mologous to Homo sapiens ubiquitin-specific protease,accession number AF134213,Smith-Waterman Score=1150.
atggcaccagcatctgcttctggtgagggcctcaggaagttgccaatcatggtggaaggagaaggggagccagtgtgtatagattacatggcaagagacaagcaagagggaggccctaccttcaacattggggatcaaatttcaacaagagacttggtgagggccaaagaaaccgtatccaaaccataccagctcgtttgcagtgtagggggtgcaagttcaaggcttgtgaaattcctagaaaggcgaggggagagaacgcgtgacacagaaaggggccggagttcgggaccctacgcagttttgggacgttatgggcatggagggaaatgtttgctttggaggctttggtcggcgtttcgccgcctgcccgcggtgcccgcgcacgccggccgccatcgccttcgcgcctggctggcgggggcgctgtcctcccaggccgtccgcgccgctccctggagctcggcggagcgcggcagccagggccggcggaggcgcgaggagccgggcgccaccgccgccgccgccgccgccgccgcgggggccatgaccgtggagcagaacgtgctgcagcagagcgcggcgcagaagctccaggagccagccaggtgcgtgttacagccgttctttgttcccaccgtttggcgagttctgggtttttgtccagtgaccaagaataatgaggtacgtggacaccagagaagaaaaaaaatccatacaaggagcatctcagagcccagaagaggagctctagatatggaagtggattggatgggaaccaccttggatttggaattgctggtcagggagaggaccatatttaggacatttccagttgaggatcagggcgtatcacaggtcagaagtttcataaatgggaagcaccagcagacgtttttgaatcaactgagagaaattacggggattaatgacacccagatactacagcaagccttgaaggatagtaatggaaacttggaattagcagtggctttccttactgcgaagaatgctaagacccctcagcaggaggagacaacttactaccaaacagcacttcctggcaatgatagatacatcagtgtgggaagccaagcagatacaagactgaccagtcagggaagcgaccagtcagggaagcggctacttctgtcacaattaggaaagcggcctcttggactactgagttcaagaacatacttctatagctgcagcccaggaaacaggaagccaggattagatgtgattgatctcactggagatgataaagatgatcttcagagagcaattgccttgagtttggccgaatcaaacagggcattcagggagactggaataactgatgaggaacaagccattagcagagttcttgaagccagcatagcagagaataaagcatgtttgaagaggacacctacagaagtttggagggattctcgaaacccttatgatagaaaaagacaggacaaagctcccgttgggctaaagaatgttggcaatacttgttggtttagtgctgttattcagtcattatttaatcttttggaatttagaagattagttctgaattacaagcctccatcaaatgctcaagatttaccccgaaaccaaaaggaacatcggaatttgccttttatgcgtgagctgaggtatctatttgcacttcttgttggtaccaaaaggaagtatgttgatccatcaagagcagttgaaattcttaaggatgctttcaaatcaaatgactcacagcagcaagatgtgagtgagtttacacacaaattattagattggttagaagatgccttccaaatgaaagctgaagaggagacggatgaagagaagccaaagaaccccatggtagagttgttctatggcagattcctggctgtgggagtacttgaaggcacttcttccatggcggcgacaagagaaaatgaggtagaagtaaaagtggaaacccaggataaacccttgagatttatctggggtttccacttttacttctacctcatttcctcttgctgctgccatcctaggaacttggtgccctgtgtctcagctgctccagcttttgctagaaggggccaaggtgtagctcggcccattgtttcagagggtgcaagccccaaaccttggcaccttccacgtggtgttgagcctgcgggtgcacagaagtcaagaagtgaggtttgggcacctccacctagatttcagaagatgtatagaaatgcctggatgtccaggcagaagtttgctacagagttggggtcctcatggacaacctctgctagggcagtacggaagagaaatgtggggttggagcccacacagagagtccctactggggcaccacctagtggaactgtgagaagaaggccactgtcctccagaccccagaatgttagatccactgatagcttgcattgtgtacctggaaaagctgcagacactcaacaccaacccgtgaaagcagccaggagggaggctgtaccttgcaaagccacaggggcggagctgcccaggaccatgggaacctacctcttgcatcagtgtgacctggatgtgagagctggcatccaaggagagcatttcagagccttaaaatttgactgccctgttggatttcagactgtaacccctttgttttggcctgtttctcccatgtggaatggctgtatttacccagtacctgtactccaattgtaa

SEQ ID NO: 16675 - DNA, 555 bp, Homo sapiens
  SIMILAR (12)..(554): 661254mologous to Homo sapiens p40,accession number U93570,Smith-Waterman Score=591.
gatcacaactcctcaccagcaagggaacaaacagtatggagaataagtttcacgaattgacagaagtaggcttcagaaaaataaccagtttagagaagaacataaatgacctgatggagctgaaaaacacagcacgagaacttcgtgaagcatacacaagtatcaagagcagaattgatcaggcgaaagaaagcatatcagagattgaagatcagcttaatgaaataaaatgtgaagacaaggttagagaaaaaagaatgaaaagcaacaaacaaaacttccaagaaatatgggactatgtgaaaagaccaaacctacgtttgactggtgtacctgaaagtgacagggagaatggaaccaagttggaaaacactcttcaggagattatccaggagaacttccccaacctagcaagacaggccaacattcaaattcaggaaatacagagaacagcacaaagacaatcctcgagtagagcaaccccaatacacataatcgtcagattcgccaagtttgaaataaaggaaaaaatgttaagggcagccagagagaaag

SEQ ID NO: 16676 - DNA, 839 bp, Homo sapiens
  SIMILAR (28)..(837): 641254mologous to Homo sapiens p40,accession number U93569,Smith-Waterman Score=808.
gatcacaactcctcgccagcaagggaacaaaactggatggagaatgagtttgacgaattgacagaagtaggcttcagaaggtgggtaataacaaactcctccgagctaaaggagcatgttctaacccaatgcaaggaagctaagaaccttgataaaaggttagacaaattgctacctagaataaccagtgtagagaagaacataaatgacctgatggagctgaaaaacacagcacaagaacttcatgaagcatacacaagtatcaatacccaaatcgatcaagcagaagaaaagatatcagagattgaagatcaactcaatgaaataaaaccaaatctacgtctgattggtgtacctgaaagtgatggggagaatggaaccaagttggaaaacactctgcaggatattatccaggagaacttctccaacctagcaaagcaggccaacattcaaattcaggaaatacagagaacaccacaaagatactcctcgagaagaacaaccccaagacacataattatcagattcaccaaggttggaatgaaggaaaaaatgttaagggcagccagagagaaaagtcgggttacccacaaaggaaagcccatcagactaacagtggatctctcggcagaaaccagaaaagagtgggggccaatattcagcatttgtaaagaaaagaattttcaacccagaatttcatatccagccaaactaagcttcataagcgaaggagaaataaaatcctttacaaacaagcaaatgctgagagattttgtcaccaccaggcctgccctacaagagctcctgaaggaagcactaaatatggaaaagaacaaccg

SEQ ID NO: 16677 - DNA, 507 bp, Homo sapiens
  SIMILAR (271)..(504): 611254mologous to Homo sapiens PRO2221,accession number AF116695,Smith-Waterman Score=225.
atgattggagcagatccagaatcccagtccctgaatagcaatcagtgttggaagctaagagccggcatccactatcatcacatgaaacatggaagaaacggcaaatcctatacagctgttagtgacctaactgggggacacctcccagtagggaccgacaggcacctcatacaggagagctctagctggcatctggcatgtgcccctctgggaccaagcttccagagaaaggatcgggcagcaatagttgctgttctgcagcttctgctggatcacaacccctcgccagcaagggaacaaaactggacagagaatgagtttggtgaattgactgaagtaggcttcagaaggtgggtaataacaaactcctctgagctaaaggagaatgttctaactcagtgcaaggaagctaagaaccttgaaaaagggttagatgaattgctaactagaatatccagtgtagagaagaacataaatgacctgatggagctgaaacatgcagcatga

SEQ ID NO: 16678 - DNA, 2370 bp, Homo sapiens; identical to SEQ ID NO: 15368
  SIMILAR (1)..(696): 661254mologous to Homo sapiens p40,accession number U93570,Smith-Waterman Score=773.

SEQ ID NO: 16679 - DNA, 1569 bp, Homo sapiens
  SIMILAR (643)..(1566): 501254mologous to Homo sapiens p40,accession number U93569,Smith-Waterman Score=616.
atgtgcgatgccaactctttgctgtttaatgcacagcaggcacggtcaaaagggcaagtgcctctccagtttctgaggccagagtggagggttgctgttgctctgatgtttgctcagtgcaaggtggagaaggaaagcacaaggagaagacagaaatatcaagagtctcaagaacctttgaatgaagtaaacagtttcccacaaaaaatcagctatacacaattcccaaactcattttatgagcctcatcaagattttaccagtccagatatattcaagaagtcaagatctccatcttggtataaatacacttccacagtcagcacggggatcacagacttagaaagttcaactggactttggcctacaatttcccagtttactcttagtgaagagacaaacgcagatgtttattattatcgcatcatcatacctgtccttttgatagcacgtggggaaaggggcggctgtgggcacagcttcagcagacttaaatgttcctgcctgctggctctgaaaagagcagcagatctcccaccacaacactcgagctctgctaagggacagactgcctcctcaagcaggggtcaaaagacaactcatacaggagagctccagctggcatctggaggatggccctctgggacgaagcttccagagaaaggaacaggcagcaaaatctttgctgttctgcaacctccactggtgatacccaggcaaacaaggtctggagtggacctccagcaaaatccagcagacctgcagcagagggaaagcaatagcatcaacatcaacaaaaaggacatccacaccaaaaccccatatgaaagtcaacaatatcaaagaccaaacgtagataaatccacgacgatgaggaaaaactcgcacaaaaaggaggaaaattccaaaaaccagaacaccttttctccaacggatcacaactcctcgccagcaagggaacaaaactggacagagaatgagtttgacaaactgacagaagtaggcttcagaaagtgggtaataacaaactcctctgagctaaaggagcatgttctaacccaatgcaaggaagctaagaaccttgaaaaaaagttagaggaattgctaactaaaataaccagtgatggggagagtggaaccaagttaaaaaacactcttcaggatgttatccaggacagcttctccaacattccaattcaggaaatacagagaacaccacaaagatactcctccagaacagcaaccacaagacacataatggtcagattcatcaaggttgaaatgaaggaaaaaatgttaagggcagccagagacaaaggttgggttacccacaaagggaagcccatcagactaacagcagatctctctgcagaaaccctacaagccagaagagagtgggggccaatatttaatattcttaaagaaaagaattttcaaactagaatttcctatcccgccaaactaaccttcaggagtgaaggagaaataaaatcctttacagacaagcaaatcctgatagatcttgtcaccaccaggcctgccttacaagagctcctgaaggacgcgtga

SEQ ID NO: 16680 - DNA, 685 bp, Homo sapiens
  SIMILAR (1)..(582): 941254mologous to Macaca fascicularis hypothetical protein,accession number AB047842,Smith-Waterman Score=994.
  misc_feature (1)...(685): n = a,t,c or g
gaattttttatctattacttagcgatctttcagtgtaattggcctgaagtgaaaaccacagcctctgatggtgaacagaccacacgtgagcctgtgctcaaagccatgtttttggctgacacccatttgcttggggaattcctaggtcactggctggacaaattacgaagggaatggcagatggagagagcgttccagacagctctgtggttgctgcagccggaagtcgtcttcatcctgggggatatctttgatgaagggaagtggagcacccctgaggcctgggcggatgatgtggagcggtttcagaaaatgttcagacacccaagtcatgtacagctgaaggtagttgctggaaaccatgacattggcttccattatgagatgaacacatacaaagtagaacgctttgagaaagtgttcagctctgaaagactgttttcttggaaaggcattaactttgtgatggtcaacagcgtggcgctgaacggggatggctgtggcatctgctctgaaacagaagcagagctcattgaagtttctcacagactgaactgctcccgagagcangcacgtggctccagcccggtgtggacctgggcctctgctgcccacgtctgcccctgtcctcctgcagcattatcctctgtatcggagaagtgatgctaactgttctggggaagaa

SEQ ID NO: 16681 - DNA, 1785 bp, Homo sapiens
  SIMILAR (259)..(645): 861254mologous to Macaca fascicularis hypothetical protein,accession number AB047842,Smith-Waterman Score=617.
atggcagtgattatgaacttggactctggtgaccctggctcacgagtgaagctacagaccttcacggtgagtgttacagctcttaaagtggagcgtctggagttgttcgttcctccctttgggctcgtggtctcgctggcttcaggagtgaagctgcagaccttcgcgggcgggaaagcgtggctgttacaaacgcattctgacttgggggagcagaagttaactactttcataccaatctctctctctttaaaagtgatcttttggtgtaattggcctgaagcgaaaaccgcagcctatgatggtgaacaggccacgtgtgagcctgtgctcaaagccatgtttttggctgacacccacttgcttagggaattcctaggtcactggctggacaaattacgaagggaatggcaggtggagagagccttccagacagctctgtggttgctgcagccggaagtcgtcttcatcctggaggatgtctttgatgaagggaagtggagcacctctgaggcctgggtggatgatgtggagcagtttcggaaaatgttcagacacccaagtcatgtgcagctgaaggtagttgctggaaaccatgacactggcttccactatgagacgaacacatacgaagtagaacgttggaggaacagaaacaaccccagtttcattatgggtagcatcacacccacagactatgccctctccaagtgccacctaccacctgaggacgtggtcttgatcatctactgtggagtgaaattaccagatagaatagtagactctaaagcaggactcctgaaactacctgtgttgaagaatgtgatttccacccaactccaattcccatctatcatggaccaacttttggtctacaacttgttcaatgagacgagtccattggtcatgtgcctggatgtcatggcaatgtcaaatcgaggaaaccaccatctggctgcaacacgcctaaggaaggtattggatcacaactccttgccagcaagggaacaaaactggacggagaatgagtttgatgaattgacagaagtagtcttcagaaggtgggtaataacaagctcctctgagctaaaggagcctgttctaacccaatgcaaggaagctaagaaccttgaaaaaaggttagagaaattgctaactggaataaccagtttagagaagaacataaatgacctgatggagctgaaaaacacagcacaagaacttcatgaagcatacacaagtatcaatagccaaattgatcaagtggaagaaaggatatcagagattgaagatcaacttaatgaaataaagtgtgaagacaagattagagaaaaaagaatgaaaaggaacaaacaaaccctccaagaaacatgggactatgtgaaaagaccaaacccatgttggattggtgtacctgaaagtgatggggagaatggaaccaagttagaaaacactcttcaggatattatccaagagaactttcccaacctagcaagacaggccaacattcaaattcaggaaatacagagaacaccacaaagatactcctcgagaagagcaaccccaagacacataatcgtaagattcaccaaggttgaaatgaaggaaaaaatgttaagggcagctggagaaaaagaagatgaaactgacaacaatgagttcttcttgtggagccagaaagggaagagggccggaaccctgaacgaccacgtggaggaaagctgtccaccaaccaaaaatgcctgccttggaacacccattcattgctatgtgggcaagaaataa

SEQ ID NO: 16682 - DNA, 1259 bp, Homo sapiens
  SIMILAR (774)..(1166): 961254mologous to Homo sapiens p40,accession number U93567,Smith-Waterman Score=639.
gagtggactttcagcaaactccagcagacctgcagcagagggtcctgactgttagaaagaaaactaacaaacagaaaggaatagcatcaacatcaacaaaaaggacagccacacaaacacccgatccgaagatcactgacatcaaagaacaaaggtatataaattcaccaagatgaggaaaaaccagctcaaaaaggcttgaaaattcccaaaacccgggatgccctcttctccctccaaagggatcacaactgctcgccagcaagggaaccaaaactggacagagaataagtttgatgaattgacagaagtaggcttcagaaggcgggtaataacaaactcctctgagctaaaggagcatgttctaacccaatgcaaggaagctaagaaccttgaaaaaaggttagatgaattgctgactagaataaccagtgtagagaagaacataaatgacctgatggagctgaaaaacacagtacgagaacttcctgaagcattcacaagtttcaatagccaaattgatcaagtggaagaaaggatatccgtgattaaagatcaacttaatgaaataaagagagcaggcaagattagagaaaaaaagaataaaaaggaacaaacaaagcctccaagaaatatgggactatgtgaaaagaccaaaatctacgtctgattggtatacctgaaagtgacgaggagaatggaaccaagttggaaaacactctgcaggatattatccatggagaacttccccaatctagcaaggcaggccaaccgttcagattcaggaaatacagagaacgccacaaagatactcctcgagaagagcaactccaagacacataattgtcagattcaccaaagttgaaatgaaggaaaaaatgttaagggcagccagagagaaaggtcgggttaccctcaaaggaaagcccatcagactaacagcggatctctcggcagaaaccctacaagccagaagagagtgggggccaatattcaacattcttaaagaaaagaattttcaacccagaatttcatatccagccaaactaagcttcataagtgaaggagaaataaaatactttatagacaagccaatgctgagagattttgtcaccaccaggcctcccttacaagagctcctgaaggaagcactaaatatggaaaaactggtacctcccactgcaaaaacataccaaattgtaaagaccatcaacactatgaagaaactgcatcaactaatgggcaaaataaccacctag

SEQ ID NO: 16683 - DNA, 630 bp, Homo sapiens; identical to SEQ ID NO: 16540
  SIMILAR (109)..(627): 831254mologous to Homo sapiens cytokeratin 18 (424 AA),accession number X12883,Smith-Waterman Score=685.

SEQ ID NO: 16684 - DNA, 1542 bp, Homo sapiens
  SIMILAR (189)..(488): 1001254mologous to Homo sapiens Amino acid sequence of a human secreted peptide,accession number Y12916,Smith-Waterman Score =560.
atggcaatgattattgatgatgatgatgatgatgatgatgataatgatggtgatgatgatgttgatggtgatgatgatgggttagaagcacaggcttgcgttctgggggatgagtacaggacccctgtcatgctacgagcagatggcatcgatcctgactttgctgccatgaaatcccctcaagagagccccacatcaggggtcctgagtttgcagacagtcattagagacatccttgtttgggaaacagctgccctccaccctgatttcacagctggggaaacagggcctggagaggagactcatctggtgagaaaactaaagctcaagaaggccacggcacacacaggcagcgagggcagcaggaagattggaaatcagctctgctcccaatgcctgtgcccactctgttccaacacagccttccaaagctcatacgctgtgaagttttctgcccatcacattggccaaagagctctagccagagttgaagccagtgctgatcactttcctgacaacctggctggcagagatgggaccgtatgtagcacagggaagagtgggggtaataatagtgggaactcccagagttgtggagaagattcgacaagtgaatgcacacttcctggccacagcgagatcttgttaggaaagaaagttgccaggatgagcgggggcgccacatccagcgttctctgtggaagcctgcagcccctatgccatgacagcacgagattcaccactcgcttcaccttctccaccaactaccagtccctaggctccgttcagcctcccagctatggtgtccagctggtcagcagcgcagccagcgtctatgcaggcgctgggggctcgggctcccggatctctatgtcccgctccaccaacttccaaggctgcttggggtctgggggcctggctgcggggctggccgggggtctggagagaatgggaggcatccacaaggagaaggagaccatgcaaagcctgaacgactgcctggcctcctacctggacagagtgaggagccaggagaccgagaaccagaagctggaaaacaaaatctgggagcacctggagaagaagggaccccaggtcagagactggggccattacttcaagaccatcgaggaactgaggactcagatctttgcaaatactgtggacaatgcccgcattgttctgcagatcaacaatgcccgtcttgctgctgatgactttagagtcaagtatgagacagggctggccatgcgccagtctgtggagagcgaaatccatgggctctgcaaagtcactgatgacacaaatgtcactcggctgcagctggagacagagatcgaagctctcaaggaggagctgctcttcatgaagaaaaaccacaaagaggaagtaaaaggcctacaagcccagattgccagctctgggttgaccatggaggtagatgcccccaaatctcagaacctcaccaagatcatggcagacatccgggcccaatacaaggagctggctcggaagaaccaagaggagctggacaagtactag

SEQ ID NO: 16685 - DNA, 1376 bp, Homo sapiens
  SIMILAR (34)..(537): 731254mologous to Mus musculus cytokeratin,accession number M22832,Smith-Waterman Score=573.
ctgagtcctgtcctttctctctccccggacagcatgagcttcaccactcgctccaccttctccaccaactaccggtccctgggctctgtccaggcgcccagctacggcgcccggccggtcagcagcgcggccagcgtctatgcaggcgctgggggcctggccaccgggatagccgggggtctggcaggaatgggaggcatccagaacgagaaggagaccatgcaaagcctgaacgaccgcctggcctcttacctggacagagtgaggagcctggagaccgagaaccggaggctggagagcaaaatccgggagcacttggagaagaagggaccccaggtcagagactggagccattacttcaagatcatcgaggacctgagggctcagatcttcgcaaatactgtggacaatgcccgcatcgttctgcagattgacaatgccccgtcttgctgctgatgacttttagagtcaagtatgagacagagctggccatgcgccagtcctgtggagaacgacatccatgggctccgcaaggtcaattgatgacaccaatatcacacgactgcagctggagacagagatcgaggctctcaaggaggagcttgctcttcatgaagaagaaccacgaagaaggaagtaaaaggcctacaagcccagattgccagctcctgggttgaccgtggaggtaagatgcccccaaattttcaggaccttcgccaagattcatgggcagacatccggggcccaatatgaacgagctggctcggaaagaaccgagaggagcctagacaaagtactggttctcagcagatttgagggagagcaccacagtgggtcaccacacagttttgctgaggtttggagctgcttgagacgacgcttcacagagctggaggacgtacagtcccagttccttgggagatccgacctggggattcccatggaggaaatcttgaagggccagctttggagaacagcctgagggaaggttgaaggcccgcttacgcccttacaagatggagcaagcttcaacggggatcctggcttgcacctttgagtcagagcttggcacagaccccggggcagagggacagcgccaggcccaggagtattgaggccctgctgaacatcaaggtcaagctggaagctgagattcgccacctaccgccgccttgttggaagatggcgaggactttaatcttggtgatgccttggacagcagcaactccatgcaaaccatccaaaagaccaccacccgccggatagtggatggcaaagtggtgtctgagaccaatgacaccaaagttctgaggcattaagccagcagaagacgggtacctttggggagcaggaggccaataaaaagttcagagttc

SEQ ID NO: 16686 - DNA, 485 bp, Homo sapiens
  SIMILAR (319)..(89): 1001254mologous to Homo sapiens DREV1 protein,accession number AJ278578,Smith-Waterman Score=410.
agggtgcggactctgaagacttcgacctccacgtgtttatactggtttgagaacaaagacagcgtcatccagaacgtagtagtccataatacatgtcgccttcacacaggtatggtagtctggtgaaagcttcgataacaaaaccagcttttctgaaaacttcaggcagactattcacttgttcttcccagttctgtcctttgatttccaaaatttctgatggtttctcccacttgccaccgttttccacatagggatgaaaggggaggacaagggcaaggatgaccctgcctctagttggctccaagacacttctgatataattggataaatagccagcccgatttctcaatgctgttgtttaagaagatctgtgttccttgatcaaggtaactctgaacaaagacagcctggagtgattcgcataatttctctctgttgcacacataccactggtggttatccttcctgccgcccgcggccgc

SEQ ID NO: 16687 - DNA, 498 bp, Homo sapiens
  SIMILAR (326)..(1840): 991254mologous to Homo sapiens N-WASP,accession number D88460,Smith-Waterman Score=2731.
gcggccgccgccggcccacccgggccgctagtcatgttcacgtacagggagcgggtgagcgggctccgcagcgtccacatcctccgcgccagccacacggacgccaggctcaggcaagaagaacccactgagaggttacagtttcattcctcaggtctattaatcaggttttccagagaaacagaaccaattggtgtgtatataaaagaagattaggaggaatgggcttacaagatgatggtgtttgcgaagtcccacgatctgccatttgcaaactgagacccaagaaagctggtggtgtaactcaggctgaaggcctgagaaccagggggccaatggggctaagtcccagtccaagggcaaaaaaagatgagatgagatcacccagctcaacagtgaggcagaaaaacaaaaggaggcgaactcctgtctctctgttttgttccattcgggccctcaatggatagcatttaaaagacagaaacccctaaattatga

SEQ ID NO: 16688 - DNA, 467 bp, Homo sapiens
  SIMILAR (467)..(402): 451254mologous to Homo sapiens dJ622L5.7.1 (novel protein (isoform 1)),accession number AL049795,Smith-Waterman Score=43.
cttctccatacttcaacaaagaatgagttgtggcaatgagggaagagagaccctctcatagtgttttatactcagtacctgttttaagaaaaaacaacaaggaagtaaaaccaaagacaggcaggcagcctggcgctaggcccgaaaccaggcctgcgcctgcctggcctaaacccagtagttgaaaatcaattcataacttagaaaccgatgttattcatagattccagacattgtatagaagaacatttgtgaaactccctgccgtgttctgtttctctctgaccgccggtgcatgcagcccctgtcacgtaccgcctgcttgctcaaatcaatgacgaccctttcatgtgaaatcttcggtgttgtgagcccttaaaagggacagaaattgtgcacttggggagctcggattttaaggcagtagcttgccgatgctcccagctgaataaagcccttccttctac

SEQ ID NO: 16689 - DNA, 631 bp, Homo sapiens
  SIMILAR (305)..(631): 991254mologous to Homo sapiens DREV protein,accession number AJ278577,Smith-Waterman Score=568.
gccctgaagggggctggatgggcaaggcggccgcgatggctcgagctcgggcggtggcggcggtggccggaggcggcggtgcctcctcctcctcgccccggcgccggcggtgatccgagcgagcggccgcggcccccgatgagactgctggcgggctggctgtgcctgagcctggcgtccgtgtggctggcgcggaggatgtggacgctgcggagcccgctcacccgctccctgtacgtgaacatgactagcggcccgggtgggccggcggcggccgcgggcggcaggaaggagaaccaccaggttgctaggaagaggctcaatgtttgtgttttcaccagatcagtttcagagactgcttaaaattaatccagactggaaaacccacagacttcttgatttaggtgctggagatggagaagtcacaaaaatcatgagccctcattttgaagaaatctatgccactgagctttctgaaactatgatatggcagcttcagaaaaagaaatacagagtccttggtataaatgaatggcagaatacggggttccagtatgatgtcatcagctggctgaacttgcttgaccgctgtgatcagcccctgactttgttaaaagatatcagaagtgtc

SEQ ID NO: 16690 - DNA, 1774 bp, Homo sapiens
  SIMILAR (1860)..(1976): 1001254mologous to Homo sapiens N-WASP,accession number D88460,Smith-Waterman Score=202.
  misc_feature (1)...(1774): n = a,t,c or g
atgattgcagattcggctgctcaggttatagtgttgcagttattagcttttgacaatgctaatgccgattgccaggctgctctgcaacctgtcagagggaaagcacatttagttgattacatcaaggcctgtgatggtatcagaggtaatctgcataaagctactttgttggcacaggaaatggcaggactgagagtggataaaggaaatactccatttcctggagcttgttttaactatgggaagcatggtcatactaaaaaagaatgtagaaaaaaatcagtgagtcaggcagccagatggggaaaaaggaaaactgctgatcctgaaatatgtccaaaatgtaaaaaagggaaatattgggctaatcagtgtcactctaagtttgacaaagatgggaccctgatttcgggaaatgccatgagggctgagcaagactgtgaatggtttacatttacaattcctgcagtaaacaacctgcagcctgctaagcattttcatcgtttcacagatgtgtctagtaatggtaaagcttcttattctggatcaaaaggaggacaggcaagggtccagctttttgagaatgcatcagtaagggccactaactctgaccttcctcagtcctccttgtggtgtaggaggaaaactagtgtttctgttgctgtgttggtgagtgcaactattccgatcagcagggtccagggaccatcacaggttcttgggcagggggagaaacaaacaaaccaaaacgttgtacccaacccctataccctgctctctcaaataccagaggaagcaaaatggttcactgctctggacctcaaggatgccttcttctgtattcccctgcactctgactcccagtttctctttgcctttgaggatctcacagaccacacatcccaacttacgtggaccatcttgccccaagggtttagggatagccctcatctctttggtcaggcactggctcaagatctaggccacttctcaagtccaggcactctggtccttcagtatgtggatgatttacttttggctaccagttcagaagcctcatgccagcaggctactctagatttcttgagctttctagcaaatcangggatcgaggctatcaagctacagatgatcttacaaatggaaccccaaatgagctcaactaacaacttctaccgaggacccctggaccaaccagctggccctttgactggcctaaagagttcccctctggaggacactacaactgcagggccccttcttcacccctatccagcaggaagtaactagagcggtcatcggccaaattcccaacagcagttggggtgtcgtgtttagagggggaattgagaggagcttgctacaagtgctggaaatctggccactgggccaaggaatgcccacagcccagaattcctcctcatccacgtcccatctgtgtgggaccccactgaaaatcagacttttcaactcaccaggcagccactcccagagcccctggaactctggcccaaggctctctgactccttcccagatcttcttggcttagcggctgaagacggacgctgcccagtctcctcagaagcccccgagactatcacgaatgccgatcttctggtaacactcacaatggaggctgaagtgcagggctgtgcagtcagaattcttacacaagaaccaggaccacaccctgtagcctttatatccaaacaacttgaccttactgttttgcctagccctcaagtctccgtgcagcagccgctgccaccctaa

SEQ ID NO: 16691 - DNA, 1632 bp, Homo sapiens
  SIMILAR (309)..(52): 561254mologous to Homo sapiens envelope protein,accession number AF072508,Smith-Waterman Score=211.
ctaaacaggacacccccaactgccgttgggaattgggcgatgaccactctggctaattcctgctggataggggcaaagaaggggccctgcagttgtagtgtcctccagaggggaactctttaggccagtgaaagggccagcaggtcgatccaggggtccttggtagaagttgttagttgagcacatgtggggttccatttgtaagaccatctgtagcttgatggcctcgatcctggaggaaacaaatttgacaaaaagattaaaaatagaaggcccaaaggcgagtaatagcacgatggctctcatgggacagttttggtttgtttgtttcccccactgccgcccaagaacctgcaatagtccctggaccctgctgatcagaatagttgcactcactgatgcagcagctgaaagactagttttcctcctagaccacaaggaggaccgaggaaggtcggatttagtggccattaccgactcatcctcgaaaacctgcacctttgcctgtcctcctagaccacaaagaggatgcttggcaattgtcccttggtcgtcgccaaaatgtgtctggaatttgttccttccagtgggcttgtggtctcgcttgacttcaggagtgaagccgcagaccattgcaatgaacgttgcagctcttaaaggtggtgcgtccggagttatttgttcctcctggtgggttcgtggtctcactgacttcaggagtgaagctgcagaccttcacggtgagtgttaacagctcttaaaggcggcacgtctggagttgttcgttcctccccagtgggttccgtggtctccccgacttcaggagtgaaagctgcaagaccttcgtggtgttacagttcataaaggcggcacgtccggagttgttcattcctcccagtgggttcgtggtcttgctgacttcaggagtaaagctgcagaccttcatggacacccaactgctattgagaatttggccgatgaccgctctagctacttcctgctggataggagcgaagaaggggccctgcagttgtggtgtccttcagaggggaactctctaggccaggggaagtgccagcggacaccgagttgtagaaggaagggctttattcagctgggagcattggcaagctactgccttaaaatccgagctcctcgagtgcacaatttctgtcccttttaagggctcacaacactaaagatttcagatgaaagggtcgtgattgatttgagcaagcaaggtgtacgtgacaggggctgcatgcaccggtggtcagagagaaacagaacagggcagggaatttcacaaatgttcttctatacaatgtctggaatctatgaataacatctgtttctaagttatgagttgatttttcactactgagtttaggccaggcaggcgcaggcctggtttcgggcctagcgccgggctgcctgtctttgatttcacttccttttttttaaaaaaaacaaaacaaaacaggtactgagtataaaataatataaaacaatataaaacaatatgagagggtctctctcttccctcatttccccccctttgagactctcactttttatcagtgggagttctcactcttatttttgctacttatgtattttcgtgcaatagat

SEQ ID NO: 16692 - DNA, 622 bp, Homo sapiens
  SIMILAR (93)..(152): 551254mologous to Homo sapiens PRO0483,accession number AF090931,Smith-Waterman Score=52.
tggtggatttcattaaaattaaaaaactttttctctctgaaaaatcctgttaagctgggcgctgtggttcatgcctgtaatcccagcactcttgggaggctgagttgggaagaaattaatagcttgaggccaggagttcaagatcatcctggggcagcaaagtcatacactcttgagggaagagagagaccttctcatattgttttatattgttttaatacctcagtaccctgttttaaaggaaaaaaaacaaggaaagtgaaaatcaaagacaggcagccccggcacccaggcctgaaacccagcccctgggcctgccctggccctaaaccctagtagttaaaaatcaacttacggacttagaacctgatgttatccgtagattcccaagcattgtataaaaaaattgtgaaactccctgttgtgttctgtaccagtgcatgaaacccctgtcacatatcccctagattgctcaatcaatcacgaccctttcatgtgaaatctttagtgttgtgagcccttaaaaagggacagaaattgtgcacttgaggagctcagattttaaggctgtagcttgccgatgctcccagctgaataaagcccttccttctacaactctgaa

SEQ ID NO: 16693 - DNA, 2544 bp, Homo sapiens
  SIMILAR (218)..(1993): 951254mologous to Chimeric - Homo sapiens Grk5-green flourescent protein fusion product,accession number W85008,Smith- Waterman Score=2953.
ggctgcgcgccggctgctcctccccacccccagcctttgccctgaagggggctggatgggcaaggcggccgcgatggctcgagctcgggcggtggcggcggtggccggaggcggcggtgcctcctcctcctcgccccggcgccggcggtgatccgagcgagcggccgcggcccccgatgagactgctggcgggctggctgtgcctgagcctggcgtccgtgtggctggcgcggaggatgtggacgctgcggagcccgctcacccgctccctgtacgtgaacatgactagcggcccgggtgggccggcggcggccgcgggcggcaggaaggagaaccaccagtggtatgtgtgcaacagagagaaattatcgcgaatcactccaggctgtctttgttcagaagttacctttgatcaaggaacacaagatcttcttaaacaacaagcattgagaaatcgggcttggctatttatccaattatatcattcttttgtgtcatctcgtttttagcctgtttatgtctagaacatctatcaatgggttgctaggaagaggctcaatgtttgtgttttcaccagatcagtttcagagactgcttaaaattaatccagactggaaaacccacagacttcttgatttaggtgctggagatgggagaagtcacaaaaatcatggagccctcatttttgaagaaatctatgccactggagctttctgaaactatggatatgggcagcttcagaaaaagaaatacagagtccttgggtataaaatgaatgggcagaatacggggttccagtatgatggtcatcagctgcctggaacttgcttggaccgctgtgatcagcccctgactttggttaaaagatatcagaagtggtcttggagccaactagaggcaggggccaccttgcccttggtcctcccctttcatccctatgtggaaaacgcctgggcactccgacagcccagtgggagcttgtcccccgatcaagcccagcaggcgctggctggtggcgccaagtgcggggcctgccgagcctgcgcccacccggaacccacgctggctcccgcctgcacctctcccttcacacctccctgtgagcagagggagccggctctggcctcggccagccccagagaggaggcccctacagtgcagccgtgggctgaagggctcctcgagcacagccagagccgacgccgtggccgagggggcgccgagagcgagcgagggctgctagcacgttgtcacctctcaatcccccgtctaaacaggatacccccaactgctgttgggaatttggctgatgaccactctagctacttcctgctggatagatgggactgtctagttgcaggaaaacaagctcagggctcccacggattctacattatgaaggaaacaagcaaagaaatctccaaaggaccacaaaaacccccaggctatcagttatgtcccttgcaagctgtagggggaggggaatttggcccaacctggatacatgtccccttctccctctctgatttaaagcagatcaaggcagacctggggaagttttcagatgatcctgatagggatcaagaggaagaggcccaaaaggaaaagcaagatcagagaaaggctgcagcattagtcatggccctcagacaaaccaaccttggtgattcagagaggacagaaaatggagcaggccaatcacttgccgttgagggccaggaaattgacttcctcctggacaatggtgcggctttctcagtgttaatctcctgtcccagacagctgtcctcaaggtccgttaccatccggggaatcctgggacagcctgtaaccaggtatttctcccacctcctcagttgtaattgggagacttttctacagataagttcccctctggaggacactacaactgcaggccccttcttcacccctatccaggaggaagtagctagagtggtcatcatccaattcccaacagcaattggggtgtcctgtttagaggggggattgacaggtgaagccaaccgggcttctgagtcagaaacacaaactaccatcagagaatactacaaacacctctatgcaaataaactagaaaatctagaagaaatggataaattcctcaacacatacactctcccaagactaaaccaggaagaagttgaatctctgaatagaccaataacaggatctgaaattgagtcaataattaacagcttaccaaccaaaaaaagtccaggaccagatggattcacagccaaattctaccagaggtacaaggaggagctggtgccattccttctgaaactattccaatcaatagaaaaagagggaatcctccctaactcattttatgaggccagcatcatcctgataccaaagactggcagagacacaacaaaaaaagagaattttagaccaatatccttgatgaacattgatgcaaaaatcctcaataaaatactggcaaaccgaatccagcaacacatcaaaaagcttatctaccatgatcaagtgggcttcatccctgggatgcaaggctag

SEQ ID NO: 16694 - DNA, 435 bp, Homo sapiens; identical to SEQ ID NO: 16403
  SIMILAR (26)..(403): 1001254mologous to Homo sapiens histone H2B,accession number Z80781,Smith-Waterman Score=629.

SEQ ID NO: 16695 - DNA, 583 bp, Homo sapiens
  SIMILAR (86)..(463): 1001254mologous to Homo sapiens Histone H2B,accession number AJ223352,Smith-Waterman Score=628.
cgcgcccctcgagatcgtcgacattagtccgtgcggtggaattctcgatctgctgctcgtctcaggctcgtagttcgccttcaacatgccggaaccagcgaagtccgctcccgcgcccaagaagggctcgaagaaagccgtgactaaggcgcagaagaaggacggcaagaagcgcaagcgcagccgcaaggagagctactccgtatacgtgtacaaggtgctgaagcaggtccaccccgacaccggcatctcctctaaggccatgggaatcatgaactccttcgtcaacgacatcttcgaacgcatcgcgggtgaggcttcccgcctggcgcattacaacaagcgctcgaccatcacctccagggagatccagacggccgtgcgcctgctgctgcccggggagttggccaagcacgccgtgtccgagggcaccaaggccgtcaccaagtacaccagcgctaagtaaacttgccaaggagggactttctctggaatttcctgatatgaccaagaaagcttcttatcaaaagaagcacaattgccttcggttacctcattatctactgcagaaaagaagacgaga

SEQ ID NO: 16696 - DNA, 821 bp, Homo sapiens
  SIMILAR (1087)..(971): 1001254mologous to Homo sapiens Human secreted protein, SEQ ID NO: 6956,accession number G02875,Smith-Waterman Score=211.
tgctattggctaacattacagtttcgctttaaccaatgggattgcggttttgaaaaacacttattttgattggacaaagttaatatacgtttccaggactcaccactggttaaacgcacaacttcattctctaccccacttgcgttaagaagcagtgaataagcggtaggttgacagagctaccgtcttcctgtttttttcctccaattttccggcagttactcccagtcatgcccgagccctcaaagtccgctcctgccccgaagaaaggctccaagaaggcagtgacaaaggcccagaagaaggacggcaagaagcgcaagcgcagccgcaaggagagctactccgtgtacgtgtacaaggtgctgaagcaggtccaccccgacaccggtatctcgtccaaggccatgggcatcatgaactccttcgtcaatgacatcttcgagcgcatcgccggcgaggcttcccgcctggcgcattacaacaagcgctcgaccatcacctccagggagatccagacggccgtgcgcctgctgctgccaggggagctggccaagcacgcggtgtcggagggcaccaaggccgtcaccaagtacaccagttccaagtaactttgccaaatttccaagttgatcgtgatgttgatccgggactcggtgtggtgacggcccgccctgagcacgaaagtgcacgctcttgacaacttccttatgtttggagctttctccaccaccacccccgcccattttcttgtaaaatttttaccatgcagatatgtaataactgcaagtaaaggctgaagacaatgtgagctgaacacg

SEQ ID NO: 16697 - DNA, 273 bp, Homo sapiens
  SIMILAR (223)..(405): 681254mologous to Homo sapiens triple LIM domain protein,accession number AJ011654,Smith-Waterman Score=249.
atggctggagaatcccaaatagccataggatttcccagtaacaacttctgccgtggattcagggggatggtcgtgggtgaaggaaagaggcttctggtggcattcattgcccatggaattctaagtgttcgagagtgctatatcttggacttagagggtcagaggctgatgaagcttgtgaagaagcagaagcagctgacacaggatgatgatactgatgcggttgagattgctatcgacaacacggcttttatggacgagttcttttctgag

SEQ ID NO: 16698 - DNA, 546 bp, Homo sapiens
  SIMILAR (190)..(387): 891254mologous to Mus musculus Fish protein,accession number AJ007012,Smith-Waterman Score=306.
atgattaactggcctgataacacttccttcccctccctgcccttactgtcccactcccctaatgatatttcttgggatcgcctccaaaacaagtcaaatccttgtttctggggctgtgtctgggggaataatctaaatcaaggcaatggcttttctgagtacttcactcggaccttgacagaagcagctggcaagatcctcttccgcagaagccacatccgggacgtagctgtgaagagactgaagcccatcgatgaatactgccgggcacttgtccggctgcccccccacatctcacagtgtgacgaagtcttccggttcttcgaggctcgacccgaggatgtcaaccctccaaaagagcaaggcccctcacccccagatgcagtcctcccatatggtgtcaacaagggcaaacaggagctaaaggcaggcccaaactggcccggcaggactcaccacgtggtcaactgcgtgacccagaaatgcctctttgtgttccattttaaattctcatccagtggaaataaggaatctaaaagtctttga

SEQ ID NO: 16699 - DNA, 873 bp, Homo sapiens
  SIMILAR (511)..(693): 951254mologous to Homo sapiens prepro-neurturin,accession number U78110,Smith-Waterman Score=292.
atggtcttccggcagcaggggcaatgggatggatttggttttgcaattaaaataacagctggttctgtttccacagcacggttctggaagatgcagcttttggataagtttcccattgaaggtggccagaaggaccccaagcaaaggatcatccccttcctcccagaagagctcccttcacagtgggcttccccccgggctcagactggccctggacctgcacaggtcaggaccacagtgatcagtcagaccttggcaagaagcagggcctgcaccttgctaacccctggcacactgccagcccacagccagtgcctgcttgctgacttgaaaacggatgtaggggcacctccctcagagagcggctcctctctgaaaggcgtttctcctgcattcctccatcctcaaaagcagcgaaagatgacaaaatgggcctggttaaagtacttgcttcaaggttgttgcgaggatgaagggagggaattcagtgaaaagctcttagtgtgcaccagggcttccagaggtagcagccatagagcccaggcctccgatgagcacacagcagtcccagtggagaagggacctgtttcagggtcacacagccagcctgtggcccagggagatggcccggccctctggcttcagagaaaagatgatgaaggagagcttgagcaagagtccaggagaggaacaagaatgacccagcaagcactcattgagcatctgctgaatgcaaagcctagtgctccatgtagtgtgggggcagacaggaggggcaagatcctcttccgcagaagccacatccgggacgtagctgtgaagagactgaagcccatcgatgaatactgccgggcattcactgtttctggttaa

SEQ ID NO: 16700 - DNA, 597 bp, Homo sapiens
ttaagagctataaaactcatcaggaaggtccacagctccattcttgaagtcagcaagaccacgaacccaccagaaggaacgaactctggacacagtgttcccttggccatactttcctgcccctccacttccaggcaaaacactcctcgggacaggccttgggacatgtcccagatacacaatgggggcgctggacttggtgataaggggccgtcctctctggggcccctgctccccctgcagcgggaacctctctacaactggcaggcgaccaaggcgtcgctgaaggagcgcttcgccttcctcttcaactcggagctgctgagcgatgtgcgcttcgtactgggcaagggtcgcggcgccgccgccgctgggggcccgcagcgcatccccgcccaccgcttcgtgctggcggccggcagcgccgtctttgacgccatgttcaacggcggcatggccaccacgtcggccgagatcgagctgccggacgtggagcccgcagccttcctggcgctgctgtctctctgtgtgggggacactgctgatgattcccaagattgagatgatgacggtgatgacgactgggtgaacagccat

SEQ ID NO: 16701 - DNA, 647 bp, Homo sapiens
taaatttcagaaaattaagaagctgactttatatttggtggtttgaactatctatgctgtgtagcattcgtaataatgctattaaaggcctaataaaactgccgcaagaaaatagttcacttgcagtttataaatgaacgatattgtgtacaatgatagtaatgtgctatggagtacagttttaaagctattaatggaattttgggtaaatacacgacaatgtgatataaacaggatctaagactggattcccatgtcactaaactgcaccactatacctgtctctctgtgtgggggacactgctgtatgattcccaagattgagatgatgacggtgatgacgactgggtgaacagccatcacttcaacattgtgataatccttcacagcaagaaaccgaataaaatactaacatttctaacaactgctctgacattgtaaagagatccaacagaatcactcctgctgaaaaatacgctttctgccacctacacatttctatttagggaagtaaaatttgcttcatgggtcatgaccccattagtcagtgttacagctgtgctgggggatagggaagtatatctgggcagatttgatattttattacactttttttattaaaggcaggttttaaaatatagtaacat

SEQ ID NO: 16702 - DNA, 363 bp, Homo sapiens
  SIMILAR (180)..(353): 461254mologous to Human herpesvirus 4 nuclear antigen precursor,accession number M23028,Smith-Waterman Score=90.
ttaatcaaaggaatttggcagctgtagggttgtcttttcatccatatcgtccctggaattaactgtcctgctataccagtcagattgagcagcatctggtggtggccccgagcggcctcggaggccgcggcgtagctcctgggtgaaggcgtctctaaatcgctcagcgcggcggcacagggagcccacgggcccagccgcgaggtcctgcaggcggcgggccgcgtcctggccccgcagctgggcctgcagcagtgcgaaggccgtgagctgcgccgcacgtcggataggccgcgactctgacagacgttccaccagctgcgggctgtgcagcagggcggccagcagccgccgcagcaccat

SEQ ID NO: 16703 - DNA, 994 bp, Homo sapiens
  SIMILAR (663)..(944): 351254mologous to Human adenovirus type 4 major core protein,accession number U70921,Smith-Waterman Score=95.
  misc_feature (1)...(994): n = a,t,c or g
aaccaccccatctctacaaaanaatccaaaaagtaatctgcttccctcatgtgaatgtcgttgtaaggagtgagataacacatagagtgcaatgagcaagtcccagcacagaagactcatttcataaaatacgtgtttattattaccataggcctacagtccccggtattcttaacacatcttgcctgagaagtatcacactcatgcctatcaaccagctcacacatttaatcaaaggaatttggcagctgtagggttgtcttttcatccatatcgtccccggaattaactgtcctgctataccagtcagattgagcagcatctgtcaaggagtttcagtcgcacttgcagaggaaaggctctctggcttcggtccgtggctctccgtaggtgccgtgtctggacccagcctaccttcatctctgttaggcttaggggtctttctctcacactgtgtcttgtccaatcacaagacttcaacggagcgggcggtctggcctaaggctcttatgcgtgggatgtcttgcaggccaacaatcccagtcgggattcgaagccgcgcgcagtgcccggaatgacccctccacattgatgccactgtagagcccggaaggaaaagcaaagcggcctcggccccgcacagcccaggattaaatgtttgcgccagggcccctctggctaccttggtggtggccccgatcgccctcgccccgccgcggcgtagctcctggttaaaggcgtctctaaatcgctcagcgcgccggcacagggagcccacgggcacagccgcgaggtcctgcaggcggcgggccgcgtcctggccccgcacgctgggcctgcatgcagtgcgaacggccgtgagctgcgccgcacgtcggataggccgcgactctgacagacgttccaccagctgcgggctgtgcacgcagggcggccagcagccgccgcagcaccatcttctccaagcgcccggaacccgacctcgcctcgtgcc

SEQ ID NO: 16704 - DNA, 690 bp, Homo sapiens
  SIMILAR (546)..(472): 481254mologous to Homo sapiens Human secreted protein encoded from gene 37,accession number Y30847,Smith-Waterman Score=68.
cctccaaaggtgagctggtattatgaagaggctttgatttctttctctttatcaggatattcttccacctctgaggagaacattaactcttcactaagatccatgcctggcctataagacaaaaatagccaaagataatccaaccaagaagagccaccacgagattcacctcaatccatggctggagaatctgtccctcaattccctgcttcccagaggctaccattaacagaagaaggtgtgtaaaggtggattctgtcacttgtcatttgctgactcagagatagtataagagcagtaaagtacaagaaagatgctaaagctgtaggatccagggccaaaaaatttcggattgctactgatattttagcaaagtcaatcctgtcaaaagctgaaattgtactcagagccaaaagcaagtacagaagactctggaatggatacgctagggtcttgtattgttgcagaaggtttgagaggttggatagctgatctcctgctagaacatatatcacaacaatattccacacagcacagccagccaagaatcccatgagaaaagagaccaatcatcctgaaagcccggtgcactgtaagtgccacatctctggtggtccaggaaggcttcacgtccattgacacatctatgttttctgtggtctgtatcaactctgaacgaattacacggca

SEQ ID NO: 16705 - DNA, 1813 bp, Homo sapiens
  SIMILAR (1361)..(1810): 551254mologous to Gallus gallus enolase,accession number D37900,Smith-Waterman Score=386.
atgtccaagggcaggaggagtggaaggaagcatccagcatggaagaaagatgaaatccacaaggctcagcaagcaaggttatccctcttctggccgccatctagccgtttggcagctgactgcatggtgcccacctacattgagggtgggtcttcctctcccagtccactgactcaaacgtcaatctcctctggcaacaccctcatagacacacccagaaacaatactttaccacaggagtccccaaaccccgctgtggacccatacgggtcagtggcctgttgggaacccagcgtcacagcagatgagcagcagggtggatcagcggccacattaaattctcataggagcaccaaccctattgtgaactcacacacaagtgatctaggtcgtgctgctccttatgagaatctaatgcctgatctgagatggaacagtttcatcctgaaaccatcccccaccccatgccccctcgttttttcttcctcagcctttcttattccttcatttatttcttttcctaacttaaagcccaaagttacagcaagtgcttctttggaaggccttgctcagacctgcgtggtcgaaggccctcttgagggcaatgagccatcaactaaagaactcaaagaggcacccagaggctcctgttcaaagaaggacagaaaaagacaagggcttacctctttgaattgggagactttcctccacccaaaagaagttcatctagtttcatctttattaccgaaatgaaaatggtattgatgcggagccagctcgaggaggcagttattcaaaaacctcgggagggaagaccaaagaaaaccccagcccagcagaatttaccagtatggccaattgaagcttagggagttagaagattgaagacataatcactggattgagccaactactgttgggaacagcagtctggtattcactggcacccactggcattagccagcctgtaggcaaagtatttgtggaaaaaagccggagattccaggctgctgatcgttcagagttgataaagaccacagaaaacatagatgtgtcaatggacgtgaagccttcctggaccaccagagatgtggcacttacagtgcaccgggctttcaggatgattggtctcttttctcatggattcttggctggctgtgctgtgtggaatattggtgtgatatatgttctagcaggagatcagctatccaacctctcaaaccttctgcaacaatacaagaccctagcgtatccattccagagtcttctgtacttgcttttggctctgagtacaatttcagcttttgacaggattgactttgctaaaatatcagtagcaatccgaaattttttggccctggatcctacagctttagcatctttctatgggtcctgcactgggaaagatctcttcagaactatatccaatggtacctcagctgttgtatatgagaccctaaagctcaagttgaggagaagactagctatgggaaaaaatgtttcaaaggctgttgagcacatcaataaaactattgagcctgccctgattagcaagcacctgaatgttatagaacagaagaggattgacaaattgatgatagagacagttgaccctgacaataggtctaaatttggagtgaacattatactgggaatctcttttgctgtttgtaaggctggagctgccgaaaagggattctccctgctgtcacagaattgtgaatttgctggcaattctgaaggcatcctgctagttccagctttcactgtgaccagcaatggttctcaatctggcaataagctggcagtatag

SEQ ID NO: 16706 - DNA, 846 bp, Homo sapiens
  SIMILAR (517)..(717): 641254mologous to Homo sapiens golgin-like protein,accession number AF266285,Smith-Waterman Score=213.
atggcagaagaaactcgacaaagcaaattggccatagccaaggaaaagatccccttgatgacaagaccagtgccagagtccataccactcctgaggcacactggactgggccccgcaaccctggtgcctctggattcctccaccaaagtctcgtcagtcagccccaccccttcagcaagcagcccagtccctgcccttgccaatctccccagggtgactttgggaggagtggaatgtagtgatatcacaatcggcctaggaactgtcattactgcaatactggcctttgatcttacaacccagtcccctaagcattgtcaccctatttctggttcctctggtcacagcacaaatttccagctggaagaagaatggagactatgggacctaggagcaagaggtttcaggctgccttactcccttaacatagacattgacagtgggaaaagcctacacttcccccatgagctcaaaacattgacaatatctctgggtggcaatgagagaatgggtttgttaaaagaatattggcagagaaacagccttggtgttccagcaggagtgaagaggaacaggaaaacgagtggcagtagccctgaaacagccacttctggtggttgccactcacctgaggatagcccatgccaagaactagcagtagtcctggacccgaggtccataaaaatcagtcaactgaataacaccatcaaatctttgacacccctggagaggggtataaacacctttgttttatcaacccaaagtgccattgatttaaagacacctctatttgagaaatgttggaaatcgtatgtcttagaattgatcaaatacaccagaatgtga

SEQ ID NO: 16707 - DNA, 459 bp, Homo sapiens
  SIMILAR (317)..(403): 821254mologous to Homo sapiens Human endometrium tumour EST encoded protein 144,accession number Y60084,Smith-Waterman Score= 128.
  misc_feature (1)...(459): n = a,t,c or g
nacaggtaaggcactgggatgtcgggcttccccagtcagagaagcaggcgcggggatgggacacgcagcttccgggtcaagcgctttttctttttcctcccggaaacaacggtgtcattctctagttccggatctaaggtgacccagttgcgaagtccagccttctcgtctgctcatggagccttcagggccatatttgtccattataatgcctctcattgcaaggtttgaccatgttgtaatccattcatccgcattcaagtttgcagttatggtggaaattttggcctgttgatctgcctgctgattaaatagtcagactatggaggattcaccaccagtctgggaagcaacagcctgggctccagagtcggccactcgtccgtgcacagacgaggagaggtctcagaattccnccncgctggtctagangtcgtcaaagacatcatgcggcgcctg

SEQ ID NO: 16708 - DNA, 1653 bp, Homo sapiens
  SIMILAR (1297)..(1650): 461254mologous to Homo sapiens ORF1; putative,accession number M19503,Smith-Waterman Score=278.
atgagggctaagtggacatctgcattatcggagaaggcttttactttgagcctttgtaaggctaaaactcagaaatactggtcctcagggtacggtgcaggtatgattcaatcattttctgtaccacatgttgggtccaccagggtagctggcacagggtacctacagagttggacagtaggaccccagtcctgtcctcttgaaactgacctggagatgaccccagctgatggagaaccctggaaacctggaggatcctcctgctcattctctgtgcccctggacacatgggtggccaactctggagcccagcctgttactgcccactctggtggtgaatcctccatagtctggtatggagccactagaaaacactatgactttcattggggagagacagacagcatggcttctgaacaagataaacaagcggtgcaactggccctggatctatggtccatacaggatgggccaggagaactgcaagtaactgtcctagatcaacaggctaattggagccttagaaacaagatgggaagaggactacttaatcagcaggaagaacagcaggccaaaatttccaccataacggtaaacatgaatgcggatgaatggattacaacgtgttcaagccttgcaatgagaggcattataatgtatggtgctataattgatagcgattaccagggagagttaaaggtcattttatacactccagattcttttgctctaaaaccacaaatgtgggttgctcaattgttagtggtaccttgtcaacaacccctgaggaaatctctgccccaacagaggctacatacagaactgggggattcggatcccctggtacagggctgctgcagtttgctggggggtcacttcaggctctattcatctggtttactcctgtacctggagatgtcactcaaggaggttggagaacagcaaagaatggtgcctgctccttcctctgagatcactgatgtcaagaggcaccaacctgaatccaaactagcagaaagaaaggctaagtctgctggtccacagaaactgcaaccacctctcccgctaggggttcaggcccagggagatcacagttctgtccctgagcccctggctggagctgttggagttcttggagggaggccctgcccatcctttgactccaacggacttcgtcacccccacgacctggtgttgggtctgatcaccccaacacctcatgttacttccactcatggtagaaagcagaagggaagcaggtatgtgcaaaaagattatatagcaagagcaagggtgcagaactggacagaggatgagatggacgaagtgacagaagtaggcttcagaagatgtgtgacagcacactccgctgagctaaagaaacatgttctaacccaatgcaaagaagttaagaaccttgataaaaggttagaggaactgctaaatagagtaaccagtttaaagaggaacataaatgacctgatggagttgaaaaacacaacacaaaaacttcgtgaagcatacgaaagtatcaatagccaaattgaccaagcagaagaaaggatatcagagtttgaagaccaccttgccgaaatgaggcatgcagacaagtttacagaaaaaagaattaaaaggagcaaacaaagcctctga

SEQ ID NO: 16709 - DNA, 404 bp, Homo sapiens
  SIMILAR (21)..(404): 911254mologous to Homo sapiens immunoglobulin light chain variable region,accession number L29162,Smith-Waterman Score=596.
agagctctgaatgtctcaccatggcctggatccctctcctgctccccctcctcattctctgcacagtctctgtggcctcctatgagctggcacagccatcctcagtgtcagtgtctccgggacagacagccaagatcacctgctcaggcgatgtcctggcaaaaaaaaaatatgctcggtggctccagcagaggccaggccaggcccctgtagtggtgatttataaagacattgagcggccctcagggatccctgagcgattctccggctccacgtcagggaccacagtcaccttgaccatcagcggggcccaggttgaggatgaggctgactattactgttactctgcgactgacaacaatctgggggtgttcggcggagggaccaagctgaccgtcctaggt

SEQ ID NO: 16710 - DNA, 438 bp, Homo sapiens
  SIMILAR (437)..(306): 691254mologous to Homo sapiens Human secreted protein, SEQ ID NO: 4473,accession number G00392,Smith-Waterman Score=167.
tgtgtgttgattttgtactctgcaactatgccaaaactatttgttagctcatagatgttttgtggattatatgctaaataatgttatctgcaaatagagtagttttacttctgcctttcaatttgaatgtcttttattttttttttcttgcctatttgctctggctagaacttttaatacagtgttgaattgcagtggtgtgaaagcactatcattgcctgttcatgatcttagggggggatctttcagtctttcactatggagtatgttacctatgagttttttgtatatgtgctttattatgtggaggaacaggcagcagtctttgctgtttggcagcctccactggtgataccgaggcaaacagggtctggagtggacctccagcaaactccagcagacctgcagcagaggggcctgactattagaaggaaaact

SEQ ID NO: 16711 - DNA, 507 bp, Homo sapiens
  SIMILAR (195)..(172): 621254mologous to Homo sapiens Human secreted protein encoded by gene No. 53,accession number Y27774,Smith-Waterman Score=42.
tttcgtgtggccgcgaagctagggccaccatggcggaccgcatgtcggcggctccggccggggacgttggccccggtgcgcgagggcgtgaactgcaggtccagctcttatcaaaggtgctggaagtgcttgatcctgaccggaagctggaggacacatgggcttattgtcaggacaccaggaaaggaatgaaggaacccacgaagcttttaaaaaaacattctacccaagtctacctgggaccttccaagaagacgtctgcgtcaaacgcaggccaatggctttatgaagaaaagccacataaaatggatttgctccatgaaaatggtcctcgtcctggtcttcatgaaaatgtatgcaaagcagttagtgacttctgcaagtgggttactacttttggaatttcggacatcgatgaagagttcatcttgaaacagtttgacattgactatgagaccaaaccaagccatgatgcgctccacacgatgaagctaaatcaggttcctc

SEQ ID NO: 16712 - DNA, 1131 bp, Homo sapiens
  SIMILAR (1110)..(979): 681254mologous to Homo sapiens FLJ00044 protein,accession number AK024452,Smith-Waterman Score=176.
atgcaggttgagagtggagagagaggtggttctccaaggaaaaatccagatattcatgcgagggaaagtagacagtgggcagtcaaaaaccacagaaatcctttagaggcgcttcactcagtggggcatttggggacagggctcttatcaaaggtgctggaagtgcttgatcctgaccggaagctggaggacacatgggcttattgtcaggacaccaggaaaggaatgaaggaacccacgaagcttttaaaaaaacattctacccaagtctacctgggaccgcaaatagggtctggagtggacctccagcaaactccagcagacctgcagcagagggacctgactgttagaagaaaaactaacaaacagaaagcagtaacaccaacatcaacaaaaaggacacccacacaagaaacctcattcaaaggtcatcagcctcaacggtcaaacatagataaatccatgaagataaggaaaaaacagtgcaaaaaggctgaaaattccaaaaaccagaatgcctcttcttctccaaatgatcgcaactcctctccagcaagtgcacaaaactggacagagaatgaggttgacgaattgacagaagtaggcttcagaagaaataatgctaggggatcctttagagccaccgagcaggtcattcaagtctgtagtcttgttatctttgataataaagcaggggaagaaaccaggacggtgttagaagaaaactttgcacctaaagcagatttatttgaggttgtcgatgaactgggcaaattgcaggtggtcatcctggggcagcaggagggtctccagagccttgctcagaaattcaatgaactttccatagtggcaagagctgatgtgtgcatcattggcaactggcacaatggagatttgtcaatggacatgaactttccagagctacagcagcctggagtgccagccaggccaggtgcagtcattgtgcagtgtcgcacacaggatgtctggaagcactatggcacagtgcacactctttatcaccagggggatgagagctggcagctcattcttgcccagagagtggctgagggcacaagcccagagcacatcattgatggctgtgtggctgtgtgggtatcctggatgtag

SEQ ID NO: 16713 - DNA, 567 bp, Homo sapiens
  SIMILAR (182)..(18): 401254mologous to Homo sapiens immunoglobulin kappa chain,accession number AJ399935,Smith-Waterman Score=82.
atggtcagtaccgcccaggataaaagcaggcagaggaacgtggaagaaccagactggctgagttttccaggcttcatctttctcccgtgctggatgcttcctgcccttgaacattggactacaagttcttcagcttttggactcttggacttataccagtggtttgacagggactctcgggccattggccacagacagaaggctacactgtcggcttccctacttttgaggtttggggactcggactggcctccttgctcctcggcttgtagacggcctattgtggaacttcgccttcgtccaccagctacagcggcgatggaggcgatggaaatgcgcctatttggagttgagctgttctgctggatctgcactctctccagcacgcaggctcctactcccaccgaccgcccttctgtgcagctacatgtggccggacaagaatacagccaggctgcccgattccactgtacattcacggtcatcaacgtcaaatgggtccttaatgtcgcccggcaaacataccatgcttctgtggcctattccctttcccgttaccctacatga

SEQ ID NO: 16714 - DNA, 2253 bp, Homo sapiens
  SIMILAR (57)..(800): 821254mologous to Homo sapiens nucleolysin TIAR,accession number M96954,Smith-Waterman Score=1084.
gaggtagtgaagggcagggagctggacctggaggcgccgccgcgacagcagcagccatggaggacgagatgcccaagactctatacgtcggtaacctttccagagatgtgacagaagctctaattctgcaactctttagccagattggaccttgtaaaaactgcaaaatgattatggatacagctggaaatgatccctattgttttgtggagtttcatgagcatcgtcatgcagctgcagcattagctgctatgaatggacggaagataatgggtaaggaagtcaaagtgaattgggcaacaacccctagcagtcaaaagaaagatacaagcaatcatttccatgtctttgttggtgatctcagcccacaaattacaactgaagatataaaagctgcttttgcaccatttggaagaatatcagatgcccgagtggtaaaagacatggcaacaggaaagtctaagggatatggctttgtctcctttttcaacaaatgggatgctgaaaacgccattcaacagatgggtggccagtggcttggtggaagacaaatcagaactaactgggcaacccgaaagcctcccgctccaaagagtacatatgagtcaaataccaaacagctatcatatgatgaggttgtaaatcagtctagtccaagcaactgtactgtatactgtggaggtgttacttctgggctaacagaacaactaatgcgtcagactttttcaccatttgggacaaataatgggaaattcgagtctttccagataaagggtatttcatttgttcggttcaattccccatggaaagtggcaggcacatggcaattgtttctgttaatggtactaccattgaaggtcatgttgtgaaatgctattggggcaaagaaactctttgatatgataaatcccgtggcaacagcagaatcaaattggatatccccaaccttatggccagtggggccagttggtatggaaatgcacaacaaattggccagtatatgcctaatggttggcaagttcctggcatatgggatgtatggccaggcatgggaaccagccaaggatttaattcagacacagtgtttctggcaccatgggatggggacccaaattttgggagttgcaaccggcttcaagggcaaaatgggcagcctgttgcccaatccggccttctgggtatcgagtggcagggtatgaaacccagtgaataaggactccagaatctaaagccagtggcttgaggctacagggagtgtagtaaagccgttgtttacttaaagatttatcaaatcagtcagtgcaaatgtcagatacaatgtattcatttaaaagattcatttttaatcatgaaattacttatcatccacattgttttaaaaagaaacaagatgctggatgtctgccaatttttgccttcattaccttttttgataaagtttctcagatccttgtttcaaacacaaatgcagggattgctgccactttttaactattaagaggcagaaaattgcacaatattgaacttttttccactgaagtagtgtgcagttctagtttgcattcctgatatgatttaaaacatgtaatataaagatgttaaaaaaaaaaaccaaaactgtgcagagtctagaagttgtttgtcatcttcagcttgtgcacaattctgttttaggttaaaaaaaggcattgtttgagctgtcccatctccactgttatccctttgggttttttaatataaattattagtttacatcatttttgtatctacatcttttttcacaaatttgtcttgccttattaaagttctgtaaaatatacttaaatggaaaaaatgatgttcatttagattgaaaacttttctcagatggattgataattgcattcatcttgtgttttatatgagaaggtgcctcaagaatttcctgttggatttgtttaaaaggatttttatctttcgtgataaactttgctgtgtaccaggaactataaaaacaaaaacttgttactaaagaaaatatctgaaatgtgataagttcttatgccatgttaatttcatgtgtcaacttcaacatttacatgtattatttcattatgtaaaatgttttagcaatttaatattttgcacagttagcaaactttgtatgtcatttccttcaaggcatcatgcagagttgacatgagatttataaggttttaagttgtttgcatgtgaaaatcaaatacatactttggtagtctttgaaaaaaaaaa

SEQ ID NO: 16715 - DNA, 1565 bp, Homo sapiens
  SIMILAR (526)..(1059): 691254mologous to Homo sapiens unnamed protein product,accession number AK000565,Smith-Waterman Score=562.
agcgcctaagttcaggtagacgatctcgtctgagcaaggaccggggcggcggtggggcagttttgtttagctcgggttcccagcggaaagcatgtcctaggtagcggctgccggcagaggtgatgcttctgcctgggcctacttgggaccggaagtgagcgctcgcgcggtgaggatgccgggaagcaagtcccaggggatatgtgtgtgtcgctgcagacccatcccggaagccggccgggagactatcaagatctccacttagggaagtgggaatcttatttgcggaacattgggcagaagctttgccattggctggtggagaaggaggaggcagaatgtctgcattgctacaccatacagctcatacttcagaagattttgggttaagcagctatcattagtctgccaatgatcgtgttttcaccttgatattagaaactaatgaaacaccttttaagtcttatgaattcaggttacactgttttccagatgccttggcagctggtacagggcctctgaaaaatggaaccaaattctctgaggactaaagtcccagctttcttatctgatttggggaaggccacattgaggggaatcagaaagtgtccccgatgtggcacatacaatggaacccggtgactgagctgtatgaacatgacatgtggaaccatattccgttacggtgcacgcaagcagcctattgttgaagctgtcaaaaatcattacagggctctggatcttcaggtctactcagtgcggcaaagagaccggggccctgattaccgatgctttgtggaacctcggggtttccagagacaacaatccagacagtggatggggacgcatcatcactcagctgagctctggacggtgttatgtccccctcatgcctgaaagctgccactcaaggcgttgtggaaaaccagtgccagcacatcaagctggcggtgaaactgccaggcagaggccacccctctgaccctgaagagctcggtcctgaatgcaatgcaggcctccccggaaaccaaacagaccatctggcagttggccacggacacccacaggtcctctggtgcagagaattactaaaaacatcttggtggtgaaatgcaaggcaagccagaagcacagtttggggtatttgcatacatcttttgtgcagaaagtcagtggcaaaagcttgcctgagcgccgcttcttctgctcctgtcagactctgaaatcgcacaagtcaaatgcctccaaggatgagacagcccagagatgcattcatttctttgcttgcatctgtgcctttgccagtgatgagacactggcttcaggaattctcagacttcctaaattttgattccagcggtcttaaagagattattgtaccccagttaggttgccattcaggaatcaacagtatctgcttgtgagtctactgcctcttaagtcaaagaagagggaggaaagggatggaagtatctgaacaactaatgcgtcagactttttcaccatttggacaaataatggaaattcgagtctttccagataaaggatattcatttgttcggtag

SEQ ID NO: 16716 - DNA, 401 bp, Homo sapiens
  SIMILAR (169)..(68): 941254mologous to Homo sapiens CDC10 homolog=hCDC10,accession number S72008,Smith-Waterman Score=167.
  misc_feature (1)...(401): n = a,t,c or g
gttcacgcatgattctgcatttaggtagtcctcaaatttactatcaatgtaatcgataacaggctgccagctgtacagtctttttaattctgtgagaaggacctggatactctggagaatacaaatctatgaggaataatgagttgattaatgtcgactttcccaatccacatttcgcccaagctcaggggggacgacgtgcgcggccgcnggcttgantggcgctggccattgaggggcttctgcgccaccgtgcgatggtgcccgccaggtgctgccggttggtgcgcatngcctgttcgcgcagagtctgcctttntgcgcccggccaagtcgtaaatctcctcctcgtagcttacaggcgacnggcggccagccgaagcctctggacacagaagcgc

SEQ ID NO: 16717 - DNA, 463 bp, Homo sapiens
  SIMILAR (39)..(230): 281254mologous to Homo sapiens PRO1951,accession number AF113698,Smith-Waterman Score=80.
tttcaatattcaattattatttatattaatatgatgtcatgaattcctttcttcactgggttataattctgtgactgtcaccattttattctgatgttcaaatcgccccatatttggcctgttggaatcttttcaagttggcttctctgctttttttgggcatgtctccatcattctttgagcattgccttactttcttgtacaaaaagatattctgggctcatcttatactttctgtgctctagctttgaaattaccgtttcttcaaagagctctgtttccttttagaggaggatggtttttagaaaccaagttctaggtagcaggtgtgcttgttgctgttgaggtgttgcagctcccaggccctttccgtgaacagagccaggctcagatgaggcgagtgggcggccggggctgcagctggcgttggccattgaggagcttctgcgcgacagtgcgatcg

SEQ ID NO: 16718 - DNA, 1107 bp, Homo sapiens
  SIMILAR (145)..(303): 641254mologous to Homo sapiens F-box protein Fbx25,accession number AF174605,Smith-Waterman Score=163.
atgggcccacattggctgtggctccacctggccttggtgctcttgccgccctctgctctgctgctcccttcatgtgagaagggtgtgttaagagtccgtttttatcatgaaaaatggatctatgtccataaagaaagcacaaaagaaaggcatggctattgcaccttgggagaagcctttaatcggttagacttctcaagtgcaattcaagatatccgaaggttcaattatgtggtcaaaccccttctaccccgctacaagtttcaaagacttaatgctattacaaaggaccgtcagaggtcaagctcaggggtgcaactccctcatgccgggcagcctcagggggccgaccctacccaggatgagcggcgccaggtagccggggacactcccggggatccccgggccctggctgggggaggcgttgtggaccgcacgtacccaggctcatatgaggcgagtgggcggccggggctgcagctggcgttggccattgaggatcttctgcgcgacagtgcgatcggttgcaccttctgcgacaggtgccggccggttggcgcgcaacgcctgctagcgcatagtctggcccttgctgcgcccggcgccgaaaaacgggaagtcgtaaagctcctcctcgtggcttatgtgcggcggcggccgggcaaaaacctaacgacacagaactgccagctcagcagccggttacatcccgcccggccaccagtaggcagcgtccgctcatgcgcgctcctggaagaaccagcagcccccaccgcgagttctgattggctctgcatgatgattattccccaccttctaagagacaaagaccaacgagccaccacagccaccagtcccagaacccgccaatgctggggaacggaaaatgagggagttcaactctggccctcacaatccagtggaggagacgaaactcatctgcctctgtccctctgggcacgcctcatgccaggtgcatctgtggacaggggccatgctcctgggcttccaaagttggagaaagctgccaggctcaggtggccaggtgcatatcttggtgtgaggaccttcgctgtatctgggaatgcctactggttaccttggtaa

SEQ ID NO: 16719 - DNA, 498 bp, Homo sapiens
  SIMILAR (1)..(435): 971254mologous to Rattus norvegicus CDC10,accession number AF142759,Smith-Waterman Score=722.
gaggagaggagcatcaacagcagcaccatggtagctcaacagaagaaccttgaaggctatgtgggatttgccaatctcccaaatcaagtatacagaaaatcggtgaagagaggttttgaattcacgcttatggtagtgggtgaatctggattgggaaagtcgacattaatcaactcattattcctcacagatttgtattctccagagtatccaggtccttctcatagaattaaaaagactgtacaggtggaacaatccaaagttttaatcaaagaaggtggtgttcagttgctgctcacaatagttgataccccaggatttggagatgcagtggataatagtaattgctggcagcctgttatcgactacattgatagtaaatttgaggactacctaaatgcagaatcacgagtgaacagacgtcagatgcctgattaacagggtgcagtgttgtttatacttcattgctccttcaggacatggactttaaaccattgg

SEQ ID NO: 16720 - DNA, 793 bp, Homo sapiens
  SIMILAR (372)..(608): 911254mologous to Mus musculus CDC10,accession number AJ223782,Smith-Waterman Score=387.
caggagaccgccactcacgcggagccaatcggaactcgcggcggggttgctgggtcttccaggatcgcgcattagcggacgctggctacgggtggccgggcgggatgtaaccggctgctgagctggcagttctgtgtccccaggcttcggcccggccgccgccgcacataaactgcgaggaggagctttacgacttcccggtcttcggggccgggcgcagcaagggccagactctgcgctagcaggcgctgcgcgccaaccggccggcccctgtcgcagaaggtgcaaccgatcgcactgtcgcgcagaagctcctcaatggccagcgccagctgcagccccggctgcccactcgcctcacctgagcctgggtggaacaatccaaagttttaatcaaagaaggtggtattcagttgctgcttacaatagttgataccccaggatttggagatgcagtggataatagtaattgctggcagcctggtatcaattacattgatagtaaatttgaggactacctaaatgcagaatcgcaagtgaacagatgtcagatgcctggtaacagggtgcactgttgtttatacttcattgctccttcaggacatggaccgttacataactgaagactcccaccttcaggcaggattgggtagtacatgtttgtaacaacctggcattgccttttgttgagacttaaaccattggatattgagtttacaaagcatttgcatgaaaaagtgaatatcatcccacttattgccaaagcagacacactcatgccagaggaatgcca

SEQ ID NO: 16721 - DNA, 804 bp, Homo sapiens
  SIMILAR (482)..(616): 1001254mologous to Homo sapiens bA291L22.2 (similar to CDC10 (cell division cycle 10, S. cerevisiae, homolog)),accession number AL133216,Smith-Waterman Score=256.
gtggccgggcgggatgtaatcggctgctgagctggcagttctgtgtcgctaggcttctgcccggccgccgccgcacataagctgcgaggaggagctttacgacttcccggtcttcggggccgggcgcagcaagggccagactctgcgctagcaggcgctgcgcgccaaccggccggcacctgtcgcagaaggtgcaaccgatcgcactgtcgcgcagaagctcctcaatggccagcgccagctgcagccccggccgcccactcgcctcatctgagcctgggcgaatctggattgggaaagttgatattaatcaactcattattcctcacagatttgtattctccagagtatccaggtccttctcagagaattaaaaagcctgtacaggtctacatattggtatttttaattgatgataagctggaataatattaatacacacaaagcacgtgttgtaactttcattatgcttccctagagctggcagcctgctatcaattatattgatagtaaatttgaggactacctaaatgcagaatcgcgagtgaacagatgtcagatgcctggtaacagggtgcagtgttgtttatacttcattgctccttcaggacatgggtggcagacaagaaacatggattattgcgtggagttccattagtaggaataagactcattctacattcttgttgttcttagtgttttttgtttttcatgagaaggaattgtatcagcacaaggcaatattctaacatgacaatgacagcagacagaacctcaataaactctgacttggtactgcaaaaa

SEQ ID NO: 16722 - DNA, 746 bp, Homo sapiens
  SIMILAR (333)..(590): 781254mologous to Homo sapiens bA291L22.2 (similar to CDC10 (cell division cycle 10, S. cerevisiae, homolog)),accession number AL133216,Smith-Waterman Score=344.
ccggaattcccgtgtcgacgatttcgtggatgtaacccgctgctgagctggcagctctgtgtcgctaggcttcggcccggccgccgccgcacataagctgcgaggaggagctttacgacttcccggtcttcggggccgggcgcagcaagggccagactctgcgctagcaggcgctgcgcgccaaccggccggcacctgtcgcagaaggtgcaaccgatcgcactgtcgcgccgaagctcctcaatggccagcgccagctgcagccccggccgcccactcgcctcacctgagcctgggagcttgaaaaatcacatttgagaagaggattggatcctagccataacataaatataagggtggaaccaaagttttaatcaaagtatggtggtgttcagttgctgcttacgatagttgataccccacgatttggagatgcagtggataacagtaattgctggcagcctgttatcaattacattgatattaaatttgaggactacctaaatgcagaatcgcgagtgaacagatgtcagatgcctggtaacagggtgcagtgatgattatacttcattgctccttcaggacatggaccattacataactgaagactcccaccttcaggcaggattgggtagtacgtgtttgtaactacctggcattgccttttgttgaggaagggtagatgtctacccaaatggaatattgagtatcagagacttcaaatgataacttttgtttgtttggag

SEQ ID NO: 16723 - DNA, 732 bp, Homo sapiens
  SIMILAR (340)..(474): 1001254mologous to Homo sapiens bA291L22.2 (similar to CDC10 (cell division cycle 10, S. cerevisiae, homolog)),accession number AL133216,Smith-Waterman Score=256.
tcatggcggggctgctgggtcttccaggagcgcgcatgagcggacgctgcctatgggttgccgggcgagatgtaaccggctgctgagctggcagttctgtgtcgctaggctactcgcccggccgccgccacacataagctgcgatgaggagctttacgacttcccggtcttcggggccgggcgcacgaagggccagactctgcgctagcaggcgctgcgcgccaaccaggccggcacctgtcgcagaaggtgcaaccgatcgcactgtcgcgcagaagctcctcaatggccagcgccagctgcagccccggccgcccactcgcctcatctgagcctggctggcagcctgctatcaattacattgatagtaaatttgaggactacctaaatgcagaatcgcgagtgaacagatgtcagatgcctggtaacagggtgcagtgttgtttatacttcattgctccttcaggacatggactcccaccttcaggcaggattgggtagtacatgtttgtaactacctggcgattgccttttgttgaggtggcgagacaagaaacatggattattgcgtggagttccattagtaggaataagactcattctacattcttgttgttcttagtgttttttgttttttcatgagaaggaattgtatcagcacaaggcaatattctaacatgacaatgacagcagacagaacctcaataaactctgacttggtactgcaaaaaa

SEQ ID NO: 16724 - DNA, 595 bp, Homo sapiens
  SIMILAR (10)..(594): 771254mologous to Homo sapiens protein that is immuno- reactive with anti-PTH polyclonal antibodies,accession number U28831,Smith-Waterman Score=705.
gatcgaccaagaataacgggcggtgggaaatctggaacagagtatcctgagaatctgcccaccttgaaggctacaattgaaaataaaaattctgttctgaatacagccaccaaaatgaaggatgtacaaacatccacaccagcagaacaagacttagaaatggccatcagagggagagcaaaagaggcttgaagaatatgaaaataaccagccacaggtgaaaaacccaaatacattctagggatgaccttgatgacataattcagtcatctcaaacagtctcagaggacggtgacatcgctttgctgtaattgtaagaatgtcatattactcattgatcaacatgaaatgaagtgtaaagattgtgttcacctattgaaaattaaaaatacattttgtttatggaaaagattaataaaacttaaagataaccactgtgagcaacttagagtaaaaattcgaaaactgaaaaataaggctagtgtactacaaaagagaatatctgaaaaagaagaaataaaatcgcagttaaagcatgaaatacttgaattggaaaaagaactctgtagtttgagatttgccatacagcaagaaa

SEQ ID NO: 16725 - DNA, 831 bp, Homo sapiens
  SIMILAR (148)..(756): 621254mologous to Homo sapiens protein that is immuno- reactive with anti-PTH polyclonal antibodies,accession number U28831,Smith-Waterman Score=556.
atggaacaggtgaaaaaccaaatacattctagggatgaccttgatgacataattcagtcatctcaaacagtctcagaggacggtgactcgctttgctgtaattgtaagaatgtcatattactcattgatcaacatgaaatgaagtgtaaagtgtcttctcagaaacaaccagctgagaaggctacaagtgacgagaaagattctgtttcaaatatagccacagaaataaaggagggacaacaatctgggacagtgtcttctcagaaacaaccagcctcaaagactgcaagtgacaagacagattctgctttgaatacagctacagaaataaaggatggactacaatgtgggacagtgtcttctcagaaacaacaagccttgaaggctacaactgacgaggaaggttctgtttctaatatagccacagaaataaaggatggagaaaaatctgggacagtgtcttctcagaaaaaaccagccttgaaggccacaagtgatgagaaagattctttttcgaatataaccagagaaaaaaaggatggagaaatatctaggacagtgtcttctcagaaaccaccagccttgaaggctacaagtgtcaaggaagattctgttttgaatatagccagagaaaaaaaggatggagaaaaatctaggacagtgtcttctcataaacaaccatccttgaaggctacaagtgacaaggaagattctgttccgaatatggccacagaaacaaaggatgaacaaatatctgggacaggtaattttgcaaacacatttaatatgatgttcgttcaagatagaagagatcttctcttcaccaaataa

SEQ ID NO: 16726 - DNA, 543 bp, Homo sapiens
  SIMILAR (533)..(405): 741254mologous to Homo sapiens Human secreted protein sequence SEQ ID NO:155,accession number Y87116,Smith-Waterman Score =154.
atgctgaaaaacccaaaagtccagcatgcctcttctcctccaaatgatcgaaatgtctctctatcaagggcacagagctggacagaggatctgatgaacgaattgacagaaataggtttcagaagatgggtaataaaaaactacaatgagctaaaggagcatgttctaacccaaggcaaagaagctaagaaacttgataaaagagcacctggggaaagcagcggctgtgggcacagcttcagcagacttaaacgtccttgcctggcagctctgaagagagcagcagacctcccaacacagcgttcaagctctgataagggggctgacagacacctcatacaggagagctctggctggcatctggcgggtgcctctctgggacgaagtttccagaggaaggaactggcagcaatttttgctgttctgcagcttccgtggttgatacccgggcaaacatggtctggagtggaccgccagcaaactccagcagacctgcagcagagggccctgactgttagaaggaaaactaacagaaaggaatag

SEQ ID NO: 16727 - DNA, 532 bp, Homo sapiens
  SIMILAR (230)..(442): 391254mologous to Homo sapiens SRp25 nuclear protein,accession number AB035384,Smith-Waterman Score=101.
gctgagctcctgctctatagagcaaagatcacccatcaaggcatccagatccacagtctctccctgattcagagcttcattcaagttgtatatggagaagcggtaagaaaagttggccatgtttgtttcctggcgaagaggagatctttttactggttccatgggcttgtcagaatccaaactctgagtgagtttgtctagttctccaagccaggctccaaacattttgtccaggtcctgatcttccttgtcactgtcttcttcagcaccatgatcaatttcttcatctgatagctgctccatcgcggcagtcggtcggccttcccgcggccccgggcaaggaaaccgccgctcgcgctcctccagccgctgcctccgcctcctccccaggcgcggcgctccctcgccagagacgcagcgactgccagcagctcccgcgccgcgcgctcagtgactgactgactgactgactgactgactgactgactgactgactggcgggcggctgcgggagcgggggcggggcggccgc

SEQ ID NO: 16728 - DNA, 1357 bp, Homo sapiens
  SIMILAR (1040)..(1198): 1001254mologous to Homo sapiens argBPIB,accession number X95677,Smith-Waterman Score=293.
caagcagtcctttctgaacatctgcaaggaggcaacatcaaaccacaagcacttccaggaagacacagtccatggcagggtacaggaaggctctggggatgatgataatcagagcagcatacaagaacattgtagttactctttcattagtggacattttagaggcttgcccttcactgtccttggttggaaaatccattccttaaaggtagcacagtcagatggtcaggctggttcaaggacggcaaactgcctgcctaccggctgctgccttgaggactcagctgctcctatgggactgaacacctgggaagcgtcaaaacagactgctttccgctggaaattagaaggactagcagcgagtcctgtgctagggaacagagaacatgtttgggaaagggttagaacatgccccagaaataacacaaggctgaacaggctccagagcagagatgctgctgcccacatgagcatctgcaagttgggtgcatttgacagcttggatggtgtgattctcccagtggctaatgagcagctcaggaatgctaatgaaggacttcctttggttgtctcctgtgagtcagcaaatgagctctgtaacttggagagccagaagttaattagtgccctggaagaacaggcagcaaaattgaaagctgagaagatcagagttgccctagagaaaattaaagaggcacaagtgaaaaagctggtgatcagagtccacatgtctgatgacagttctaaaacaatgatggtggatgagaggcagacagtaagacaagtactggataacctgatggacaaatcccactgcggttatagtttagactggtcactggtagaaaccgtttctgaattacaaatggaatgtgatgttccttgcaccttttcccagcagaatatgacagggatgttccttcagttgggcctttgccaggcagggtatgataaggacgttcctgtgccttgtggtcagatggttagacatgctgtttctcaggccccaaacaccattgggatgtttcacttttgccaaggtcatcctgtacagttctacagcatgaataggcctgcctctcgccatactcccccaacaatagggggctcgttgccctatagacgccctccttccattacttcacaaacaagccttcagaatcagatgaatggaggacctttttatagccagaatccaggcctatttcagacttctgacctccagaattgtaagataataaatgagtggtttttgaacaacagaaatctatttctcacagttctggggtctggaaagtccacgatcaaggtgctggcagagttggtgtctgatgagggcctatttcttgattcatag

SEQ ID NO: 16729 - DNA, 1186 bp, Homo sapiens
  SIMILAR (932)..(1180): 591254mologous to Mus musculus proline-rich protein 48,accession number AF020313,Smith-Waterman Score=263.
atgaacataaccgaacaatattctggagatgtagcaatggagaggtgctgttcactctctgtttacgatgcggttgtcgtggagtgtcttcagtataaaggacttcaccagtgtcttctgcactgcccccatcccgtagggtccaaaagaccagctgcattcctgctgaccgccactaactctgttttctgcatagttgtcttccctgcttctgtagtgagtttggattctgacaagcccatggaaccagtaaaaagatctcctcttcgccaggaaacaaacatggccaacttttcttaccgcttctccatatacaacttgaatgaagctctgaatcagggagagactgtggatctggatgccttgatggctgatctttgctctatagagcaggagctcagcagcattggttcaggaaacagtaagcgtcaaatcacagaaacgaaagctactcagaaattgcctgttagccgacatacattgaaacatggcaccttgaaaggattatcttcttcatctaataggatagctaaaccttcccatgccagctactccttggacgacgtcactgcacagttagaacaggcctctttgagtatggatgaggctgctcagcaatctgtactagaagatactaaacccttagtaactaatcagcacagaagaaccgcagtcagcaggcacagtgagtgatgctgaagtacactctattagtaattcctcccattccagcatcacttccgcagcctccagcatggactctttggatattgataaagtaacacgccctcaagagctggatttgacacatcaagggcagccaattactgaggtctctcgggatctggtgtgctttctccagctggatcatgtcaacgtttattatggccaggactatcggaacaaatacaaagcacctacagactattgtctggtgctgaaggaagaacaggcagcaaaattgagagctgagaagatcagagttgccctagagaaaattaaagaggcacaagtgaaaaagctggtgatcagagtccacatgtctgatgacagttctaaaacaatgatggtggatgagaggcagacagtaagacaagtactggataacctgatggacaaatcccactgcggttatagtttagactggtcactggtagaaaccgtttctgaattacaaatgggttag

SEQ ID NO: 16730 - DNA, 2382 bp, Homo sapiens
  SIMILAR (1103)..(1516): 861254mologous to Homo sapiens dJ569M23.1 (similar to BS69 protein),accession number AL031666,Smith-Waterman Score=645.
gccaagcacctgtgcagaatggagctacgccgccgcagtcggcagtggaaggcgctcagaaggtgaagccacagggtatctcgggatgcagcttgtggggccgctcctgctgctgctcgcctggctggaggccagcggaacgggcgagccatttcagggaggccaggcctcagctcgtaaggtgctgggggagggaatgtctttaaggtgtgtttgttgctaaataaaaacagaacaggaggtggtagagggcatggatatctctactcgctccaaaggtgagtaaaaatctcaggagacaaagctttcgagctttcaagatgtcaggttgacatttgtgtccgagggtaatgatcctgctgaaagatgctcctacatcaatgggaagtgccatctcgatgccaggtgtgtttgcgtggcagatccatcaaagcctcagggcctttgcccataccttgaaggtcccctccttgccttcctctccttactccccatcaattttaaggctcaaaatgaggatgagttctgccttttgtttttgctcatcctgttttactaccaccttgcctgctgctggtgagcgtataatattgtcacctcggccagcagaacaactgcagttcctcgtatttattcacaatcccacgaaatcaatggctcttcggtgcactgcaccggagactttcagctcagccgagctgctgttgagggtgataaattataggctgtcgacatcattaaggaaattaaacacccacaaaaacacaagaagctcccggcctttcagctgcggccctttcccttgagggaggagacaattccctgtaatggtgtgtcatttcctaggtgtgagccaccgtgcctggctgaagtgtacatgtgtttaaatgagatgctgaaagatgaaaagaaggggtgcatgaacaagagtggggctggtgagaatccacaagagagaacagcccagaaaagaaagttccccagccctccacattcttccaatggccactcgccgcaggacacatcaacaagccccattaaaaagaaaaagaaacctggcttactgaacagtaacaataaggagcaggtaaagcagccgctagaatgcatcgagacccagagtaaagccatgacaatgctcaccattgaacagttatcctacctgctcaagtttgccattcagaaaatgaaacagccaggggtaagaagaaagttgaagcccgttccattggaacagcaccctgactatgcggaatacatcttccatccaatggacctttgtacattggaaaaggttggcctccgtcaaatgtatggctgcacagaagccttcctggctgatgcaaagtggattttgcacaactgcatcatttataatgggggtgagtggcttagaacgcaaatagcgaaagtagtcatcaaaatctgtgaacatgaggtatgtgtttcccaagtatgtccagaatgttatctagctgcttgccaaaaacgagataactggttttgtgagccttgtgtaagttggatttatgactgctgcgtgccagcctgtgtagtggaagctggtgattcaaatgtttctgcccatgtgaaggctgacatcctagcggggaagaaggatgatacacaagtgaactaataggctggctgtagtctctcagctgtgactgctctgcagggacctccatctctcacccgtcagacagcgactgaaggtggcttacagagcatgaaggacggcgtgtgagttggccagctaaataattgctacctcatgtctaaagaaattcctttttctgtgaaaaagactaagagcatcttcaacagtgccatgcaagagatggaggtttacgtggagaacatccgcaggaagtttggggtttttaattactctccatttaggacaccctacacacccaacagccagtatcaaatgctgctcgatcccaccaaccccagcgccggcactgccaagatagacaagcaggagaaggtcaagctcaactttgacatgacggcatcccccaagatcctgatgagcaagcctgtgctgagtgggggcacaggccgccggatttccttgtcggatatgccgcgctcccccatgagcacaaactcttctgtgcacacgggctccgacgtggagcaggatgctgagaagaaggccacgtcgagccacttcagtgcgagcgaggagtccatggacttcctggataagagcacaggtcagctccgtgcgggggagcggggaggaggccccttggacacgggggtttcccatgggtgcacacttggtgggcccaagcaggtgagcatcaagcagcaagcatcagttcttcaggataccatgaatgtccccaagagttaaaataatgaggattt

SEQ ID NO: 16731 - DNA, 190 bp, Homo sapiens
  SIMILAR (9)..(116): 411254mologous to Homo sapiens Human secreted protein encoded by gene 44,accession number Y76167,Smith-Waterman Score=53.
ccccagcaccttacgagctgaggcctggcctccctgaaatggctcgcccgttccgctggcctccagccaggcgagcagcagcaggagcggccccacaagctgcatcccgagataccctgtggcttcaccttctgagcgccttccactgccgactgcggcggcgtagctccattctgcacaggtgcttggc

SEQ ID NO: 16732 - DNA, 498 bp, Homo sapiens
  SIMILAR (69)..(404): 701254mologous to Homo sapiens Human secreted protein, SEQ ID NO: 5460,accession number G01379,Smith-Waterman Score=411.
cccacgcgtccggaactaggagcctgtcctccatgttttataagtattgacattacacagtgttaacaatgcatccacagagcttggctgaagaggaaataaaaacagaacaggaggtggtagagggcatggatatctctactcgctccaaagatcctggctctgcagagagaacagcccagaaaagaaagttccccagccctccacattcttccaatggccactcgccgcaggacacatcaacaagccccattaaaaagaaaaagaaacctggcttactgaacagtaacaataaggagcaggatggacggaatgatttctactgctgggtttgtcaccgggaaggccaagtcctttgctgtgagctctgtccccgggtttatcacgctaagtgtctgagactgacatcggaaccagagggggactggttttgtcctgaatgtgagaaaattacagtagcagaatgcatcgagacccagagtaaagccatgacaatgc

SEQ ID NO: 16733 - DNA, 534 bp, Homo sapiens
  SIMILAR (428)..(255): 311254mologous to Rattus norvegicus ATP synthase subunit e,accession number D13121,Smith-Waterman Score=69.
atgtttcaatgtcccgtgtccctgaagaagccattttcatgtgactttcctgcttcagaccaggcccagttcactgagttaaaaaccaaaatgctcatcgtggcctacaagttcctccgtgacctggcctgtagccagttttctgcccagatagcagataatggtggctctggagccaagcacctgtgcagaatggagctacgccgccgcagtcggcagtggaaggcgctcagaagcttggctgaagaggaaataaaaacagaacaggaggtggtagagggcatggatatctctactcgctccaaagcctgcgatgccttcggcttcctgcctgttaaccctctctcggactcggggcctggctgggaaaaactaggccttgagatcgcagcgaaggcctgtggaaaaataccagctgcagctctcccggcagatgcagaaagagagagagagagccgctgtctctcagcctttgcttcccagggaggcgtgtaccttgtgaatccagggcacaggcagtgcctctcgggctga

SEQ ID NO: 16734 - DNA, 535 bp, Homo sapiens
  SIMILAR (371)..(159): 631254mologous to Homo sapiens NAP,accession number M86667,Smith-Waterman Score=210.
  misc_feature (1)...(535): n = a,t,c or g
taatcttcaatctggcnttttcttcaatcctccgaatctatcttcttcatctggttccattcacatcctcttccgtaggttcataaattgcattaataatttcaaatcgnttatcaaatagagctgntagagaacagcatacttcctttcaagatcgtnacttcctcatagaatttggcttctatctgtgcacatntaacttgcaggtttttgagagnattcactcggtcttttaactaccctagnacggctttcaatgatcctgttggtgtttctaccagnccatcaagtctttcttgaacggntgcaagaatctgagattttgcatcatctgaacacgttagctgacgtgctttgacgtttngtttcttcaccacgtttcctcttcttctacttcttcaacatcatccaaatcttgatcaagttcagactgttctttgcggcgactagtatggggacncaggcggccggagtgcgcaggcagtgactcagggcggcagcggcagcagcagcgggaggagcanggagngcgccg

SEQ ID NO: 16735 - DNA, 467 bp, Homo sapiens
  SIMILAR (284)..(466): 981254mologous to Homo sapiens NAP,accession number M86667,Smith-Waterman Score=318.
  misc_feature (1)...(467): n = a,t,c or g
gcgccgcctcctgctcctcccgctgctgctgccgctgccgccctgagtcactgcctgcgcantccggccgcctggctccccatactagtcgccgcacgtcagctaactgttcagatgatgcaaaatcctcagattcttgcagcccttcaagaaagacttgatggtctggtagaaacaccaacaggatacattgaaagcctgcctagggtagttaaaagacgagtgaatgctctcaaaaacctgcaagttaaatgtgcacagatagaagccaaattctatgnaggaagttcatgatcttnaaaggaagtatgctgttctctatcagcctctatttgataagcgatttgaaattattaatgcaatttatgaacctacggaagaagaatgtgaatggaaaccagatgaagaagatgagatttcggaggaattgaaagaaaaggccaagattgaagatgagaaaaaggatg

SEQ ID NO: 16736 - DNA, 837 bp, Homo sapiens
  SIMILAR (34)..(255): 981254mologous to Homo sapiens NAP,accession number M86667,Smith-Waterman Score=388.
atgaaggtctgtgacaaggagaagggcgcaggcctgcctagggtagttaaaagacgagtgaatgctctcaaaaacctgcaagttaaatgtgcacagatagaagccaaattctatgaggaagttcacgatcttgaaaggaagtatgctgttatctatcagcctctatttgataagcgatttgaaattattaatgcaatttatgaacctacggaagaagaatgtgaatggaaaccagatgaagaagatgagatttcggttagtaccaactttattttgctgctgaaagataccatgtcttcagtgccagaggatcaacaaagaaaaacaacttggcctcacatgataatgaccccaagtggttggtcaagaaaaagaagtggcaatgttagccaagttgtgaatgcaaaggaaatgttcttgaagaaaattaaaagtgctattccagagaatgcacaaatgataagaaagggaaacagccttctagttggtatggagaaagaacaaaccagccacaatagtcccttaaaccaaagcctaatccagagcaaagccctaactctcttcctttccatgaaggctgagagaggtgaggaagatgcagaagaaaagtgtgaagccagcagagattggttcatgaggtttaaggaaagaggccatctttataacatcaaagtacaagatgagacagcaagtactgatttagaagctacagcaagttatcctgaagttctagctaagataatttgtgaagacagctacactaaacaacaggtttttaatgtagacaaaacagccttatattggaaaaagatgccatctaggacttccatagcttga

SEQ ID NO: 16737 - DNA, 1647 bp, Homo sapiens
  SIMILAR (271)..(1335): 761254mologous to Homo sapiens NAP,accession number M86667,Smith-Waterman Score=1299.
atctgctcgcggcgccgcctcctgctcctcccgctgctgctgccgctgccgccctgagtcactgcctgcgcagctccgggccgcctggctccccatactagtcgccgatatttggagttcttacaacatggcagacattgacaacaaagaacagtctgaacttgatcaagatttggatgatgttgaagaagtagaagaagaggaaactggtgaagaaacaaaactcaaagcacggtcagcgtaactgttcagaatgatgccaaaatcctcagattcttgcaagcccttcaacgaaagacttgatgggtctgggtagaaacaccaacaaggatacattgaaagcctgcctagctagggtagttaaaagacggagtgaatgctctcaaaaacctgcaagttaaatgtgcacagaaagaaacccaacttctatgagggaagttcacgatcttgaaaggaagtatgctgttctctatcagcctctatttgattaagcggttttgaaattattaatgcaatttatgaacctacggaaggaaggaatgtgaatgggaaaccagatgaaggaaggatgaggatttcggagggaattggaaagaaaagggccagattgaagatgagaaaaaggatgaaggaaaaagaagaccccaaagggaattccctgaattttggttaactgtttttaagaatgttgacttgctcagtgatatggttcaggaacacgatgaacctattctgaagcacttgaaagatattaaagtgaagttctcagatgctggccagcctatgagttttgtcttagaatttcactttgaacccaatgaatattttacaaatgaagtgctgacaaagacatacaggatgaggtccgaaccagaaccagatgattctgatcacttttcctttgatggacaagaaattatgggttgtacagggtgccagatagattggaaaaaaggaaagaatgtcactttgaaaactattaagaagaagcagaaacacaagggacgtgggacagttcgtactgtgactaaaacagtttccaatgactctttctttaacttttttgcccctcctgaagttcctgagagtggagatctggatgatgatgctgaagctatccttgctgcagacttcgaaattggtcactttttacgtgagcgtataatcccaagatcagtgttatattttactggagaagctattgaagatgatgatgatgattatgatgaagaaggtgaagaagcggatgaggaaggggaagaagaaggagatgaggaaaatgatccagactatgacccaaagaaggatcaaaacccagcagagtgcaagcagcagtgaagcaggatgtatgtggccttgaggataacctgcactggtctaccttctgcttccctggaaaggatgaatttacatcatttgacaagcctattttcaagttatttgttgtttgtttgcttgtttttgtttttgcagctaaaataaaaatttcaaatacaattttagttcttacaagataatgtcttaattttgtaccaattcaggtagaagtagaggcctaccttgaattaagggttatactcagtttttaacacattgttgaagaaaaggtaccagctttggaacgagatgctatactaataagcaagt

SEQ ID NO: 16738 - DNA, 476 bp, Homo sapiens
  SIMILAR (28)..(213): 501254mologous to Meleagrid herpesvirus 1 RS1 immediate-early gene transactivator, ICP4 like protein,accession number AF291866,Smith-Waterman Score=103.
  misc_feature (1)...(476): n = a,t,c or g
tggcgccnnnaattgaannatcgaatgccggtacgcacggagccaccggtccggaattcccnnnccacgatttcgtggagacggagatcgagcgctgccgcttcgagtgccagtgggagcggatccctgagctcgtcaagcagctgtcggccaagctcatcgccaacgatgacatggcagagcttctcctcggggagtcgaagctggagcagtacctgaaggaacaccccctgaggcagggggccagtccccgaggccccaagccccagctgactgaggtccgcaagcatctgaccgccgccctggaccgagggaaccttaagtcagaattcctacaagaatccaatctgatcatggccaagttgaattatgtggaaggtgattataaagaagctctgaacatttacgcccgggtgggcctggacgatctgccactgacagctgtcccgccctacaggctgcgggtgatcgcagac

SEQ ID NO: 16739 - DNA, 1365 bp, Homo sapiens
  SIMILAR (681)..(211): 481254mologous to Mus musculus piL,accession number AF229032,Smith-Waterman Score=254.
atgaaggtgaagttgcccgcactgggcacccctctgccctcacaggtgggcacccctccgccctcacaggttccccgtgagcatcgccgcagcgaccgcccacagcaccagctgctgatggctcacacctcctggggctgcaaggcctgtccctggctctggcagcgagatgacagggctgttgccccggcaggggttgctgtggcagctgccagagtggcccgggccatggatgagggccaggatatggaaagcagaggcagaaatgagcccagaggccacagggcccagctctcaggctcccacggcgtgagccacagagcctggcatgctggcactgttctctgtgccctacctgtatttcctcatttcctcctcaacgagctccagggggaggtatcacagccaagaaatggaggcctggggatgttaaatgccatggcccaggcagcatccgtcctcatgaagccaccttatcagccggggctcccgttacgccgcggagccgggagccggagcccgagcccgcggcggcggcgggaggcggcgagggggcgccgcggcggcggcggtggggcctgcggggcgggcggccgggcccggccaggccgcgatggcgaccaagaaggcaggctcgcggctggagacggagatcgagcgtgccgctccgagtgccagtgggagcggatccctgagctcgtcaagcagctgtcggccaagctcatcgccaacggcacgggcacaggcaccctagacttccctgctaaaggctccctgaacccccatcgctgtctaaggactggcccagccccctgcaaacccttccctagcaaaccctcagtccatccggctgctccacgaccagctgtgtgccacactctgcctgatgacatggcagagcttctcctcggggagtcgaagctggagcagtacctgaaggaacaccccctgaggcagggggccagtccccgaggccccaagccccagctgactgaggtccgcaagcatctgaccgccgccctggaccgagggaaccttaagtcagaattcctacaagaatccaatctgatcatggccaagttgaattatgtggaaggtgattataaagaagctctgaacatttacgcccgggtgggcctggacgatctgccactgacagctgtcccgccctacaggctgcgggtgatcgcagaagcctacgctaccaaagcaacagcattctggaagcacagcaaagcatcatctggcaatttccacctgcccaactgccctggggctgctcatattgctgtcttctctgaagccccctgggaagagtcaatgatatttgatgttgtcgtagcacagtacattagaattatgtaa

SEQ ID NO: 16740 - DNA, 750 bp, Homo sapiens
  SIMILAR (1122)..(982): 781254mologous to Homo sapiens Human secreted protein clone pl87_1 protein sequence SEQ ID NO:28,accession number Y53011,Smith- Waterman Score=165.
atggcgccagtattgtcttggttcatcgttgtagatgcggttgctgcgtacaaattggccaatgagcctgctttggcaagagacaccccagatggccccgagccccggagctccccagcccttaacacccacctgcacctcctcggaagagaaacacagccagtgccccagtccaccctgagagatggggaaactgaggctcgtaaaggaaccaaggacgtcatgtggccttcccctatctcccgatgtcccggatacccgatgtgcctccacattctcagttgtgccatacttggtgtcttgttttctttggtatatcagggttgtaggcttgggtggtcggataatacggccctcacaaggtgcctggagctagaaaagctaggccttggcgacagcgtggacctgcatgtgtacgagattccggttgagtaccaaacagtccagagactcatccccgccctgtgggagaagcacagtccacagctggtggtgcatgtgggggtgtcaggcatggcgaccacagtcacactggagaaatgtggacacaacaagggctacaaggggctggacaactgccgcttttgccccggctcccagtgctgcgtggaggacgggcctgaaagcattgactccatcatcgacatggatgctgtgtgcaagcgagtcaccacgttgggcctggatgtgtcggtgaccatctcgcaggatgccggcagctggtggctgctggccatccttggcttgtag

SEQ ID NO: 16741 - DNA, 687 bp, Homo sapiens
  SIMILAR (285)..(368): 391254mologous to Anopheles gambiae lysozyme,accession number U28809,Smith-Waterman Score=65.
ctctacatcacttgagttctcatcttcaacctctccttcttcagcttcatcatcatctgaactgtcttcctgcttgtcttttttccttttctcagctgacttgtcctcactggcatccctgcttctgatcttatcctgtgcaggcagggagctcatattgataagtgctcgtgtggctgtcatttcatccagccaaactacattacaggaggtatcatccaaccattcgatgtgagctggaggatattctttaaaataggaaaagacatcttgggtgctcatctcatctactccgcaaatatagattgtctccagtctcaccttggggattgctttcttcatcatgtctcggtccaaggctacatttctttgggcaagatttacttccgatcgaaaatggaagcgcttggctcgctgctctttcttttcaattgcttccttggaggtgacatcaattccagtgatgaagctgccagccttgttttcatatcttctgctcgtgtccgggatcagttccttgagcgagcgccgcacaggcacgatttccagctcgccctcctccacctccatgggctccggctcgccacggtcaacaccggactccgcctcaggggacgggagccccagggccggccccgccggggcctccgccttcaccgacacccgcaggccccgtacggccgccat

SEQ ID NO: 16742 - DNA, 864 bp, Homo sapiens
  SIMILAR (298)..(837): 411254mologous to Xenopus laevis CTX,accession number U43330,Smith-Waterman Score=312.
tttcgtgggctgggtggcacggctggcgagcccggaactcctctggtcacagctcagcgtccgcggagccgggcggcgctgcagctgcacttggctcgtctgtgggtctgacagtcccagctctgcgcggggaacagcggcccggcgctgggtgtgggaggaccaggctgccccaagagcgcggagactcacgcccgctcctctcctgttgcgaccgggagccgggtaggaggcaggcgcgctccctgcggccccgggatgacttctcagcgttcccctctggcgcctttgctgctcctctctctgcacggggttgcagcatccctggaagtgtcagagagccctgggagtatccaggtggcccggggtcagacaagcagcctggcctgcactttcactaccagcgctgccctcattaacctcaatgtcatttggatggtcactcctctctccaatgccaaccaacctgaacaggtcatcctgtatcagggtggacagatgtttgatggtgccccccggttccacggtagggtaggatttacaggcaccatgccagctaccaatgtctctatcttcattaataacactcagttatcagacactggcacctaccagtgcctggtcaacaaccttccagacatagggggcaggaacattggggtcaccggtctcacagtgttagttcccccttctgccccacactgccaaatccaaggatcccaggatattggcagcgatgtcatcctgctctgtagctcagaggaaggcattcctcgaccaacttacctttgggagaagttagacaataccctcaaactacctccaacagctactcaggaccttggcgatgaccttgagcagtag

SEQ ID NO: 16743 - DNA, 472 bp, Homo sapiens
  SIMILAR (955)..(1239): 891254mologous to Homo sapiens CAP-binding protein complex interacting protein 1,accession number Y10776,Smith-Waterman Score= 439.
ctgtgggttctggctaccacctgagcccactgggcatgtggtcatccctggcacctctcctttggagccaccttgtccctggctagacagtcacattttcccagtgccgttttggaaagatgttgcctttggagaaggcgtttgcctccccccaggagctccccagccccgccggatctgcccacgccggggtcagcagccggagttccagcaggaagaacccgagaccatccctgagaggacccctgctgaccctggagttctcccgcctgcgtttccgggaatttgtctacccaggaggctgccgggccccaccataccctggcccggcttgatgagctgtgccgccagtggctgatgcctgaagcgcgctccaaggagcagatgctggagctgctggtgctggagcagttcctggcatcctgcctgataaggtccggccctgggtggtggcacagtaccctgagagctg

SEQ ID NO: 16744 - DNA, 396 bp, Homo sapiens
  SIMILAR (217)..(315): 781254mologous to pestivirus type 1 nonstructural protein P125-2,accession number U89438,Smith-Waterman Score=135.
atggggctgtatttggagacagggcctttacaagcctggctttctccggaccccctgtttctggaacagaggagggtcagagaagcaaagaccgaagaggacggccctgccaacaccgagcaggtgggtgggcacgagcaggtgggaggctgcgggccccaccagaccctggcccggctgcatgagctgtgccgccagtggctgatgcctgaggcgcgctccaaggagcagatgctggagctgctggtgctggagcagttcctgggcatcctgcctgataaggtccggccctgggtggtggcacagtaccctgagagctgcaagaaggcagcctccctggtggagggcctcgctgatgtcctggaagagccagatgtaaggaagccagaggaatga

SEQ ID NO: 16745 - DNA, 1100 bp, Homo sapiens
  SIMILAR (87)..(266): 1001254mologous to Homo sapiens Human secreted protein, SEQ ID NO: 4480,accession number G00399,Smith-Waterman Score=328.
atgaaggagcagacagttgtcctgagtaacagaaaagagagaaaagagaaaggagagaaagggagaaaagcattgcctgtggcagggggcttgtctgcatcctcatccacgtgtgctcaggctcagagtgagtttcaggaaagagtcagtcagccagcccccaggtgtggaaaccagatctgtgacatcatggagaactgctccatggataagcccatgaaagccaagctccgcatgcaagtattccaagaagctgatgaaaatcatgtccctgacatggaaatcaagacactttcaccacattctactggtcaaggaagtcacaagcctcctcttgactgtgacagtttctcagatttttccttgtttttgatgaccttcacagttatgagcagtactggtaaggaacttgcttattttctggcacaagatgcttcagatccttaccagggtctgaagggcactgggaacttggaccgcctgacattgaaaaagactgaggtagctcgggggcagccaaaagaaaccagaggcggggatcctagtatcattcaggaagtggacccagccgcaaactcaggagcgttccaagtgtccagagcgtctggtagtcgcaatagccagtgagctccgccgcgctgggccgctgctgtcctggccgtgacccgatgtttgtcgcccgcgggcccccgcgctgcttctgcgaccaagcgtgcggcgcggcgcggcgcgggactgctgcgcagactatacgcgggtctgcccaggagggacgcagacactcaggacctaaaggggaagcactggctgtggagctgcgagccgagaaagacgcgcaggttatgaacctgggtgcgttcatctcgggggacctgaaggagagggactcgtggagagttgaggggtgtttcggaggaggggcgcaaggactgctcacaggacttgaagggcggcaggaaggtggaggattcggcccaggtgcgggacgcaggcggtggaagggaaatgagcacaagaggcgcaggcaggaaggagagcgcctggtgcgagagaggaaggagcgcacccaagattgtcacaatgctgaatttgacatttaa

SEQ ID NO: 16746 - DNA, 1113 bp, Homo sapiens
  SIMILAR (715)..(912): 921254mologous to Homo sapiens BC-2 protein,accession number AF042384,Smith-Waterman Score=303.
ttagcgtttaggagaaggctgagagttagtagttatccactggagagatgtccctgggtacatggttggtgggggaccccagggcttaaggggatccccagttgccaaaggatggagggcggagctggaggacctcaggctagtgagcacgcccttgcccaggcctgcagtggctgcactcgccagctggcccatggccctgtccgactcccctccctccaccccaagcctcggccccgggctccgaagcggctcgggggcgccctttcggtcaacatcgtagtccaccccctccccatccccagcccccggggattcaggctcgccagcgcccagccagggagccggccgggaagcgcgatgggggccccagccgcctcgctcctgctcctgctcctgctgttcgcctgctgctgggcgcccggcggggccaacctctcccaggacggtgagtgagggagggggcggcgcctggggaggtggggagtgacccgaggcgggggctgggatcgggagtctcgcggaaggagcctgttggctttgtttggaaccggggttaaagtcaccagccgctgctaatacccttgtgtctgtctctgagcatccgtgtctctgtggactgtgggtgtgccggtgtgtgcacccttctgtgtacaccactgagcgtgtgtctgcgtgtgcaccggggtttggctctcggggctgatgtccgttaggagcagcccggggtctggatgtgttgctgtccgtgtgcgcgcgcgtctgtgttggtgtctggctctgcgtttctgtgtcagtatctgtgtgtatgtctgtgtcagtgtgtgttgggggcggagtgagatttgtcgctgtttcagtcagggcgtgtgtcgggtgtttgtgtatgtatgtactaactgtgtattgattgctaattataagcacctttggctcatttacttctagttcagggtcaagaaggtcaggtgcatcaccttgctctgtcctcacagtcaccctttttagctccaaagggcatggcagtgacttctgcccaatggcctcttcttctgtgtgaactggaacctgccggtaaagccctgaagtgtaagaagatgccatccgccccat

SEQ ID NO: 16747 - DNA, 1177 bp, Homo sapiens
  SIMILAR (292)..(687): 571254mologous to Homo sapiens Breast cancer-associated protein fragment BC-2 SEQ ID NO:12,accession number W44365,Smith- Waterman Score=334.
atggagtcccagagtcatctgataactcatagcgagacaagcacttctctaaacggggcttttacacgctccccttttacacacttactgataaagggacgaggagaaatagtcaacgtagcttcctgtgggacagcagagaaaagaggcttgaggggtttttccagggccccgcccatgctcacctggagcgcagacgaagagttaaggaaacggcccaaagaaacacagtttgtatgtggtagagctggaatccatgagtttaaccactatccacagcaagggactctgggaagatgggctttgccgtgggaaggttggcttttggtggaagggagcggggcttcttatgggaagagcagcctttctgagagagaagagagactttctgggggatctccagggagagtggctggtcaagaccatagatgttcccaatggcaggggctcatccccatacttcccagagtccacttggagactgtctgggatgtcggtgtcgcagatacctcacctgtaccccatcctgggcaaagaaggcacgggcgtcagcttgcatggacagctggaggcaagtggcatccccccagagcgggcagcgacggacgaggaggcgggcacgactcacctcaatggtgcgatagcactcgccaaagaggtccgcggcaaagaagtcgtatgtgaccggatgcgaaaaacacgaggacgtttaaggagcggacgcgcccagggcatgaccggaaagcaggagtggacgccaacccaccaagcaaccacacagacccgacacgatgagattttcaaaatagtgcaaggtgaagcaccaagtcctgatggagaagctgcagcaagttatccaggagatctagctaagatcattgatgaaggtggttgcactaaaccagcacgctggatctcggcgaggccaggcacacgacccgctcttgaaggatgctacgcgcgagctgaagcccggctcgcgcgtgttcgacgagcggcccgacgtggtctgcacccccagcgacggcatcgtcggcgcctgcggcctcgtgcagcgcggccaggtctaccaggccaagggcttcccgtactccacggccgagctcttcggaccgacgcaggacgccagcgtcttcgagggtggccgagtccatacatgtcactgcaagggaaatga

SEQ ID NO: 16748 - DNA, 549 bp, Homo sapiens
  SIMILAR (469)..(546): 801254mologous to Homo sapiens Human secreted protein, SEQ ID NO: 8172,accession number G04091,Smith-Waterman Score=107.
atggcattggtgatggcagtagaagtagtgggtacatcttgggaccttcctgtggcatacatgggcacagtagtggcagcagtggacttggaaggccagttcccaggcctccaggtggcacatgaagctttggcttactcaaatgcatctgcatttcgacgtctaaatctgtattactggtttgcctctgctctctcctttgtggattggccttttaaaacaatttccctttctgaggagatttggaaaagaggaaaaagagtttgtgaggctgggaaattcaagatcaaggccccattagattcaatgtctgatgagggtttgctggttcatagatgttgtattcttgctgtgtcctcccatagtgcaagagggaaagaaacttgtgtatggcacagtggaaacaatgaagttgaagggtacggcttaatggatgatgaaaatgagatgttcgggggacaagagaggggcaaagatttcatgatgaagacacaaaaggtggttgcaacgaaagcaaaaattggcaaatgggatctaattaaactctag

SEQ ID NO: 16749 - DNA, 421 bp, Homo sapiens
  SIMILAR (41)..(412): 331254mologous to Homo sapiens keratin associated protein 9.2,accession number AJ406946,Smith-Waterman Score=132.
agagtcctccttagaagggtccaagttcccaggaagagggacggccacagttcagtcaacttacctgcttcagcctgccagctttggagaacacaggcagtccggatgagggagggtcccccatctccagtgcagcacattggctctaccaaaaagcagccagatccctgatcctgttcctcctgactgggtgagtcctcccagtaggggtctccagccacctcctacaggtgggtgtgggccagcaacaggtcagtaaccactaggacagagcttccagaggaaggagctggctgccatctttgctgtttcacagtattcactggtagtacctccaggtatgggagaaactgaggcaactggcatctggagtagaccgccagcaaatggcaacagccctacagtagaatggcatattaaa

SEQ ID NO: 16750 - DNA, 1655 bp, Homo sapiens
  SIMILAR (456)..(1139): 811254mologous to Homo sapiens putative p150,accession number U93574,Smith-Waterman Score=1011.
ggatttttgccgatttcggaaccaccatcaaacaggattttcgcctgctggggcaaaccagcgtggaccgcttgctgcaactctctcagggccaggcggtgaagggcaatcagctgttgcccgtctcactggctcacgtctgccaagatgccttcattgactttgcaaaaaggaggagtgatacagcaagtgggacatccacaggaaacacgtccacacttacgagctgcgtagttcagttacccagctgccagaaatccgtcaatcccagggattccgtgcaggaagcacaggggacgggccacggcaagcaagggctggtgactgagcctcagctgcagggctggacagagtcatctgggggagaggtggggcaggaggatgcctggaagccaagaggagacactgttccagaggaggtggctggagacccctactgggaggactcacccagtcaggaggaacaggatcagggatctggctgctttttggtagagccaatgtgctgcactggagatgggggaccctccctcatccggactgcctgtgttctccaaagctggcaggctgaagcagagcacttcaaaggactaataatgttccatggaacagacattggaaaaagacaatccgggacaccagccatggcaatatcccacatgctccctctcataaagtggggctgctcaggaaccagtgagaggctagcaccgcaggcaacggtgcaggtgaatggactgaacgatttcatccgttcttccaaggtggggctgctcaggaaccagagagaggctagcaccgcaggcaacggtgcaggtgaatggactgaacgatttcatccgttcttccaaggaaccagtgagaggctagcaccgcaggcaacggtgcaggtgaatggactgaacgatttcatccgttcttccaaggtggggctgctcaggaaccagagagaggctagcaccgcaggcaacggtgcaggtgaatggactgaacgatttcatccgttcttccaaggaaccagtgagaggctagcaccgcaggcaacggtgcaggtgaatggactgaacgatttcatccgttcttccaaggtggggctgctcaggaaccagagagaggctagcaccgcaggcaacagtgccagcaaatggactgaacgatttcatcggttctcagtcttcagaggccgtgacaccaagggcacaaaactggacagagagaatgagtttcatgaactgacagaactaggcttcagaagatgggtaataacaaactcctctgagctaaaggagcatgttctaacccaatgcaaggaagctaagaaccttgataaacacttacaggaactgctaactggaataaccagttcagagaagaacataaataacccgatggagctgaaaaacacagcacgagaacttcgtgaagcacacacaagtatcaatagccaaatcaatcaagtgttagaaaggatatcacagattgaagatcaacatattgaaataaggcatgacgacaagattagagaaaaaagaatgaaaaggaacgaacaaagcctccaagaaatatgggactatgtgaaaagaccaaacctacgatggactggtgtaccggaaagagatggggagaatggaaccaggttggaaaacacactttag

SEQ ID NO: 16751 - DNA, 897 bp, Homo sapiens
  SIMILAR (442)..(891): 961254mologous to Homo sapiens putative p150,accession number U93564,Smith-Waterman Score=733.
  misc_feature (1)...(897): n = a,t,c or g
gtcgacccgggaattccggaccggtacctgcaggcgtaccacgctttccctatagtgagtcgtattaagagcttggcgtaatcatggtcatagctgtttcctgtgtgaaattgttatccgctcacaattccacacaacatactgagccggaagcataaagtgtaaagcctggggtgcctaatgagtgagctaactcacattaattgcgttgcgctcactgcccgctttccagtcgggaaacctgtcgtgccagctgcattaatgaatcggccaacgcgcggggagaggcggtttgcgtattgggcgccagggtggttttttttttcaccaagtgagacgggcaacagctgtattgcccttcaccgcctggccctgagagagttgcagcaaagcggtccacgctggttttgccccaagcaggcgaaaatcctgtttgatgggtggttaaagcgcggggatataacatgagctggtcttcgggtatcgtcgtattcccacctacccggaggatatccggcaccaacgcgcagccccggactccgngtaatggcggcgcattgcggcccagcgccattctggatcgttgggcaaccagcaatcgccagtggggaacgatgccctcattcagcatttgcatgggttggttgaaaaccggacatggcactccagtcgccttccccgttcccgctatcggctgaatttgaattgccagtgagaaaattatgccaagccagccagacgcagacgcgcccgagacagaacttaatgggcccgctaacagcgccgatttgctgggtgacccaatgcgaccagatgctccacgcccagtcgcgtaccgtcttcatgggagaaaataatactgttggatgggtgtctggtcagagacatcaagaaata

SEQ ID NO: 16752 - DNA, 561 bp, Homo sapiens
  SIMILAR (385)..(537): 1001254mologous to Escherichia coli CTP synthetase (EC 6.3.4.2),accession number M12843,Smith-Waterman Score=266.
atggggccccatccactacatgggtcccacagccatgaagccagctttgatgacaaaaggcaggaaaaacggcatgttttgcatctggtgtgcaatgtgaagagtccttcaaaaatgccagaaatcaacgccaagggcagagagcaaaaagaaagggcagcgctctcaagacttccttgctttgttttggttgacacatctgtcaacatcacccttagcaccgcctgccctggccaccacgtgatgaggctactggcttgtggcctgagagtccgctatcagcacatcatacctttggctaaaaatgtgctaaaaatgtgccagcccctccagtgtcaatcaaatggccatcagtcatttacacttgagtgtggagaagccgatgcagccattcttgaagcccgtggcctcaatgtgaccatcatgaaactggatccgtacatcaacgtcgatccaggtactatgagcccaatccaacacggggaagtgttcgttactgaagacggcgctgaaaccgacctggacctggggcactacgggtaccggcgtatcttatcctag

SEQ ID NO: 16753 - DNA, 642 bp, Homo sapiens
  SIMILAR (395)..(267): 901254mologous to Homo sapiens stress protein Herp,accession number AB034989,Smith-Waterman Score=207.
tcccataagatagtgcaatatgtaactccacctttctactacagcactaacggaacaatctgctactattaactcatcactttgtgttgataatacagtttctaattcctaggaaagaaacaaaatattacttggtaataacaccatacagtctctcaataaacgttttatccaacttcttttattactcccctgaaagtctgaatgatacaaattgttaccatcatgaagaggcagacacaccttggcgttgatttctggcaatttttgaaggactcttcaacattgcacaccagatgcaaaacatgccgtttttcctgctttggaagcaagtccctgagacattggtgatccaacaacagcttcccagaataaattaacctctggtcctctggaacgcggacgctcggggtagacgcggctcaggtgggccttgaggtggcccacactccagccgcggtcagccactcagctccaagttccggtggcgctggttggggctcttcaccaggagcgtgacgggctcgggttcggtctcggactccatggcggcggctggcggtgtcggggctccgctgcgctcctaggtgccaggcaggcggcgtctcagccgcccgcaatctctgcaacgaccgttcacgt

SEQ ID NO: 16754 - DNA, 551 bp, Homo sapiens
  SIMILAR (243)..(548): 531254mologous to Homo sapiens p40,accession number U93571,Smith-Waterman Score=251.
aagctgagactttccaaaatggaaagaggcttctggaccatcaagtttctatggacaagaagcagactaagaaagctactaaggcaaccccatcaataacttatacgacaaaagatgaagggccaccaagtgaccataaaggaaagattccagatatgcatccagagaaacttagtgaagatgaacttattgacataaaggaggaaggtggttgtgacaaaaaggatgtagatgtcccagaggaagagactccctttgaaaagctcactggtgagctgacagaagtaagcttcagaaggtcagtaataacaaactactctgagctaaaggaggatgctcgaacccatcgcaaggaagctaaaaaccttgaaaaaatattagacgaatggctaactagaataaacagtgtagagaagaccttaaatgacctgatggagctgaaaaccatggcacgagaactaggtgacgcatgcacaagcttcaatagccaattcaatcaagtggaagaaagggtatcagtgattgaagatcaaattaatgaaataaagtga

SEQ ID NO: 16755 - DNA, 465 bp, Homo sapiens
  SIMILAR (1584)..(2498): 931254mologous to Homo sapiens putative p150,accession number U93563,Smith-Waterman Score=1454.
atgaaagtctctgaagaaagttatcatcttccaaggtcacaaattattccaatagtacccaacacattcttgaagataacagtttctgctgaccacggagtctgccatgaagaagatataaaacaacaacatactgtgttcattgtggatgttaaagccaacaagcaccagatcacacgggctgtgaagaagctctatgacattgatatgcccaaggtcaacaccctgattagggattgcagctccttgccagcaacagaacaaagctggacgaagattgacgagttgacagaagtaggcttcagaaggtcggtaataacaaacttctctgagctaaaggaggatgttcgaacccatcgcaaggaagctaaaaaccttgaaaaaagattagacaaatggctaactacaataaacagtgtagagaagatgttaaatgacctgatggagctgaaaaccatggcatga

SEQ ID NO: 16756 - DNA, 2811 bp, Homo sapiens
  SIMILAR (958)..(1182): 561254mologous to Homo sapiens p40,accession number U93567,Smith-Waterman Score=204.
atggttatgttggaaggaactggggaagaagagtggggcgctgctgaaaatatacccaaaagtgtggagcgactttggaaccgggtaacaggcagaggttggaacagattggagggctcagaagaagacaggaaaatgtgggaaagattggaacttcctagagacttgttgaatggctttgaccaaaatgctgataacaatatggacaataaaattaaagtccaggctgaggtggcctcagctggagatgaggaacttgttgggaactggagcaaaggagaaaaacttcaagagtttgtggatcacaaagtgtggtggctgacacatgactggaaaaatgtaaaggagagaggttgtaatacttgctgtgatgaccgatggatggcagtgaagccagctgcacgtctatggaaagggaccatatttcctctaggctgctatagaaaccacagaagatatgcacatcctctgttggtgatacccaggcaaacaggatcaggagtggacctccagcaagccccaacagacctgcagctgagggacctgactgttagaaggaaaactaacaaacagaaaggaatagcaccaacatcaacaaaaaggacatccacaccaaaaccccatctgtcaccatcatcaaagacaaaggtagataaaaccacaaagatggggagaaaccagagcagaaaagctgaaaattctaaaaaccagagcaccccttctcctccaaaggatcgcatctcctcgccagcaaaggaacaaagaaggatggagaatgactttgacgagttcacagaagtaggcttcagaaagtcggaagctaaaaaccttgaaaaaagattagacaaatggctaactagaataaacagtgtagagaagaccttaaatgacctgatggagctgaaaaccatggcacgagaaatatgtgatgcatgcataagcttcagtagccgattcgatcaagtggaaataagggtatcagtgattgaagatccaattaatgaaataaaaaccaaagacaaaaaccacatgattatcttaatagatgcagaaaagacctttgacaaaattcaacagcccttcatgctaagaactctcaatgaactaggtattgatggaacgtatctcaatataataagaactatttatgacagacccgcagccaatatcatactgaatgtgcaaaaactggaagcattccctttgaaaacaggcacaagacaaggatgccctctcttaccactcctattcaacataatgttggaagtgctggccagggcaatcaggcaagagaaagaaatgaagggtattcaattaggaaaagaggaaattaaattttccctgtttgcagatgacatcattgtctatttagaaaaccccattttctcagccccaaatttccttaagctgataagcaacttaagcaaattctcaggatacaaaatcaatgtgcaaaaatcacaagcattcctatacatcataaacagacaaacagagagccaaatcatgagtgaactccgattcacaattgctaccaagagaataaaatacctaggaatccaccttacgagggatgtgaaggatctcttcaatgagaactacaaaccactgctcaatgaaataaaagaggacacaaacaaatggaagaacattccatgctcatggacaggaagtatcaatattgtgaaaacagccatactgcccaaagtaatttatagattcaatgccattcccatcaagctccaactgactttcttcacagaattggaaaaaactgctttgaagttcatgtggatacaaggctacagtaaccaaaacagcatggtactgactctgctggtgatacccaggaaaatgcggtctgcagtggaactccagcaaacttcaacagacctgcagctgagggacctgactgttagaaagaaaactaacaaacggaaagcaacagcatcaacttcacaaaaaggtcatctacaccaaaaccccatctgtaggtcaccaacatcaaagaccaaagaagtaggcttcagaaggtcggtaataacaaacttctctgagctaaaggaggatgttcgaacctatcacaaggaagctaaaaaccttgaaaacagattagatgaatggctaactagaataaacagtgtagagaagaccttaaatgacctgaaggagctgaaaaccatggcacgagatcttcatgatgcatgcacaagcttcaatagacgatttgatcaagtggaagaaagggtaacagtgactgaagatcaaattaatgaaataaatgatggagagaatggaaccaagttggaaaacactcctcaagatattatccaggagaacttccccaatctagcaaggcaggccaacattcaaattcaggaaatacagagaacactacaaagatactcctcgagaagagcaaccccaagacacataattatcagattcaccaaggttgaaatgaaggaaaaagtgttaaaggcagccagagagaaaggtcgagttacctacaaagggaagcccatcagactaacagcggatatctcggcagaaatcctacaagccagaagagagtgggggcccatattcaacattctcaaagaaaagaattttcaacccagaatttcatatccagccaaactaagcttcataagtgaaagagaaataaaatcctttacagacaagcaaatgctgagagattttgtcaccaccaggcctgccttacaagagctcctgaaggaagcactaaatatggaaaggaacaaccggtgccagcactgcaaaaacttgccaaattgtaaagaccattga

SEQ ID NO: 16757 - DNA, 591 bp, Homo sapiens
  SIMILAR (480)..(587): 391254mologous to Hordeum bulbosum chitinase,accession number AJ400135,Smith-Waterman Score=56.
atgcgtcaggaaccgccccggaaatccaggctcgacccacgcgtccgcgccgaaagcgaagaaggaagctcctgcccctcctaaagctgaagccaaagcgaaggctttaaaggccaagaaggcagtgttgaaaggtgtccacagccacaaaaagaagaagatccgcacgtcacccaccttccggcggccgaagacactgcgactccggagacagcccaaatatcctcggaagagcgctcccaggagaaacaagcttgaccactatgctatcatcaagtttccgctgaccactgagtctgccatgaagaagatagaagacaacaacacacttgtgttcattgtggatgttaaagccaacaagcaccagattaaacaggctgtgaagaagctgtatgacattgatgtggccaaggtcaacaccctgattcggcctgatggagagaagaaggcatatgttcgactggctcctgattacgatgctttggatgttgccaacaaaattgggatcatctaaactgagtccagctgcctaattctgaatatatatatatatatatcttttcaccataaaaaaaaaaaaaaaaaaaaaaa

SEQ ID NO: 16758 - DNA, 396 bp, Homo sapiens
  SIMILAR (155)..(394): 861254mologous to Homo sapiens transcription initiation factor IA protein,accession number AJ272050,Smith-Waterman Score= 333.
ttcgccctctgcagtcaagatgctgggcgcgttgagtactgggatttcaaatatgcgtgcattagagaatgattttttcaattctcccccaagaaaaactgttcagtttggtggaactgtgacagaagtcttgctgaagtacaaaacgggtgaaacaaatgactttgagttgttgaagaaccagctgttagatccagacataaagagattgccttggttgaatagaagtcaaacagtagtggaagagtatttggcttttcttggtaatcttgtatcagcacagactgttttcctcagaccgtgtctcagcatgattgcttcccattttgtgcctccccgagtgatcattaaggaaggcgatgtagatgtttcagattctgatgatgaagatgatac

SEQ ID NO: 16759 - DNA, 655 bp, Homo sapiens
  SIMILAR (436)..(1089): 431254mologous to Homo sapiens BC85722_1,accession number AC006486,Smith-Waterman Score=334.
ttttttaatactattaacattttataatttttactaattgattacaattttcttgagaattaaacattcaaaataaggaaaagtatactcatgatggtacatatcttgctattatttgcaaggctctgtgatatgtgtcaaaatttgcaggaagattatcatcttcatcatcagaatctgaaacatctacatcgccttccttaatgatcactcggggaggcacaaaatggggaagcaatcatgctgagacacggtctgaggaaaacagtctatgctgatacaagattaccaagaaaagccaaatactcttccactactgttttgacttctattcaaccaaggcaatctcaatataatactgataagttggctcaaagtcttttggtcaagtacatgacagaagaacggaattctagcagccagttgatgatctgggtcatcctttatgtctggatctaacagctggttcttcaacaactcaaagtcatttgtttcaccctttttgtacttcagcaagacttctgtcacagttccaccaaaccgaacagtttttcttgggggagaattgaaaaaatcattctctaatgcacgcatatttgaaatcccagtcctacgacgcgaacagcgtcttgactgcacaggacgaagcggccgc

SEQ ID NO: 16760 - DNA, 599 bp, Homo sapiens
  SIMILAR (264)..(350): 821254mologous to Schizosaccharomyces pombe 60s ribosomal protein l44,accession number AL109770,Smith-Waterman Score=136.
atgtggggtgtttgcatcactgagtatcacacagccttttcactcatggttagagacggagcagaaaggtggacagacaccccagcacaaagccgagtgaagaactctgaggaaggatgcgtgcttgggaatgatgcctcgaccctggtgcctgaagccgtgcctgggacgcgaccactcctagcgatactcggtgatggtcgctcaataggagccattccgacacgcttgcgaaccaatcagcaagtcgtgggtcccccaaagtgccgttccatggcgcaggtgcatcctattatgccgactttagtgaagccagctgtgaggccgcgctggcaaatggcatacacagcccgagtgatcattaaggaaggcgatgtagatgtttcagattctgatgatgaagatgatagtaagtataaaaaggtttaaaccctgggcacggtggcttacacccataatcccagcattttgggaggccgagatgggaggatcacttgaggcccaggagtttgagaccagcctgggcaacatggtgagaccttgtctctgcaaaaaaacattttttttcaaatattttcttaaaaaaggcttaaagtaga

SEQ ID NO: 16761 - DNA, 447 bp, Homo sapiens; identical to SEQ ID NO: 1866
  SIMILAR (234)..(410): 301254mologous to Arabidopsis thaliana hypothetical protein (fragment at BAC end),accession number AL357612,Smith-Waterman Score=89.
  misc_feature (1)...(447): n = a,t,c or g

SEQ ID NO: 16762 - DNA, 429 bp, Homo sapiens
  SIMILAR (392)..(294): 361254mologous to Homo sapiens Human secreted protein sequence encoded by gene 33 SEQ ID NO:156,accession number Y91483,Smith-Waterman Score=61.
ttttttttttttcaagatttctgattgtttattgaaatcatttaagaatagagcctggaaaactttcagtaatgttcctaggacatcttcatctgagataactttgtctttggattcctctggaacatatcggagggtccccaatccgaaacccaccatcccgacgtgcttttgagtggcgttctgcccgttcttaacgcgcgagctactgcacgctattctcacagccgggatgggcttctttaaccacgtgaagtacttgtatgaactatgaaaataaaccctggattggcttttctgaggaagttcaagcacctaattaacccctggtggagaaaaagccacgcactctcacgcggtaagggcagtctttttaaaaagtttccatttttgcccagatacaagctccccagtcagtgccgaacgcaa

SEQ ID NO: 16763 - DNA, 1076 bp, Homo sapiens; identical to SEQ ID NO: 1870
  SIMILAR (859)..(1386): 361254mologous to Arabidopsis thaliana E2F transcription factor-like protein,accession number AL391146,Smith-Waterman Score= 255.
  misc_feature (1)...(1076): n = a,t,c or g

SEQ ID NO: 16764 - DNA, 2122 bp, Homo sapiens
  SIMILAR (2)..(430): 551254mologous to Mus musculus fatso protein,accession number AJ237917,Smith-Waterman Score=370.
aatggaataatgtaaggaccccacagcatgtggtatagaatgggcctttcataagtactgactacttgggtgggaagtgttgggagttagctaactagaactccctcaaacaattcttttctgaacttagtttccagccctccacacacatgagaataagcttatagttccttaaggccaggaacccagaagttatgcaggtaagtttggcttttatcagttgaagggtagtgaatagaaacttttcccattttcaggaccctccgatatgttccagaggaatccaaagacaaagttatctcagatgaagatgtcctaggaacattactgaaagttttccaggctctattcttaaatgatttcaataaacaatcagaaatcttgactatgcttccagaatctgttaaatcaaaatatcaagacctactggcagttggaacatcaaggggtggaactgcttgaaaacagacatcaacagcaaagtacctttaaaccagaagaaattctttacaagactttgggtttcagtgttgcccaagcaactagctcattgatttctgctggaaaaggtgtcttcgttactaaaggattggtaccaaaaggcgcagtcgtatctatgtatcctggtacagtatatcagaagtatgagccgatctttttccagtccattggaaatccgtttatttttagatgcctggatggggtactcattgatgggaatgacaaagggatatcaaaagttgtgtacagatcttgcaatgggagggatcgactcggccctttagaaatgagtgatagtacatggctaacgtcagaaattcataaccctctggctgtgggacagtatgtcaacaattgttccaatgacagagcagctaatgtctgttatcaggaatttgatgtgcctgcagttttccctatagaactgaagcagtatcttccaaacattgcctacagctatgacaaacaaagggcgaacgagcagcgccgagcccagtccccggatggggcgcctgagccaatcgcagccgccgccgccaccgccgcggccacaaaacctccttgcaagttcctttcacctggttcattcctccacgtttatcgggacttggcttggtgctccacctcacatttcccaaaaaagcctcctgatgcctccccgactcacagtggacgggggcctgcactgtctgtcatcagatgcagaaatggaggttcagaaagtcaaaatgggggtcacgtagcagaagaggaaattcaggcacgcaaagagacacaaaagatgcagacacagaggaaaagaccatgtgaagaggcagtaagagggcagctgcctgcaagccaaggagagaggcctcagaggaatccagccctgctgacaccttcatcttggacttctaccctccaaagctacacaacacaagaggagcgaccaaaaaggaaaagacaaaaggaacacacgaaaaaacgaagaccaccacccacgcacccaacaaccacaacacatgagaacacacaaggacaacagcaaccacaagacaaggaacaaaaaaaaacagaacacagaaacagagagaagagcaatgcgagacaggcgcgacaaacgagacacaacacaagtaacaaacgagacacgacaaaaaagagcatagaaagaacacaacagaacacacaccaaagcagagaaaacaaaacagcaacaaacacacaaaaaaaaaagaaaacaaaaagaggaaaaaaaaaagagggaacaagaaacgcggaaacaacgaagacgaaccaagcggacgcaggaagcgacgagcacgcagaacagaccacagagagaggacgcaacgaaagacgagagcaagagagggaggaccgatccacaaagagcgagagagcgcacaaagagccaaagggaaagcacgccaagaagaacaacacgaaggaccagacaaaggaaagcaaaccagagcaaatcagagacaacaagaagaaagaaagaagtgaaagcaggagccagaatagacacgacacaggcaccagagaacaagcgaagccaggaaaagaaaacaggaagaaagcaaagagaaaaacggacacgcgaagcaacacgagagacagagcgaacaactga

SEQ ID NO: 16765 - DNA, 1104 bp, Homo sapiens
  SIMILAR (513)..(965): 361254mologous to Herpesvirus papio NTR,accession number AF200364,Smith-Waterman Score=137.
atgcccatgcgtgtactctcagatgatcgggagtctcatgacacagcaacactcacataccatccatattccaaagacatcagcccatgggtggctggtggagagctcaatcccataaatgtagaaagagaagcgcaggaggatgagatctcagagaacttggtgaacattcagaaaatgcagaaaacgcaggtgaaatgccgcaaaatcctgaccaagatgaagcagcagggtcatgagacagccgcctgtccggagactgaagagataccgcagggagccagtggctgctggaaggatgacctccagaaggaactgagtgatatatggactcaccccaccacggcccccaaccttagctgtactgctgtctacaccctgagcagtgtggagtctcccagcgcccccagctccttgtcttcttgcaggtctgctgtgcacgtgctgcagaactccatagacagcctcactttgtgctcgggggcctgtcccaaggcctcgagcctaagagggcgacaccttcgcgcagttggagacgctcaagagcgagaacgagcagacgttggtgaggctgaagcaggagaagcaacaactgcagcgggacgtgaagacctcaagtactcgggggaggccacgctgccagcagaaactgcaagccgaggcgcaggagcgtctcaagaaggaggagcggcggcagcgaaggccaaggaccagctggagcgcgccttgcgggcgatgcaagtggccaaggacagcctggagcacctggccagcaagctgatccacatcactgtggaggacggccgcttcgcgggaaaggagctggatccccaggcagataactatgtgccaaacctgctgggcctcgtggaggaaaagctgctgaaactgcaggcgcagctccagggccacgacgtgcaggagatgctgtgccacatcgctaaccgcgaggtgccctgcagccatggggcagagctccagagatctaggaacgaagagagtgaggaggaggacaatcgaggtagtgacccgcgcatcactcaagatccgttcccagaaattaatcgaaagtcacaagaagcaccgtcgctctcggagtcctag

SEQ ID NO: 16766 - DNA, 1390 bp, Homo sapiens
  SIMILAR (1633)..(1788): 981254mologous to Homo sapiens candidate tumor suppressor protein DICE1,accession number AF097645,Smith-Waterman Score=260.
atggaagttgcagccctggagcacctagaccaccggctgagggagaaggtgaagcagcagaacgccctgcggcaccaggtggtgttgcggcagaggcggctggaggagctccagctgcagcacagcctgcgccttctggagatggcggaggcgcaaaacagacacacggaggtggccaagaccatgcggaacctggagaaccgcctggagaaggcccagatgaaggcgcaggaggccgagcacattaccagcgtgtacctgcagctcaaggcctatctaatggacgagagcctcaacttggagaaccggctggactccatggaggctgaggtggtgaggaccaaacatgagctggaggcactgcacgtggtgaaccaagaggccctcaatgcccgggacattgccaagaaccagctgcagtacctagaggagaccttggttcgagagcgcaagaagcgggaacgctacataagtgagtgcaagaagcgcgccgaggagaagaaactggagaacgagcgcatggagcgcaagctgaccctggctctgacctcaacccacgagcagacccaccgcgagcacctgctgctacagtccgacgacaccatccaggacagcctgcatgccaaggaggaggagctgcggcagcgctggagcatgtaccagatggaggtgatctttggcaaggtcaaggacgccactggcactgacgagacgcactcgttggtgcggcggttcctggcccagggcgacaccttcgcgcagttggagacgctcaagagcgagaacgagcagacgttggtgaggctgaagcaggagaagcaacaactgcagcgggagctggaagacctcaagtactcgggggaggccacgctggtgagccagcagaaactgcaagccgaggcgcaggagcgtctcaagaaggaggagcggcggcacgccgaggccaaggaccagctggagcgcgccttgcgggcgatgcaagtggccaaggacagcctggaaaaaccaagccagcaagctgatccacatcactgtggaggacggccgcttcgcgggaaaggagctggatccccaggcagataactatgtgccaaacctgctgggcctcgtggaggaaaagctgctgaaactgcaggcgcagctccagggccacgacgtgcaggagatgctgtgccacatcgctaaccgcgagttcctcgccagcttagagggaaggctgcccgaatacaacacccgcatcgccctgccccttgccacttccaaggacaagttttttgacgaagagagtgaggaggaggacaacgaggtagtgacccgcgcatcactcaagatccgttcccagaaattaatcgaaagtcacaagaagcaccgtcgctctcggaggtcctag

SEQ ID NO: 16767 - DNA, 1351 bp, Homo sapiens
  SIMILAR (316)..(477): 381254mologous to Homo sapiens Human neurofilament-H mutant protein fragment 8,accession number Y20849,Smith-Waterman Score=67.
atgcgctgtccaccgctgaccctggctctgacctcaacccacgagcagacccaccgcgagcactgctgctacagtccgacgacaccatccaggacagcctgcatgccaaggagaggagctgcggcagcgctggagcatgtaccagatggaggtgatctttgcaaggtcaaggacgccactggcactgacgagacgcacgagtacacctatggggtcatctggggcactgaggcgcagcccctttccagatgtgggccttgtgagcggatggctccgaagacgggcggtatttcctgcggaatcgggcgagattcacgggcagaaattgatggcactttgattttggaaagaagctatgctcgcctctccagtgcccccgaggcgacaccttcgcgcagtggagacgctcaagagcgagaacgagcagacgttggtgaggctgaagcagagaagcaacaactgcagcgggagctggaagacctcaagtactcgggggagccacgctgccagcagaaactcaagccgaggcgcaggagcgtctcaagaaggaggagcggcggcacgccgggccaaggaccagctggagcgcgccttgcgggcgatgcaagtggccaagacagcctggagcacctggccagcaagctgatccacatcactgtggtgggggacaaacccagcccttattgctcggacgccctgctgcaagctcccacgcggacgcaaaacctaggcaactacaacaagacaacacagaccaagacacacaacacatatgaacaggacgccaaaagcgcaagacgaaaaaacacgaaaacaacacgaaaaaaccaccccgaacgacaacaaaaagaagaacgagaacaaaacaaaccacgacctacgaaccccacgagacacaaccaagaaaacaacacagccacaaagaacaacccacataccaagaaacacacaagagcaaaacaaaaacaccaaaacaagaacaactacaacaggaaattctcaggccagaggaacaaccagtgccaaaaccccgagcgccctcgaccggactgtcggattgctgtcgtggtgctgaagcctcacgccctggcgaccccgccccagtgtgtgctagtcccgcgccccgacgtaaacatgcaccggcgcccgcgcaccaaaggagctctaggagctggacggaggaggggagcccgtctcctggcccgaaagccagcccaagaagggggccaggtcgtgctgcctaaagcgaaggtggagctcagggataggggacctggatcccacatcgctccctgctatccccccaccccccttagacgaagagagtgaggaggaggacaacgaggagtga

SEQ ID NO: 16768 - DNA, 1779 bp, Homo sapiens
  SIMILAR (184)..(1035): 411254mologous to Homo sapiens MSTP030,accession number AF113210,Smith-Waterman Score=320.
atgtctgccacaggggaccgacacccgacccaaggggaccaggaggccccggtaagccaggagggagcacaggccgaggcggccggagctggtaaccaggagggcggcgactccggccccgacagcagcgacatggtgcctgcggccgaggtggtcggagtcgcagggcccgtggaaggcctcggggaggaggagggtgagcaggcggcaggcctggccgcagtcccccagggcgggagcgccgaggaggactcagatatcgggcccgcgacggaggaagaggaggaggaggaagaggggaacgaggcggccaacttcgacttggcggtggccacccgtcggtacccggcggcgggcattggcttcgtgttcctgtacctggtccactcccttctccgccgcctctatcacaacgaccacatccagatagcgaaccgtcacctcagccgcctgatggtggggccccacgctgctgtgcccaacctctgggacaaccctcccctgctgctgctgtcccagaggctgggtgcaggggctgcagccccagaaggcgagggcctcggcctgatccaggaggctgcgtcggtccaggaggccgcgtcggtcccagagcctgcagtgccagctgacctggccgagatggccagggagcccgcggaggaggccgcagatgagaaacccccagaggaggccgcagaggagaagctcacagaggaggccacagaggaaccggccgcagaggaaccgacctcagaggaggccgtggcccccgagggtaagggggctagcggcagcagcggggaagcggggatccatgtgtccaagggctctgggcagggctgcggtgcgggcacagctggtgaagcgggtgaactagaaataatcagccgctttgggtgggagatttactggaaaaaagggaaatacagtgtccctgtggaaatgatcaagcagcagcaacaagtcactaaatctcagcccgaaaagtgggatgaagaggcccaagatgctgcaggcgaggaagagaaagaacaagaaaaagagaaggatgtggaaaacaaggtgttcaaacgcaaaacctcttcaatggcccttctccctcataccaaatatcaatgcgcacctgaaagccatcagcttgaagcatctagctcaggtgtgttggtactgagcctgtgtgagaaagatgatgccatgattatggaagaaatagggaaaatcttcaagaaaaaaatagaaatgagaaaaggtattgcttttcccaccagcatttcagtaaataactgtatatgtcacttctcccctttgaagagcaaccaggattatattctcaaggaaggtgacttggtaaaaattgaccttggggtccatgtggatggcttcatcgctaatgtagctcatacttttgtggttgatgtagctcaggggacccaagtaacagggaggaaagcagatgtcattaaggcaattcacctttgtgatgaagctgtcctacgcctggtcaaacctggaaaccagaacacacaagtgacagaagccctgaacaaagctgcccactcacttaactgcacgccaatagaaggtatgctgtcacatcagttgaagcagcatgtcatcgatggagaaaaaaccattatccagaatctcacagaccagaagaagaaggaccatgaaaaagcggaattggcggtacatgaagtatatgctgtggatgttctcgtcagctcaggagagggcaagagcaaggatgcaggacagagaaccactatttacaaatga

SEQ ID NO: 16769 - DNA, 397 bp, Homo sapiens
  SIMILAR (1)..(390): 1001254mologous to Homo sapiens dipeptidyl-peptidase III,accession number AJ271216,Smith-Waterman Score=681.
cggctggtggcgagcgcagagcagctgctgaaggagctgccctggcccccaacctttgagaaggacaagttcctcacccctgacttcacctccctggatgttctcaccttcgctggctccggcatccctgccggcatcaacatccccaactacgatgatctgaggcagacggaaggctttaagaacgtgtcgctggggaatgtgctggctgtggcctacgccacgcagcgggagaagcttacctttctggaggaggatgacaaggacctgtacatcctctggaaggggccctccttcgatgtgcaggtgggcctgcacgagctgctgggccatggcagtggcaagctcttcgtacaggacgaaaaaggagcattcaactttgaccaggaaatgtatt

SEQ ID NO: 16770 - DNA, 1977 bp, Homo sapiens
  SIMILAR (1270)..(1425): 801254mologous to Homo sapiens dipeptidyl peptidase III,accession number AB017970,Smith-Waterman Score=227.
atgcctgaggtcgactctagaggatccctggtactatctagaagtcgtaatcattgtcatagctgtacatactgtgaaattgtcatagttataaatttgacagaagatacgagtcgcaggcttaaagtgtatagattgtggtcgcaaaggagtgagcagactaacgttaaaagccatgggatcagcgaccgcaatccagctgccacagcttgtgccatcgccctgcaggctcggactctcagagcgatcccctactccccccccgaggagtatctccttttgcctgcgtcgtcggcgtacgagctcgaattcgtaatcatggtcatagctgtttccttgagacgggtaacagctcattgtccttcaacgcctggccctgagagagttaaccaagcggtcaacgctggtttgcgcagccggcgcaaatcatgtttcatgctgggttccgacatcgcgacatgccttgtggatctaaaccatggctcggcggtcgcgtgcgagtgcgggcatgtgacactgtcccgagccatttttctattagctcacagagccggcaaatccgcaccagccgaaaccacgacccgactcccccaatatcagaccgctaacaatggccgcacagcagctcaggccaccaccagcatcggcgtccccgtgatcccacatgccgagacacgcatgccgcacgctgggcatcttcctctacgtccccactcaccgatcgccagtcatccgcgcccaccgcgcacgacgacacgctctacaatcgcgtcacgtcccacatcaccacctgtcaatccaaggcgcccaccacctctgcagcctgcacgttccaaactgcggacccatcatgcatcatcgcatgtctggtgcttaccaccttcacgccttgcggcccttcgttctcacagcgcgctccccccttccaatcatgtctccccggtcaccgctggctccttgagaccacccttcatcgcagccatctggccccgcgccctacggcccagtgctaagcttgcatgcctgcaggctcgactctcagaggatcccctactcccccccggcaggcagtatgctctctttgcctgcgtcgtcggcctgcgccttgctccaccctcgacccgcgccactatcaccaacgtcgacgcaacatcgcgggcgcaaccaccgtccgcgggatgggccatcccagcacgtcgcccacatccgttttatgcccatcacgtccgtcaacctcacatgcaccctccacgggacccgactcagcggtccgccgcagacagctgctgcaaggagctgccctggccccaagtctttgagaaggacaagttcctcacccccgacttcacctcccaggatgttcttgacttcgctggttctggcatccctgctggcatcaacatccccaactacgatgacctgaggtggatcatatacacgcagtatattgcgccgacgcgacatagcaccgagaactcgatccggccgtcatgtcgccgatggctgattaccggcacatatggctctcatacgcgtcatatcttcttgatatatagctattgcattccttcagcgagttttatgtatccactactccacgtagcatccgtcacagtctatgtcattagcttatacataccggttgatcgtgacgcacatcatgatctctcctatatgattatcgatgctatcacttgcatcgcaacatcgctaccactacctactcccacgcaccaccgacgagctcaactacctcagatctccgaccgatcctcatcactcgctcgatcacccaccccagatcccatcccagatcccgccgaactcctcgaattcaacaggcccctatcctcatcctccgacagtccccgctcgccgcagtcccagcgagcaaccaccgatcgtccctcccaaggctgccgccgttctcgccacacgcacgcattgcatcgacccccgcgacatcccgactcttaa

SEQ ID NO: 16771 - DNA, 336 bp, Homo sapiens
  SIMILAR (181)..(324): 691254mologous to synthetic construct dihydrofolatreductase,accession number A02740,Smith-Waterman Score= 188.
atggccactttgtgcagggactccatgagcaaggcctgtgtggctgagtggcatcgtccatcaagccatctcacccacctggttacagggagccccatccccttaaagaccctctggaagattgacgcaggctggtgtccagtgaagaaatgcgtgcgagcgggcttggaggagctcaccgctgctgtcatggttcgtttgctaaactgcatcgtcgctgtgtctcagaacatgggcatcggcaagaacggggacctgccctggccgccgctcaggaatgaatttaggtcttaccagaaatcatcaattgaggtacggagaaatggaactgagaag

SEQ ID NO: 16772 - DNA, 1043 bp, Homo sapiens
  SIMILAR (1001)..(3520): 691254mologous to Homo sapiens nik-like; similar to U88984 (PID:g1872546),accession number AC005035,Smith-Waterman Score=2691.
gggggcggggcggccacaatttcgcgccaaacttgaccgcgcgttctgctgtaacgagcgggctcggaggtcctcccgctgctgtcatggttggttcgctaaactgcatcgtcgctgtgtcccagaacatgggcatcggcaagaacggggacctgccctggccaccgctcaggaatgaattcagatatttccagagaatgaccacaacctcttcagtagaaggtaaacagaatctggtgattatggggtaagaagacctgggttctccattcctgaggaaggaatcgaccttttaaagggtaggaatttaatttagttctcagcagagaacttcaagggaaccttccacaaggagctcattttctttccagaagtctagatgatgccttaaaacttactgaacaaccagaattagcaaataaagtaggcatggtctggcatagttggtggtagttctattttataaggaatccatgaatcactcaagcagtcttaaactatttgtcacaaggatcatacaggactttgaaagtgacacgttttttccagaaattgatttggagaaatataaatttctgccagaatacccaggtgttttctttgatgtccaggaggagaaaggcattaagtacaaatttgaagtacatgagaagaatgattaatatgaaggtgttttctggtttaagttgttccccctccctctgaaaaaagtaggtatttttaaattagaaaaaaaatacttatgttgactttaaatctacggataattatttctaagcaatgtgttcttattccccagtaacctacactatatctgataccatttatgaaacattcttgctgtaactaagtgcctccccaagaccctgactgagtccccagcatgtgctacagtgagctgccattccacaaccttcacatgtggcactcttgccagtccttgacattttcgggcttttcaaatgtcggtagtgtttattaaagatgaagatgcacatacccttccactgagcagtttcactagtgggaaataccaaaaactt

SEQ ID NO: 16773 - DNA, 791 bp, Homo sapiens
  SIMILAR (181)..(47): 391254mologous to Mus musculus interferon alpha/beta receptor,accession number U06244,Smith-Waterman Score=81.
atgaatgaagttctgatgcacactacaacagggatgagccttgaaaacatgctcagtaaatcagccagacgccaaagacaatatcgcgggatcctctgggcacctccgcacgctgtcgccagtggtatcaagatcctgtctcaaagaagaagaaaggagaaggagaaggaggatgaagagaaggcagaggagcaggaggaggaggagcaggagaaggaggatgaggagaaggcggagaagcaggagcaggaggaggaggatgaagaggaggaagaggagaaggaggatgaagaggagaagcagcttcatcctgatgtacttcttcatgcttctcttatccgggatcccgctcttatacatggaggtgatcatggggcagtggctgcatgtggacaacatccgggtctggaagcagctagtcccctggctgtgcagcatgagctatgctcacagtctgtgtgcgcctcggtgagcttgtacaacagcaccatcatctcctggaatttcttctactcctttgctcaccccctgccctgggaccactgcccactggtgaagaacatcagtgtcactgactgggcccaccagtacttcttgtaccacactaccctccatgcctcggaccacagtgaagaagcggctgaagccctcgtcccgaaccgcagcctgggttgtcttctcggtcgtgatcacagggatttggatttcaagccggaaatcagaagaggagcccacacgggaggagctagagtttgacaggatagtgtcattaatggggaagggcctgtcgg

SEQ ID NO: 16774 - DNA, 1833 bp, Homo sapiens
  SIMILAR (1609)..(1998): 531254mologous to Homo sapiens zinc finger protein 42,accession number AF055078,Smith-Waterman Score=288.
atggggaccatcatcaccttcacctcctacaaggccggaggtgacgattatgtcaaggtggctgccattgcagccctggtcaacctgataacctcaacgcggacaacatccctcgtctttctagtgcagggattctgggccaccaccaatggccacgcctgtgttgagaaattttctcaggatttaccgggcctgaaagaagagccacagagtcccttgaggaattatctgacagagaaagagtcttctaagaaattccagacccccaactccctgtcctggaggctcaagaccaaggagatccaggccaccaagacccaaaactacttcgttcaacctaaaaacactgagagcatcttgatccagattgccttctctgtcgggctgggcagcgtgtggcgttctccttacctgtgtcaccggaacggaggaggcagcttcatcctgatgtacttcttcatgcttctcttattcgggatcccgctcttatacatggaggtgatcatggggcagtggctgcatgtggacaacatccgggtctggaagcagcttgtcccctggctgtgcagcatgagctatgctcacagtctggtctctgcccaccgtgtccagccccaggtgtgcgcctcggtgagcttgtacaacagcaccatcatctcctggaatttcttctactcctttgctcaccccctgccctgggaccactgcccactggtgaagaacatcagtgtcactggtgaggagaggggccagcagggccaagggaggcagggacaccaaggggaggaagtgaacagaagtaggcaccgagcaagacgtgggcccaccagtacttcttgtaccacactaccctccatgcctcggaccacagtgaagaagcggctgaagccctcgtcccgaaccgcagcctgggttgtcttctcggtcgtgatcacagggatttggatttcaacgccggggtccgaggaagattctgtactctcctcagacaagctaagtcggccaggtctctctacagagaactgctgtcccattgacagcgtgaagaaatgcctcactatcaaccagatccccacatcgctgcaggcagacacctgttcaagtgattcctatgaagggactcaagatagacgccagtgtgccacaccattggtagtgtgcctactaaatagaaaaacacgtcctaaaactaacatgaaatctcaagggaccctgaacagccaaaataatcttgaaaaagaagaaaaacgctggtctcctcaggaagatgaaccctcccttgcagaagcgggagctgccccagagagtctgtgtgagatgaagacagaggcccagccttcgacatccttgctggcaaacacctcatggactggcacagtgatttctgacagtgtcccaggaagtcaaacgtgggaagacaagggttcattgacccggtctgcaacatcttggacctcagaggcccaagtttcagcagcccgggttgcagaggctcaggccaggaccagtcagcccaagcaaatttctgtattggaggcgttaactgcctcagccctgaaccagaaacccacgcatgagaaggtgcagatgacagagaagaaagagagtgaggtcctccttgcccgtccgttctggtccagcaaaactgagtatattctggctcaggtgggcttctctatgaagccatcttgtctctggcgctttgcctacctgtggcttaacagtggaggctgtaagtctggggaccaggaaacctgggtccacaaggggcaatcaggacagagtcctgtccaggctttaaccatgaatgtttctgagatatgtagagactaa

SEQ ID NO: 16775 - DNA, 1144 bp, Homo sapiens
  SIMILAR (3)..(221): 651254mologous to Mus musculus Pro-Pol-dUTPase polyprotein,accession number Y12713,Smith-Waterman Score=243.
aatcctttacctccacctccaaggtccccaagagccttatcacattacaggatctgctcaaagtccagaatctcattatctaaattgggtccaggtgtggaagaagtgccttagatataatttaaatgagaaacagatttggataaaaggtgatcagtgttttcttcagttggaagatgtgaaaagaaaccttttctctttcagccttgccttacacccagacaaaactctcgttgcaactggccaagtcgggaaggagccgtatatatgcatatgggattcctataatgtccagactgtgtctcttcttaaagatgtccatacacatggagttgcctgcctggcttttgactcagatggacagataagcagaaaagaagagaaagaatttgccttaaaaacctgtgccaaaggaagtaccgagggatattcaggcaaacagcaaatgatccctgatggaaggccagaaattcaggaaggaataaaggtgaacaaaactggagccaaatttagaaagtatgtgggccattctgcacatgtcacaaatgtccgctggtcccatgactttcagtgggtgttgagcacaggaggggctgatcactcagttttccagtggaggtttattccagaaggtgtcagcaacggcatgctggaaactgcaccccaagaacaatggttggcagctggcccactgatcaaggatggctctgcttgtgcccagtctcccaaccagaatgtggttcctacagaatggaaccagcctcaaaacctagcagagtttctggtagatttcaaaggactgggagaaaacagcctagacggcatatccttcaggccatccttaaatagtgttgtttgcagcaaaactttgccaacagttgagcaacagggaaatgagctggatattgtacttcctgtttatacctggatgccagctgctttatgtatctgtgaaatacaaaaatgtgcatctaagtcaactaatccaggattggactcttgtcttctcacggaggctcatgatgctggtgtgcatacgtttctgaatactaggcacagagtttggcatagggaagttgtggaatttggtgtctacctcaatgtagggacaaggagatcgaaggccttaagttctctgccatag

SEQ ID NO: 16776 - DNA, 438 bp, Homo sapiens
  SIMILAR (1)..(288): 441254mologous to Homo sapiens cytoplasmic protein,accession number AF177377,Smith-Waterman Score=202.
atggtggcagagggtggaagatgctgtgccttttcccctgatgggaaagccttagcggttggcttgaacgatgggagtttcctggtggtaaatgctgacactgttgaagacatggtctctttccatcacagaaaagaaatgatctctgatattaagttttcaaaagatacgggaaaataccttgccgtggcatcccatgataactttgtggatatttacaacgtacttacaagcaaaagggttggcatctgtaaaggtgcttctagttatattacacacattgactgggactctagagcatgctgcagcctcatgacaaacggtgcttctgattctggtgacattgacaatccttcaccagatgctaggacagaagaaaaacaaggggcaaggcaccagcctgagaaaagctgcttttctattgctgaagtgctttga

SEQ ID NO: 16777 - DNA, 966 bp, Homo sapiens
  SIMILAR (342)..(563): 641254mologous to Mus musculus Pro-Pol-dUTPase polyprotein,accession number Y12713,Smith-Waterman Score=241.
atgtttgctgaaagcaatggcaacaattcctgtcacctgtttcttgaacaagggaagtactttggcacagagcagggccctgccacgttttggacactgtgtggaaatgccctgactgcaaaaagagggatatttggcaaaacaggggatcttcagaccatcctttgccttgcatgtgccaaagaagacatcacctactctggtgctttaaatggtgacatctatgtctggaaagggctcaatttagtccgcaccattcaaggagcacatagtgtaagtattaccttgtggaaatctgtgggtgacctaccaaataaggctggaatctttagcatgtatgcttgtgaagaaggctttgccactggtgggcgagatgggtgtatacgactgtgggacactgatttcaaaccaataaccaaaattgatctcagggagacagaacaaggatacaaaggtgtggtactgatcacatcagccccacagccaactcccatctacagagttaggacagtcagcgacgccctccgttatacatcagtctcagattcccgccccatccttaccaagatcaaagcacatctggctggcctctctatccggagcgtgtgctggaaagcagaccgccttctagcagggacccaggacagtgagatatttgaagtgattgtgcgagagcgagacaagccgatgttgatcctacagggccactgcgagggtgagctctgggctctggccctgcaccccaagaagcctctggctgtgacaggcagcgatgaccgctctgtcaggctgtggagcctggctgatcatgccttgatcgcccgctgtaacatggaagaggcggttcgcagtgtagctttcagccccgacggatctcagctggccctgggcatgaaggacggctctttcattgttctccgagtcaggcacattgctgccccagcccccactggggatgttacatga

SEQ ID NO: 16778 - DNA, 1092 bp, Homo sapiens
  SIMILAR (25)..(246): 751254mologous to Mus musculus ribosomal protein,accession number L08651,Smith-Waterman Score=273.
ttttggacactgtgtggaaatgccctgactgcaaaaagagggatatttggcaaaacaggggatcttcagaccatcctttgccttgcatgtgccaaagaagacatcacctactctggtgctttaaatggtgacatctatgtctggaaagggctcaatttagtccgcaccattcaaggagcacatagtgtaagtattaccttgtggaaatctgtgggtgacctaccaaataaggctggaatctttagcatgtatgcttgtgaagaaggctttgccactggtgggcgagatgggtgtatacgactgtgggacactgatttcaaaccaataaccaaaattgatctcagggagacagaacaaggatacaaaggtgtggtactgatcacatcagccccacagccaactcccatctacagagttaggacagtcagcgacgccctccgttatacatcagtctcagattcccgccccatccttaccaagatcaaagcacatctggctggtgggggcttcacttctaaaagaggaacttttggaagcgttggaaaattggaaacaatgatgtgtgtttcttacggacgaatggaagatctagtgttctcaggagcagctactggagatatttttatttggaaagacattctactactgaagacagtgaaagctcatgatgggcctgtgtttgctatgtatgcactggataagggctttgtaacaggtggaaaggacggcatcgtggagctctgggatgatatgtttgaaagatgtttgaagacttatgccattaaaagatcagcattgtcgactagctcaaaaggcttgcttttggaagataacccttcaattcgtgccatcactttgggacatggacatatcctggtgggaacaaaaaatggagagattctggaaattgataagagtggcccaatgacactgcttgttcagccagccaagtgtgtttgtgataagatacagatacatggaattggtccagtgcttattaagcacctttcagtttttgatgttcattgttggcacatggacagaccaatttgtgaacagacgcagaacctgggctacaccgaggacgcttga

SEQ ID NO: 16779 - DNA, 1656 bp, Homo sapiens
  SIMILAR (210)..(617): 451254mologous to Homo sapiens ribosomal protein L29,accession number U10248,Smith-Waterman Score=241.
atgggtgatttgctctctaccgccatctgctggctctctgtaccaagcataggcccaagctccacgtttctcatcacaagtggcacagggtatggtgtccaaatgtggacacctcatctgtgtggtgaaacgccttcagttcacagtgtcaaaagcctctctatccggagcgtgtgctggaaagcagaccgccttctagcagggacccaggacagtgagatatttgaagtgattgtgcgagagcgagacaagccgatgttgatcctacagggccactgcgagggtgagctctgggctctggccctgcaccccaagaagcctctggctgtgacaggcagcgatgaccgctctgtcagagatatgacagaagtagttcacatcaaagatcgaaaagaagtcattcatgaaatgaaattttctccagatggttcttaccttgcagtgggatccaatgatggcccagtagatgtctatgctgttgcccagaggtataagaaaattggagaatgcagcaagtcccttagtttcatcacgcatattgactggtccttggatagtaaatacttacaaactaatgacggtgcaggagaacgattgttctacagaatgccatctgggaagcctttaacaagtaaagaagaaattaaagggattccttgggcctcctggacatgcgtgaaaggccctgaagtgagtggaatttggcccaaatacactgaggttactgacatcaactcagtggatgcgaattacaacagctcagtgctggtgtctggagatgattttggactggttaaattgtttaaatttccttgtctcaagagaggagccaaatttagaaagtatgtgggccattctgcacatgtcacaaatgtccgctggtcccatgactttcagtgggtgttgagcacaggaggggctgatcactcagttttccagtggaggtttattccagaaggtgtcagcaacggcatgctggaaactgcaccccaagataatttaaatgagaaacagatttggataaaaggtgatcagtgttttcttcagttggaagatgtgaaaagaaaccttttctctttcagccttgccttacacccagacaaaactctcgttgcaactggccaagtcgggaaggagccgtatatatgcatatgggattcctataatgtccagactgtgtctcttcttaaagatgtccatacacatggagttgcctgcctggcttttgactcagatggacagaggcgagcagggacccaggacagtgagatatttgaagtgattgtgcgagagcgagacaagccgatgttgatcctacagggccactgcgagggtgagctctgggctctggccctgcaccccaagaagcctctggctgtgacaggcagcgatgaccgctctgtcaggctgtggagcctggctgatcatgccttgatcgcccgctgtaacatggaagaggcggttcgcagtgtagctttcagccccgacggatctcagctggccctgggcatgaaggacggctctttcattgttctccgagtcaggcacagtgttagctcctgtgtgtgtgaaatacagctggtcacctctccctgtggtgctgactctccactcacggaccgggcaccatctgagatgtttgacagaacattctga

SEQ ID NO: 16780 - DNA, 2271 bp, Homo sapiens
  SIMILAR (451)..(1359): 961254mologous to Homo sapiens ubiquitous Kruppel like factor,accession number AB015132,Smith-Waterman Score=1502.
atgcaaaggaggaatggaacgggtgcaccaggtggaacatggagagcctctgagtctcccattggagtagggttttggacactgtgtggaaatgccctgactgcaaaaagagggatatttggcaaaacaggggatcttcagaccatcctttgccttgcatgtgccaaagaagacatcacctactctggtgctttaaatggtgacatctatgtctggaaagggctcaatttagtccgcaccattcaaggagcacatagtgtaagtattaccttgtggaaatctgtgggtgacctaccaaataaggctggaatctttagcatgtatgcttgtgaagaaggctttgccactggtgggcgagatgggtgtatacgactgtgggacactgatttcaaaccaataaccaaaattgatctcagggagacagaacaaggatacaaaggtgtggtactgatcacatcagccccacagccaactcccatctacagagttaggacagtcagcgacgccctccgttatacatcagtctcagattcccgccccatccttaccaagatcaaagcacatctggctggcctctctatccggagcgtgtgctggaaagcagaccgccttctagcagggacccaggacagtgagatatttgaagtgattgtgcgagagcgagacaagccgatgttgatcctacagggccactgcgagggtgagctctgggctctggccctgcaccccaagaagcctctggctgtgacaggcagcgatgaccgctctgtcagccttgccttacacccagacaaaactctcgttgcaactggccaagtcgggaaggagccgtatatatgcatatgggattcctataatgtccagactgtgtctcttcttaaagatgtccatacacatggagttgcctgcctggcttttgactcagatggacagcgtttagcctctgtggggttggatgccaaaaacacagtctgcatttgggactggaggaagggaaaacttctggcgtcagccaccggccattctgacaggggtcacaaaaatgatggcacagatggagatgaccatcctgtctaccttagcctattaaaggttttgataggatcaaataacttagcatatgcaaatagcccttataacctgagggggggctatatcaagggcagtgggggcttcacttctaaaagaggaacttttggaagcgttggaaaattggaaacaatgatgtgtgtttcttacggacgaatggaagatctagtgttctcaggagcagctactggagatatttttatttggaaagacattctactactgaagacagtgaaagctcatgatgggcctgtgtttgctatgtatgcactggataagggctttgtaacaggtggaaaggacggcatcgtggagctctgggatgatatgtttgaaagatgtttgaagacttatgccattaaaagatcagcattgtcgactagctcaaaaggcttgcttttggaagataacccttcaattcgtgccatcactttgggacatggacatatcctggtgggaacaaaaaatggagagattctggaaattgataagagtggcccaatgacactgcttgttcaggggcacatggaaggagaagtgtgggggttggcagctcaccctctcctgcccatctgtgcaacagtgagcgatgataaaacacttcgcatctgggaactatctgcccagcaccgtatgctggcagtacggaaactcaaaaaaggtggaagatgctgtgccttttcccctgatgggaaagccttagcggttggcttgaacgatgggagtttcctggtggtaaatgctgacactgttgaagacatggtctctttccatcacagaaaagaaatgatctctgatattaagttttcaaaagatacgggaaaataccttgccgtggcatcccatgataactttgtggatatttacaacgtacttacaagcaaaagggttggcatctgtaaaggtgcttctagttatattacacacattgactgggactctagagctccacctcttggagaaccgcccaaaaaggctcaagcaaatttcctcctccagcagagttctcttggctctagcctgcaggctaacatcacagttatagtgtttacccagagccatggagagaagaacaaaagggataccggtgtggctttgtttaagaatccactgactggaactagaagtggggacaaactgatcaacttcagggtttacattgctggtgaactccaacaatga

SEQ ID NO: 16781 - DNA, 618 bp, Homo sapiens
  SIMILAR (556)..(660): 971254mologous to Homo sapiens ubiquitous Kruppel like factor,accession number AB015132,Smith-Waterman Score=177.
gaggaaggggctggccagaacggttccatagttggctcccagtttttcttggtgaggaagagttgatcagactaagaagtcatcttctctgattcagatatgatcactcacttccttagtcaacctgcttgttctcacctggaaccatttggttcttcccttgagtcagagatcgaggagcaaaagggaggaaactgctagagactgagatcaacgcatactctgacaacagcttatttggcaaggaagcctcctggactcagcaccgcagcccctttgctgaagcaacctgaacattgagagtgcttgtgttttctagctgcggttggatttctcacgatgtccagggttatctccatgtctgcccctttcttcctggggaagatcattgatgtcatctataccaaccccactgtggactacagcgacaacctgacccgcctctgcctagggctcagtgccgtgtttctgtgtggtgctgccgccaatgccattcgtgtctacctcatgcaaacttcaggtaacagtctctcctctcagggatgtgagtcatcctgaagaagatgtagagtcctgtgggtttgttcgggctcaaatctcatgtgctccaggattgaa

SEQ ID NO: 16782 - DNA, 633 bp, Homo sapiens
  SIMILAR (202)..(113): 931254mologous to Homo sapiens Human secreted protein clone dh1073_12 protein sequence SEQ ID NO:106,accession number Y94950,Smith-Waterman Score=154.
atgaggcaacgagccccgagagacacccttgcagataatcactcattctggagaaatgaaggtacaagaggccatgcaggcagaggcaatccccacgttccagcagcttctgcaacagcacttttggctctaggcacttacagaatgatgcgaaccgctcagcttgagctcgtctcacacgtgagaggcctggtgcaagccaagccctggcaggaagctgcggttggatttctcacgatgtccagtgttatctccatgtctgcccctttcttcctggggaagatcattgatgtcatctataccaaccccactgtggactacagcgacaacctgacccgcctctgcctaaggctcagtgccgtgtttctgtgtggtgctgccgccattgccattcgtgttacctcaggcaacttcagttacagctctctcttagggatgtgggcagaaacagcggattgcgattgcccgtgctctgctaaagtgacttttagtaaatttgcggagttggttgcacacaaagtccagtttcagaacatttctgtcaccctaaaaagatctcttgtgcccacttgcagtcagtcgttccttgtttccggccccaggatgccacgaatctactttctgtctgtctag

SEQ ID NO: 16783 - DNA, 860 bp, Homo sapiens
  SIMILAR (819)..(739): 771254mologous to Homo sapiens FasL isoform,accession number AF288573,Smith-Waterman Score=122.
tgtgacacttcattggaattccaggaacagagcatcatctatttgccacacacctttgctagcaaagaggagcaccttgattgatagtctcacccaaactgactccaatgacagcactgcagctcttcacagaaaagtctgggagctgttatcagaagtaggaatggaggctggagttatgtgatacgatctatgtgaattttttaaatgcccattaaatatacaatcattactataaaaatactcatttgcacctaaaatcatctcacttaccagcactggaccctggggcttagaagactttcttttttggtagcatatattgtttaaaaatgacaggatcaatcagcaacactctccaacgcaggcaccagaaacttaactcttcagctctaactttgttttcaaccacttcattttctttcctaagaagaatggactttcagagagatgaaggtagcatagtgtggatatttgtcccttccaaatctcatgataggaggtgtttgggtcatgggggcggaaccttcatgaataacttggtgctgtccttgccacatgtcattaatcaaacagagcctctttcatattatttacttggctgttcctcaaatctcttcagacaaccaaaacaatctagaaagtacagtgtagcttttaagaacacagattttgatgtccaattagatcttggttcaacttccagttttaaacttcctagtggacttagcatgttaggggccagtcaaggggaggagaaggaggaagaggaggaggaggaggaagaggaggaggacaaagaggaggaggaggaggaggtgaaagaacattctaagagctccagagagaatggaatgtaa

SEQ ID NO: 16784 - DNA, 2280 bp, Homo sapiens
  SIMILAR (1)..(2277): 1001254mologous to Homo sapiens Graf protein,accession number Y10388,Smith-Waterman Score=3915.
atggggctcccagcgctcgagttcagcgactgctgcctcgatagtccgcacttccgagagacgctcaagtcgcacgaagcagagctggacaagaccaacaaattcatcaaggagctcatcaaggacgggaagtcactcataagcgcgctcaagaatttgtcttcagcgaagcggaagtttgcagattccttaaatgaatttaaatttcagtgcataggagatgcagaaacagatgatgagatgtgtatagcaaggtctttgcaggagtttgccactgtcctcaggaatcttgaagatgaacggatacggatgattgagaatgccagcgaggtgctcatcactcccttggagaagtttcgaaaggaacagatcggggctgccaaggaagccaaaaagaagtatgacaaagagacagaaaagtattgtggcatcttagaaaaacacttgaatttgtcttccaaaaagaaagaatctcagcttcaggaggcagacagccaagtggacctggtccggcagcatttctatgaagtatccctggaatatgtcttcaaggtgcaggaagtccaagagagaaagatgtttgagtttgtggagcctctgctggccttcctgcaaggactcttcactttctatcaccatggttacgaactggccaaggatttcggggacttcaagacacagttaaccattagcatacagaacacaagaaatcgctttgaaggcactagatcagaagtggaatcactgatgaaaaagatgaaggagaatccccttgagcacaagaccatcagtccctacaccatggagggatacctctacgtgcaggagaaacgtcactttggaacttcttgggtgaagcactactgtacatatcaacgggattccaaacaaatcaccatggtaccatttgaccaaaagtcaggaggaaaagggggagaagatgaatcagttatcctcaaatcctgcacacggcggaaaacagactccattgagaagaggttttgctttgatgtggaagcagtagacaggccaggggttatcaccatgcaagctttgtcggaaggggaccggaggctctggatggaagccatggatggccgggaacctgtctacaactcgaacaaagacagccagagtgaagggactgcgcagttggacagcattggcttcagcataatcaggaaatgcatccatgctgtggaaaccagagggatcaacgagcaagggctgtatcgaattgtgggggtcaactccagagtgcagaagttgctgagtgtcctgatggaccccaagactgcttctgagacagaaacagatatctgtgctgaatgggagataaagaccatcactagtgctctgaagacctacctaagaatgcttccaggaccactcatgatgtaccagtttcaaagaagtttcatcaaagcagcaaaactggagaaccaggagtctcgggtctctgaaatccacagccttgttcatcggctcccagagaaaaatcggcagatgttacagctgctcatgaaccacttggcaaatgttgctaacaaccacaagcagaatttgatgacggtggcaaaccttggtgtggtgtttggacccactctgctgaggcctcaggaagaaacagtagcagccatcatggacatcaaatttcagaacattgtcattgagatcctaatagaaaaccacgaaaagatatttaacaccgtgcccgatatgcctctcaccaatgcccagctgcacctgtctcggaagaagagcagtgactccaagcccccgtcctgcagcgagaggcccctgacgctcttccacaccgttcagtcaacagagaaacaggaacaaaggaacagcatcatcaactccagtttggaatctgtctcatcaaatccaaacagcatccttaattccagcagcagcttacagcccaacatgaactccagtgacccagacctggctgtggtcaaacccacccggcccaactcactccccccgaatccaagcccaacttcacccctctcgccatcttggcccatgttctcggcaccatccagccctatgcccacctcatccacgtccagcgactcatcccccgtcagcacaccgttccggaaggcaaaagccttgtatgcctgcaaagctgaacatgactcagaactttcgttcacagcaggcacggtcttcgataatgttcacccatctcaggagcctggctggttggaggggactctgaacggaaagactggcctcatccctgaaaattacgtggagttcctctaa

SEQ ID NO: 16785 - DNA, 2447 bp, Homo sapiens
  SIMILAR (123)..(2444): 991254mologous to Homo sapiens oligophrenin-1 like protein,accession number AF141884,Smith-Waterman Score=3980.
atggggctcccagcgctcgagttcagcgactgctgcctcgatagtccgcacttccgagagacgctcaagtcgcacgaagcagagctggacaagaccaacaaattcatcaaggagctcaatcacaggacgggaagtcactcataagcgcgctcaagaatttgtcttcagcgaagcggaagtttgcagattccttaaatgaatttaaatttcagtgcataggagatgcagaaacagatgatgagatgtgtatagcaaggtctttgcaggagtttgccactgtcctcaggaatcttgaagatgaacggatacggatgattgagaatgccagcgaggtgctcatcactcccttggagaagtttcgaaaggaacagatcggggctgccaaggaagccaaaaagaaatatgacaaagagacagaaaagtattgtggcatcttagaaaaacacttgaatttgtcttccaaaaagaaagaatctcagcttcaggaggcagacagccaagtggacctggtccggcagcatttctatgaagtatccctggaatatgtcttcaaggtgcaggaagtccaagagagaaagatgtttgagtttgtggagcctctgctggccttcctgcaaggactcttcactttctatcaccatggttacgaactggccaaggatttcggggacttcaagacacagttaaccattagcatacagaacacaagaaatcgctttgaaggcactagatcagaagtggaatcactgatgaaaaagatgaaggagaatccccttgagcacaagaccatcagtccctacaccatggagggatacctctacgtgcaggagaaacgtcactttggaacttcttgggtgaagcactactgtacatatcaacgggattccaaacaaatcaccatggtaccatttgaccaaaagtcaggaggaaaagggggagaagatgaatcagttatcctcaaatcctgcacacggcggaaaacagactccattgagaagaggttttgctttgatgtggaagcagtagacaggccaggggttatcaccatgcaagctttgtcggaagaggaccggaggctctggatggaagccatggatggccgggaacctgtctacaactcgaacaaagacagccagagtgaagggactgcgcagttggacagcattggcttcagcataatcaggaaatgcatccatgctgtggaaaccagagggatcaacgagcaagggctgtatcgaattgtgggggtcaactccagagtgcagaagttgctgagtgtcctgatggaccccaagactgcttctgagacagaaacagatatctgtgctgaatgggagataaagaccatcactagtgctctgaagacctacctaagaatgcttccaggaccactcatgatgtaccagtttcaaagaagtttcatcaaagcagcaaaactggagaaccaggagtctcgggtctctgaaatccacagccttgttcatcggctcccagagaaaaatcggcagatgttacagctgctcatgaaccacttggcaaatgttgctaacaaccacaagcagaatttgatgacggtggcaaaccttggtgtggtgtttggacccactctgctgaggcctcaggaagaaacagtagcagccatcatggacatcaaatttcagaacattgtcattgagatcctaatagaaaaccacgaaaagatatttaacaccgtgcccgatatgcctctcaccaatgcccagctgcacctgtctcggaagaagagcagtgactccaagcccccgtcctgcagcgagaggcccctgacgctcttccacaccgttcagtcaacagagaaacaggaacaaaggaacagcatcatcaactccagtttggaatctgtctcatcaaatccaaacagcatccttaattccagcagcagcttacagcccaacatgaactccagtgacccagacctggctgtggtcaaacccacccggcccaactcactccccccgaatccaagcccaacttcacccctctcgccatcttggcccatgttctcggcgccatccagccctatgcccacctcatccacgtccagcgactcatcccccgtcaggtctgttgcagggtttgtttggttttctgttgctgccgttgttctctcattggctcggtcctctcttcatgcagtgttcagcctcctcgtcaactttgttccctgccatccaaacctgcacttgctttttgacaggccagaagaagcggtacatgaagactccagcacaccgttccggaaggcaaaagccttgtatgcctgcaaagctgaacatgactcagaactttcgttcacagcaggcacggtcttcgataatgttcacccatctcaggagcctggctggttggaggggactctgaacggaaagactggcctcatccctgagaattacgtggagttcctctaa

SEQ ID NO: 16786 - DNA, 1608 bp, Homo sapiens
  SIMILAR (616)..(696): 881254mologous to Homo sapiens Human GTPase regulator GRAF,accession number W97809,Smith-Waterman Score=117.
tcaaccctgagatcttccctgatgttcactccaccagcaatgttgcacttccccacctccggtgtccagatgggccaaacctccaaatgccatctcatccatggagtcccccaggcccacgccagtccacctgcagcactgcccaccacccatacaaccaggtgctgcttctctcccttgagcctcttcgtggcactctatttgtgcacctgggccacaccaaaagacattccccaactgctgacaagccaagagctgagcttggggaggaagtagaggaggtctctgtggggactcagagcttagtcttctgtcccacagactacatacccgataactccacactcctctcttttcaagaacaatttcaagaaacatgcccttcagaacacaaaaaaattcttgaaatgttggtggaggatctgcagcagttggctgagctatgcgtctgccactgccttcagatagggagagagctccgtatctggttctcctgtgctgtggagagggaggtccccaccatcctgtttccttaaaaagaggctgaggtgggttactgtttatcaccacgtgtgttgcttcactcttcaccatcacctgccttggttctgtgttcttcaccagattgagaatgccagcgaggtgctcatcactcccttggagaagtttcgaaaggaacagatcggggctgccaaggtgagaattttgcaagctttggtctggattttagggtgagaggtctgaaaaccgcactgccaagggcagctgccaggaggatcagggagtggctggtcatcacaacggggcctttgtgaggcttctgcacaggggcacccattgaaccaggcagggcctgttagcttatgaccagcaggtgacctgatttccttgtccctggcacagagcacaccctgccacagtgcaagcctgagaagcagtgaggccccatgaagctgaaggacaggccgatcccccgatagacgattaggtaagactgctggtatggagtcagtattgggcttcaagccaatgaggaaagaggtgtggcctttgccagatggcggggggatgctggggccccagttccttcccagctgtggctcgctggcaatgctgaggagcctggggtcagcaggcagctggattggagagagctctccacgtaagccagctccgggctcctgtcctgtttctgtgtctgccttggggcaatcttcaatttcctgagcccttgctttccatttcctgagatgcctggacttcactctcgcattgcttctgttatcctccagcctctgtgccccatggccagtgacttgcccgcctgctccagcccgaatccgagccacgcatggcgagtcgctggtcctgggggccgaagagcctcgatgtgccaagcatgaaaaacctgggactagggctgcagttcaccaccgcctgccctgcacctcccactggccaaacagcgatcttccaagatagggtcctcagatcagcaccctcatacatcctccttggcccgaaaggcctctccaccctgaccaacacaaccaaccgactgccacctggccctccaggaactctttcaaggtgtggcttcacgcacat

SEQ ID NO: 16787 - DNA, 319 bp, Homo sapiens
  SIMILAR (158)..(316): 401254mologous to Scomberomorus tritor NADH dehydrogenase subunit 2,accession number AF076134,Smith-Waterman Score=74.
gcacaaccaaaaaggtggaggcaaagagagggcaaaacgggattcctaggtcactcattatacttggggccttcagatcctgctacttttatcccctaggaaccttgaagaaccagtgttcttgaggacagaaaaatcaaggtatcagaatttgttcggtagtgctcctgcttggggctgtagggttagtgatggccaggaggtggttacagcctactgtgtttctggtgcccactgagctttgctggagcagctggaacaagtaacagtcacacaactcatgttgttatcagtgatgtctacattatcaggcggtcaa

SEQ ID NO: 16788 - DNA, 591 bp, Homo sapiens
  SIMILAR (334)..(164): 311254mologous to Glycine max metallothionein-II protein,accession number AF004808,Smith-Waterman Score=74.
atgacgtttaggtgcagacagctggccctgggtggccctgtgctgatcaccggcctcggcccctcaaacagtgggaaatggaagaatggcttggaaatgggtcctgtcgactgtgtgtcatctgagcacattctcccaggggcccaagaagggccatcgtgtctccagaaccagaactggaagccaaggaccagcaggcagcattaccgcatccacatggggcttttgctggacacaaaaggttctccccgaagaatgatgctcacccaggccagcgcacacagcacagtgacccgtgcacaggatgcactgagcacacacggcactgggtgtccaagcctactcacaccaatcatggaaggagcctttgtcactgccagaagatatagagccttggtgttaagggaaaacctgaggggagatgattggattatggggacgggttctcctcatgctgttcttgtgataccccaagcaggagcactaccgaacaaatctgataccttgatttttctgtcctcaagacactggttcttcaaggtcctaggggataaagtagcaggatctgaaggccccaagtataatgagtga

SEQ ID NO: 16789 - DNA, 306 bp, Homo sapiens; identical to SEQ ID NO: 3091
  SIMILAR (89)..(148): 901254mologous to Homo sapiens Human secreted protein, SEQ ID NO: 5576,accession number G01495,Smith-Waterman Score=108.

SEQ ID NO: 16790 - DNA, 756 bp, Homo sapiens; identical to SEQ ID NO: 3067
  SIMILAR (73)..(144): 911254mologous to Homo sapiens calbindin D28K,accession number S46006,Smith-Waterman Score=122.

SEQ ID NO: 16791 - DNA, 576 bp, Homo sapiens; identical to SEQ ID NO: 1844
  SIMILAR (259)..(570): 551254mologous to Sus scrofa domestica polyprotein,accession number U77600,Smith-Waterman Score=300.

SEQ ID NO: 16792 - DNA, 435 bp, Homo sapiens
  SIMILAR (270)..(401): 421254mologous to Human T-cell lymphotropic virus type 1 Gag,accession number S74562,Smith-Waterman Score=109.
atgacctcaggtcctcagactgaccagcccaagaaacatctcaccaatttcaaatctgagacaaaagagacacattttatccgtggacccaaaactccggcgccagtcacggactgggaaggcagccttcccttggtgtttaatcattggagggacgcctctctgattatacacccacgtttcaagggtgtcagaccacgcagggacgcctgccttggtccttcacccttagcggcaagtcccgcttttctggggaaggggcaagagcttgctacaagtgccagaaatctgaccaccaaggcaaggaacgcctgcagcccaggattcctcttaagccgtatcccatctgtgcgggaccccactggaaatcggactgttcaactcacctggcagccactcccagagcccctggaactctggcccaaggctctctga

SEQ ID NO: 16793 - DNA, 996 bp, Homo sapiens
  SIMILAR (763)..(1758): 751254mologous to Homo sapiens zinc finger protein,accession number L11672,Smith-Waterman Score=1361.
atgggtactcccttttcttgccacaactggtatcgcactgggtcatgcacatcccaagtccactggctccaagatcagtgcagcatgagtgtttgtccaaaaactccagttattgtggcctatcactcaaatttgttctggaccagtgggcaccttaatcagctggtgggaaacactgagttccagtgcaaagacccacactcacttcactctcccttcctgagcatactgattctctttccatgctgctctgcctcgggttggtggaggggtggtgtagaaaatagaacaggcggttttgttgtcgtcaccaaaagttgtggttttcaagaacactatggggctccacgaccccattttggggccatgtggaaaccaagctccacaaacagaggaggaaaaagcagaagaaggggcgagcaccacactggcatggctgagaaggagagaaaagaaggagcatctgaacaaggagtttggctggggacagaaatagagaagattggctgttggatgaccgtacttcagcctgtttggtggtctcttcacatggacgcgcatgaaatttggtgccgtgacttggatcaggggacctcccttgggagatcagtcccctcctcctgctctttgctccatgagaaagatccacctatgacctcaggtcctcagactgaccagcccaagaaacatctcaccaatttcaaatctgagataaaggagacatgttttatccgtggacccaaaactctggcgccagtcatggactgggaaggcagcctttccttggtgtttaatcattgcaaggacgcctttctgattattcatccacgtttcaaaggtgagactcagcaaattgccagcagtggtgaatatgtggtgaaaccccttctgcttgagaaaagcagagagaaaagtagaggagactttgtcttgcaccttagataccagcatgagtacagggcggtagagcaccaagtgggctcctggggtcaatga

SEQ ID NO: 16794 - DNA, 632 bp, Homo sapiens
  SIMILAR (89)..(145): 571254mologous to Homo sapiens PNAS-146,accession number AF279900,Smith-Waterman Score=53.
ctagaatgcacacccttcattggttttctctgttgtccaaaggacctagcataggagctcttatctgagcacctgatgagaagacgacactcagaaatctcggtatcatgctcaccttcactgtcagggtcatcaaagttgacacagagggaaagattaaaatatcttccaggaaagcgggaaaggggttggggcgtggaaatgaggggttggggcacagagataagaggttgggccacagagagaggtcggggcatggaaataagggattggggcacagagatacgaggttggggtacttgcccctcccccagaaaagcgggacttgccgctaagggtgaaggaccaaggcaggcgtccctgcctggtctgacacctctgaaacgtgggtgaataaaaatcagagaggtgtccctgcaatgattaaacaccaagggaaggctgccttcccagtccgtgaccggcgccggagttttgggtccacggataaaagatgtcccctttgtcttcggaagaccagtggcaccagggggttgttgctgcaccgccagctgtgtgtctccctctcttatcattacaatcaagtgctttgagtcatctttcacattaatggagctcccaggaggattcat

SEQ ID NO: 16795 - DNA, 1944 bp, Homo sapiens
  SIMILAR (438)..(1001): 961254mologous to Homo sapiens serine/threonine protein kinase,accession number X66360,Smith-Waterman Score=934.
ttaagtcactggctttgtcactggggtgctcccagatgtaagtatctggggttcgtgtggctgctcagacttggagggaagatgactgtaactctgacagccattgtcagtgggtccagctgagtcccggactttcttctcactggccgcagtcaatgtgtcttgggccatgtcctcaagaagtacttgttttccttgataaggtatcagggcagaacgggaatctgaagacctgagctttggctccagttctgctaagacccgttttgttacaatgacaatccactcagctactctaagctttggtgtctgaaaagccaggatgatggagaagacattctctaagtttccttccagttctaaaattctctttctcctttcaatcttggcgccacacttcaatctctcccttctcttaatttcaattcctttcattttctggtagagacaaaggagacatgttttatccgtggacccaaaactccggtgccggtcacggactgggaaggcagccttcccttggtgtttaatcactgcagggacacctctgtgattattcacccacgtttcaaaggtgtcagaccacgcagggacgcctgccttggtccttcacccttagcggcaagtcctgcttttctggggaaggggcaagccgagctaggtcccaattcttcctcagcctctgctcctccaccctataatctttttatcgcctcccctcctcacacctggtccggcttacagtttcgttcggtgactagccctcccccacctgcccagcaatttactcttaaaaaggtggctggagccaaaggcatagtcaagcggctgaagactgacactgcccgatcgccttggaagacccctagaccatcacggacgccgagcttcagaaaagcagaacggactaaaggtcttttaaaaatacacctcaccaagctcagccaccaacttaaaaaggactggacaatacttttaccactttcccttctcagaattcaggcctgtcctcggaatgctacaagactggctactggccaattgggatatccttttatcagtcaaagctatgtcctggtcaatggatttcaaactgttgaggatctatgtgaagctgcagaccttcgagtgagtgttgcagaccttcgagtgagtgttacagctcttaaggtggcgcgtctggagttgttcgttcctcccggtgggctcgtggtctcgctggcttcagcagtgaagctgcagaccttcgcggtgttacagctcataaaagcaaaaagatgggactggggcaccttggagcagggggcggcgctcatcggggaggctcgggacgcacaggagcccacggagggggtgggaggctcaggcatggcgggctgcaggtccagagacctgccccgcgggaaggcagctaaggcccggcgagaaatcgagcgcagcgccgggctgacgatcaagaaggaaagatgcatacgaaatggatacagcaaagaaaaaatgaaactcatagttgtttctcatggcctccatgtaaatgacttgcagcataaactgacgcttttcaccaaggaaacatacacatacctagccagggattcagagaagcagaagcaggggtatctagcaggacttgaaggagcccatgccaacagggtgaaccagcagatcagtgacaacttagccatagtctttggacaaaagattcaaggccatctctccactactggacagctgcttatggcaggtcaagaaggaaagctgggccagcttcttttcctgggaatttcgggttggacaattcaactgaatgatgtttattgtctacagacacaatcaacaattgtccacataagatcagaagcagggaattccaatccacgagaatggctgccgcttttacaaggaatcagcagtaaagatgaaacacagccctttatgccttag

SEQ ID NO: 16796 - DNA, 795 bp, Homo sapiens
  SIMILAR (123)..(281): 731254mologous to Homo sapiens Human secreted protein, SEQ ID NO: 5210,accession number G01129,Smith-Waterman Score=199.
taaaacggccccacccttatctccctttgctgactctcttttcggactcagcccacctgcacccaggtgaaataaacaaccatgttgctcacacaaggcctgtttggtggtctcttcacacggacgtgcatgaaatttggtgccgtgactcggatcaggggacctcccctgggagatcaatcccccgtcctcctgctctttactccatgagaaagacccacctacgacctcaggtcctcagaccaaccagcccaagaaacatctcaccaatttcaaatccggtaagcggcctctttttactctcttctccaacctccctcactatcactcaacctctttctcctttcaatcttggcaccacacttcaatctctcccttctcttaatttcaattcctttcattttctggtagagacaaaggagacacgttttatccgtggatccaaaactccggcgccggtcacagactagggaaggcagccttcccttggtgtttaatcattgcagggacgcctctctgattatacacccacgtttcaagggtgtcagaccacgcagggatgcctgccttggtccttcaccctttgcagcaagtcccgcttttctggggaaggggaaacacgctttaaaaggattaaagcctgttatcactcgcctgctacagcatggccttttaaagcctataaactctccttacaattcccccattttacctgtcgtaaaaccagacaagccttacaagttagttcagaatctgcgccttatcaaccaaattgttttgcctatccaccccgtg

SEQ ID NO: 16797 - DNA, 399 bp, Homo sapiens
  SIMILAR (304)..(390): 581254mologous to Cowpox virus B10R,accession number Y15035,Smith-Waterman Score=99.
atgctgtttagttcaactgaatgtatccaatgtggattgcgggcctgctggattgcagtaagtactagggaagcctcgggagttactgggtcaatgctaaccctagaatctgaggccattctggttgcagtgggagaggccctggttcctggaagacaggaccagcccaatggtaatagaggaccacatagaatgtcagtgccccagttggtgcagtccagggacaagattagaaccaagcccctccaggtcacttgtgagaagtttgtgcatcaggagatgtccgtgggtcttcatttctccatctatatagatgtagatgtcgatatagatatagatacagatacagatacggatacagatacagatacagatatagatatagatatagatggatag

SEQ ID NO: 16798 - DNA, 588 bp, Homo sapiens
  SIMILAR (1057)..(2211): 391254mologous to HERV-H/env62 envelope protein,accession number AJ289709,Smith-Waterman Score=625.
atggcggccctgctggcgtcctgctcctccgtcatacccagtgtggagatgcgaactcttgtgcgtggagagacaaacacaggcacatttaaggttgacaacagccagaggcggtcaatagcacgatggctgtttgcctttgacagaggaggagcactgaggcacaggaagagtgacagcccgtgcttcaaagagcatgaatatacggagtttgggaaatggatggatggctgggagaccaggaggaaaaggattccaggtcacgactggtgtgtcctcaggctggggatccaaggagtcatccggggcttcgacgtggacgtttcttacttcacgggagattacgctcctcgagtgtccattcaagcagcaaacttggaagaagcaccccagaccctgcaggatccccgaggccagcagcacctccaggactggtggacctggggcagccagggaggctttgtgggcagtggatgccgccgtgcaggatgggagaagcaggcaggccccatgggcagcatgggaattgccccaagacaggttgctgatgaagaaggccgccagtgtgatggatttttctggggctga

SEQ ID NO: 16799 - DNA, 1069 bp, Homo sapiens
  SIMILAR (310)..(594): 291254mologous to avian leukosis virus envelope protein,accession number AF247389,Smith-Waterman Score=121.
gcggccgccgccgccgcccgccgccgccgcagctcccgacgccgccgcccccgccgggtgcctaagcaggcccggcgcggccccaggacttgggaccctggaggactgacgctgctggcctgggcgtccccttccgctgagccatggcgactcccgacgtgagtgtgcacatggaggaggtggtggttgtgacaactccggacactgcagtggacggcagtggtgtggagggggtgaagaccgtgttggtgacgaccaacttggcccctcacgggggcgacctgacggaagataacatggagacagaaaatgcagcggcagcagctgccgcggccttcacagcctcctcccagctcaaggaagccgtgttagtgaagatggctgaagagggggagaacctggaagctgagattgtgtaccccatcacctgtggagacagcagagccaacctcatctggaggaagtttgtgtgtcccggcatcaatgtgaaatgtgttcaggtttcaagtaatttccacagaaccctggacacacaagaagtagtgctcctggagcagaagccacagaagccacaggctgcacagaagccacaggccccacagaagccacaagctgcacagaagccacaggccccacagaagccacaggcagcacagaagccacaggccccacagaagccacaggcagcacagaagccacaggccccacggaagccacaggccccacggaagccacaggcagcacggaagccacaggccccacggaaaagcacaggccccacagacaccacaggcagcacagataccacaggccccacagggaccacaggccccacagaacccacaggctgcagagtcggccctgcagcagcctcggctgttggggttttaaggcttagcagataaaatcgttatatttaataatttattttaagaaataaaagaggccgggtgccatggcttaacacctgcaatcctgacactttgggaggccgaggcaggaggattgcttgagcccaggagttcaagagcagcctgggtaacatactgagaccccagtttcttcttaa

SEQ ID NO: 16800 - DNA, 426 bp, Homo sapiens
  SIMILAR (464)..(171): 711254mologous to Homo sapiens Human secreted protein clone dd119_4 protein sequence SEQ ID NO:108,accession number Y53051,Smith-Waterman Score=362.
  misc_feature (1)...(426): n = a,t,c or g
aaaaatggaccaatcagttcatatcaggtgttagtgcttcccctggccctccaaagcacattttcttgtgattctgaaggcgcttcctccttctttagcaacgcctctgatgctgatggatacgtggctgcagaactactggccaaagatgttccagatgatgccatggagatacctataggagacaggctgtactatggggaatattataatgcacccttgaaaagagggagtgattactgcattatattacgaatcacaagtgaatggaataaggtgagaagacactcctgtgcagtttgggctcaggtgaaagattcgtcactcatgctgctgcagatggcgggtgttggactgggttccctggctgttgtgatcattctcacattcctctcttctcancggngtgatggcagatggacactg

SEQ ID NO: 16801 - DNA, 759 bp, Homo sapiens
  SIMILAR (304)..(513): 361254mologous to Mus musculus decay-accelerating factor transmembrane,accession number L41365,Smith-Waterman Score=123.
atgaaggcctcacgggatgattccaccggcacacagtctgtcaaacatgcctggaagcagggagactcttggcggagactcttggcagagactgcgatggagaagaaaatggcagtgcaaggtgcaggctggggctccaggatatccataaaaggacaacggttggaccctatggaatcagttcgtgaggagacagtcaacttgaccacagacagcaggaccccagaagtgtgcctagccctgtacccaggcaccaactacaccgtgaacatctccacagcacctcccaggcgctcgatgccagccgtcatcggtttccagacagctgaaatagactgtggtacccctcctgaggttccagatggctatatcataggaaattatacgtctagtctgggcagccaggttcgttatgcttgcagagaaggattcttcagtgttccagaagatacagtttcaagctgcacaggcctgggcacatgggagtccccaaaattacattgccaagattcgtcactcatgctgctgcagatggcgggtgttggactgggttccctggctgttgtgatcattctcacattcctctccttctcagcggtgtggtatgtgagggtgtcatttttgagaaatgactggaatggaggggaggatgggtcagagtcacgaagaacagctggggatgaggggagtcaaagggagtgtgggtggaggttgtccttggctcagcagagcacactcagcggtgaaaggcatgactaa

SEQ ID NO: 16802 - DNA, 383 bp, Homo sapiens
  SIMILAR (604)..(482): 751254mologous to Mus musculus Reprimo,accession number AB043586,Smith-Waterman Score=166.
cacaggctctccgttatgtctatgctggctgaacgtcggcggaagcagaagtgggctgtggatcctcagaacactgcctggagtaatgacgattccaagtttggccagcggatgctagagaagatggggtggtctaaaggaaagggtttaggggctcaggagcaaggagccacagatcatattaaagttcaagtgaaaaataaccacctgggactcggagctaccatcaataatgaagacaactggattgcccatcaggatgattttaaccagcttctggccgaactgaacacttgccatgggcaggaaaccacagattcctcggacaagaaggaaaagaaatcttttagccttgaggaaaagtccaaaatcttcaaaaaccg

SEQ ID NO: 16803 - DNA, 753 bp, Homo sapiens
  SIMILAR (28)..(87): 1001254mologous to Homo sapiens ARF,accession number AF208864,Smith-Waterman Score=104.
atggaagctgtaatgctgctgctactactgctgatggtgatgaggatgctggtgtccacaggtcggcggaagcagaagtgggctgtggatcctcagaacactgcctggagtaatgacgattccaagtttggccagcggatgctagagaagatggggtggtctaaaggaaagcagccccttgtgaaggagcagccggcaccggccggatgtcagagcggctcctccctagtgaccactgcctatcccgtgactcagcatagtccgcgcaggcaccaaagccagaacattctcgacatgacaaaactacagagagagaggacagatgaatggtttcgaggggacaaggatgaagggtttcgggaaggacaactggaagggcaaaaggagcaggaacacaccattgaggaagacatccgaagtggtaacgcttttgacggaagggaaaatgtgagccagaaatttctgtatgttatagaagttcaaagaagacaaactctagccaagagcagtgtgaagaaaagaagacgctatattaatcacagtccagggatgccttctggcttcctggcagcaattccggcctgagattccttctctgtgcatacttcctgtcaacattgtgtgatgtcaagctgtggccatcacaaaagtactgtgaacacctgtaaatcccaactatcaaaaatcacacccaggaatccaaattagcattattatgtcaaaagaaaaacctgatttcttcactgtcaaaaa

SEQ ID NO: 16804 - DNA, 615 bp, Homo sapiens; identical to SEQ ID NO: 4586
  SIMILAR (400)..(546): 1001254mologous to Homo sapiens Human secreted protein clone dd119_4 protein sequence SEQ ID NO:108,accession number Y53051,Smith-Waterman Score=263.

SEQ ID NO: 16805 - DNA, 415 bp, Homo sapiens; identical to SEQ ID NO: 13080
  SIMILAR (11)..(301): 771254mologous to Mus musculus Pro-Pol-dUTPase polyprotein,accession number Y12713,Smith-Waterman Score=374.

SEQ ID NO: 16806 - DNA, 642 bp, Homo sapiens
  SIMILAR (1)..(192): 351254mologous to Amsacta moorei entomopoxvirus AMV120,accession number AF250284,Smith-Waterman Score=80.
gagagttggtgtcgctccacatcctcatcagcatttggtgttgtcagtgttctggatttcggccattttaataggtatgtgagcaaaaaacctgaacaggcacttccaaagcagaatatgttaatggccaatgagcacatgagcatatgttttgacagcaataaaaagtttactgatttctttattttaaccagtggtgaccagacaaaagacctcaacggtctctggtaacatgtgcattggggaaaggaaaatgatcagacattttgggggctactggacattggctctgagctgatgttgattccaggggacccaaatcgtcattgtggtcctccagttaaagtaggggcatacggaggccaggtaattaatggagttttagctcagatccgacttacagtgggtccctggactcatcttatggtcatttccccagtgccagaatgcataattggcatagacacacttagcagctggcagaaccctcacattggctccatgactggtagggtgaggacaccagacttgagccagtttatagactcagaaccctttgaatggagtggcagtcgggtcttcttgaggaaggacctggtacgcaatggattgaatgatgtccaggcacactggtgagggtgg

SEQ ID NO: 16807 - DNA, 1680 bp, Homo sapiens; identical to SEQ ID NO: 7546
  SIMILAR (270)..(467): 841254mologous to Homo sapiens sorcin CP-22,accession number M32886,Smith-Waterman Score=305.

SEQ ID NO: 16808 - DNA, 498 bp, Homo sapiens
  SIMILAR (397)..(320): 731254mologous to Mus musculus Gag polyprotein,accession number Y12713,Smith-Waterman Score=90.
  misc_feature (1)...(498): n = a,t,c or g
cgcgggtccnncaactggancctgggacctgctnnnnnnnnnnnnnnnnnnnnnnnnnnnnnnnnnnnnnnnnnnnnnnnnnnnnnnnnnnnnnnnnnnnnnnnnnnnnnnnnnnnnnnnnnnnnnnnnnnnnnnnnnnnnnnnnnnnnnnnnnnnnnnnnnnnnnnnnnnnnnnnnnnnnnnnnnnnnnnnnnnnnnnnnnnnnnnnnnnnnnnnnnnnnnnnnnnnnnnnnnnnnnnnnnnnnnnnnnnnnnnnnnnnnnnnnnnnnnnngaaaaatttattnnnnnnnnnnnnnnnnnnnnnnnnnnnnnnnntgcttttttaactcctcaagctgcaacattaaatgcagagtccctacttagtgggcccaagtcaataaattcagcctgatcnnnnnnnnnnnnnnnnnnnnnnnnnnnnnnnatacctcagaaaaagaatgaggaagtaaaagttaaagaagggcaaaaatgagatcaatagacagcccagt

SEQ ID NO: 16809 - DNA, 811 bp, Homo sapiens
  SIMILAR (3)..(536): 741254mologous to Mus musculus Pro-Pol-dUTPase polyprotein,accession number Y12713,Smith-Waterman Score=692.
gggacccaaaacatcactgtggtcctccagttaatgtaggggcttatggagttcaggtaattaatggatttttagctcaggtccaacttacagtgggtccagtgggttcccagaccgattctgtggtagtttccccagtgccagaatgcataattgtcatagacatacttagcagctggcagaacccccacattgactccctgactggtagcatgagggctattatggtgggaaaggccaaatggaagccattagagctgtctctacctagaaaaatagtaaatcaaaaacaatatcgcatccctggagggattgtggagattagtgccaccgtcaagagcttgaaagatgcaggggcggtgattcccaccacattcccattcaactctctcatttggtctgtgcagaagacagatagattttggaaaatgacagtgggttattgtaagcttaaccaagtggttactccaattgcaactgctataccagatgtcatttcattgcttgagcaaattagcacatctcctgatacctgggcaatatttttcctcactggaataaacactgattctggatgtgggtttgcctatcctgcacgcaatgcttctgccaagactaccatccatggactcatggaatgccttatccaacatcatggtattccatacagcattgcctctgaccaaggcactcactttatggctaaagcagtgtggcagtgggctcatgctcatggaattcactggtcttaccatattgcccatcatcctgaagcagctggattaatagaacagtggaatggccttttgaa

SEQ ID NO: 16810 - DNA, 1128 bp, Homo sapiens
  SIMILAR (322)..(636): 751254mologous to Mus musculus Pro-Pol-dUTPase polyprotein,accession number Y12713,Smith-Waterman Score=418.
atggaatttataactagacaaaagtcccggcaggcacctagaggtgaggttgagagtctgacccataaggaggtgcactacactcgaaaagaactgtttgagttttctaatttatataaacaggaatctggagaacagacatgggaacggatattaagggtgtggtataatggtggaagaaacgtagagttggatcaggctgaattaattgatttgggcccactaagaagggactctgcatttagtgttacagcttggggagttaaaaaaggttctgatagtttatttgcttggttagctgaaatatggattaaaagatggcccatcgagaccctccggccttttaccagggttactgtgcattgggaaaagagatatgatcaaacatttcagggtctactggactctggctctgagctgatgctgattccaggggacccaaaacatcattgtggtcctccagttaaagtaggagcttatggaggtcaggtaattaatggagttttagctcaggtccaacttacagtgggtccccagacttatcctgtggtcattttcccagtgccagaatgcataattggcagagacatatttagcaactggcagaaccaccacattggccctctgactggtagggggtatatcaactttgtggctttgtgttataatcttattaggagagaccttgatcgctttttgcttctgcaagatatcacactggtcgattacattgatgacattatgctgattaggtccagtgagcaagaagtagcaaacacactggacttcttgggccattgctgggggaatcaatttcatcgtgccttgagagatgggagtggcctaaaggttcatcctaagtgtggcatacattccactgttgctattgtagggcaccaaccagccccaccagagagctcagctattgtgtttaaaagtttcttggctgccctgcttcctcttggagagcaaccagtgttaatgacagcagcaccagtggagcagaaagcagtacctcaaggacaggcaatggcagcaggattggccctggtccagctgctgaggatgcagactgacctaacatccgagaacagtggaacatccctgaggatgccctggaggaactaa

SEQ ID NO: 16811 - DNA, 1194 bp, Homo sapiens
  SIMILAR (1394)..(2224): 311254mologous to Homo sapiens Human N-methyl-D-aspartate receptor subunit encoded by clone NMDA24,accession number W87504,Smith-Waterman Score=127.
atggcatcaacgaacactggaagtcggactgtgctctgcaaaactcatcatcccacttcatcacctctaactgaagaatgctggggcccggaatccactgtccccactgtccccactgccatcaccaccacggaacccaaggtaacgctgtcagtcactagacatggaatgcaacaatatggaaatctgagtgatgccaaaccaagctactgtcagctggtgagtgaaagaagcgtaaaggattcattccacattcatgctcagatgacagagaatgaagaatatagcagtagtggtggagatggaggcagtgaagaggacttttctacaaacaccaaagctgtgaacagaaagactatctggatctttagagataaagatgttcctttcctccacatacagggaggacagttttctaatgaggttcttatgatctgcttcagggaagatgggtggcagaagctcaagtgtcccaggtcgacttcagactgctgtgctggcagcaagaatttcaagccagtggatcttagcttgctgggctccatgggagtgggatccgctgagctagaccactggggtccttggcttcagccccctttccagggtagcgaatggttctgtattgctggcattccagatgcagaaaaggccttggataaaattcaacactccttcatgctaaaaactctcaataaactaggtattgatggaatgtatctcaaaataataagagctatttatgatgaaaccaaagccaatatcatactgaatgggcaaaagctaaaagcattccctttgaaaactggcacaagacaaggatgccctctctcaccactcctattcaacagattattggaagttctggccagagcaatcaggcaagagaaagaaagaaagggtattcacatgggaagagaggaagtcaaattgtctctgtttgcagatgacatgattgtgtatttagaaaaccccattgtctcagcccaaattctccttaagctgataagcaacttcagcaacgtctcaggatacaaaatcaatgtgcaaaaatcacaaacattcctatataccactcatagacaaacagagagccaaatcgtgaatgaacttccactcacaattgctacaaagaaaataaaatacctaggaatacaatttacaagggatgtgaaggacctcttgaaggagaactaa

SEQ ID NO: 16812 - DNA, 485 bp, Homo sapiens
  SIMILAR (15)..(386): 401254mologous to Caenorhabditis elegans contains similarity to TR:O04034,accession number AC024881,Smith-Waterman Score=231.
  misc_feature (1)...(485): n = a,t,c or g
tgggannnagacacactaggccgtcgcangtgacacccgtccggaannncnnnnnttctatttcgtccaggggatggacgagtactcaggctttcctcgaatctctgcttgagtggggcagcctcggggcctccggacgctggagaagctcacagcatctgtggccgggggtgcaactaacttttttggtgacattgaaagagatttaggtccaagagatacgagcaggggaattaggggtgggaatttgggggacagaggctgttcttcagcggaaatggcctatgcctcctggcagaggtggtccccagtggaatgggcccggtggatgtggacagcggtgaccagcagtggggactccagtctgctggtgcttcagggagactctggaaaaaggagttccgattctgaagaggcatttgagaccccggagtcaacgacccctgtcaaagctccgccagctccacccccaccaccccccgaag

SEQ ID NO: 16813 - DNA, 360 bp, Homo sapiens
  SIMILAR (175)..(354): 811254mologous to Homo sapiens TACC2 protein,accession number AF095791,Smith-Waterman Score=251.
atggcctatgcctcctggcagaggtggtccccagtggaatgggcccggtggatgtggacagcggtgaccagcagtggggactccagtctgctggtgcttcagggagactctggaaaaaggcaagttatctctgtgtatcttgtcagtgttgctcatgatggtgcagtgctgggggcctggagttccgattctgaagaggcatttgagaccccggagtcaacgacccctgtcaaagctccgccagctccacccccaccaccccccgaagtcatcccagaacccgaggtcagcacacagccacccccggaagaaccagccttcccgtgtgatgagaagtctgcagggccaaaccccttctag

SEQ ID NO: 16814 - DNA, 474 bp, Homo sapiens
  SIMILAR (388)..(801): 281254mologous to Caenorhabditis elegans contains similarity to Pfam domain: PF01699 (Sodium/calcium exchanger protein), Score= 193.0, E-value=1.5e-54, N=2,accession number Z29094,Smith-Waterman Score=111.
tgcgtttgtaaaaggaaaataaattaacaacaagtgtttgtttttcaagcatgagagagggcccacacctggctcaggaatgcagcctcggcctctggctcctgaggcccctgcaacagttgttagaggcccgcttccggtctcatgctgcccctgagcgtctagggatgacaaaagctaagccctttgatattaatgagtgtttgagttccgattctgaagaggcatttgagaccccggagtcaacgacccctgtcaaagctccgccagctccacccccaccaccccccgaagtcatcccagaacccgaaggtcagcacacagccacccccggaagaaccaggacatggtccacaggcactgattgtggcagtgcacctgggggcccgagccattgagacaagggctccagattcacaggccaccagatcagggccccagtgtcctcaacaatcagtaggccttgtaagatag

SEQ ID NO: 16815 - DNA, 633 bp, Homo sapiens
  SIMILAR (789)..(1064): 821254mologous to Homo sapiens Human secreted protein sequence SEQ ID NO:140,accession number Y87101,Smith-Waterman Score =385.
  misc_feature (1)...(633): n = a,t,c or g
gcggccgctgggctcaggctgtccgctctgggctctgcggcctcggccccgctgcactccacctccgccccctcggactccctcccctctgcttctactcctcctgctccagtgcggatcgtttcgcaactgcttgccactcgtcccgtgcctggctgtttttccatttcccggccccctcttcttgagtactttaccccctgcatttggggacagggactggaaaaggggcgggtggagcgtccagtggagaagaaggaagcgaggcccgcaggaggaggaggatcggcggactgtggggaggagaccccacgccaccctttctggtaactcccctcccgccccgcccctgcgcacactccctcgcgggcgagctactttcggaccaggaaagtaagagcggccctgngtgacagcgccgcggggccagtcccgggggttagccggcgtctgctcgcttctggtccgtcgcgctcncagccagggcacagcccnggaccgagatggcttcgaccacaacctgcaccagtttcacgacgagtatcagcttttcgaggagctttgaaaaggggcattctcagtgaatgggacacngtgactcctgaagcccaagacctcatncataaaatgctt

SEQ ID NO: 16816 - DNA, 777 bp, Homo sapiens
  SIMILAR (296)..(361): 1001254mologous to Homo sapiens calcium/calmodulin dependent protein kinase II delta,accession number AJ252239,Smith-Waterman Score=116.
atgaagtggttgctctcccttgctcggcccaccgggtgtcgtggcccgggaaccggcctggagaagtccctgctgcccggcgcccaaaacaggggcgtgggcttccgcgacccagggcggctgccccgggccatcctcgagttgccctgcatcttcccgctcagtcagccccagattgaggcagccttctctactggtgtgctcgtgtgtgcaaccaaaggagggagtgcgagagatccacgaagggacaggcttggagtcgctagagggagccagggcacagcccggaccgaggatggcttcgaccacaacctgcaccaggttcacggacgagtatcagcttttcgaggagcttggaaagaactgagtactgccaacaactatgccagcttggaagcagatccttcctcagtcaagatttcagatgagaccccagccgtggctgacaccttgattgcagcctgtagcattgataataaacttgcctatgaaataaatattatttacgttggtggaaatgttcttccaactgagcttggcattgttggtgcagtttggctttgtattactggcaacttgaagcaagaggaccagtgtattttcaacacgtcagtcacggatgtgttcttaaaacaagcagagcatatcaccctctcctcagaactctacagtgaattcccatctagctcagaggaagggccaaagcctttaataatggcatactccaaggctctgtataacccctcatactcacacccccgatactcacacctctga

SEQ ID NO: 16817 - DNA, 2005 bp, Homo sapiens
  SIMILAR (412)..(1530): 1001254mologous to Homo sapiens phosphoprotein associated with GEMs,accession number AF240634,Smith-Waterman Score=1920.
tgcggccgctgggctcaggctgtccgctctgggctctgcggcctcggccccgctgcactccacctccgccccctcggactccctcccctctgcttctactcctcctgctccagtgcggatcgtttcgcaactgcttgccactcgtcccgtgcctggctgtttttccatttcccggccccctcttcttgagtactttaccccctgcatttggggacagggactggaaaaggggcgggtggagcgtccagtggagaagaaggaagcgaggcccgcaggaggaggaggatcggcggactgtgggggaggagaccccacgccaccctttctggtcatctcccctcccgccccgcccctgcgcacactccctcgcgggcgagctactttcggaccaggaaagtaagagcggccctgggtgacagcgccgcggggccagtcccggggttagccgcgcgtctgctcgcttctggtccgtcgcgctcccagccagggcacagccccggacccgagatggcttctaccacaacctgcaccaggttcacggacgagtatcagcttttcgaggagccttggaaggggggcattctcagtggtgagaagatgtatgaaaattcctactggacaaggatatgctgccaaaattatcaacaccaaaaagctttctgctagggatcatcagaaactagaaagagaagctagaatctgccgtcttttgaagcaccctaatattgtgcgacttcatgatagcatatcagaagagggctttcactacttggtgtttgatttagttactggaggtgaactgtttgaagacatagtggcaagagaatactacagtgaagctgatgccagtcattgtatacagcagattctagaaagtgttaatcattgtcacctaaatggcatagttcacagggacctgaagcctgagaatttgcttttagctagcaaatccaagggagcagctgtgaaattggcagactttggcttagccatagaagttcaaggggaccagcaggcgtggtttggttttgctggcacacctggatatctttctccagaagttttacgtaaagatccttatggaaagccagtggatatgtgggcatgtggtgtcattctctatattctacttgtggggtatccacccttctgggatgaagaccaacacagactctatcagcagatcaaggctggagcttatgattttccatcaccagaatgggacacggtgactcctgaagccaaagacctcatcaataaaatgcttactatcaaccctgccaaacgcatcacagcctcagaggcactgaagcacccatggatctgtcaacgttctactgttgcttccatgatgcacagacaggagactgtagactgcttgaagaaatttaatgctagaagaaaactaaagggtgccatcttgacaactatgctggctacaaggaatttctcagcagccaagagtttgttgaagaaaccagatggagtaaaggagtcaactgagagttcaaatacaacaattgaggatgaagatgtgaaagcacgaaagcaagagattatcaaagtcactgaacaactgatcgaagctatcaacaatggggactttgaagcctacacaaaaatctgtgacccaggccttactgcttttgaacctgaagctttgggtaatttagtggaagggatggattttcaccgattctactttgaaaatgctttgtccaaaagcaataaaccaatccacactattattctaaaccctcatgtacatctggtaggggatgatgccgcctgcatagcatatattaggctcacacagtacatggatggcagtggaatgccaaagacaatgcagtcagaagagactcgtgtgtggcaccgccgggatggaaagtggcagaatgttcattttcatcgctcggggtcaccaacagtacccatcaagccaccctgtattccaaatgggaaagaaaacttctcaggaggcacctctttgtggcaaaacatc

SEQ ID NO: 16818 - DNA, 291 bp, Homo sapiens
  SIMILAR (4)..(117): 561254mologous to Canis familiaris transcription factor HOXA13,accession number AF083096,Smith-Waterman Score=87.
atggggactgcagctgcggcagcggcggcggcggcggcggcggcggccggggagggggcgcgtagcccgagccccgccgccgtgtcgctcggcctgggcgtggccgtcgtgtcgagcctggtgaacgggtccacgttcgtgctacagaagaagggcatcgtgcgtgccaagcggcgaggggcctcgctggtgcaaaaggaagacccgggcgggctctcagggctgtgcgttcctggggtgctcttacggagcccgctgcgccttagacctgcaccaaatgaatacaagtga

SEQ ID NO: 16819 - DNA, 458 bp, Homo sapiens
  SIMILAR (324)..(458): 861254mologous to Homo sapiens neural cell adhesion molecule,accession number AF002246,Smith-Waterman Score=186.
tttcgtggagccgggaggctggggaaagccagcccctccgttcccactctccgggctcgctgcgagccacagtgtctcagccaggggcagggccggggaactcctgcgaaaaaccacgggccggaggagcagcagccgcgcgggcccaggtgctgtaaactgcaaaccataatcctgtcttaatactgcaaacaaatcatagtggaactaaggggaacttaatttactgtttccaggttaactaaggtctcagctgtaaaccaaaagtgagaggagacattaagattttcattcttaccgggttgtcttcttcctgaagagcaatggagccgcttttacttggaagaggagctaatcgatatctaatgttcctcctgttaaaattctccaaagcaattgagataccatcttcagttcaacaggttccaacattcttaaaacagtcaaaagtccagttg

SEQ ID NO: 16820 - DNA, 578 bp, Homo sapiens
  SIMILAR (112)..(387): 751254mologous to Homo sapiens neural cell adhesion molecule,accession number AF002246,Smith-Waterman Score=360.
atggtatttcaattgcttttgagaattttaacaggaggaacattagatatacgattagtcctcttccaagtaaaagcggctccattgctcttcaggaagaagacaacccgattttcgtggactaaggatggcaaccctttttatttcactgaccatcggataattccatcgaacaattcaggaacattcaggatcccaaacgaggggcacatatctcactttcaagggaaataccgctgctttgcttcaaataaactgggaatcgctatgtcagaagaaatagaatttatagttccaaaggtcttagttccagagggaggaacgctgccaccagaagagacaataacgattccattaaactggaagttaagattgccacctggacactttggactcctcttacttttaagtcaacaggctaagaagggagttacagtgttggctggggtgattgacccggactatcacaatgaaatcagtctactactccacaatggagaatccaagttcttcagttttggactggctctccttgctcctcagcctgcagatggcctattgcgggaccttgtgatcag

SEQ ID NO: 16821 - DNA, 1068 bp, Homo sapiens
  SIMILAR (809)..(898): 1001254mologous to Homo sapiens neural cell adhesion molecule,accession number AF002246,Smith-Waterman Score=144.
ttagcatttaaatgtgtgaatcctgccctgtgagtactgtgtagatctaggcttaaacgtgtgaatcctgccctgtaagtactgtgtagatctaggcttaaacgtgtgaatcctgccctgtgagtactgtgtagatctaggcttaaacgtgtgaatcctgccctgtgagtactgtgtagatctgggcttaaacgtgtgaatcctgccctgtgagtactgtgtagatctgggcttaaacgtgtgaatcctgccctgtgagtactgtgtagatctaggcttaaacgtgtgaatcctgccctgtgagtactgtgtagatctaggcttaaacgtgtgaatcctgccctgtgagtactgtgtagatctaggcttaaacgtgtgaatcctgccctgtgagtactgtgtagatctaggcttaaacgtgtgaatcctgccctgtgagtactgtgtagatctaggcttaaacgtgtgaatcctgccctgtgagtactgtgtagatctaggcttaaacgtgtgaatcctgccctgtgagtactgtgtagatctgggcttaaatatactcaagctgcttacagtcacaagtatgaatgtcatagcttcatggagcaggagggagcacattaccaccacagtgtctgtcaaaagagatgctcccagaagccagaggccctcttctggaggtgctagtcctctgtttcccaccttggagtatgacggcagaggcatctcttgttttctcactactgtcaaagatagtataccgaaagaaatcatgtttgaaacagtcgggttgtcttcttcctgaagagcaatggagccgcttttacttggaagaggactaatcgtatatctaatgttcctcctgttaaaattctcaaaagcaattgaaataccatcttcaggtaaagttaaaacattcagtgcaattttactgtccatggattccccgttccaggctggcggcattttcggaaccccccccgggctgggatctagaatcctctccccctccccgatggtttcactcggttcatgttgcacacacaggtcgccaatctgcttttctcccat

SEQ ID NO: 16822 - DNA, 663 bp, Homo sapiens
  SIMILAR (406)..(642): 701254mologous to Homo sapiens Human normal ovarian tissue derived protein 34,accession number Y59757,Smith-Waterman Score= 239.
atgtcttccaagatacaatactttcgctttagatacatattggaggcacaaggatcacacgatgcccaaaaggctcacccaccggaccagagacagcccacacgaataccagagcgagaaataacacagacacatacaccccgaacagacgccgcacgcatcacatgcagtccaaacaaacagaaggcaagcaatagacagcgaaacgagcaccaacaacacaaggggtacgagaacgacggaatcattatttctatctttaatagaaaagtttgtgtggatgcccttgggcggtcgatgggactgggcaccgtggagcaggggcagggggtggtgcccgtcggggaggctctggctgcacgggagcccactggtgttgagggagctcaggcatgggctgccgttccccctcccggcaacggggggctggcggagctgtgccacgggggcccccggggccggcggggccggcagagcagcagtgccagggtcatcaggatgatgcggacgcagtgtctgctggggctgcgcacgttcgtggccttcgccgccaagctctggagcttctccgcccttttgcggtggcagatctgcatggtaattcagcaccaaactgttcgatatgatatcatccccttatcttcttgtcctggaatcagctag

SEQ ID NO: 16823 - DNA, 405 bp, Homo sapiens
  SIMILAR (190)..(77): 311254mologous to Trypanosoma brucei protein kinase,accession number L10993,Smith-Waterman Score=60.
gacctcctcagaaaataataatggaccaaagagatgaattcattcaacagaaagtctttatctcttgcaaggttcagtagtggcagatcatgactacattggattgcctgaaattccgattggagcatatcaagcaaatattctggtggaagatgcaactattggtatagtcgataatgaattactgacatcaagcaaggatcgtgaactattagaatatagaaatacgaaaatctctccattgatagacgatcatagttctcttgaaaagcagactttcagtctgttggactcttcaaaccaggttcttgaatacttaagttagtaaataccaaaatttatttaaattgtttgtttagaatataaattcttaatgatatcttattcattaaaaacgttgtatag

SEQ ID NO: 16824 - DNA, 573 bp, Homo sapiens
  SIMILAR (362)..(270): 641254mologous to Homo sapiens Human secreted protein fragment encoded from gene 42,accession number Y07785,Smith- Waterman Score=109.
ttatcgactataccaatagttgcatcttccaccagaatatttgcttgaatgctccaatcggaatttcaggcaatccaatgtagtcatgatctgccacactgaaccttgcaagagataaagactttcttcattcagactctccacatatgtggtaatgtcagaggatccagccggatcccatgcctgccaagggcaagccaggcacagagcagcaagggggcatgagtgagcgagtatggggtccggccactgcgcactgccaggtatgtggctgtagcagggcaggtagctctcagtgctggcacaggtactggctccctgcaaggctgcagctgcaccaggcataccacaaatggcttccactgtggcactggggaacgcagtggggcccagaagctggtccacggaactggcactctgggcctcaggcttcatgccatcccagcctgaaggtggagcttcaccagggacctgcccctttctgcccagaagccgtctgcctccctccgccatcaacctgctgttcacccaaactgtttgtgccggagcacctgcaggcttgtgccaagccat

SEQ ID NO: 16825 - DNA, 1383 bp, Homo sapiens
  SIMILAR (504)..(1055): 971254mologous to Homo sapiens immunoglobulin-like transcript 11 protein,accession number AF212842,Smith-Waterman Score=974.
ctagatccagagactcagatgaaacaaacaggatttggcttccctctcagtttggcttgcttctatatagggtttaccttcattcagactctccacatatgtggtaatgtcagaggatccagcccggatcccatgcctgccaagggcaagccaggcacagagcagcaaggggtgcatgagtgagcgagtatggggtccggccactgcgcactgccaggtatgctggctgtagcagggcaggtagctctcagtgctggcacaggtactggctccctgcaaggctgcagctgcaccaggcataccacaaatggcttccactgtgggcactggggaacgcagtggggcccagaagtttccatcccagacatggtcacctctgtggaaaatcaccaggttattcttagggtctagagccaccccagaaacctggcctggtaacaagtatactccaggccaatccagtgcctcttccatgtggaaattctcagtcaaggtgaacttccacacggtgttggtatgagcatctccaatgtacacagtcccatcttcagatgcaacaatatcatgaggcatatcaaagtgcttgcgcactggcttgaagatgtctataatttccccattggaaaagttcatcacaaatccttgtacaggttcttggtccccaaaatgaggcttcccattcactgcaaagagcaagcctgcaacagcaaatccagttaacctttctggtatatatgaaattgcaaatacatttcttccaaatgatgaatgcttaatctctctcacaaattctttggtgtcagttttaaaacactggatccgaccattttcccggtctgccacacataattggcccaaaagaggcacaagagccaagctgtgaggaacagtgaactggcctggcagaggactgctccctgaagacttgtgtgatgaactttccacttggtgaaactgcacaatcctgctgttgcagtaaccatctgatacataaatggctccagtgcctggatccacagccacatcagtgggttgacagaagtgattctggtcactgcctggttgcatgctccttcccaggattaatacagggccttctttattgtttggatccagtttgaacacctgatggagagccacgtctgtgacccaataattcccatctttatctatactcaagccatgtggcaagtaaaaccttattcccttcaggtttccgtaccagcaagctatggatgcctcatctttgtctttaattgtgttgtggcctctgtgatattgattgcgtttcatgttacttgctaatgtggaaagccagataatacagcatgtggagataatctccaaaaaagtaacggatatgcgtgcatggcagctgtccat

SEQ ID NO: 16826 - DNA, 1678 bp, Homo sapiens
  SIMILAR (193)..(894): 271254mologous to Drosophila buzzatii protease, reverse transcriptase, ribonuclease H, integrase,accession number AJ133521,Smith-Waterman Score=290.
atggtccgtagtggaaaaaatggtgaccttcatcttaaacagattgcatattacaaacgaactggtgaatatcattcaactacactgccaagtgagagaagtggcataagaagagcagcaaaaaaatttgtcttcaaagaaaaaaagctgttttatgttggaaaagacagaaaacaaaatcgtttggtaattgtttcagaagaggaaaaaaagaaagtcttaagagaatgccatgaaaatgacagtggagctcatcatggtatatccaggaccctcactctggtagaatccaattattattggacatctgtgaccaatgatgtcaaacagtgggtatatgcttgtcagcattgccaagtggcaaaaaatacagttattgtagcaccgaaacagcaccttctcaaggtggaaaatccatggagtttagttactgttgatctgatggggccttttcatacaagcaacagaagtcatgtatatgctataatcatgacagatttgttcaccaaatggattgtgattttgcctctatgtgatgtttcagcatcagaagtttctaaagctattatcaatatatttttcttatatggacctcctcagaaaataataatggaccaaagagatgaattcattcaacagatcaatattgaactgtacagattgtttggcataaagcaaattgtaatttctcacacctctggaactgttaacccaatggaaagtacacctaacacaatcaaagcatttctctccaaacactgtgctgaccacccaaacaattgggatgatcacctatcagctgtttcatttgccttcaatgtaactcacttggaacctactaaaaatacaccatattttcaaatgtttagtcgaaatccttatatgcctgagacttcagatagtcttcatgaagtggatggtgataatacaagtatgtttgccaaaattctagatgcaattaaagaagctgataaaataatggagaataagacaacttcactgggccagatggagaacaacaatttggatgaactaaataaaagcaagatcattgttaaaaagaaacccaaacaattaaatccatttcatttaaaagtgggtcatgaagttttaagacaaaggaaaaattggtggaaggatggtcgttttcagtctgaatgggttggtccttgtgtcatagactatattacagaaagtggatgtgctgcccctgagagacaacactggggttagactgaaaagccctatccaaaatgcccccccccttaagccccctacataagagaatcccagtgaacaagaaagtcctttatccccttgccaaggttccagtagtggccagatccatgacctacattggattgccctgaaattcccgattggagcatatcaagcaaatattctggtggaagatgcaactattggtatagtcgataaagaatttactgacatcaagccaaggatcgtgaactattagaatatagaaatacgaaaatctctccattgatagacgatcatagttctcttgaaaaggcagactttcagtctgttggactcttcaaaccaggttcttgaatacttaagttagtaaataccaaaatttatttaaattgtttgtttagaataccaattcttaatgatatcttattcattaaaaaccgttgtatagaaaaaaaaa

SEQ ID NO: 16827 - DNA, 1128 bp, Homo sapiens
  SIMILAR (673)..(996): 961254mologous to Homo sapiens Protein regulating gene expression PRGE-1,accession number Y58608,Smith-Waterman Score=559.
atggaagacatgccttttgccttccgccatgattgtgaggcctccccagccacgtggaactccagcgcccgccaacggtttcaaccggccgcggggagcacgtggactcgccgccgccagcccagcgccgcagctacctgcctctcaggcttcgcggtgcagaattcgcttctgaaccacccagcgcgcctgcgccgcggccacgccccccccagtggaagtgacgccaacggaagcaggaaggcggttccggcaagccaagggggcgttgtcgtgatgattccgcggccagcatcgctgcgagtggccttgaaggcagctgctgcagccagggagtggaggaagctgaagaaggctacagccggaagcgggagtgaggagcctgacaactcaagaggtggcacagggggagagaactgggacacaaaagagtctgagaagcagggaacactttggatacctcccgcctttggctgtcgacctgagtatgacaatggattggaggagattgtctttggctttgaaccctggataattgtggtcaacctggccatgcctttttctattttctatcgaatgcacgcagctgcctccctctttgagcctcagaaggtccaggcgagaagctggcttctggctgcatctgccccagtgtcctctgaggcattcggatggggcgatgactataaaaaccacgtgaaatgcataagtgaagatcagaagtatggtggcaaaggctatgaaggtaaaacccacaaaggcgacatcaaacagcaggcgtggattcagaaaattagtgaattaataaagagacccaatgtcagccccaaagtgagagaacttttagagcaaattagtgcttttgacaacgttcccaggaaaaaggcaaaatttcagaattggatgaagaacagtttaaaagttcataatgaatccattctggaccaggtgtggaatatcttttctgaagcttccaacagcgtgaatgatgaaaggactgtgatgcacgcacagcacgggatactcctcaccaataagatgaatattggtcagttcagcaacctgggtgaatctccagagaaaaacgctgagcgaagagtcagtctcaaaaggttacatactgtatga

SEQ ID NO: 16828 - DNA, 930 bp, Homo sapiens
  SIMILAR (2)..(2539): 1001254mologous to Homo sapiens FAA,accession number AC005360,Smith-Waterman Score=4384.
atgaggattgaaaaactacctattgagtactctgcttattacttgtggaacaaaatggccgcatctgtttccaccagtcaccagcaaggggaggatcgtataaggacacccttcagtgtcagtgtgcttcactatgctcaaaatcaccggatttggaggtggatgtggagggacttgggcgacggggtggtgaagtcaggctgtgcccccagcggcgccacgaggccaaaaaccggcgctcagcctcatcccggtggctgcagagtgccaagcgccaggtcctgcgctccgggcgcgggtcagaagcagctggcaagggcagcgcagcctgtgggcccttgggcgctggccggccgcagctccgggaagccacgtcagcccacggggtctgcagctgcagccgccaccagcacatggagcaggggtccccgaggattgggaatccccgaccaggcctgcgcctccagccgcgcggaccccggggccagcctggccgcggcaagtcaggcagtctgcggcaggagcgccgggcatgggcttcggccgggggtgcaggaggcgcgcaccctccggccggatggcggcgcactcagggctcaggaggccatcccacgggagccccgccagcccccgccggagcccgagctgcagtgccgcctgcaagtggtgcgctggctgcagctgtggcaaccccagatcccgtcctcccgcctcgcacccatcagcgcggaccccgggggcgacgcagtggcgatgtcgggctctgggtcgcccctcacccctggcctgcctttccagctcctgtccctggagagtagcctggccttggaacacactgtcccggagcgcggctgtcgggatgatggagagaaagatgcttttaggactttcaaaagatacactgtcaccttcgtcagagcatctttatga

SEQ ID NO: 16829 - DNA, 4989 bp, Homo sapiens
  SIMILAR (986)..(780): 601254mologous to Homo sapiens PRO2738,accession number AF116712,Smith-Waterman Score=187.
atgaagccttatggtagacacggtaaagttgaaattgcaagttgtggttgctgtgcttctcacgatggtgaagaagattactacaagtggcgtacagaccatcgtagacgctttctcagaagagataagaagagagctagacaggaatctcaaaagaacattgcagaattagttcaaacggatagagcagcaacctacgaagttgtttatatcgagaagcgtactggagatgaatgtcgtgtacgtgcgtcaatgattgacggaaaagaatggtacgccattgtacgtgaatctgataagaagattatgaagcagtctaatcttcctaaagtacagcttgcagagttcatcgcggaacttgaaagcaaagaattgttcgtggtaacatctgacacatgcgttatctgtaaaggtcttttaggaagtttgaaagaccttggattgagtgacttcacagaagttcgaccaatcagttcgaaagcagacaaagacttctgccgagaaaacggattatggcttgcagatattgtttactatgacgcaaataagcttacaattgaagatgtaaaagctggcgttgaacttggagtagataagtttgacaaacctttacggttcggtgacatagtgatgtacacagaggattgtaaagggcgaagtgatatcaagtttggtcgtgttactggtaagaagcgtggtaactttgttatttcacgaatggaagacaacctgcacgaagaccttgaaaaactgtttgatgaaactaaacgttggtggtactgcaacgcaatgtcaaaagcttcactgactaaggactctaaaataatgattaagaccattcgcaaatctgacggtacaatcgtgccattcgaaccagaacgtttaaacaaatgggcttcatgggctgacaaacgaggaatcatttggtcagaagtaactatggaagccatgaagcgtgtttatgaaggttgctctaccaaagagatgcaccaagctatgattgacgtttgtattgataagcagactcaagagtactctgatatggctggtcgattactccttggtatcatctacaaagaagcctttggtggtttcacaaaagttcctcaactgttcaacttcgttatgaagatggagcaaatgggtttgtgggagcacatggattacaccgaacaagaaattgactatttacaaggtcacattgttcactcaaaagatatctcttacggttatgcagtactgaaacagttccgtgacaaatatggcatccgagatatcaagtcaggtcgtctgtttgaatccccacaatttatgtttatgggtatggctatgaaagcctttgagagacaacctaagcaccgtagactggaagatgttatcaagctgtacacttacctgtctgacctgaagattaacgctcctacgccttatctgaatggtttacgtgctactaagtcaggttatgcgtcatgctgcttaatcaaggctaatgacactgctgagtctcttggcattgctactaaggtagcttatgatatgaccaccaagcaagctggtattggtatgcttatggagacccgtacaattggtgatggtattcgtcaaaacaccattgaacacatgggtaagcttccttactacaagcttgtacgtgctgctgtagaggccaataagcagaagagtcgtggtggttcagctaacaacttcttcactgcattagacccacagattgaggatttgctacgcttgaagcaccctacaacggttcctgcaaagcgtattaatgaaatggattactcatttggtgcaaatgattacttctggcaatgtgtacagtacgatacagattggttgctattctcttacaaagatgcaccaagactgtatgacatgttctacacagcaagtgctgatgaatttgctatggcagtaggtcacgcagttcatacaggtgttaaacataaacgtgtaaaggctcgtgaagttgccaagttgtttattcagcaacgttatgctacaggacgtgtgtatccgttctttacgaacaatgcgaacacacacacaccgtttaaagaagctttgaaaatgtctaacttgtgcatggaaattatactgccagttcacgggtttgaagatgaacgtgacctttacagttacacagcacctaaagaagatggtgaagttgctctttgcttcttggctagtctggtagcagggagaatcacagaatatgaatacgctgacgttgcttattatgctcttgcaatggttgactccgttattgaccttatggactatccgtatccgtcaatgcgtaaccacgttcagaaacgtcgttctgttgggattggccttacgaatgtggctcactaccttgcgaagaactacgtgaactattcttcaagagcaggtaaaacgaagctacatgaacttgcagagatgcactcttactatctgcatgaggcttcactaagacttgcaaaagagcgtggtgtacctgaatatatgaagttcaccaagtatcctgaagaaaatgctagactcaagtcagtcagagaatcagcttggcttcaggaaagagctaactcatctctacgtcagatgattggtggttttgtttcagcttatgcagccttagaattggctcagaagacaattgatgcaggtgttaaaagacagtctgcacagttagcctcaacagctatcttcggagcagatacacagcaagctagaatgttcgctgcatcgttcgctcatcagattggtcagagttacacaagcactatgaaacagtattcaaactttgctgctggtgctcaacctgcacttggttttgaagggactcaagagttctacaagaatgctgctatgttctcccgtatcaggggtgctagtgatgaagacttgaaaggtatcatggttgctttccaacagatggcatctaaaggtaagattcaggctgaagaacttcgtggtcagttaggtgaccgtttagcaggtgctgtacagctattcgctgatgctattggcaagacaccacaagaacttgataaacttatgaaagatggtaagcttcttgctaatgaagttctaccaaaagtctctgagagaatggctgaactcgtagaagcagcaggtggtatgaatgccgtatctaagcagacagctacctcaatgggtcaagcgaagtctatgtgggataacatgttagttgcattgtttaacaactctagcgacggtatttcacagctttcacaatccattgcaatgtttttacaaggttctatgggtactgctgaagcacttggtacagttattggttatctgttaaaaggtgctggtaacttacttgacttcgtgacagatatcatgtacagaacatcttcactgtattactctgcaatggcatggtacaaggatttagacgcaagtcaacagaaacttatcaaggattctgctgaactagtttcaacctttgctatgattggtgttgcaattgccgctatcacgaaggttgcaaaaatctttggcggtactgtagcatttgtcaagagtatctttgaagaaggtatctttgcaaaaatcatgcagaagtttggtttaggtggtgcagcagccgcatctgaagcagcaggtgttgcaggagtatcagcaacaagaatggctcttggtacagttggttcatcattaatgctatctggctctacagacagaaagaataatggtagattcagtgaagttgaccttccaaaaccttttgaagatgccgtagcaagcattaccaacccgaaacgtccaatgttctttgaccagaatggacagctacagtttgcacaatattctgtagatgctcaaggcaatcgcagctttgttgataatggaatgtccaattgggatattatcatgaacaacttgtcagagtctttaaataactttgcaacgaagttcaaccaaaccccaatgatgatgacaccttctggtttccctatgcagactagacagaccctgaatgtttcattcaatcttgatgagaatatggagtatgattcacctatgatggtgacgactcaagcaatgcaatctggacagactgtaactgataacgttcaacgtgctccaaagactattactatctctggtgttgttgtagtgggctacgaaggtagcctattacgtacacgtcaaggtcaacttgtagaaaactttatcgacactgtagaaacttggcgagaccagaaacagattatttcggttatctgtaaagacggtattaagattgacgatagcattatcaccaacttcaaagcttctaaagagcatactattgcaaatggtcttcgtattcagatgactttccaaggtgtggagtttaaagctgtagttggacagacagacgtttcagcagcaactggtaaaacagctaccacaaatgacggtggagcaacttcaaagaagaatacaggtaataccacaacctctttaggtaacggtaaattaaactgtcaacttctttatgacctgcaatcaaatggtgtaagagaactttcaagtgatgaatatcgtgctcttgctgcttgtggtcgttctgcaaataccagcaaaggccagacaacatttagtgatgaagctgaaagaactgctggtcaggctcttaataggggtgctggtacagatacggaatggtcaactcagacagttactttagaaggtactgtgtttgttattgagttgaaatacaaagaaaggcttgacagatggttcttgacgctaactgatgttgatggtaatgtattattatctgaaaagaaatgccttgccgaccaatctattacaggccgctacgtaattccttccttagctggtgaaatcttcgttgaaaaaatcttcggaactgacttacaaccatcaagaaataactttggaagggataaggcatttgaacttaactattacacttctgaagatatgcgtttgatggagaacttataa

SEQ ID NO: 16830 - DNA, 4404 bp, Homo sapiens
  SIMILAR (566)..(1333): 901254mologous to Homo sapiens retinal degeneration B beta,accession number AF171102,Smith-Waterman Score=1207.
atgtgtagaaatttcctgaagcctccccagaagctgatgctgggtctgtgcttcctgtacagcctgcagaacccatctgtttccaccagtcaccagcaagcggaggatcgtataaggacacccttcagtgtcagtgtgcttcattatgcttttggatgtgttagtaaaaattctccggatttggagggattggtgtcaatcaaagacaaatcacaacaagtgattgtccagggtgtccatgagctctatgatctggaggagactccagtgagctggaaggatgacactgagagaacaaatcgattggtcctccttggacacgccctccgatctcatcgccactgcaaccgcattcgacctcgaatggcggggtccccagctgtaccggagggctaccacgttctggtggtgaatggatgtacatcatccgtggtgctgactgttaatgttcctaaagcctctcaagttgctttggcagacaagaaagctcgtatcctgaaagacgttaccttctcaggtatcttagcgggtgctatcttggatgttgacttgaaagacgttgtatgtagctggaatggtattgccatcgaaggctttgctccagactcattcttacgtctacagagaacttctccacttgttacaccagttgttggtgcaggtggtcaggtagctctgacaagaaacgcagacaagacaggtactattgagattgagctaatgcagacttcactctctaaccagatgctttctgcgattcaagctaaacaagatgacatggaacttgaagaagatatctcttctaacttcgtaatctacgacccatctggttctgttctggcaactggtattaacgcatggttgcaggaacttccacagattgaacttggtcgtgaccagaactctaaaacttggatttttggttgtgcaagagatggtattaaaatgtcgatgaaactcggtaaagttgttgtaccgacaattgctcagatgttttcaagtttatctgggaaagagcagaaagaaggcgaagaaagtgtaacagcagtacctttcaaagaattagttgaagcttgctttgaccgtattgatgaactcgatattgactcaatggctgctttgttattccaaggtgcaactgtagatgacttccctctaaacttttttcgaagcaagcattttcaaaagcctaacttctcagtaagcatgagtagtgctatgcagaccccattgactgatggggctgtagcagcaacttatgaagaagcagatgagatgaaatttgtgcttgctatttacggtatggaagggtgtaaagaaacactcgaccaactcttctcaatgactttctctgatttattatctctgcgacagtatttagaaatccagaggtcatacaaagaagaaattgcttataacgaacttagaaaggcagttgatagctttattgtggagttgggtttcagtgaaaaggttgttaaaggtttgcagagagttgaaaagatggctatgcagtctgctcaacgaattgaacgtaatattaacaaagcctttgacgtgaaacccaataagtcttcacaggaagcattaaacagaattgtaaaaaacgctcagactgcttcgggcagaatcaataaagcactcaacaactcccttaaccttgattcacaaggtgttaaatctcttaaaagactggagacgcaaggtagaaaaactgccaaggaaattaacaaggctttaagagacgctatgaaagttgatggaaaagtcactgttcgtggtggtagaaaaggtggtactggtttccctcctactggtggaagtggcaacccaagacctccaagacctgatattgctcagagacagatggaaagaatgtttaacaacaacttctattctggtctgacacgtcgccttgaaactattggtgggcaaggtaaccaaatggcagcttccttcagaggaaacttgcaaggtctttataacaaatataagggaactggtaaagtcggtgaatatgagatggaagtcaaaaagctcattgacgttaccaagcgttgggttattgcagaaaatgctagactcaagtcagtcagagaatcagcttggcttcaggaaagagctaactcatctctacgtcagatgattggtggttttgtttcagcttatgcagccttagaattggctcagaagacaattgatgcaggtgttaaaagacagtctgcacagttagcctcaacagctatcttcggagcagatacacagcaagctagaatgttcgctgcatcgttcgctcatcagattggtcagagttacacaagcactatgaaacagtattcaaactttgctgctggtgctcaacctgcacttggttttgaagggactcaagagttctacaagaatgctgctatgttctcccgtatcaggggtgctagtgatgaagacttgaaaggtatcatggttgctttccaacagatggcatctaaaggtaagattcaggctgaagaacttcgtggtcagttaggtgaccgtttagcaggtgctgtacagctattcgctgatgctattggcaagacaccacaagaacttgataaacttatgaaagatggtaagcttcttgctaatgaagttctaccaaaagtctctgagagaatggctgaactcgtagaagcagcaggtggtatgaatgccgtatctaagcagacagctacctcaatgggtcaagcgaagtctatgtgggataacatgttagttgcattgtttaacaactctagcgacggtatttcacagctttcacaatccattgcaatgtttttacaaggttctatgggtactgctgaagcacttggtacagttattggttatctgttaaaaggtgctggtaacttacttgacttcgtgacagatatcatgtacagaacatcttcactgtattactctgcaatggcatggtacaaggatttagacgcaagtcaacagaaacttatcaaggattctgctgaactagtttcaacctttgctatgattggtgttgcaattgccgctatcacgaaggttgcaaaaatctttggcggtactgtagcatttgtcaagagtatctttgaagaaggtatctttgcaaaaatcatgcagaagtttggtttaggtggtgcagcagccgcatctgaagcagcaggtgttgcaggagtatcagcaacaagaatggctcttggtacagttggttcatcattaatgctatctggctctacagacagaaagaataatggtagattcagtgaagttgaccttccaaaaccttttgaagatgccgtagcaagcattaccaacccgaaacgtccaatgttctttgaccagaatggacagctacagtttgcacaatattctgtagatgctcaaggcaatcgcagctttgttgataatggaatgtccaattgggatattatcatgaacaacttgtcagagtctttaaataactttgcaacgaagttcaaccaaaccccaatgatgatgacaccttctggtttccctatgcagactagacagaccctgaatgtttcattcaatcttgatgagaatatggagtatgattcacctatgatggtgacgactcaagcaatgcaatctggacagactgtaactgataacgttcaacgtgctccaaagactattactatctctggtgttgttgtagtgggctacgaaggtagcctattacgtacacgtcaaggtcaacttgtagaaaactttatcgacactgtagaaacttggcgagaccagaaacagattatttcggttatctgtaaagacggtattaagattgacgatagcattatcaccaacttcaaagcttctaaagagcatactattgcaaatggtcttcgtattcagatgactttccaaggtgtggagtttaaagctgtagttggacagacagacgtttcagcagcaactggtaaaacagctaccacaaatgacggtggagcaacttcaaagaagaatacaggtaataccacaacctctttaggtaacggtaaattaaactgtcaacttctttatgacctgcaatcaaatggtgtaagagaactttcaagtgatgaatatcgtgctcttgctgcttgtggtcgttctgcaaataccagcaaaggccagacaacatttagtgatgaagctgaaagaactgctggtcaggctcttaataggggtgctggtacagatacggaatggtcaactcagacagttactttagaaggtactgtgtttgttattgagttgaaatacaaagaaaggcttgacagatggttcttgacgctaactgatgttgatggttggaaactcagtttctccaactgttgttccacaggttcagctggtgaaaaccctccctttgattctcctttgaagtag

SEQ ID NO: 16831 - DNA, 721 bp, Homo sapiens
  SIMILAR (718)..(503): 631254mologous to Homo sapiens COBW-like protein,accession number AF257330,Smith-Waterman Score=176.
tgctgtaaaacaaataccattttaaagtatattggaattcggtaactaaagtaataaataaatgcttgaaatatacccagtagaaaacttaatttttattaacccaatccttttggataaggaaatgcctctagtgttatgtacaaacttgatctgtcttggaaacgtgtatgtccactgcttttcctgtttcctgtcacagtagctttaaaacagctgtgttaaggatatccttatcctaaatttctgcccaaggaggaccaatcgatttgttctctcagtgtcatccttccagctcgactggagtctcctccagatcatagaggctcatgggacacccctggacaatcacttgttgtgatttgtctttgattgacaacaatcccttcaggccttatggacctccatggcagtgattgtcccttgtttctcacatttcttttcccacaggaaggattctggaataaacatattaagggtggatcttcctttgcatttccgggggacgggcaaatgtgattggtaacaatactctgatcaaggtgaggttgtggttcctgggcacatgctgaagtttttttctggcaaacttaatccagagagactatcaaaggcatgaaagatctaatacattagagagatcaactcttgatctttgtgtttctaagatttgtcctagtccatttatggatctaattgtcgctctaaatttctttacaac

SEQ ID NO: 16832 - DNA, 520 bp, Homo sapiens
  SIMILAR (832)..(1383): 1001254mologous to Escherichia coli K12 putative glycosyl transferase,accession number AE000295,Smith-Waterman Score=922.
atgaggatgattacaggcactttgtcaacctggatcatgcccacagccttctgagggactatcagcagagagaaggcattgccatggatcagttgctttcccaaagagattttcgggaaggcgcctacagtggctcagcgcgcagggagcccgcacgggaactgtcccggccagaccgcccagggcagtgtggcctcaacaccactgagcacccgctggggccgctaaccccagcaccttcccatagcctgcggagttccagcccctgccccaccaggatgacaaagaaaagaaagaacaacaatcatgccaaaaagggccgcggccacatgcagcctatttgctgcatgaactgtgcccgatgcatgcccaagtacaaagccgttaagaaactcgtcactggggccagccttcctaatgatggtgatgaaaaatatgagaagaccataattaaaagtggagatcagacgttttacaaattcatgaagcgaattgctgcttgtcaggagcagattttgag

SEQ ID NO: 16833 - DNA, 2401 bp, Homo sapiens
  SIMILAR (987)..(139): 951254mologous to Bacteriophage phi-80 put. major coat protein (AA 1-341),accession number X06751,Smith-Waterman Score= 1368.
tgccgccttccggctccagtccccgggctcggcctcggcgaggtgtaattcgcagcgcgggccggccccggaggctctcggcgagcgcggcgcggtaacaagtgggcgaggatgccgtacgagatcaagaaggtgttcgccagcctcccgcaggtggagaggggcgtctccaagatcatcggcggcgaccctaagggcaacaattttctgtacaccaatggaaagtgcgtcatcctaaggaacatcgacaacccagcccttgctgacatctacacagagcacgcccatcaggtggtggtggccaagtatgcgcccagcggattctacattgcctccggagatgtgtctgggaagctgaggatctgggataccacgcagaaggagcacctgttgaagtatgagtaccagcctttcgctgggaagatcaaagacattgcttggactgaagacagtaagaggatcgccgtggtcggggaaggaagggagaagtttggagcagtcttcctctgggatagtggctcttctgtgggcgagattacaggacacaacaaagtcatcaacagcgtggacatcaagcagagccggccataccggctggccacgggaagcgatgataactgcgcggcattctttgagggacccccattcaagttcaagttcacaattggcgaccacagccgctttgtcaactgtgtgcgattctctcctgatgggaacagatttgccacagccagtgctgacggccagatatacatctatgacgggaagactggggagaaggtgtgcgcgctgggcggaagcaaggcccacgacggtgggatttacgcaattagttggagtcccgacagcacccatttgctttctgcttctggggacaaaacttccaagatttgggacgtcagcgtgaactccgtggtcagcacatttcccatgggctccacggttctggaccagcagctgggctgcctatggcagaaggaccacctgctcagtgtctccctgtccgggtacatcaactatctggacagaaacaaccccagcaagcccctgcacgtcatcaagggtcacagtaaatcgatccagtgtctgacggtgcataaaaacggcggcaagtcctacatttactctgggagccacgacggacacattaattactgggattcagagacgggggagaacgactccttcgctgggaaaggccacacgaaccaggtgtccaggatgaccgtggatgagtcggggcagctcatcagctgcagcatggacgacaccgtgcggtacaccagcctcatgctgcgggactacagcggacaaggagttgtgaaactggacgttcagccaaagtgcgtagccgtcggccccgggggatacgccgtggtcgtgtgcattggacagattgtcctgctgaaggatcagaggaagtgcttcagcatcgacaaccccggctacgagcccgaagttgtggcagtgcaccccggcggggacacggtggcaattgggggtgtggacggcaacgtccgcctgtattccatcctgggcaccacgctgaaggatgagggcaagctcctagaggccaagggccccgtgaccgacgtggcctactcccacgacggcgccttcctcgcggtgtgcgacgccagcaaggtggtcacagtgttcagcgttgctgacggctactcggagaacaatgttttttatggacaccatgaaaaataaagcgagcacctaaacaatgtgtggagcataactaaaacccacagcccaaccaaaccttgagaatgcgaaacattccagaggcagtagcctccaaagcacacagagcccctggccccgccgcggctctcactatctgtcaggggaggttgtacaggtgaatgagccggggggctcatgttcctgcctgcagaacatttctgtactagtgagaagagggaatatgcattgcagttcagcaaagccggaattctgtgttgaacagatgtctgtctccctagtgtgtgactcacaccttgtggctgccttcagagcgccacctccagatcagatggggacacacaacccctggatatgtttcattgtcagattttgtgcttgattttaagaatggaattgtgggtatctttcctttttttttaatgtatcttaactgttgcctgtcagtgtttacaaactagtgcgttgacggcaccgtgtccaagtttttagaacccttgttagccagaccgaggtgtcctggtcaccgtttcaccatcatgctttgatgttcccctgtctttccctcttctgctctcaagagcaaaggttaatttaaggacaaagatgaagtcactgtaaactaatctgtcattgtttttaccttccttttctttttcagtgcagaaattaaaagtaagtataaagc

SEQ ID NO: 16834 - DNA, 1002 bp, Homo sapiens
  SIMILAR (541)..(651): 1001254mologous to Homo sapiens WDR1 protein,accession number AF020260,Smith-Waterman Score=196.
atggacgccatatgggggggatgggaggggcgcttcagtacagggtggtcgcataacacgcagcggggacaaaacggcggcggccgaaaccgagttgatacagatcagggattgagagcagggaccctggtggctcgacacttgttgcaaggggcccaccccaaccaattgggaaaacagaaccgccagcactcacagatccaggtgattatgaggaagtacataggatatgacttagaaccacacctctaccccctggtgcccgtcatcaacagttgtcgatattggcgcgttgatacaaccggccatacggccagtggaccgcaaccatcagagcaactcccaacaaccacatcgtctgcctacattaatgagataacaatcaggtggtctgtgcatggggcccccggggtccctcagtacggccagcagcgcaactggtgtttgctggatggaaggagacccacaactctttcgggccccctgtttaaaagcacaaaggctactttacccctgggactgaagcccagggacagccttattgtcctgctgaaggatcagaggaagtgcttcagcatcgacaaccccggctacgagcccgaagttgtggcagtgcaccccggcggggacacggtggcaattgggggtgtgagacgattgaggatagtccgtgcccgggacggctgtctacgtaataatttgagggttgcgttgccccgattgttagaaggaaccgttgaggagagcgccccggtggggccgctcgagggggcgtcaccctttgtgggtggagatcgcttggagtgtgttggaaatcattcggtatcgaacgcatgtgggtgtttgattgcgtgcgaacgcactgaccgtgcctcgttgatcggccttaagcggctccgcttggttcgttacgggaccgcccattcccccgatgtcgtcgctgtcgctacaccgttcgcttccgacgcaatgcgaaatagtctgaatcgggatgcactctga

SEQ ID NO: 16835 - DNA, 3047 bp, Homo sapiens
  SIMILAR (1530)..(2030): 761254mologous to Homo sapiens 26-JUN-1997 cDNA encoding human WD-40 protein, WDPro2,accession number Z92428_cd1,Smith- Waterman Score=635.
ggcacgagcgcaaccacagcgcgcagggcaggcgcgagctggcctctgagccccggcctcggaccgcccactccactcccggcacgcccggtgccgccttccggctccagtccccgggctcggcctcggcgaggtgtaattcgcagcgcgggccggccccggaggctctcggcgagcgcggcgcggtaacaagtgggcgaggatgccgtacgagatcaagaaggtgttcgccagcctcccgcaggtggagaggggcgtctccaagatcatcggcggcgaccctaagggcaacaattttctgtacaccaatggaaagtgcgtcatcctaaggaacatcgacaacccagcccttgctgacatctacacagagcacgcccatcaggtggtggtggccaagtatgcgcccagcggattctacattgcctccggagatgtgtctgggaagctgaggatctgggataccacgcagaaggagcacctgttgaagtatgagtaccagcctttcgctgggaagatcaaagacattgcttggactgaagacagtaagaggatcgccgtggtcggggaaggaagggagaagtttggagcagtcttcctctgggatagtggctcttctgtgggcgagattacaggacacaacaaagtcatcaacagcgtggacatcaagcagagccggccataccggctggccacgggaagcgatgataactgcgcggcattctttgagggacccccattcaagttcaagttcacaattggcgaccacagccgctttgtcaactgtgtgcgattctctcctgatgggaacagatttgccacagccagtgctgacggccagatatacatctatgacgggaagactggggagaaggtgtgcgcgctgggcggaagcaaggcccacgacggtgggatttacgcaattagttggagtcccgacagcacccatttgctttctgcttctggggacaaaacttccaagatttgggacgtcagcgtgaactccgtggtcagcacatttcccatgggctccacggttctggaccagcagctgggctgcctatggcagaaggaccacctgctcagtgtctccctgtccgggtacatcaactatctggacagaaacaaccccagcaagcccctgcacgtcatcaagggtcacagtaaatcgatccagtgtctgacggtgcataaaaacggcggcaagtcctacatttactctgggagccacgacggacacattaattactgggattcagagacgggggagaacgactccttcgctgggaaaggccacacgaaccaggtgtccaggatgaccgtggatgagtcggggcagctcatcagctgcagcatggacgacaccgtgcggtacaccagcctcatgctgcgggactacagcggacaaggagttgtgaaacctggaccgttcagccaaagtgccgtagccgtcggccccgggggatacgccgtggtcgtgtgcattggacagattgtcctgctgaaggatcagaggaagtgcttcagcatccgacaaccccggctacgagcccgaagttgtggcagtgcaccccggcggggtacacggtggcaattgggggtgtggacggcaacgtcgccctgtattccatcctgggcaccacgctggaaggatgagggcaagctcctagaggccaagggccccgtgaccgacgtggcctactcccacggacggcgccttcctcgcggtgtgcgacgccagcaaggtggtcacagtgttcagcgttgctgacggctactcggagaacaatgttttttatggacaccatgcaaaaatcgtctgcctggcctggtccccagacaatgaacactttgcctccggtggcatggacatgatggtgtatgtttggaccctgagtgacccggaaaccagagtcaagatccaagatgcacaccggctgcaccatgtcagcagcctggcctggctggacgagcacacgctggtcacgacctcccatgatgcctctgtcaaggagtggacaatcacctactgaggagccccacccccgcctctggatggaccgaatcagggactagagtttaactgcagcggaacatgtcatttctctatttctgtgacgcgcccccatgcccccaccccaccacaagaggcaggagggcccagtcatgaccctcgtctctgcagggtgtctgtacacgttcttctgaaagctttagacagtaacagtttgcacatgaaaaataaagcgagcacctaaacaatgtgtggagcataactaaaacccacagcccaaccaaaccttgagaatgcgaaacattccagaggcagtagcctccaaagcacacagagcccctggccccgccgcggctctcactatctgtcaggggaggttgtacaggtgaatgagccggggggctcatgttcctgcctgcagaacatttctgtactagtgagaagagggaatatgcattgcagttcagcaaagccggaattctgtgttgaacagatgtctgtctccctagtgtgtgactcacaccttgtggctgccttcagagcgccacctccagatcagatggggacacacaacccctggatatgtttcattgtcagattttgtgcttgattttaagaatggaattgtgggtatctttcctttttttttaatgtatcttaactgttgcctgtcagtgtttacaaactagtgcgttgacggcaccgtgtccaagtttttagaacccttgttagccagaccgaggtgtcctggtcaccgtttcaccatcatgctttgatgttcccctgtctttccctcttctgctctcaagagcaaaggttaatttaaggacaaagatgaagtcactgtaaactaatctgtcattgtttttaccttccttttctttttcagtgcagaaattaaaagtaagtataaagcaccgtgattgggagtgtttttgcgtgtgtcggaatcactggtaaatgttggctgagaacaatccctccccttgcacttgtgaaaacactttgagcgctttaagagattagcctgagaaat

SEQ ID NO: 16836 - DNA, 449 bp, Homo sapiens
  SIMILAR (58)..(324): 971254mologous to Homo sapiens Human secreted protein, SEQ ID NO: 5727,accession number G01646,Smith-Waterman Score=468.
  misc_feature (1)...(449): n = a,t,c or g
cagcataacgcctnngtttgtgaacgtnccagacctggagcagccaccgccgcaatcatggtgtcagtaattttcactgtggatacctcccatgaggacatgattcacgacgcccagatggactactatggcacccgcctggcaacctgctcatcagacaggtccgtcaaaatctttgatgtgcgcaatggagggcagatccttatcgccgacctcaggggtcatgagggtcctgtgtggcaagtggcctgggctcaccccatgtacggcaacatcctggcatcgtgctcctatgaccggaaagtcattatctggagagaggatggtcgtgtgttcatttggacctgtgatgatgcctcaagcaatacgtggtcccctaaattgttgcacaagttcaacgatgtggtgtggcatgtgagctggtccatcacagccaacattcttgctgg

SEQ ID NO: 16837 - DNA, 317 bp, Homo sapiens
  SIMILAR (38)..(148): 351254mologous to Bacteriophage fr lysis protein (AA 1- 71),accession number X15031,Smith-Waterman Score=61.
cacaagttcaacgatgtggtgtggcatgtgagctggtccatcacagccaactaaccaaacaactgggaagagcccccaactccaacaggattattttcccaggaggagttacagatgcagccacagattgatcatctgccttaacgtgatcggagatgctgtgtaatctactgtccagctgaaagcactcatgttacgaggaagaaactacaagtgatgttcaaatctattttgggtcatttttatgtacctttgggttcaggcattatttggggggttttgtttccaaaggaactaaataaagtcatattgcttat

SEQ ID NO: 16838 - DNA, 560 bp, Homo sapiens
  SIMILAR (1)..(216): 481254mologous to Drosophila melanogaster BcDNA.LD03471,accession number AF160909,Smith-Waterman Score=189.
ggcatgcccaccagcactatcgccagctgctcccaggatggtcgtgtgttcatttggacctgtgatgatgcctcaagcaatacgtggtcccctaaattgttgcacaagttcaacgatgtggtgtggcatgtgagctggtccatcacagccaacatcctggctgtctctggtggagacaataaggtgacagagggccagcagaacgagcagtgacaagacaggtggggcctggctccccacccgccagctccaggactgccccttcctgggccaactaaccagacaactgggaagagcccccaactccaacaggattattttcccaggaggagttacagatgcagccacagattgatcatctgccttaacgtgatcggaaatgctttgtaatctactgtccagctgaaagcactcatgttacgaggaagaaactacaagtgatgttcaaatctattttgggtcatttttatgtacctttgggttcaggcattatttggggggttttgtttccaaaggaactaaataaagtcatattgcttataaaaaaaaaaaaaaaaaaa

SEQ ID NO: 16839 - DNA, 438 bp, Homo sapiens
  SIMILAR (28)..(273): 1001254mologous to Homo sapiens Human secreted protein, SEQ ID NO: 5727,accession number G01646,Smith-Waterman Score=452.
gccggctgcaggaattcggcacgagatggcacccgcctggcaacctgctcatcagacaggtccgtcaaaatctttgatgtgcgcaatggagggcagatccttatcgccgacctcaggggtcatgagggtcctgtgtggcaagtggcctgggctcaccccatgtacggcaacatcctggcatcgtgctcctatgaccggaaagtcattatctggagagaggaaaacggcacctgggagaagagccacgagcatgcgggacacgactcctcagtgaactcggtgtgctgggctccccacccgccagctccaggactgccccttcctgggccaactaaccagacaactgggaagagcccccaactccaacaggattattttcccaggaggagttacagatgcagccacagattgatcatctgccttaacgtgatcggagat

SEQ ID NO: 16840 - DNA, 1304 bp, Homo sapiens
  SIMILAR (1)..(891): 991254mologous to Cloning vector pZC320 SopA,accession number U26464,Smith-Waterman Score=1551.
atgaaactcatggaaacacttaaccagtgcataaacgctggtcatgaaatgacgaaggctatcgccattgcacagtttaatgatgacagcccggaagcgaggaaaataacccggcgctggagaataggtgaagcagcggatttagttggggtttcttctcaggctatcagagatgccgagaaagcagggcgactaccgcacccggatatggaaattcgaggacgggttgagcaacgtgttggttatacaattgaacaaattaatcatatgcgtgatgtgtttggtacgcgattgcgacgtgctgaagacgtatttccaccggtgatcggggttgctgcccataaaggtggcgtttacaaaacctcagtttctgttcatcttgctcaggatctggctctgaaggggctacgtgttttgctcgtggaaggtaacgacccccagggaacagcctcaatgtatcacggatgggtaccagatcttcatattcatgcagaagacactctcctgcctttctatcttggggaaaaggacgatgtcacttatgcaataaagcccacttgctggccggggcttgacattattccttcctgtctggctctgcaccgtattgaaactgagttaatgggcaaatttgatgaaggtaaactgcccaccgatccacacctgatgctccgactggccattgaaactgttgctcatgactatgatgtcatagttattgacagcgcgcctaacctgggtatcggcacgattaatgtcgtatgtgctgctgatgtgctgattgttcccacgcctgctgagttgtttgactacacctccgcactgcagtttttcgatatgcttcgtgatctgctcaagaacgttgatcttaaagggttcgagcctgatattggctgcaatgccgtcagctgggcccctgctgttgtacctgtaagcctcatagaccacccatcggggcagaaacccaattacatcaagaggtttgcatcaggtggctgtgacaacctcatcaagctgtggaaggaaggaggaaggacggccagtggaagggaggagcagaagctagaggcgcacagtgactgggtttcgagatgtgggcctgggccccctccatcggcctgcccaccagcaccatcgccagctgctccagtgctcacaggccaccattccaagatgactgggaatcctgccaaaaccaatgctgaccccagcagcccaggcttcacgggactcactgggatccctgctgagacatggaatgccttctgtctgtcaccagtccccttgtccttccccactaaggg

SEQ ID NO: 16841 - DNA, 957 bp, Homo sapiens
  SIMILAR (644)..(805): 1001254mologous to Homo sapiens Human secreted protein, SEQ ID NO: 5727,accession number G01646,Smith-Waterman Score=277.
cgtatatttgtaccatgacgaccgcccgaattcccggtcgacgatttcgtgccgccgggagctgccacgtccgagacctgttcagctaccgccgcaatcatggtgagtgttggtactgaggaggcctagcagggtgaaggccacggtcgcggccttcacgggttcctcggccgtcctgagtcccaaatcccaagctggagccgttcagctcccctccaccgcttaaagatttggggggctctggccccgtccttgcggaccattccgaggggagtccagaggtgaggccgaggaacctccctgactttgcggggcgcgccgctcctgcgtctcctgccagtctcccttccttcttttcgggcaacaattgaaaacaaaacgaggaacagcagaggagctactgtataccgagccctcagcattgttcgtaatctccgcctgctaacagccttgtgaagaaggtgctattcttctcaacactttacagatgaggacacttgaggttcggagacgtggagcctcttgcacagctgcttaagtggtagtagagccgagatttgaacccttctaaccattcctttctggcgcctactgcagctcccagcagagatgattgaactgttgctcggggtagggcccccaggtgtcagtaattaacactgtggatacctcccatgaggacatgattcacgacgcccagatggactactatggcacccgcctggcaacctgctcatcagacaggtccgtcaaaatctttgatgtgcgcaatggagggcagatccttatcgccgacctcagggggtaagtgctggcgagcccagggaagggctccaggaatggtgtgggttctcaggccctgcttcaagcgtgggagcaaagcatgggagcccagattcagagcaaccccaaagcacatttagcggagaggacgctgggatcccagccagcctggct

SEQ ID NO: 16842 - DNA, 2199 bp, Homo sapiens
  SIMILAR (651)..(1238): 261254mologous to Drosophila melanogaster BcDNA.LD03471,accession number AF160909,Smith-Waterman Score=141.
  misc_feature (1)...(2199): n = a,t,c or g
cgtcccatggtgaaggttggtactgaggaggcctagcagggtgaaggccacggtcgcggccttcacgggttcctcggccgtcctgagtcccaaatcccaagctggagccgttcagctcccctccaccgcttagagatttggggggctctggccccgtcccttgcggaccattccgaggggagtccagaggtgtcagtaattaacactgtggatacctcccatgagtacatgatttattgacgcccagatggactactatgggcacccgcctgggcaacctgcttcatcagacaggtccgtcaaaatcttttgatgtgcgcaatgggagggcagatccttattcgccgaccttcaggggtcatggaggggtcctgtgtggcaagttggctgggggttcaccccattgttacgggcaacatcctgggcattcgttgcttccttattgaccggaaagttcatttattcttgggagagagggaaaacgggcaccctggggagaagagccacgagcaatgcggggacacgactcctcaagttgaacttcgggtgttgctgggccccccatggacttacggtcctgnattcctgggcctgttgggtagtctcggatngggggccatcttccctggctggactttacaccgggggaaggccaatgggaagtaaagaagatcaacaacgctcacaccattggctgcaatgccgtcaacttgggcccctgcttgttgtacctggaagcctcatagacgaccccatcggggtcagaaacccaattacatcaagaggtttgcatcaggtggctgtggacaacctcattcaagctgtggaaggaggaggaggacggccagtggaaggaggagcagaagctagaagcgccacagtgactgggtttcgagatgtggcctgggccccctccatcgggcctgcccaccagcaccatcgcccagctgctcccaggatgggtcgtgtgtcaatttggacctgtgatgatgcctcaagcaatacgtggtccccttaaattgttgcacaagttcaacgatgtggtgtggcatgtgagcttggtccatcacagccaacatcctggctgttctctggtggagacaataaagatacccctgtggaaggagtcaagttgatgggccaagtgggttgtgccatccagtgatgtcaaacaaaggggcccagggctcccgtatcagccatccagtgaccaggaaggcccagcaagaaacgagcaagtgaacaaagaccagggtggggccctggctcccccacccgcccagctcccaggacctgccccttccccgggcccaacttaaccagacaacttgggaagagccccccaactcccaacagggattattttccccaggagggagttacagatgcagcccacagattgatccatctgcccttaactgtgatctgagatgctttgtaatctactgtccgagctggaaacagctcatgttacgaggaagaaactacaagtgatgttcaaatctattttgggtcatttttttataagcaatatgactttatttagttcctttggaaacaaaaccccccaaataatgcctgaacccaaaggtacataaaaatgacccaaaatagatttgaacatcacttgtagtttcttcctcgtaacatgagtgctttcagctggacagtagattacaaagcatctccgatcacgttaaggcagatgatcaatctgtgggctgcatctgtaactcctccttattgtctccaccagagacagccagggatgttggctgtgatggaccccagttcaacatgcccaacaccacatcgttgaacttgtgcaaacaatttagggggaccacggtaattgcttgagggcatcatcacagggtccaaatggaacacacgaccatcctgggagcagctggcgaattgtggcttggtggccagggccgattgaagggggcccaggccacatctcgaacccagtccactgtgcggcttcttagcttctgctccttctttcactgggccgtccttctccttcttcacagctgattgaagggtttggcacagccacctgatgcaaacctcttgatgtattttggggttctgccccgatgggtggtctatgaggcttccaggtacaacagcaggggcccagctgacggcattgcagccaatggtgtgagcgttgttgatcttctttacttc

SEQ ID NO: 16843 - DNA, 1713 bp, Homo sapiens
  SIMILAR (901)..(1689): 931254mologous to Homo sapiens putative p150,accession number U93563,Smith-Waterman Score=1273.
atgagtggagaatttattgaccatagtcacatcgctagaattatatatccaggaatatttggtacagatgctggcagctgtattgaccagagaggcataacagggaagctgcagcagcccccagaagataggagattgggagaaggaaaactaacaaacacaaaggacatccacaccaaaaccccatctgtacgtcaccatcatcaaagaccaaaggtagataaaaccacaaagatagggaaaaaacagagcagaaaaactggaaactctaaaaatcagagtgcccctcctcctccaaaggaatgcagctcctcaccagcaatggaacaaagctggacagagaatgactttgacgagttgagagaagaaggcttcagacgatcaaactactccgagctaaaggaggaatttcgaacccatggcaaagaagttaaaaaccttgaaaaaagattagacgaatggctaactagaataaccaatgcagagaagtccttaaaggacctgatggagctgaaaaccaaggcacgaggactacaaagggtatcagtgatggaagacgaaatgaatgaaatgaagcaagaagagaagtttagagaaaaaagaataaaaagaaacaaacaaagcctccaagaaatatgggactatgtgaaaagaccaaatctacgtctgattggtgtacctgaaagtgatggagagaatggaaccaagttggaaaacacgctgcaggatattatccaggagagcttccccaatctagcaagacaggccaacattcaaattcaggaaatacagagaatgccacaaagagactccttgagaagagcaactccaagacacataattgtcagattcaccaaagttgaaatgaaggaaaaaatgttaagggcagccagagagaaagcaccacattgcacttattccaaaattgaccacttagttggaagtaaagctctcctcagcaaatgtaaaagaacagaaattataacaaactgtgtttcagaccacagtgcaatcaaactagaactcaggattaagaaactcactcaaaaccgctcaactacatggaaactgaacaacctgctccagaatgactactgggtacataacgaaatgaaggcagaaataaagatgttctttgaaaccaacgagaacaaagacacaacataccagaatctctgggacacattcaaagcagtgtgtagagggaaatttatagcactaaatgcccacaagagaaagcaggaaagacctaaaattgacaccctaacatcacaactaaaagaactagagaagcaagagcaaacacatttaaaagctagcagaaggcaagaaataactaagatcagagcagaactgaaggaaatagagacacaaaaaacccttcaaaaattcgatgaatccaggagctggttttttgaaaagatcaacaaaattgatagaccgttagcaagactaattaagaagaaaagagagaagaatcaaatagatgcaataaaaaatgataaaggggatatcaccactgatcccacagaaatacaaactaccatcagagaatactataaacacctctacgcaaataaactagaaaatctagaagaaatggataagttcctcgacacatacaccctcccaagactaaaccaggaagaagttgaatctctgaatagaccaataacaggatctgaattgaggcaacaattaatagcttactaa

SEQ ID NO: 16844 - DNA, 396 bp, Homo sapiens
  SIMILAR (250)..(393): 831254mologous to Homo sapiens p40,accession number U93564,Smith-Waterman Score=207.
atggctgggtactcctctgagacaaaacttccagaggaacatttgctgttcaccaatatccactgttctgcagcctttgctgctgatacccaggcaaacaggtttggagtggacctccagcaaactccaacagacctgcagctgagggtcctgactgttagaaggaaaactaacaaacaggacatccacaccaaaaccctatcagtacatcaccatcatcaaagaccaaaggtagataaaaccacaaagatggggaaaaaacagagcagaaaaactggaaactctaaaaatcagagcgcctctgctcctccaaaggaacgcagctccgcatcagcaatggaacaaagctggacggaaaatgactttgacgagttgacagaagaaggcttcagatga

SEQ ID NO: 16845 - DNA, 2634 bp, Homo sapiens
  SIMILAR (1)..(1734): 1001254mologous to Homo sapiens dJ568F9.1 (zinc finger protein 133 (clone pHZ-13)),accession number AL049646,Smith- Waterman Score=3189.
atggcattcagggatgtggctgtggatttcacccaggatgagtggaggctgctgagccctgctcaaaggactctgtacagagaggtgatgctggagaactacagcaacctggtctcactgggaatttcattttctaaaccagaactcatcacccagctggagcaagggaaagagacctggagagaggaaaaaaaatgttcaccggcaacctgtccagcagatccagagccagagctctacctcgatcctttctgccctccgggtttctccagtcagaaattccccatgcagcatgtgctgtgtaatcatcccccctggatcttcacatgcttgtgtgcagaaggtaacatccagcctggggatccgggcccaggggaccaggagaagcagcaacaagcctctgaggggagaccctggagtgatcaagcagaaggtcctgagggagaaggtgccatgcctttgtttggaagaaccaagaaaaggactctgggagcgttctccaggccaccccagaggcagccagtcagctctcggaacggcctcagaggggtggagttagaagccagcccagctcagtcagggaaccctgaggaaacagacaaattgttgaagaggatagaagtcttaggatttggaacagtcaactgtggagagtgtggactgagcttcagcaagatgacaaacctgctcagtcaccagcggatacactcaggggagaagccctacgtgtgtggggtatgtgagaagggcttcagcctaaagaagagcctcgccagacaccagaaggcacactcgggggagaagccaattgtgtgcagggagtgtggacgaggctttaaccggaagtcaacgctaatcatacacgaacggacacactccggtgagaaaccttacatgtgcagtgagtgtgggcgaggcttcagccagaagtcaaacctcatcatacaccagaggacacactcaggggaaaagccttacgtgtgccgggaatgtggcaaaggcttcagccagaagtcagctgtcgtgagacaccagaggacacacttggaggagaagaccatcgtgtgcagtgactgtggcctgggcttcagcgacaggtcaaacctcatctcccaccagaggacgcactctggggagaagccctacgcctgcaaggagtgtgggcgatgcttcaggcagaggaccacccttgtcaaccaccagaggacacactcaaaggagaagccctatgtgtgcggggtgtgtgggcacagcttcagccagaattcaaccctcatctctcacaggcggacacacactggggagaagccgtatgtttgtggggtgtgtgggcgaggctttagtctcaagtcacacctcaacagacaccagaacatacactcaggagagaagcccattgtgtgcaaggactgtggccggggcttcagccagcaatccaacctcatcagacaccagaggacgcactcaggcgagaagcccatggtgtgtggggagtgcgggcgaggcttcagccagaagtcaaaccttgttgcacaccagaggacgcactcaggggagaggccgtatgtgtgccgagagtgcgggcgaggctttagccaccaggccggtctcatcaggcacaagcggaagcactcgagggagaagccctacatgtgcaggcagtgtggactgggctttggcaataagtcagctctaattacacacaagcgggctcactcggaagagaagccttgcttttttagtccctggtccttccatcgggggccctctcaccaatacattgtccccagcactccagtcccacggcctggtcttgcagctgtgaccaagcagagccttggatctcagttacacccatatcagaccaccaagaaaatagataatctccaaccacccccagctataccacctcatcagcacctccataactacagtcaggcactgcataatgttcgtctgcgacggactgcatatacagtgtgtctggttttgctcaaaataagtgtccttcaagggaggcagggtgagaaacctactaagctgcaagcacaggccatttctcatggaaaaggaggaataacttggactgcagacatcatggagaatcactctcaggggcagtacggtgctactaagaatataagacttcataactggctaaaaatgagttttcctaacaacgtgggaccttacccctctaggaatgggccatcccaatcacaaaacttccagaggaacaatcaggcagcagcatttgcagttcaccaagatccgctgttctacagccaccgctgttccacagccaccgctgctgatatccaggcaaacagggtctggagtggacctctagcaaactccaacagacctgcagctgagggtccttcctgtctgttagaaggaaaactaacaaacagaaaggacatccacaccaaaaacccttctgtacgtcaccatcatcaaagaccaaaagtagataaagccacaaagatgggggaaaaacagagcagaaaaactggaaactctaaaaagcagagcacctctcctcctccaaaggaacgcagctcctcaccagcaatggaacaaagctggacagagaatgactttgacgagctgagagaagaaggcttcagatga

SEQ ID NO: 16846 - DNA, 1158 bp, Homo sapiens
  SIMILAR (865)..(1155): 791254mologous to Homo sapiens p40,accession number U93564,Smith-Waterman Score=402.
atgagcaaaggccaggaggctctaaacggaggggccaccgatcttggcgtagggatcgccttcgaccatgtgtcatggaggatccaaagaacagctgcttcatctaacagtgatgaaggtccaaggacagtgtgggggctccatgaagccatgggggcccgggctgcttcctgctcttccgccgtctttggttatctcacagctcaagatgaagatggcagatccccctgcagcctcacgctcatgtctggagccctccgagttgctgagttgagtaggaaacctgctgccatccctgtgctgggggatttgcacagtaagaaggaagccaattgcaatggagtagtctccgagcagcaggaaggcttgaaactcctctcttattctggcacatcctctgccgcatccctgaaacttggccatcggcactggagtgccagcaaggacacctccctctccctcagcctctcgcccatgccctccctgaatggcctcactcgctgcatgtggcagcagaagagatatacgtatggggagacgtgtccgcttggtgaacgagtgcgcataggtgggggaatgtgtgtattacgattggcacagatcactatgcatcatccgtgcggagacgaagcggtcactggaccaacagggctgtccgacgatcggatcatagacatgcatcgagtcccgtccgtggagtcagtctgtggcgtgcggtctagaaatggggccacgacgagttgtaaaggcacgtgcggacaggaagaaaggaatagcagcaacatcaaccaaaaggatatccacaccaaaaacccatctgtacgtcaccatcatcaaagaccaaaggtagataaaaccacaaagatggggaaaaaacagagcagaaaaaccagaaactctaaaaatcagagcgcctctcctcctccaaaggaacgcagctcctcactagcaactgaacaaagctggatggagaatgactttgacgagttgaaagaagaaggcttcagaagatcaagctactccgagctaaaggaggaagttcaaaccaatggcaaagaagttaaaaactttgaaaaaaaattagacgaatgggtaactagaataacaaatgcagagaagtccttaaaggacctgatggagctgaaaaccacagcatga

SEQ ID NO: 16847 - DNA, 1188 bp, Homo sapiens
  SIMILAR (799)..(1185): 741254mologous to Homo sapiens p40,accession number U93567,Smith-Waterman Score=498.
atgacgggctcatcattcagcctcgctcatctgctcatcatttcaggactgctctgttactcggcaggctgcttggacccacaaggggatgttccagacaaagcagatgggggaggtaaaagaggtgaggcaagactgggtcagccgtcatggagagatgggcgtgaagacgccaaagaggatggaatggatcagatgcacagaaagaagcataaaaggggagatgggggacaggggatcgaggaagcccttcccagcctggatcagaagaagcgtggtggccacaaagcatgctgcctgctgacgcctcctccaccaccactgttcccaccaccattcttcagaggtggccgaagtccgcttctctccccagacatgaagaatctcatgctggaactggagacctcgcagtccccgtgcatgcaaggctcgctaggctcccctgggcctcccggcccccaggtattgctaccaagcagcccacccctccccaccaaagctaaaggggaaacagtcaaaatgctgcagaaaggatttctagacaaacaagagtaccctccagagaccccaccccacagagtcctggcccctctggcctgcctccaagagggtgctccatcgcctctgctgctgatacccaggcaaacagggtctggaatggacctccggcaaactccaacagacctgcagcagagggtcctgactgttagaaggaaaagaaacagaaaggacatccacaccaaaaccccatctgtacatcaccatcatcaaagaccaaaggtagataaaaccacaaagatggggaaaaaacagagcagaaaaactgaaaattctaaaaatcagagcgcctctcctcctccaaaggaacgcagctcctcaccagcaatggaacaaagctggacggagaatgactttgatgagttgagagaagaaggcttcagacaatcaaactactctgagctaaaggaggaagttcgaacccatggcaaagaagttaaaaaccttgaaaaaagattagacgaatggctaactagaataaccagcgtagagaagcccttaaatgacctgatggagctgaaaaccatggcacaagaactacgtgacaaatgcacaagcctcagtagccgattcaatcaactggaagaaagggtatcagtgatggaagatcaaatgaatgaaatgaaatga

SEQ ID NO: 16848 - DNA, 945 bp, Homo sapiens
  SIMILAR (616)..(942): 781254mologous to Homo sapiens p40,accession number U93564,Smith-Waterman Score=445.
atgtccgaaagcctcaaaaccagggaagctgacagtgcagccttaagtctgcagccgaaggcccaagggccccagggaagatgctggcacaagtttcagagccagcgtctgaagatcctggagtctgatgtccaagggcaggaagagtggaaagaagcaaacatcctgcacgtgaagaagaaagagccagaagactcagcatgcaaatttatctcatcttctcctgctttctttgttccagctgcattggtagccaattggatgatgcccacccacattgagggaaaggagggagagaagaagggagagagaaaggtaggaaggagggaagaagagaacaaagaaaaaagaagggaagcagaaagggagaaagaaagaaagggagagagtgagggaggagggaaggaaggaaaggaaagacagcaggaaggaatgaaaggaagaaagaaggatgggagagggagggagggaggggacctgggatggaggaagaaagacttgcagctgagggtcctggctgttagaaggaaaactaacaaacagaaaggacatccacaccaaaaacccatctgtatgtcaccatcatcaaagaccaaaggtagatacaaccacaaaatgggaaaaagacagagcagaaaaactggaaactctaaaaatcagagtgcctctcctcctccaaaggaatgcagctcctcaccagcaatggaacaaagctggatggagaatgactttgatgagttcagagaagaaggcttcagacgatcaaactactctgagctacaggaggaaattcgaaccaacggcaaagaagttaaaagctttgaaaaaaaattagacgaatggataactagaataaccaatgcagagaagtccttaaaggacctgatggagctgaaaaccaaggctcgagagctacatgatgaatgcacaagcctcagtagctga

SEQ ID NO: 16849 - DNA, 618 bp, Homo sapiens
  SIMILAR (391)..(615): 781254mologous to Homo sapiens p40,accession number U93567,Smith-Waterman Score=321.
atgagtaaactcccattcacaattgcttcaaagagaataaaatacctaggaatccaacttacaagggatgtgaaggacctcttcaaggacctcttcaaggagaactacaaacaactgctcaacgaaataaaagaggccacaaacaaatggaagaacattccattctcatggataggaagaatcaatatcgtgaaaatggccatactgcccaagccaccgctgctgatacccaggcaaacagagtctggagtgtacctccagcaaactccaacagacctgcaactgagggtcctgttagaaggaaaactaacaaacagaaaggacatgcacaccaaaaacccatctgtacgtcaccatcaccaaagaccaaaggtagataaaaccacaaagatggggaaaaaacagagcagaaaaactggaaactctaaaaatcagagtgcttctcctcctccaaaggaatgcagctcctcaccagcaatggaacaaagttggatggaaaatgactttgacaagttgagagaagacggcttcagaagatcaaactactccgagctaaagaaggaagttcgaaccaatggcaaagaagttaaaaaccttgaaaaaaaattagacgaatag

SEQ ID NO: 16850 - DNA, 4609 bp, Homo sapiens
  SIMILAR (3287)..(3994): 981254mologous to Cloning vector pSacBII SacB,accession number U09128,Smith-Waterman Score=1257.
  misc_feature (1)...(4609): n = a,t,c or g
cagcagaaaactctgcagacctaaatgtccctgtctgacagcttggaagacagtagtggttctcccagcacacagctggagatctgagaatggacagactgcctcctcaagtggtccctgacccccaagtagccctaactgggaggcacccccccagtaggggtggactgacaccctcacatggccgggtacacctctgagacaaaacttccagaggaaccatcaggcagcagcatttgctgttcatcaatgttcaccagtatctgctgttccttgagcctccgctgctgataccccaggccaaacagggtctggagtggacctccagcaaactccaacagacctgcagctgagggtcctgtcgtgttagaaggaaaactaacaaacagaaaagaatagcatcaacattaaaaaaaaggacatccacaccaaaaccccatctgtaggtcaccagcatcaaagaccaaaggtagataaaaccacaaagatggggaaaaaaacagagcagaaaaactggaaactctaaaaatcagagcgcctctcctcctccaaaggaacgcagctcctcaccagcaatggaacaaagctggacggagaatgactttgacgagttgagagaagacagcttcagaagattggtaataacaaactactccgagctaaaggaggaagttcgaaccaatggcaaagaagttaaaaaccttgaaaaaaaattagacgaatggctaactagaataaccaatgcagagaagtccttaaaggacctgatggagctgaaaaccatggcacaagaactacctgaccaatgcacaagcctcagtagccgatgcgatcaactggaagaaagggtatcagtgatggaagacgaaatgaatgaaatgaagtgtgaagagaagtttagagaaaaaagaataaaaagaaatgaacaaagcctccaagaaatatggcactatgtgaagagaccaaatctacgtctgattggtgtacctgaaagtgacggggagaatggaaccaagttggaaaacactctgcaggatattatccaggagaacttccccaatctagcaaggcaggccaacattcaaattcaggaaatacagagaatgccacaaagatactcctcaagaagagcaactccaagacacataattgtcagattcaccaaagttgaaatgaaggaaaaaatgttaagggtagccagagagaaaggtcaggttacccacaaagggaagcccatccagactaacagctgatctcttggcagaaactctacaagccagaagagagtggggggccaatattcaacattcttaaagaaaagaattttcaacccagaatttcatatccagccaaactaagcttcatagacagatcaacgagacagaaagttaacaaggatacccaggaattgaactcagctctgcaccaagcggacctaatagacatctacagaactctccaccccaaatcaacagaatatacattcttttcagcaccacaccacacctattccaaaattgaccacatagttggaagtaaagcactcctcagcaaatgtaaaagaacagaaattataacaaactgtctctcagaccacagcgcaatcaaactagaactcaggattaagaaactcactcgaaaccactcaactacatggaaactgaacaacctgcttctgaatgactactgggtacataatgaaatgaaggcagaaataaagatgttctttgaaaccaacgagaacaaagacaaaacataccagaatctctgggacacattcaaaacagtgtgtagagggaaatttatagcactaaatgcccacaagagaaagcaggaaagatctaaaattgacaccctaacatcacaattaaaaggacttgagaagcaagagcaaacacattcaaaagctagcagaaggcaagaaataactaagatcagagcagaactgaaggagagggtcgggcgctggagaataggtgaagcagcggatttagttggggtttcttctcaggctatcagagatgccgagaaagcagggcgactaccgcacccggatatggaaattcgaggacgggttgagcaacgtgttggttatacaattgaacaaattaatcatatgcgtgatgtgtttggtacgcgattgcgacgtgctgaagacgtatttccaccggtgatcggggttgctgcccataaaggtggcgtttacaaaacctcagtttctgttcatcttgctcaggatctggctctgaaggggctacgtgttttgctcgtggaaggtaacgacccccagggaacagcctcaatgtatcacggatgggtaccagatcttcatattcatgcagaagacactctcctgcctttctatcttggggaaaaggacgatgtcacttatgcaataaagcccacttgctggccggggcttgacattattccttcctgtctggctctgcaccgtattgaaactgagttaatgggcaaatttgatgaaggtaaactgcccaccgatccacacctgatgctccgactggccattgaaactgttgctcatgactatgatgtcatagttattgacagcgcgcctaacctgggtatcggcacgattaatgtcgtatgtgctgctgatgtgctgattgttcccacgcctgctgagttgaatgactacacctccgcgagggaggnggaaaactctgactcaacacagcagtcacctgaaaatatttcccaaactcttcctcaaagggagctgctaccatattcagagtacctgaacacagtcgcgtacattatggagcctcaccaaatgcctcttggactaaattactcagggaaggaggaggaagagaatgagtggaagctgactttctcaagggattttgccgatttcggaaccaccatcaaacaggattttcgcctgctggggcaaaccagcgtggaccgcttgctgcaactctctcagggccaggcggtgaagggcaatcagctgttgcccgtctcactggtgaaaagaaaaaccaccctggcgcccaatacgcaaaccgcctctccccgcgcgttggccgattcattaatgcagctggcacgacaggtttcccgactggaaagcgggcactcgagacagcattcagcacgaagtggtttactaaaagccaatgtgctagaaaacttcagacagggacgttactcacacttttatggtggtataggatgtggaagtccaaatcatcccctggctggctctgtgtggataggggattctgggtacaagggtggcagaatgctgctgaacatttcaggaggagcgactcaagccttcgcgaaagaaaataaccaaaaagcatacaaagaaacgtacggcgtctctcatattacacgccatgatatgctgcagatccctaaacagcagcaaaacgaaaaataccaagtgcctcaattcgatcaatcaacgattaaaaatattgagtctgcaaaaggacttgatgtgtgggacagctggccgctgcaaaacgctgacggaacagtagctgaatacaacggctatcacgttgtgtttgctcttgcgggaagcccgaaagacgctgatgacacatcaatctacatgttttatcaaaaggtcggcgacaactcaatcgacagctggaaaaacgcgggccgtgtctttaaagacagcgataagttcgacgccaacgatccgatcctgaaagatcagacgcaagaatggtccggttctgcaacctttacatctgacggaaaaatccgtttattctacactgactattccggtaaacattacggcaaacaaagcctgacaacagcgcaggtaaatgtgtcaaaatctgatgacacactcaaaatcaacggagtggaagatcacaaaacgatttttgacggagacggaaaaacatatcagaacgttcagcagtttatcgatgaaggcaattatacatccggcgacaaccatacgctgagagaccctcactacgttgaagacgagggatcctntagaggattttgccgatttcggaaccaccatcaaacaggattttcgcctgctggggcaaaccagcgtggaccgcttgctgcaactctctcagggccaggcggtgaagggcaatcagctgttgcccgtctcactggtgaaaagaaaaaccaccctggcgcccaatacgcaaaccgcctctccccgcgcgttggccgattcattaatgcagctggcacgacaggtttcccgactggaaagcgggcagtgagcgcaacgcaattaatctctgaatcatttctcctggaaaacccagatgacctggctgacagcttcgtgtttctactgaaacctggtattccaacagacctgcagctgagggtcctgtctgttagaaggaaaactaacaaacagaaaggacatccacaccaaaaacccatctgtacatcaccatcatcaagaccaaaagtagataaaaccacaaagatggggaaaaaacagaacagaaaaactggaaactctaaaatgcagagcgcctctcctcctccaaaggaacgcagttcctcaccagcaacggaacaaagctggatggagaatgactttgacgagctgagagaagaaggcttcagatga

SEQ ID NO: 16851 - DNA, 678 bp, Homo sapiens; identical to SEQ ID NO: 11565
  SIMILAR (289)..(636): 911254mologous to Homo sapiens Similar to ribosomal protein S2,accession number BC001795,Smith-Waterman Score=545.

SEQ ID NO: 16852 - DNA, 1035 bp, Homo sapiens; identical to SEQ ID NO: 9452
  SIMILAR (370)..(1032): 931254mologous to Rattus rattus ribosomal protein S2,accession number X57432,Smith-Waterman Score=1051.

SEQ ID NO: 16853 - DNA, 1057 bp, Homo sapiens
  SIMILAR (130)..(963): 381254mologous to Rattus norvegicus ribosomal protein S2,accession number U92697,Smith-Waterman Score=244.
ggcacgaggcaaaacaccaaatggcggatgacgccggtggcagcggggggggcccgaaggccctggtgggccctgggatgggaaaaccccgttgctttccggcgaggttttcggcattgtcatccgggggccggggtcccggcccggtggacggggccggggccgagagccgcggagctcgcgggagcaaaggccgaggataaggattgggatgccggtcaccaagttggggccgctttggtcaaggaccattaaagatcaaagttcccctggaaggagatctatctcttctccctgccccattaaaggaatcagaggatcattgattttctttctggggggcctcctctcaaaggatgaaggttttgaatgattatgcccagtgcaagagcaagacccgtgcccggccagccgcacccaggcttcaaggccatttgttgctatcgggggactacaaatggcccacgtcggtctgggttgttaagtgctcccaaggaaggtggccaccggccatcccgtgggggcaatcatcctggccaagctctcccatcgttcccgtgcgcagaagggtatttggggaacaaagtattggcaaagccccaacactgtccctttgcaaggtgaacagggcgctgcggctctgtgctggtacgcctcatccctgcacccaaggggcctgggcatggtctccgcacctgtggcttaaaaagctgctcatgatggctggtatcgatgactgctacaccctcagcccgggggctgcactgccacccttgggcaaatttggccaagggccaccctttgattgccatttttaagaacctacaagctaccttgaccccccgacctctggaaaggaagattgtatttaccaagtttccctatcaaggagttcacttgaccacctcgtcaaagacccacacccagagtcttccgtgcagcaggactcagagctccagcttgtggctacaacatagggtttttatacaagaaaaataaagtgaattaagcgtgtaaaaaaaaaaacacagggcggccgctctagagtatccctcaa

SEQ ID NO: 16854 - DNA, 324 bp, Homo sapiens
  SIMILAR (165)..(1): 831254mologous to Escherichia coli yehO,accession number U00007,Smith-Waterman Score=203.
ctgcgcaagcatcgtcagcgccgcttcggaactggcgttgggatgttccaaacgcattagtgcgccaagagccgcgccgcgatccagcgccggggcatcaattgcctgactgcgtcgctccagtaaggcgctcgccgacgaagcctcgtccgggcctcctgggagcggggtgtcaggtaccgtggcgcctcctcgcgttggtcttgctggttctcggcccccaaagcggagcgacggagacacagctgtggaagcatctggatccgctgcccaggtccccgagcttcccggaacccgaggccgcaggacactgaaggctgccat

SEQ ID NO: 16855 - DNA, 4128 bp, Homo sapiens
  SIMILAR (420)..(2261): 1001254mologous to Homo sapiens helix-loop-helix protein,accession number M80627,Smith-Waterman Score=3191.
taaagggaccgacagcccgccccgggaggaaggggcgccaggcccgaaagccgcctccccctcccagacccgagagctcgtgcggggcaaagtgaaccgagccgctgggcgtgcaaggggaagcccaagcccgttctcccggccaaagtgaactttaatcggggtggttggatgcggagacggggcggcaggacctgctagaagtggccgaagatgaatccccagcaacaacgcatggccgctatagggaccgacaaggagctgagcgacctactggacttcagtgcgatgttttccccacctgttaatagtgggaaaactagaccaactacactgggaagcagtcaattcagtggatcaggtattgatgaaagagggaggtacaacatcttggggaacaagtggtcaaccaagtcctttcctatgattcatctagaggttttacagacagccctcattacagtgatcacttgaatgacagtcgattaggagcccatgaaggcttgtccccaacacctttcatgaactcaaatctgatgggaaaaacatcagagagaggctcattttccctgtacagcagagatactggattaccaggctgtcaatctagtctcctgagacaagatctggggcttgggagcccagcacagctatcttcttcaggaaaacctgggacagcatactattcattctctgctacaagttccaggaggagaccactccatgactctgcagcgcttgatcccttgcaagcaaaaaaagtcagaaaggtgcctcctggtttgccttcttctgtatatgcaccatccccaaattcagatgatttcaaccgtgaatctcctagttatccatctcctaagccaccaaccagtatgttcgctagcactttctttatgcaagatgggacccacaattcttctgacctttggagttcatcaaatgggatgagccagcctggttttggtggaattctggggacctccacttcccacatgtctcaatccagtagttatggcaaccttcattcacatgaccgcttgagttatcctccacactcagtttcaccaacagacataaacacgagtcttccaccaatgtccagctttcatcgcggcagtaccagcagttcaccttacgttgctgcctcacacactcctcccatcaatggatcagacagcattctaggaaccagagggaatgctgctggaagctcacagacaggtgatgcacttggaaaggctttggcatctatttattctcctgaccataccagcagtagttttccgtcaaatccatcaacaccagttggatcaccttcacctctcacaggtaccagtcagtggccaagacctggagggcaagcaccttcatccccaagctatgaaaactcactccactccctgcagtctcgaatggaggatcgtttagacagactggatgatgcaatccatgtgctgcggaaccatgctgtgggaccttccaccagtttgcctgctggtcacagtgatatacatagtttattgggaccatcccataatgcaccaattggaagcctcaattcaaactatggaggatcaagccttgttgcaagcagtcgatcagcttcaatggttggaactcatcgggaagactctgtcagtctcaatggcaatcattcagtcctgtctagtacagtcactacttcaagcacagacctgaaccataaaacacaagaaaattatagaggtggcttgcaaagtcagtctggaactgttgttacaacagaaatcaagactgaaaacaaagaaaaggatgaaaaccttcatgaacctccttcatcagatgacatgaagtcagatgatgaatcctcccaaaaagatatcaaggtttcatctagaggcagaacaagcagtactaatgaagatgaggatttgaaccctgaacagaagatagaaagggagaaggagaggcggatggctaacaatgccagagaacgcttacgcgtgcgggatattaatgaagcattcaaagagcttggccgaatgtgtcagcttcacttgaagagtgaaaaaccccaaacaaaactccttattcttcatcaagccgtggcagtcatccttagtctagaacagcaagtcagagagaggaaccttaaccccaaagcagcctgccttaagagaagggaagaagaaaaagtttctgccgtatcggcagagccgccaaccacactgccaggaacccatcctgggcttagtgaaactaccaaccctatgggtcatatgtaaacatcagccagttccagagttatcagtaggctagatagaaggtgacctctcctcataaggacttggacaactcagattatctgaagacacaaacctgacaggagggagaagaaaaaacaaaacacttgaaccaagaaactcaaatgtaatcctacgatcaaagcaactggtcaacacttccatcagaagtgaagataggaagctcatcagatagaacatcagcccatgagatgtttgcaacaaaccttttgttgcaagcagtgtgtcgcttctgcacaatcagagactgtctcgatctctccactcaccgtggaagttgccttgtgcctaaactgaattgacaaatgcattgtaactacaaattttatttattgttatgaaactgtaaggtctacatataaagggaaaaagttaatgtggaaagctgatctacactcagctgatgccagcatacattaaagcggttcacgtgcagagaacaaagcagtgacaaccattggcccttagcattcccggcatacctattagtgtcttaaaaaggaagggaaaagtcttttgttgccctctcctatcctcttgccatatgaatagcgttttccatgaaataggaaaatattacttggtatagcatttctcttgctctcattttttgatttatttttattttctctttgtgggtgttatatttgatctctaaatctgaacagtttatggtcacagtccagcctcctccgtgcagccctgtgtgctttgcacatttaccttacagtggtaagcagagaccatctgtgaccatagcctagctagcattttaaacggggaaattttgttctctaggttttcccccaaataaacattgctttatttctaataataaccaagacttttcaagcttctagatctcataggaaagcttgtaatagcaaaattgtaaattacaagggaagaatctactttttagaaatcgctttgttttccaagcagtaagtactacatacagtacttgtaaagtgttagctgtaagtaagcacaaaatacatttaaaatacaaagacgattttttcaggctgtgattatggtgaacataacaaaacccagtagtcaccgaggcaggtagtgtgataaatgaacacaccactctgaggctaattacctaatggaatacaagagcaatggtcacccgtatttccttatcctagcctttatttctctgtcatttggatggctggtcaatggggaagaattgagtgggtgatttaatcaactgcaaaccatctgcccctgtcccaaaatgatgagccagattagcattaaaccagtacttgtcagtccatcttaatactgttcattaaggcactctctgtctctaatccttaggagttgttttaaaagacataatcactttgaacttccatgaaacctgcctgccaccacaacaaccctgggagagaaaaacatgctaaaggaggtatcttggcttaataattccttatagccaatatcaacagtggcaatcagcacacagaggaaaggacccaaatcactatgtagcttaaagatttctgttaatttgaaagaacaaaaacaagacagaacttctggtactctaatcaggatgattcctaacaagtcagtcatttgtgaacttagtggactttttggttactttaatttgcatatattctccagttacatcggactctatctgtggccttgttcttcatttcagtgttaatcagctaaacagaagttgttgcttatgatgtgtgagtgaacatatgccactgcctggcccttttttcttcagagcttgttgtctttttcgctatattagactttgcagtatgcccagaagctttccttc

SEQ ID NO: 16856 - DNA, 1380 bp, Homo sapiens
  SIMILAR (631)..(924): 561254mologous to Homo sapiens putative p150,accession number U93569,Smith-Waterman Score=258.
atgtctgctctcaccacctccattaaacatttaactggaggttgtaagcaagaaaaagaaattaaaggcatccagatggaaaagaaagaagtagaactgtcattatttgaagacgacatgaccatctatgtaggaaatcctaaagaatctacaaaacagccaatgggactcccacattgccgagccagtggagaagccccaggctccatgtggtggctgctgacagctccagtttacataatccttactgttagcaatctcagtggaagagtgcatgcttccttcccacaggtgccagcaatagtcttcttacatttcactggctctgattgggatatgtggctagaggaatccagtagctcaggtctgattcatgtcattaatgtttttgaaaatgaagttcactccacccaaaagacattgactgaagtaacagaagaggaaaatcaggggatggttaccagaagaagggtgaatgttaccttgcgttccagggatgaagcccacttgattacagtggataagctttttgatgtgctgctggattcggtttgccagtattttattatggatttttgcatcgatgttcataggaagaatcaatatcatgaaaatggccacactgcccaagaattggaaaaaaccactttaaagttcatatggaaccgaaaaagagcccgcatagctgagacaatcctaagtcaaaagaacaaagctggaggcatcacgcttcctgacttcaaactatactacaaggctacagtaaccaaaacagcatgggacatggatgaagctggaatccatcattctcagcaaactatcacaaggacaaaaaaacaaacaccacatgttctcactcatagatgggaattgaacaatgagaacacttggacacaggaagccctcctggacgggagcctctgggcccagcttagggtggcgtccagcgtgacctactcgggaatggcagccttcagtgtcctgcggcctcgggttccgggaagctcggggacctgggcagcggatccagatgcttccacagctgtgtctccgtcgctccgcttcgggggccgagaaccagcaagaccaacgcgaggaggcgccacggtacctgacaccccgctcccaggaggcccggacgaggcttcgtcggcgagcggtcggggcctgcttctcgaggacctgctagaagtggccgaagatgaatccccagcaacaacgcatggccgctatagggaccgacaaggagctgagcgacctactggacttcagtgcgtactcctcaccattttcctctccagtatcagatgtagtttatggtacctgaaagatgtcagcgacaagaaaagtagtccagagctagaatttcgagccttctga

SEQ ID NO: 16857 - DNA, 554 bp, Homo sapiens
  SIMILAR (449)..(264): 351254mologous to Neisseria meningitidis hypothetical protein,accession number AJ242841,Smith-Waterman Score=75.
tttttttttttttgttttcttgatgtcttctttattttaacccggctagacttgtatttggaagatggctacccaccatccaggggacccgtttttttgaggacatgcagaaagaatgggttacctctgaagcgctctcagaaaatgaaagaaaaacttttcccaacaaagaccaggaaattgctcctctcattggcccaaatatgttacgctcattgccagccaataactgtggcagggaatgggattctgctgatttaggttggaattatgctacgttgcttagattgggaccacatgcccctgtaagtaggcagagcagggatgtgactcagaactgggcttgtttaccaagataaggaagagtggatactggggagtctaggccaccataagtttcaggtacagccaatgcaaagccttggaaatccacctgacagctccggttgtaccgtccgccctccgtatctggggtttccaaattccgggattcaatcaactctctttccatcccagtccggaatccaaaggctccttcttgccatgttgtcctc

SEQ ID NO: 16858 - DNA, 915 bp, Homo sapiens
  SIMILAR (737)..(823): 931254mologous to Homo sapiens helix-loop-helix protein,accession number M80627,Smith-Waterman Score=132.
atgagtataagagaaaaacggaacacctttcaggttaaagccaagccattatcagagctcctccaggatgtgattcaaagaaatagaggtggactcaatctccaggggacaagtactcccatattgcttccctttcaccctctcccaattcagccaatgggactcccacattgccgagccagtggagaagccccaggtatagaatccagacttgtatttggaagatggctacccaccatccaggggacccgtttttttgaggacatgcagaaagaatgggttacctctgaagcgctctcagaaaatgaaagaaaaacttttcccaacaaagaccaggaaattgctcctctcattggcccaaatatgttacgctcattgccagccaataactgtggcagggaatgggattctgctgatttaggttggaattatgctacgttgcttagattgggaccacatgcccctcttagggtggcgtccagcgtgacctactcgggaatggcagccttcagtgtcctgcggcctcgggttccgggaagctcggggacctgggcagcggatccagatgcttccacagctgtgtctccgtcgctccgcttcgggggccgagaaccagcaagaccaacgcgaggaggcgccacggtacctgccaccccgctcccaggaggcccggacgaggcttcgtcggcgagcggtcggggcctgcttctcgaggacctgctagaagtggccgaagatgaatccccagcaacaacgcatggccgctatagggaccgacaaggagctgagcgacctactggacttcagtgcgtactcctcaccattttcctctccagtatcagatgtagtttatggtacctgaaagatgtcagcgacaagaaaagtagtccagagctagaatttcgagccttctga

SEQ ID NO: 16859 - DNA, 1788 bp, Homo sapiens
  SIMILAR (921)..(853): 521254mologous to Homo sapiens PRO2325,accession number AF119876,Smith-Waterman Score=67.
atggccccaccagacgagtggatggggcaccttctgcaacaggcccagggccaagcagaggagcctcttcttgtggccaccagcaacaccaccacaagggagtttctctcaggccaccaccggtgttctcttaaggcccaaggactctccagtcagcttgtggtgaatgctgccaggcttgggactcaccctttagggcagtgggctcccctctggcccaaggcaggtccagaaatgctgaccaagggcctaggcctgcactcagggaccccaggggcctgcttcattccctactccactgcagctgagctggtacctgagctcccacagctgagaatttgcttggttacacctgaagccagcacatctcagagcccaaggcccatggcctatcacctgggtatggctgctgggtatttagggcccaagggctctttaatcagcagaaatgtctgttatgagctagagcctcatgactgcctggtgccctatcctactgtggctgagctggtatccaagatgtgcgtagattcttcaaaccaggcggccactgtcaagagatgggagacgggtggcattggcacttcaagactgtctttcctaccccccttcagtgcctctttcagtgatatgaagttaaaaccagctgcgccctgtgacatccctgattccgtgacgcgccggcctagcccttgcgggaccctatggccagagggtgcccggcgcgcgatgctttgcacagtttctggcgtcctgattccaatggtcaccaagctctgcacacttggccccagccgcagacttcggaaacttttggaagccgaatttctaagggaaggtcaaggaccgctacaaatcctctatgtcaatgggaagcactgggtccgcacctggcccctccccaagctcctcctggctgggtctatccagcatccagagagagatggtccccaaggcctggaggcgctttcccaacagcccaccactcctgagcatcaccgggccagacttttccgaggctcacctggcctacatgaagtggtggctttggaaggcccggcaccccaggcccgcccgcagcctggtggtcgagcttgtaacatcaacatcaacaaaaaagatgtcccatctgaagatcaccaacatcaaataacaaaggtagataaatccatgaagatgagggaaaaccagcacaaaaaggctgaaaattccaaacaccagaacgcctcttgtcctccaaaggatcataactccttgccagcaagggagcaaaactggatggagaatgaatttgatgaattgacagaagtaggcttcaaaacgtgggtaacaaccaactcttctgagctaaaggagcatgttctaacccaatgcaaggaagctaagcaccttgaaaaaagagcactgattggtccattttacagtgtgctagttggtccattttacagagtgcttactggtccatcttacagagtgctgattggtgcattttacaaacctctagctacctacagtgtgttgattggtgcattttacaatcctagctacagagtgctgattggtgcattttacaattctcttgtcttcattcaggcaactgagcattcggcaccatctcttcaggatcaacatctcagaagaaagcagaagacaacccaatcaattcttggcttttgggtttcaaagcctcaggggacaccggaaatgcctgatgagaaaaaggctaacttgtcacaccccacacgccctcctccaacgctgccagacaggacagattctccgtactga

SEQ ID NO: 16860 - DNA, 3039 bp, Homo sapiens
  SIMILAR (406)..(1014): 991254mologous to Homo sapiens PMS2L13,accession number AB017004,Smith-Waterman Score=1062.
atggatgttggctgggacctcggtgaggactgctggcaagaacacctacacacggccttttcctttgactgctggccttgctcacagaatggtgaccgggttcccagtgtgaacccagtgggcgggggggccccgcgctcctacctgcaagtggccagtgccgagtgctgggccgccgctcctgccgtgcatgttggggagccagtacatgcaggtgggctccacacggagaggggcgccgaccccgtgatagggctttacctggtacatcggggtggcgcgtgccagacaccaacggtcggaaaccgccagacaccaacgctcggaatccacgccaggccacgacggagggcgactacctcccttctgaccctgctgctggcgttcggaaaaaacgcagtccgtacagaacctgctaaggccatcaaacctattgatcggaagtcagtccatcagatttgctctgggccggtggtaccgagtctaagcactgcggtgaaggagttagtagaaaacagtctggatgctggtgccactaatattgatctaaagcttaaggactatggagtggatctcattgaagtttcaggcaatggatgtggggtagaagaagaaaacttcgaaggcttaactctgaaacatcacacatctaagattcaagagtttgccgacctacctcaggttgaaacttttggctttcggggggaagctctgagctcactttgtgcactgagtgatgtcaccatttctacctgccatgtatcggcgaaggttgggactcgactggtgtttgatcactatgggaaaatcatccagaaaaccccctacccccaccccagagggatgacagtcagtgtgaagcagttattttctacgctacctgtgcaccataaagaatttcaaaggaatattaagaagaaacgtgcctgcttccccttcgccttctgccgtgattgtcagtttcctgaggcctccccagccatgcttcctgtacagcctgcagaactggcccctctcctgcctggacggctctgctggtctccccgtcccctggagaagaacaaggccatgggtcggcccctgctgctgcccctactgcccttgctgctgccgccagcatttctgcagcctagtggctccacaggatctggtccaagctacctttatggggtcactcaaccaaaacacctctcagcctccatgggtggctctgtggaaatccccttctccttctattacccctgggagttagccacagctcccgacgtgagaatatcctggagacggggccacttccacaggcagtccttctacagcacaaggccgccttccattcacaaggattatgtgaaccggctctttctgaactggacagagggtcagaagagcggcttcctcaggatctccaacctgcagaagcaggaccagtctgtgtatttctgccgagttgagctggacacacggagctcagggaggcagcagtggcagtccatcgaggggaccaaactctccatcacccagggctccagcgcggcccaagcctccacgaggagcgccgccccctgctccacggcgcccggtcccatcgaccgcccaagggccgaggagtgcgggagcaaggcgcagaactggcaggcagctctacctgctgcctggtcccttggctgcaaaaggaagagggagtgtttggatgaatctgatgatgagccagagaaggagctcgcccctgagcctgaggagacctgggtggcagagacgctgtgtggcctcaagatgaaggcgaagcgacggcgagtgtcgctcgtgctccctgagtactacgaggccttcaacaggctgcttgcccctggggtagatcccagccccccacgtaggtcccttggctgcaaaaggaagagggagtgtttggatgaatctgatgatgagccagagaaggagctcgcccctgagcctgaggagacctgggtggcagagacgctgtgtggcctcaagatgaaggcgaagcgacggcgagtgtcgctcgtgctccctgagtactacgaggccttcaacaggctgcttgcccctggggtagatcccagccccccacgtaggtcccttggctgcaaaaggaagagggagtgtttggatgaatctgatgatgagccagagaaggagctcgcccctgagcctgaggagacctgggtggcagagacgctgtgtggcctcaagatgaaggcgaagcgacggcgagtgtcgctcgtgctccctgagtactacgaggccttcaacaggctgcttgcccctggggtagatcccagccccccgcgtaggtcccttggctgcaaaaggaagagggagtgtttggatgaatctgatgatgagccagagaaggagctcgcccctgagcctgaggagacctgggtggcggagacgctgtgtggcctcaagatgaaggcgaagcgacggcgagtgtcgctcgtgctccctgagtactacgaggccttcaacaggctgcttgaggatcctgtcattaaaagattcctggcctgggacaaagatctgagggtgtcagacaagatcccatcggagcccaccatcctgggagcatcacctaaaacccttcctccggcttctcggatttgcatccgaccttcgaatacccctccaccccgcaatttccacatgagcacagtcaccccaatgctgagctatctggccaatgacatggaggaggacgacgaggcccccaaacaaaagatcttctacttcctgtacgggaagacccactctcacatacccttgcgccctaagcattggttccagttatgccgtcccatgaacccgagggccaggaagaactgctctcagatagccttgttccagaagcgtcggttccagttcttctgttccatgcgctgcagggcttgggtttccccggaggagttggaggagaacaccggacccaggggagatgtggattttcagcaggaactttattccagtgctaatggcagacatcaggaaggaggagaggagccatttgtgcagatcatctag

SEQ ID NO: 16861 - DNA, 712 bp, Homo sapiens; identical to SEQ ID NO: 488
  SIMILAR (614)..(381): 341254mologous to Pseudorabies virus glycoprotein gX,accession number U27488,Smith-Waterman Score=89.

SEQ ID NO: 16862 - DNA, 513 bp, Homo sapiens; identical to SEQ ID NO: 14371
  misc_feature (1)...(513): n = a,t,c or g

SEQ ID NO: 16863 - DNA, 1338 bp, Homo sapiens; identical to SEQ ID NO: 493
  SIMILAR (6)..(131): 351254mologous to Homo sapiens keratin associated protein 4.14,accession number AJ406944,Smith-Waterman Score=79.

SEQ ID NO: 16864 - DNA, 578 bp, Homo sapiens; identical to SEQ ID NO: 14373
  SIMILAR (341)..(156): 391254mologous to Human herpesvirus 6 DR4,accession number X83413,Smith-Waterman Score=79.

SEQ ID NO: 16865 - DNA, 808 bp, Homo sapiens; identical to SEQ ID NO: 14374
  SIMILAR (259)..(360): 731254mologous to Homo sapiens homologue of yeast PMS1,accession number D38436,Smith-Waterman Score=125.

SEQ ID NO: 16866 - DNA, 1305 bp, Homo sapiens; identical to SEQ ID NO: 14375
  SIMILAR (145)..(597): 881254mologous to Homo sapiens putative p150,accession number U93563,Smith-Waterman Score=674.

SEQ ID NO: 16867 - DNA, 1564 bp, Homo sapiens; identical to SEQ ID NO: 14376
  SIMILAR (980)..(1453): 861254mologous to Homo sapiens putative p150,accession number U93563,Smith-Waterman Score=691.
  misc_feature (1)...(1564): n = a,t,c or g

SEQ ID NO: 16868 - DNA, 1812 bp, Homo sapiens; identical to SEQ ID NO: 14377
  SIMILAR (1534)..(1427): 971254mologous to Homo sapiens homologue of yeast PMS1,accession number D38435,Smith-Waterman Score=188.

SEQ ID NO: 16869 - DNA, 1724 bp, Homo sapiens
  SIMILAR (496)..(1041): 661254mologous to Oryctolagus cuniculus 597 aa protein related to Na/glucose cotransporters,accession number U08813,Smith- Waterman Score=546.
  misc_feature (1)...(1724): n = a,t,c or g
tgggggaggattatggattaggcttctggactcgtggttcgtgatgttgtcacgttagaaacagatctagcacggttacaagtttagatctgaagtgacacaaaaggccccagctgtgatgaagtccaaagccacattctctgaagggtgccctactccctgggaagacccacccaaagtccttgctatgaagcagatcactggggctgaccttgggtgtattaagtgagttttggagtcgtggtcaccaaaatgtgagtttcacagttgaacacgatggttcagaagcagggtatagaatgaaaggcagcagataaaattgtatttctcaattgctctgaactctagctagacttgacatgggacgtgaataaccttcctgtctagagagctgtctccttgaggtgtgacattgtctctctcacttccagaacaccggacccaggggagatgtggattttcagcaggaactttattccagtgctaatggcagacatcaggaaggaggagaggagccatttgtgcagatcatctagaagaacctggaccattcttgacaagagctgaatacagggatcacgcttgtcctccaaggagcaggggtggggttggggtacttctaggaaatncaaattttgcagggctgtacaggaagcatggctggnggaggcctcaggaaactgacaatcacggcagaaggcgaaggggaagcaaggcacgtttcttcttaatattcctttgaaattccttatggcgcacaggtagcgtagaaaataactgcttcacgctgactgtggtccctctggggtggggggtagggggttttctgggatgattttcccatcgtgatccaacaccagtcagagtcccaacccttcgctgatacacgggaggtagaaatggtgacatcactcagtgcacaaagtgaggctcagagcttccccccgaaaagccaaagtttcaacccgagttaggtcggcaaactctcgaatcttagatgtgtgatgtttcagagctgaaagagattaaggccttcgaagttttcttcttctaccccacatccattgcctgaaacttcaatgagatccactccatagtccttaagctttagatcaatattagtgggcaccagcatccagactgttttctacaatcttcttcaccgcagtgcttagactcagtactaccggcccagagcaaatctgatggactgacttccgatcaataggtttgatggccttagcaggttctgtactccagctctcagctcgctccaaggatgcaacaccggatccgcctcggggactgggaaagttccctccacggctcccacaggcgccccgcctcctgggctcccaacggctgctttcgacgttgtgctccaccctttccgggcggggcggaaaaaatacttcccgtctctccttttcgcctagtggctctgtcaaaggtcgagtccgtgacgtcaaagagcctggaccaatcagagcacaccggactgcgttttttccgaacgccagcagcagggtcagaagggaggtagtcgccctccgtcgtggcctggcgtggattccgagcgttggtgtctggcggtttccgaccgttggtgtctggcacgcgccaccccgatgtaccaggtaaagccctatcacggggtcggcgcccctctccgtgtggagcccacctgcatgtactggctccccaacatgcacggcaggagcggc

SEQ ID NO: 16870 - DNA, 1553 bp, Homo sapiens
  SIMILAR (169)..(546): 381254mologous to Homo sapiens expressed ubiquitously; product similar to D.melanogaster mam protein,accession number D83785,Smith-Waterman Score=172.
atggcgatggtctggatgtgtgcaggacccacgctgcaccaactggaggacctacctggatttctgcaaatcacgctgaaaaaaggggctttatttcctctttggacacacaacgtaaggatgaaagaacaacaatctttaggtcatgcagacctccctgatggcatccagaagtttcaccgaggggtgcagacagtgttgatcattggggatgtcacctcccggatacccacctcactcatgaaagcccccagttatgtgagagttcaagtcagtcggtttgtccagaagaaggccatggacagaacggagactaggttccgtaagaggggacagattacgggaaagatcacgaccagccgtcaactgcacccccagaatgagcagagtccccagcggagcacctcggggtaccccctccaggaggtggtggatgatgaagtgttgggaccatcagcccctggggtagatcccagccccccatgtaggtcccttggctggaaaaggaagaaggagtggtcagatgaatctgaggaggagccggagaaggaagctcgcccctaagcctgaggagacctgggtagaggagatgctgtgtgggctcaagatgaagctgaagcaaccgcgagtgtcatccatcctccctgagcaaccacaaggacctaaacagtcagcttgcccctggggtagatcccagccccccgcataggtccttttgctggaaaaggaagatggagtggtgggacgaatctgaggagtcgttggaggaggagccacggaaggtgctcgcccctgagcctgaggagatctgggtggcggagatgctgtgtggcctcaagatgaagctgaagcgacggcgagtgtcgctcgtgctccctgagcaccacgaggccttcaacaggctgcttgaggatcctgtcattaaaagattcttggcctgggacaaagatctgagggtgtcggacaagtatctcctggctatggtcatagcgtatttcagccgggccggcttcccctcctggcaataccaacgcattcatttcttcctggctctctacctggccaatgacatggaggaggacgacgaggactccaaacaaaacatcttccacttcctgtatgggaagacccgctctcgcatacccttgctccgtaagcgttggttccagttaggccgttccatgaacccgagggccaggaagaaccgctctcgcatacccttgctccgtaagcgtcggttccagttaggccgttccatgaacccgagggccaggaagtaccgctctcgcatacccttggtccgtaagcgtcggttccagttacgccgttgcatgaacccgagggccaggaagaaccgctctcagatagtcctgttccagaaacttcggttccagttcttctgttccatgagcggcagggcttgggtttccccggaggagttggaggagaacaccggacccaggggagatgtggattttcagcaggaactttattccaatgctaatggcagacaccaggaaggagaagaggaaccatttgtgcagatcatctag

SEQ ID NO: 16871 - DNA, 561 bp, Homo sapiens
  SIMILAR (640)..(1188): 911254mologous to Homo sapiens p40,accession number U93569,Smith-Waterman Score=851.
atgctgcctgatcacctcaaaagccctgtagaccaccacagacgccgagcttcgagtaactctcacagtggaagtgcggaaggtgaagcgcgtccgctgaaaatcggtatttttcaggatttggtcgatcgtgttgctggggaaatgaacctgagcaaaacgcaattgcgatccgctttacgtctctacacttcgagctggcgttatctttacggtgttaaacccggcgcaacgcgtgtcgatcttgacggcaacccatgcggaacgcaatatggagaaaattctgataaaggagaatttttctatggaatatgtctaaatgctgattatctggcagacttgactttgtcactcttagagaatggaaatctgcacttggttcacgtgggtacaggaagaatgcttttgaaggaccctcattatggtggtgcttgtctttttccggcttatgccgtggctgccgtccctgaagttttgcaggccgtggcgctgccattgtcaataatgtttaagggagtaccatctgtcggttgggaaacacttgtgatattgagtcattga

SEQ ID NO: 16872 - DNA, 768 bp, Homo sapiens
  SIMILAR (512)..(309): 951254mologous to Homo sapiens nonmuscle myosin heavy chain (NMHC),accession number M31013,Smith-Waterman Score=324.
atggctaaaagaagccaacatacagctcaggccattgcttcacagggttcaggccccaaaccttggcagcttccacatggtgttgggcctgcaggtgcacagaagtcaagagttgaggtttgggaacctctggctagatttcagaggatgtatggaaaggcctggatgtccaggcagaagtttgctgcagggcagagtcctcatggagaacctctgctagggcaatgcagaagggaaatctttgagaagagggccactatcctccagacccagaacagtagatccaccgacagtttgcatagtgtgcctggaaaagccacagacactcaaggccagcccatgaaagaagccaggagtggagctgtaccttgcaaagccatagagtcagagctgcccaagactctgggttcccaccttttgcatccgtgtgacctgaatgcatcagctgagtttggcctggtttttctttgtgctctaacaggacagcagcgagttcagtgcttcacaattgctgtgtctctcacagtggtcaaggaggctcactgcaccaagccacagctgcctggggtcaatgagctgaaagagaagggcaacaaggccctgggcgtggaaaacatcgacaatgccttacagtgctactctgaagccattaagctggatccccacaaccacgtgctctacagcaactgttctgccacctatgccaagaaaggagactaccagaaggcttacaaggacggctgcaagaccgtcgacctaaaagtttga

SEQ ID NO: 16873 - DNA, 418 bp, Homo sapiens
  SIMILAR (614)..(504): 451254mologous to Homo sapiens gastric cancer-related protein VRG118,accession number AF320072,Smith-Waterman Score=72.
gctcatcactcttggggttccccaggaccttgagcacctcggcgttggtggggttctggcccagggccctcatcacgtccccacactggctgtacaggatcttgccatcccccactcggtcaaacagctcgaaggcctccttgaactcctccagctggtccttgttaaactcgatcaccactttggagagatcgactggaggctcctgggttttctgaggggcctgggggacagctggctcagctttggtcttggctggaggagcccctgctgctgctggcttagcagcaggtttggagatggagggccctgctggtttcttcacgggaacatccttcttgggaggcatgatgtccggtggccaaaggacagtgtgcggatgggggcacccatctcctgcggggtccgtgtctggggc

SEQ ID NO: 16874 - DNA, 1968 bp, Homo sapiens
  SIMILAR (649)..(1551): 841254mologous to Mus musculus FYVE finger-containing phosphoinositide kinase,accession number AF102777,Smith-Waterman Score=1372.
ctagttgatgctgtcctcatgtcctgccagaacagtctccatctcctcctcagccatcttccctcccagggtggtgaggacttgtctgagctctgctcccgtgactttgctgttcccctccttgactaacacatgaagcccctccaggtagtcctcatatgtgccttggttctgcttcttggctgctgcctggagcatgggcaggaaagtcttgaagtccacatgccgggacttcaggtcatcactcttggggttccccaggaccttcatcaccttggcactggtgaggttctggtccagggcccccatcatgtccccaaactggctgtatgggatcttgccatcccccactcagttaaacagcttgaaggccaccttgaactcctccagctgatccttgttaaacttgatcaccactttggagagatcaactgggggctccttggttttctcaggggcctgggggatgggatagctggctcagctttggtcttggctggaggggcccatgctgctgctggcttggcagcacctttggagatggagggccctgctggttcctcccagaatatccttgggaggcatgatgtctggtggccaaaggacagtgtgcggatgggggcacccatctcttgcaggactcatgaaatggccacagatgataagacgtccccaacactggactctgctaatgatttgcctcgatctcctactagtccttctcatctcacacactttaaacctttgactcctgatcaagatgagcccccttttaaatcagcttatagttcttttgtaaatctctttcgttttaacaaagagagagcagaaggaggccagggagaacagcagcctttgagtggaagttggaccagccctcagctcccttcgaggacacagtctgttaggtcacccacaccttataaaaagcagcttaatgaggaactccagcggcgctcttcagcattagacacaagaaggaaagcagaacctacctttggaggtcatgaccctcgtacagctgttcagcttcgaagcctcagcacagtattaaaacgcctcaaggaaatcatggaggggaaaagccaggatagtgacctgaaacaatactggatgccagatagccaatgtaaagagtgctatgactgtagtgagaaatttacaacctttaggcgcagacaccattgccgactatgtgggcagattttctgcagtcgttgctgtaatcaagaaatccctggaaaatttatgggctatacaggagacctccgagcttgcacatattgtagaaaaatagccttaagttatgctcattccacagacagtaattctattggggaagacttgaatgctctttcagattctgcttgctctgtgtctgtgcttgatccaagtgaaccccgaacacctgttgggagtaggaaagccagccgtaacatatttttagaggatgatttggcctggcaaagttggcattctgttggtggggaaccagccaaaaaggcttctggaatgttgtccttcttcagagggacagcagggaaaagccccgatctctcttcccagaagagagagaccttacgtggagcagatagtgcttactaccaggttgggcagacgggcaaggaggggaccgagaatcaaggcgttgagcctcaagtaatgaatcccccggtggaactcagggagaaggagggtttagcttggacactgtgtgtccaggaccgtgggaagggggcaggctgtgttgctcagaggcatctggtgcaagaaactgctaaggacttcaaaacagatcaacacatccagagcacagctgctggtgctttgcaggagaaaagtgacgtctatcaggttggcctctctggagacaccgagctgtgtgcaatccaggccaaatgtgtaacaattatgccaaaagacatccatgctgcattcatggagaacttgcttgacaatccactatga

SEQ ID NO: 16875 - DNA, 1065 bp, Homo sapiens
  SIMILAR (1564)..(2679): 401254mologous to Arabidopsis thaliana polynucleotide phosphorylase,accession number Y14685,Smith-Waterman Score=663.
atggacaacttcttcgcccccgttttcaccatgggcaaatattatacgcaaggcgacaaggtgctgatgccgctggcgattcaggttcatcatgccgtttgtgatggcttccatgtcggcagaatgcttaatgaattacaacagtactgcgatgagtggcagggcggggcggctgctacaattgcctgggggttcacttcaggccttattcatctgattcactcctgtgcctggagatgtcactcaaggaggctggagagcagcaaagatgggttcctcttccttcttctgggacctctgccctcaggagacaccaacctgatgccagtacgatcactcctgtataggatgtctgacaacccttgctggaaggtctcacccagttgggtagcacaaggagcaagacctgttctaagaagcactttgtcctttggaggaggggtgacaaacaagaaacccacacaggcgtccatcacaaaggtcaaacagtttgaaggctccacatcatttgttcggagatcacagtggatgctcgagcagctttcgccagaattaaatccaagacctagcttgctgcctgttgtcgacttaaagatcccccttgagaagaatccctttgctggaaatatttctgcgctggctgatgcggaaaatatttcacgtaagattattacccgctgtatcaacaccgccaaattgcctaaatcagttgttgctcttttttctcaccccggtgaactatctgcccggtcaggtgatgcacttcaaaaagcctttacagataaagaggaattacttaagcagcaggcatctaaccttcatgagcagaaaaaagctggggtgatatttgaagctgaagaagttatcactcttttaacttctgtgcttaaaacgtcatctgcatcaagaactagtttaagctcacgacatcagtttgctcctggagcgacagtattgtataagggcgataaaatggtgcttaacctggacaggtctcgtgttccaactgagtgtatagagaaaattgaggccattcttaaggaacttgaaaagccagcaccctga

SEQ ID NO: 16876 - DNA, 561 bp, Homo sapiens
  SIMILAR (503)..(195): 971254mologous to Homo sapiens Human secreted protein encoded by cDNA clone 4031301,accession number B14319,Smith-Waterman Score =558.
atggagactgggaagtccaaaatctgcaaggcaggctggcaggttggaggcccaagaaggagccagtattgcagtacaagtccaaaggccttctaccagcaggattccttcttgcttggggaggtgtcctgtagaaacagcactgaatgtggaaacaaaccaccaacttgcaggtgcactaatctgagtgatcttttcttggcagtgacaaacaagaaacccacacaggcgtccatcacaaaggtcaaacagtttgaaggctccacatcatttgttcggagatcacagtggatgctcgagcagcttcgccaggttaatggtatcgatcctaatggggattcggcagagtttgatttgttgtttgaaaatgcttttgaccagtgggtagccagcacagcgtcagaaaaatgcaccttcttccagatcctccaccatacctgccagaggtacctcacggacaggaagccagagtttattaactgccaatccaaaattatgggaggtcatccttcagtgatcccacaatcatttactcagcgctatgtaaatgtgctaaactag

SEQ ID NO: 16877 - DNA, 1387 bp, Homo sapiens
  SIMILAR (659)..(276): 1001254mologous to Homo sapiens Human secreted protein encoded by cDNA clone 4031301,accession number B14319,Smith- Waterman Score=704.
aagttctgctccttcataaggaccttgaagtactaggaggaaaggtgctttgtgtgtggagttttccatgaagtgcagtcccaactaaaaggctgcgttaaagattcactgcgtgctgtcctcacttgttctacaatgagtgccaaatctgctatcagcaaggaaatttttgcacctcttgatgaaaggatgctgggagctgtccaagtcaagaggaggacaaagaaaaagattcctttcttggcaactggaggtcaaggcgaatatttaacttatatctgcctgtcagtgacaaacaagaaacccacacaggcgtccatcacaaaggtcaaacagtttgaaggctccacatcatttgttcggagatcacagtggatgctcgagcagcttcgccaggttaatggtatcgatcctaatggggattcggcagagtttgatttgttgtttgaaaatgcttttgaccagtgggtagccagcacagcgtcagaaaaatgcaccttcttccagatcctccaccatacctgccagaggtacctcacggacaggaagccagagtttattaactgccaatccaaaattatgggaggaaacagcatcctccattcagctgctgacagcgtgaccagcgcagtgcagaaggcaagccaggccttgaatgagccgtggagagcggattaggccgagcagaggagaagacagaagacctgaagaacagcgcccagcagtttgcagaaactgcgcacaagcttgccatgaagcacaaatgttgagaaactgcctatcctggtgactcttcttaagagaaactgaagagtttgttcagcagtttttacaagaattcgggacctccgcttgcttctttttttccaatatttggacacttagagtggtttttgttttttcttttcagatgttaatgtgaaagaaagggtgttgcatttttacatttccctaatgatcttgctaataaatgctacaatagcatcggcttcattttgggtttttgcctcctcccactgtgtgtatgtgtgtatatgtatgttttgaatatgttttctttattaaaaaatattttttgtagtttggaatatgaaatttggaccaaatgataaactgcgctgagtctaaactggcaacatgtatttttttctctgatattaagcaggaaggcattttaatgtggtgacatcagatgttatttttcctagatgaaaataaaagtcaagcagtgattagtttccactcactggtcctagctacacttaatttgaagattaaaattctacattgtgggaaaacaattgaatttattgggaaaaacagcaggtccttagattttgctccttgcatagtaatcttttgcatgaaccatcaccagcgttcaaaa

SEQ ID NO: 16878 - DNA, 1017 bp, Homo sapiens; identical to SEQ ID NO: 12085
  SIMILAR (828)..(694): 731254mologous to Homo sapiens Human secreted protein, SEQ ID NO: 7217,accession number G03136,Smith-Waterman Score=167.

SEQ ID NO: 16879 - DNA, 2967 bp, Homo sapiens
  SIMILAR (2062)..(2964): 831254mologous to Homo sapiens dJ680N4.3 (G-protein coupled receptor),accession number AL121755,Smith-Waterman Score=1238.
atgggcgaggacttcatgactaaaacaccaaaagcaatggcaacaaaagccaaaattgacaaatggcatctaattaaactaaagagcttctgcacagcaaaagaaactaccatcagaatgaacaggcaacctacagaatgggagaaaatttttgcaatctacccatctgacaaagggctaatatccagaatctgcaaagaacttaaacaaatttacaagaaaaaatcaaacaactccatcaataagtgggcaaaggatatgaacagacacttctcgaaagaagacatttatgcaaccaaaagacacatgaaagaatgttcatcatcactggccatcagagaaatgcaaatcaaaaccaccatgagatactatctcacaccagttagaatggcaatcattaaaaagtcaggaaacaacaggtgctggaaaggatatggagaaataggaacacttttacactgttggtgggactgtaaactagttcaaccattgtggaagacagtgtggcgattcctcaaggatctagaactagaaataccatttgatccagcgatcccattactgggtatatacccaaaggattataaatcatgctgctataaagacacatgcacacgttcaatcctgtatgcccagagcttcctgggcaccagtcatttgaatgggcagttcctgtgtttaaccaggaaggtcgtgggaggatttcgaacctgtcagaagcaaagtgaagggctccagactctccggacagatgggctgaggcactcctgggattgtctttatacggccatggaatctgatagtggtggtcatcgcaaagtttggaaacccggctactgtgtggtccgattcagacgggatgcgaaggcgctgaaatccgtgcgagaggctgcccccgctgccggggactcgcgtcagcgcggccggagctacggtgcccgcgccctggacgcaccagcccgagagcacgcggagtggaccaaatgcattgttcagctgggtcatctccttgctacccagcatcccgcggcgcccacatgtggagtcgtttccagcgccctggtcatgcactcaacagatgtctgtctagcccccactatgcaccaggcactggactgggcagcaggaatttggtttacaggaagattaggactcagagagcataaatcactggcccagggtgactcagtctgtccatgtgaaagtgaacttggtgatttccaagtctatggcttggtcagtacagaaggagtggtgtcctgctttggagagaagaccccgcagcatcctggccctcctgcttcattgtccctggccaacaggtgccacaacgttgtgacagctgtaggagcctggccagctcatgggagcatccttggaaatgttccagaagcccctgtgggagctgatgtgttgggggctggaggatgtgactgggcagacaaagaggccctggcccctgggcaaagggcaaaggtgcacattcttcttgagagttctggacagtctgatccatcctatgctgtccttcctgacagctgggcagccacggagggtttcccaacttacagatctcaggtctcctctccccgcatcccgggtagttccatctggttaggcagtgggtctggttggcctatacttggggaactcagggaatgtgaccagatgttctcctgcatgttgcccactggttgtgcctccttccaggatccaggacgttatggtgattatgacctccctatggatgaggatgaggacatgaccaagacccggaccttcttcgcagccaagatcgtcattggcattgcactggcaggcatcatgctggtctgcggcatcggtaactttgtctttatcgctgccctcacccgctataagaagttgcgcaacctcaccaatctgctcattgccaacctggccatctccgacttcctggtggccatcatctgctgccccttcgagatggactactacgtggtacggcagctctcctgggagcatggccacgtgctctgtgcctccgtcaactacctgcgcaccgtctccctctacgtctccaccaatgccttgctggccattgccattgacaggttttcttccaccatctatgacagcttcttgatctgtccccaggtgggtggctgtgttcaacgggtgttgcttgtgacagttggggtcctcctcagcatcagtctcgacatgactgcaaatggggggtcctcgggatcctcctggaatctcttcctcagcatctggctcatgataagatatctcgccatcgttcaccccttgaaaccacggatgaattatcaaacggcctccttcctgatcgccttggtctggatggtgtccattctcattgccatcccatcggcttactttgcaacagaaacggtcctctttattgtcaagagccaggagaagatcttctgtggccagatctggcctgtggatcagcagctctactacaagtcctacttcctcttcatctttggtgtcgagttcgtgggccctgtggtcaccatgaccctgtgctatgccaggatctcccgggagctctggttcaaggcagtccctgggttccagacggagcagattcgcaagcggctgcgctgccgcaggaagacggtcctggtgctcatgtgcattctcacggcctatgtgctgtgctgggcacccttctacggtttcaccatcgttcgtgacttcttccccactgtgttcgtgaaggaaaagcactacctcactgccttctacgtggtcgagtgcatcgccatgagcaacagcatgatcaacaccgtgtgcttcgtgacggtcaagaacaacaccatgaagtacttcaagaagatgatgctgctgcactggcgtccctcccagcgggggagcaagtccagtgctgaccttgacctcagaaccaacggggtgcccaccacagaagaggtggactgtatcaggctgaagtga

SEQ ID NO: 16880 - DNA, 2716 bp, Homo sapiens
  SIMILAR (259)..(1593): 1001254mologous to Homo sapiens CDS2 protein,accession number Y16521,Smith-Waterman Score=2376.
gggagagggagctctcgggtcggggctagggaaggctgaaccccgctcggcccgggtgaaagggcggtgacggcactgggtggggccgagctccagggctggctgctgggctgctaagggaactgtgagccgctcagagccgcgcgcctcccgggcggggcggggccggccgtgggagtccgcgcgtgcccgcgccgagctgcctgctccggcggcttcgctgctagctcgcggcgacgtcgggccgattttcccaggatgacagagctgaggcagagggtggcccatgagccggttgcgccacccgaggacaaggagtcagagtcagaagcaaaggtagatggagagactgcatcggacagtgagagccgggcagaatccgcacccctgccagtctctgcagatgataccccggaggtcctcaatagggccctttccaacttgtcttcaagatggaagaactggtgggtgagaggcatcctgactttggccatgattgcatttttcttcatcatcatttacctgggaccaatggttttgatgataatcgtgatgtgcgttcagattaagtgtttccatgagataatcactattggctacaacgtctaccactcatatgatctgccctggttcaggacgctcagctggtactttctcctgtgtgtaaactatttcttctatggtgagacagtgacggattacttcttcaccctggtccagagagaagagcctttgcggattctcagtaaataccaccggttcatttcctttactctctatctaataggattctgcatgtttgtactgagtctggtcaagaagcattatcgactgcagttctacatgtttggctggacccatgtgacattgctgattgttgtaacacagtcacatcttgttatccacaacctatttgaaggaatgatctggttcattgtccccatatcttgtgtgatctgtaatgacatcatggcctatatgtttggctttttctttggtcggaccccactcatcaagctgtccccgaagaagacctgggaaggcttcattgggggcttctttgctactgtggtgtttggccttctgctgtcctatgtgatgtccgggtacagatgctttgtctgccctgtggagtacaacaatgacaccaacagcttcactgtggactgtgagccctcggacctgtttcgcctgcaggagtacaacattcctggggtgatccagtcagtcattggctggaaaacggtccggatgtaccccttccagattcacagcatcgctctctccacctttgcctcgctcattggcccctttggaggattcttcgcaagtggattcaaacgagcctttaaaatcaaagactttgccaataccattcctggccatggaggcatcatggatcgctttgactgccagtatctgatggccacctttgtcaatgtatacatcgccagttttatcagaggccctaacccaagcaaactgattcagcagttcctgactttacggccagatcagcagctccacatcttcaacacgctgcggtctcatctgatcgacaaagggatgctgacatccaccacagaggacgagtaggggccacccagggtcaggagaacaggaacagaactgagcaggggcaggtctccaaggcaagcccagctggtgtgacttagacaatgacgaggcttcaactcactgtcttttttttttttttttggagggtattttttatttgtgggttcaaaaaatctgtatatacagtctatgtgtttagaatttgtgttgtaagtaaactacagctttgagttggaaagaagtcacgggttgtaaaaccatttggatttttttaaaacaaaagtattaataatctggaagacagtgttgcccaggtcaggagtgttttcttggtggttccagcccccatcaattgaactgtttctgggctcagtcagacacagacattcatctgtgtctgaccaaatcaggggacttccccacctgtggtgggaggcacagcttagatgttttgtacacctggtcttttctagaaatccctgcttggagctgcagaagggttgccttctgtaggtcggaggaatggaggcttactaaccaggtaagccttctatgcatccacaccaaaatcctgcagaatgtaagtaagctctgctttataagatgggttcaccttcatcgcagactgaaagtttcagtttttatttttttcagaaagcacgaaaaattatttataatagtctggagaaaaaacacactgtaatatttcaagtgtatgcagtagaatgtactgtaactgagccctttcccacatgtctaggctccaatgtctcctgtaggtccacctaactgtgtgttttcagggacaatgccatccatgtttgtgctgtagacttgctgctgctgaatcctttctggggactttctcatcgggcagggagcagagggcttctcgttcatgcaccctttgcctgaacacccatgtagctgctgtgttgtgtatatattactcttaagaggagtgtgtgtgtctgtgtttgttttaaaagtcacttatttcttacagtgatttcaattgcaccatgacttcttcactaaaaccacaaagtcctgcttaaaactatggaaaacctaacctgattagagccttgactattttgaagattaaatgcacactttttatataaaaaaaaaaaaa

SEQ ID NO: 16881 - DNA, 990 bp, Homo sapiens
  SIMILAR (118)..(570): 821254mologous to Homo sapiens Human G protein coupled receptor I5E,accession number W79258,Smith-Waterman Score=643.
atgaggaaaaaccagtgcaaaaatgctgaaaattccaaaaatcagaatgcctcttgtccttcaaatgattgcaactcctgtccagcaagggcacaaaactggacagagaatgagattgatgaattgacagaagcaggcttcagaagttatggtgattatgacctccctatggatgaggatgaggacatgaccaagacccggaccttcttcgcagccaagatcgtcattggcattgcactggcaggcatcatgctggtctgcggcatcggtaactttgtctttatcgctgccctcacccgctataagaagttgcgcaacctcaccaatctgctcattgccaacctggccatctccgacttcctggtggccatcatctgctgccccttcgagatggactactacgtggtacggcagctctcctgggagcatggccacgtgctctgtgcctccgtcaactacctgcgcaccgtctccctctacgtctccaccaatgccttgctggccattgccattgacagaaagcccaaggctgaaaagaagagagcttcaggccttggatgggaggtgtcatggtgcctggaactgcatctgcaggggaggaaggtgatagtcaagactgagacaaggtatcagggtcagtgcccgccagccatgctccctgtctatggagaaagacccaagaaaaaggtgatgtgcgttcagattaagtgtttccatgagataatcactattggctacaacgtctaccactcatatgatctgccctggttcaggacgctcagctgcgtgttgagtgttcttatcattaaagagtactggatgttgtcaaatggtttcctgaatttattgagaaataaatgtcttctcaggggaaaacagaattttaatcagtgcgtcctagtagatgcaataattgtggcatggacagaatctttgccaacaggagagtcaggacaggaccatgctgtgctgttcctcaatggtggctga

SEQ ID NO: 16882 - DNA, 1050 bp, Homo sapiens
  SIMILAR (34)..(966): 381254mologous to Homo sapiens HT017,accession number AF225421,Smith-Waterman Score=558.
atggggatcacctgctggatcgccctgtatgctgtggaggccctccccacctgccctttctcctgcaagtgtgacagccgcagcctggaggtggactgcagtggccttggcctcaccacggtgcccccagacgtgcccgcagccacccgaaccctcttgctcttgaacaataagctgagtgccctgccaagctgggctttcgccaacctctccagcctgcagcggttggacctgtccaacaacttcctggaccggctgccccgctccattttcggggacctgacgaatctgactgagcttcagctgcgcaataacagcatcaggaccctggacagggacctgctgcggcactcgccgctgctccgccacctggacctgtccatcaacggcctggcccagttgccccctggtcttttcgacgggctcctggctctgcgctccctctcgcttcgctccaaccgtctgcagaatctggaccggctgacatttgaacccctagcaaacctgcagctgctgcaggtcggggataacccctgggagtgtgactgtaacctgcgtgagttcaaacactggatggagtggttctcctaccgagggggacgcttggaccagcttgcctgcaccctgcccaaggagctgagggggaaggacatgcggatggtccccatggagatgttcaactactgctcccagctggaggacgagaatagctcagctgggctggatattcctgggccaccctgcaccaaggccagtccagagcctgctaagcccaagcccggggctgagccggagccggagcccagcacagcctgcccacagaagcagaggcaccggccggcgagcgtgaggcgagccatgggcacggtgatcattgcaggggtcgtgtgcggcgtcgtctgcatcatgatggtggtggccgctgcctatggctgcatctacgcctccctcatggccaagtaccaccgggagctcaaaaagcgccagcccctgatgggggaccccgagggcgagcacgaggaccagaagcagatctcttctgtggcctga

SEQ ID NO: 16883 - DNA, 1416 bp, Homo sapiens
  SIMILAR (814)..(1413): 1001254mologous to Homo sapiens lipase related protein 2,accession number M93284,Smith-Waterman Score=1093.
atgggctgcatgcagcccgtgggccgtgggttgtacaagcttggatcagcatcaccatgggaacgaaaagaggtctgctacggacaacttggctgcttttctgatgaaaaaccatgggcaggaacccttcagcgacctgtaaaattacttccctggtcccccgaggacattgacacccgctttcttctgtacacaaatgaaaatccaaacaacttccaactaatcactggcacggaaccagacaccattgaggcttcaaacttccaactggaccgcaagacacgcttcatcatccatggcttcttagacaaggcggaggacagctggccatcggacatgtgcaagaaaatgtttgaagtggagaaggtgaactgcatctgtgtggactggaggcacgggtcccgggcaatgtacacccaagccgtgcaaaacattcgggttgttggggcggagacagctttcttaatacaagcactgtcggtaaaaccctgcctgggccctgtcctgtgggtaggggtcagagaggggcagggagacgcagctaggggtacagcccttgaggacgtgcatgtcatcgcccacagcctgggcgcgcacacggcgcggaagccggcaggagctgggggccgcgtggcaggatcacagatgacctggggacagcataatacaaagtggatggaatgggctgagaaaggagaggggttagattttccatttaaccatgaggaggtggtgtgtgagctgggtttggaggagaaagatttagataaaggaagaatgtgggaaagagcacagcaggctggagaatggcggctggatccagcagggccgtgcttccaggatgaacctgaggaggttcggttggatccatctgacgccgtgtttgtggatgtgattcacacagattcttctcccatagttccttccctaggtttcggaatgagccaaaaggtgggccatctggatttctttccaaatggaggaaaggaaatgcccggatgtaagaaaaatgtcctttcaaccattactgatattgatggaatatgggaaggaattggtggctttgtgtcttgcaatcacctaagaagcttcgagtattactcaagcagcgtcctcaaccctgatggcttcctgggctatccctgtgcctcctacgatgagtttcaggagagtaagtgtttcccttgtccagctgaaggatgccccaaaatggggcactatgctgaccaatttaaggggaaaacaagtgctgtggaacaaacctttttcctgaacacaggagagagtggtaactttactagttggagatataaggtatcagtcacactttctggaaaagagaaagtgaatgggtacatcaggattgctttgtatggaagtaatgaaaactcaaaacaatatgagattttcaagtaa

SEQ ID NO: 16884 - DNA, 807 bp, Homo sapiens
  SIMILAR (853)..(341): 781254mologous to Homo sapiens uncharacterized hematopoietic stem/progenitor cells protein MDS032,accession number AF220052,Smith-Waterman Score=579.
gagccggcatgcatcattgtatcagacgatggaaggagcgtgacctggtcgtgtcaatcagagacttcgatcaccatcttagtgactgcgacaggaaagtacacagcttcggggtatgcagccaggtacatataccatgacctggatcccaatgaggcaaagcagtggctgtacatggagaagtcaaagatgaagctgcacaccactgtggacctcaccatgcatacagacctgacggcagcaaatggcaagaaagtcatagcccttgaaatctttgcttatgccctgcagtactctaaggagcaggcgctgaaggtaggactgatagttgaggccagccagctgtgtgctaggcggtggcacccgtgccagctccgtgtctcgggctgctgcacctgctggccagggtaggaggcacagcctggagggagagtgtgggctttggagtcaacacaacaggatgaaccctcacacgctgctggtgggaaagtaaaatggtgcggcctctttggaaaacagtttggcaattcctaaaaaagtaaagcacagagttactgtaggacccagcagctccactccttgggtggagaaatgaaagaaatccctaagagaaatgaaagaagaaatgaaatccctaagagaaatgaaatccctaagagaaatgaaagaagatgtccacacacacgtatacatgaatgtgcatagcaacattattcataactgtgaaaagtagaaacagtccacatgctgtccacacaaacacacgtatacatgaatgtgcatagcaacattattcacaacgacgaa

SEQ ID NO: 16885 - DNA, 780 bp, Homo sapiens
atgcccaaccccaaggggccagaggacaaagctgtgggcctggtcccaaagccccagggtaatagcatacagctaagaatagaaaaacaaaaagctccatccaaacgacagcaaatccgaaaacacaaaagaacgcaagctttcttggatgagaaagaatcagttaagaactctggtaatttaaaaagtcagaatatccctttatatccaaatgttattagctctccagcaatggttcttaaccagattgaaatgactgaaatgacagacatagttcagaatctggatgttcagtcacaagatgtgggatgctctgaaaagggcatattcttgagcaaagacatccatcactttgcagctgaggctgaccctaagaaagcaggcagccggagacattctgctgaccaccctctcctcagctggtcactacgcaggaaagggagtgctttggaactcagatcagggaatcacagtagcactcagagcgcaggaatcaagtgcagccatggagacacccacttcctcagtgaggtgttgaaggtggctctaagagcaaccacaggtgcaaatcagcttttaaagaaggagcatgggataggacagatcatcgatcatctctatgttctttcaaacatattccaaaagacagcattatgcaaagtatcacttacagatgcatttacatctaaacttgctgtatgcttcacggcaagttggtgtctttccactttctccttgatgaagacctgcatccaatatgaatttaaagaggctctgtaa

SEQ ID NO: 16886 - DNA, 1427 bp, Homo sapiens
  SIMILAR (20)..(649): 711254mologous to Homo sapiens lipase related protein 1,accession number M93283,Smith-Waterman Score=726.
ctctggaacattagacaggatgctgatcttctggacaatcacacttttcctgctgggagcagccaaaggaaaagaagtttgctatgaggacctcgggtgcttttctgacactgagccctggggcgggacagcaatcaggcccctgaaaattctcccctggagccctgagaagatcggcacccgcttcctgctgtacaccaatgaaaacccaaacaactttcaaattctcctcctctctgatccatcaacaattgaggcatcaaattttcaaatggacagaaagacccggttcatcatccatggcttcatagacaaaggagatgagagctgggtgacagacatgtgcaagaaactgttcgaggtggaggaggtgaactgcatcttcgttggactggaagaagggctcccaagccacctacacacaggctgccaacaacgtgcgagtggtgggcgcccaggtggcccagatgctcgacatcctcttgacagagtatagctaccccccttccaaagttcacctcattggccacagcctgggagcccacgtggctggagaggcaggaagcaagactccaggcctgagcaaggattacaagggttggatcctgtagaagcaagtttcgagagtactcctgaagaggtgcgactttgatccctctgatgctgactttgttgatgtgattcacacggatgcagctcccctgatcccattcttgggttttggaacgaaccaacagatgggtcatcttgacttcttccccaatggaggagagagcatgccgggatgcaagaagaatgccctgtctcagatcgtggatctagatggcatctgggcgggaacccgggactttgtggcttgcaatcacctaagaagctacaagtattacttggaaagcatcctcaatcccgatgggtttgctgcatatccctgcacttcctacaagtcctttgagtctgacaagtgcttcccgtgtccagatcaaggatgcccacagatgggtcactatgctgataaatttgctggcaggacaagtgaagagcagcagaaattcttcttgaacacaggagaggctagcaatttcgctcgctggagatatggggtttccatcacactgtctggaagaacagccactggtcagatcaaagttgctttgtttggaaataagggaaacactcaccagtacagcatcttcagggggattctcaaaccaggctcaacccattcctatgagtttgatgcaaagctggatgttggaacaattgagaaagtcaagtttctttggaataacaatgtgataaatccaaccctccccaaagtgggtgccaccaagatcactgtgcaaaagggagaagagaagacagtgtacaacttctgtagcgaagacacagtgcgggaagacacgctgctcaccctcacgccctgctaa

SEQ ID NO: 16887 - DNA, 1410 bp, Homo sapiens
  SIMILAR (1)..(1407): 1001254mologous to Homo sapiens lipase related protein 2,accession number M93284,Smith-Waterman Score=2529.
atgctgcccccttggaccctcggccttctcctgctggccacagtcagaggaaaagaggtctgctacggacaacttggctgcttttctgatgaaaaaccatgggcaggaacccttcagcgacctgtaaaattacttccctggtcccccgaggacattgacacccgctttcttctgtacacaaatgaaaatccaaacaacttccaactaatcactggcacggaaccagacaccattgaggcttcaaacttccaactggaccgcaagacacgcttcatcatccatggcttcttagacaaggcggaggacagctggccatcggacatgtgcaagaaaatgtttgaagtggagaaggtgaactgcatctgtgtggactggaggcacgggtcccgggcaatgtacacccaagccgtgcaaaacattcgggttgttggggcggagacagctttcttaatacaagcactgtcgacgcagctagggtacagccttgaggacgtgcatgtcatcggccacagcctgggcgcgcacacggccgcggaggcgggcaggaggctggggggccgcgtgggcaggatcacagggctggatccagcagggccgtgcttccaggatgaacctgaggaggttcggttggatccatctgacgccgtgtttgtggatgtgattcacacagattcttctcccatagttccttccctaggtttcggaatgagccaaaaggtgggccatctggatttctttccaaatggaggaaaggaaatgcccggatgtaagaaaaatgtcctttcaaccattactgatattgatggaatatgggaaggaattggtggctttgtgtcttgcaatcacctaagaagcttcgagtattactcaagcagcgtcctcaaccctgatggcttcctgggctatccctgtgcctcctacgatgagtttcaggagagtaagtgtttcccttgtccagctgaaggatgccccaaaatggggcactatgctgaccaatttaaggggaaaacaagtgctgtggaacaaacctttttcctgaacacaggagagagtggtaactttactagttggagatataaggtatcagtcacactttctggaaaagagaaagtgaatgggtacatcaggattgctttgtatggaagtaatgaaaactcgaaacaatatgagattttcaaaggatccctcaaaccagatgcaagtcacacgtgtgctattgatgtggattttaatgttggaaaaatacagaaagttaaattcctctggaacaaacgtgggataaatctatctgagcccaaactgggggcttcccaaatcacagtgcaaagtggtgaagatgggactgagtataatttttgtagcagcgacactgtggaagaaaacgtcttgcaatctctttacccttgttaa

SEQ ID NO: 16888 - DNA, 1798 bp, Homo sapiens
  SIMILAR (1049)..(1702): 971254mologous to Escherichia coli ES-beta- lactamase,accession number Y10281,Smith-Waterman Score=1076.
caggcaaggtcccagggaggcaagagcagcccaggtgggcccaggcatttccccagcccctccagaggcccaggatgaactggcctgggatgcaggccctgctaatgagcaaaggcttcagtccactgagcagtacatggtagcacagaagaaggcctggtacaccaacagcaaattgcatttccttctcagaaccctcagctctggtctggtacccccaggcaacaacagcctagcgggcagacaggacaggaggcctgggagctgtgcgtcactcaaagccagactggagagtgacaattgcctcgcagctcccagcgggtttcgagaaggggcaaagctgcaaaacagcccacagggagctcacagtgcctgtggtaatgatgatgacgatgatggtgatgatgctgacaatggtcattatcatggtgacggggtggaggacttggagccaggagacctaattacaaatgataactatgccaccattcagctgaatgaccttggcacctctgtggcccacccctgggactcctgtgggacacaggcaggtgtcatgggtggacaacaaggagcatctcaggagacagggaaggttgcaggtggaggctactctgtcagccccaggcccgaacaaagacaacaggaacagtgttgctgccagcccgcgatggaatctgggggtcatttgctcccaagctttgctatgtctatcctgattgacacccaggcagatgctacgctaaaagcagaggaaggaaaaatatctgtgtcacagcaccaactggaaaccaacgcgcgtacatcctgtctctactctggccgagccgaccaaagcacatcctgcaaaattctagacccccgcaagcggcgggaggcggccgtgcgcacaacatcctgcaaacgccgccctctggtggtggagctggtgaactgcgcccagcagccagtgagagccttcaccagaccctgcccacgctccatcagtagctttgctgcacactggaaatcaatccaaggtcctcccatggcccaggaatccctgcatgaaacgctggtgaaagtaaaagatgctgaagatcagttgggtgcacgagtgggttacatcgaactggatctcaacagcggtaagatccttgagagttttcgccccgaagaacgttttccaatgatgagcacttttaaagttctgctatgtggcgcggtattatcccgtgttgacgccgggcaagagcaactcggtcgccgcatacactattctcagaatgacttggttgagtactcaccagtcacagaaaagcatcttacggatggcatgacagtaagagaattatgcagtgctgccataaccatgagtgataacactgcggccaacttacttctgacaacgatcggaggaccgaaggagctaaccgcttttttgcacaacatgggggatcatgtaactcgccttgatcgttgggaaccggagctgaatgaagccataccaaacgacgagcgtgacaccacgatgcctgtagcaatggcaacaacgttgcgcaaactattaactggcgaactacttactctagcttcccggcaacaattaatagactggatggaggcggataaagttgcaggaccacttctgcgctcggcccttccggctggctggtttattgctgataaatctggagccgactttacgaaacacggaaaccgaagaccattcatgttgttgctcaggtcgcagacgttttgcagcagcagtcgcttcacgttcgctcgcgtatcggtgattcattctgctaaccagtaa

SEQ ID NO: 16889 - DNA, 2133 bp, Homo sapiens
  SIMILAR (1555)..(1992): 261254mologous to Neurospora crassa hsp70 related protein,accession number AL355932,Smith-Waterman Score=100.
ggcggctcagacacggcccgagcgccgccgcggacgcggacagagacccgcacgggcacgggcgctgcgctggaggctcccctcgcggtccggggctgcgcgaccatggcggacaaggaggccggcggcagcgacgggccccgagaaacggctcccacatctgcatattcatctccagcccggagtcttggggacacaggaataacgcctctgtccccctcccatattgtgaacgacactgactccaacgtctcagaacagcagtcatttctcgtggtggtggccgtcgactttgggaccacatccagtggctatgcctacagcttcaccaaggagccggaatgcatccatgtgatgaggcgatgggagggaggtgaccctggtgtgtccaatcagaagactccaaccaccatcttgctgactcccgagaggaagttccacagcttcgggtatgccgccagggacttttaccatgacctggatcccaatgaggccaagcagtggctgtacctggagaagttcaagatgaagctgcacaccactggggacctcaccatggatacagacctgacggcagcaaatggcaagaaagtcaaagcccttgaaatctttgcttatgccctgcagtactttaaggagcaggcgctgaaggagctgagtgaccaggcgggttcggagttcgagaactctgatgtcagatgggtcatcacggtgcctgccatctggaagcagccggccaagcagttcatgagacaagctgcctaccaggcaggcctggcctcccccgagaactcggagcagctcatcattgccttggagcctgaggcagcctctatctactgccgaaagctgcggctacaccagatgattgagctgagcagcaaggcagccgtcaatgggtacagcggcagtgacacagtaggagctgggtttacacaggctaaggaacacatacggcgtaatcggcagagtcggacctttttggtggagaatgtcataggagaaatctggtccgagctggaggaaggtgataagtatgtggttgtggacagtggcggtggcaccgtagacctgacagtccatcagatccggttaccggagggacaccttaaggaactgtataaagcaacaggcggaccctatggatctttaggagtagattatgagttcgaaaaacttctgtataaaatatttggagaggattttattgaacaattcaaaatcaaacgccctgcagcctgggttgacttaatgattgcgtttgagtctcgcaaaagggcggctgccccagacagaactaacccgctgaacatcaccctgcccttctccttcattgactactacaagaagttccgcgggcacagtgtggagcacgccttgcggaaaagcaatgtggattttgtgaagtggtcctcgcaggggatgctgcggatgagtccagatgccatgaacgccctttttaagccgaccatcgatagcatcattgagcatctccgggacctgtttcagaagcccgaggtgtccaccgtcaagttcctctttctggtgggcggctttgccgaggcgcccctgctgcagcaggcggtgcaggctgcttttggggaccagtgccggatcatcatcccccaggacgtgggcctcaccatcctcaagggtgccgtcctctttggcctggaccccgcggtcatcaaggtgcgccggtcgccgctcacctacggggtaggcgtgctgaaccgctacgtggagggcaagcacccgcctgagaagctgctggtgaaggatggcactcggtggtgcaccgacgtctttgacaagttcatctctgccgaccagtctgtggctctgggtgagctggtcaagcgtagctacaccccggccaagccctcccagctggtcattgtcatcaacatctacagctctgagcacgacaacgtcagcttcatcactgatcccggggtgaagaagtgtggcacgctccgcctggatctcacagggaccagtggcactgcggtgcccgcccggagggagatccagacccttatgcagttcggggacaccgagatcaaagccacagccattgatatagccacttcgaagagtgtcaaagttgggatcgacttcttaaattactaa

SEQ ID NO: 16890 - DNA, 1818 bp, Homo sapiens
  SIMILAR (1306)..(1542): 1001254mologous to Homo sapiens lipase related protein 2,accession number M93284,Smith-Waterman Score=430.
atggacagaaagacccggttcatcatccatggcttcatagacaaaggagatgagagctgggtgacagacatgtgcaagaaactgttcgaggtggaggaggtgaactgcatctgcgtggactggaagaagggctcccaagccacctacacacaggctgccaacaacgtgcgagtggtgggcgcccaggtggcccagatgctcgacatcctcttgaccaaattcagccttggtaaatgggcagcaatggctgctattggcttttggaccacatcccttggggcccctggtccaagtgtttggggaggaccctttttaagagtggcttcacctgaaacctgccccaagtatgggccggacctcaccatggatacagacctgacggcagcaaatggcaagaaagtcaaagcccttgaaatctttgcttatgccctgcagtactttaaggagcaggcgctgaagcaggacgacctggacttcctaaatagcaaaggacaagtgagcaagctccaatgcactggcaggaattttcaagcctctgctggcttcctgtttgccaaggtcctattggccaaaacaaatcatgtagctacaccgagtccagtactgaatgctgtcaaagccactgtcatttactcaacatccatttcccccttattccctgatggaagagccctgaatttgttcatcctcatggaaggtgaccctgtccccagctcagagatgacaaaacagatgtccagccaccagctgagcagctcccactctgggatgggcgccagccagatctcagacttgctgagatcccaatgccatatgggaggggcaagatgtaacagccttggcatcttcctgtggttctcaccccagacaggaatgaatcaggacggctttggaataggagcaaagccagagttggctcttcggctgctgctcttagaggaacagaagaaaaacaaaacagctcctgaggaggatgaagagagtggaggtgtggatgtttgggcaaagctgcaaaacagcccacagggagctcacagtgcctgtggtaatgatgatgacgatgatggtgatgatgctgacaatggtcattatcatggtgacggggtggaggacttggagccaggagacctaattacaaatgataactatgccaccattcagctgaatgaccttggactagctccaggtatggtggaggatggaggagatggtctgcgacagtgccctgcagctatgcagggagtgactgctgttccttgttgctgggcagtccctgtggatgaacgggatctttgcccttcgcggctggatccagcagggccgtgcttccaggatgaacctgaggaggttcggttggatccatctgacgccgtgtttgtggatgtgattcacacagattcttctcccatagttccttccctaggtttcggaatgagccaaaaggtgggccatctggatttctttccaaatggaggaaaggaaatgcccggatgtaagaaaaatgtcctttcaaccattactgatattgatggaatatgggaagatgatcacactagctccccagcaatggttcttaaccagattgaaatggctgaaatgtcagacatagaattcagaatctggatggcaaggaagctcaatgagacacaagagaaggttgaaacccaatccaaggaaaacaataaaatgatccaagggttgaaagatgacatcaccattttaagaaagaaccaaaatgaacttctggaaatagaaaatttacaggaatttcataatacaattggaagcattaacaacaattggaatagaccaacctga

SEQ ID NO: 16891 - DNA, 378 bp, Homo sapiens
  SIMILAR (7)..(93): 1001254mologous to Homo sapiens huntingtin interacting protein HYPH,accession number AF049612,Smith-Waterman Score=163.
atgcagcgggaggagggatttaacaccaagatggcggacggcccggatgagtacgataccgaagcgggctgtgtgccccttctccacccagaggtgaggaaccgtgctgagtggattccttgccctgcggccctccagcctttcttccccggactcgccgagggcggcggccgacgtgtgtggggtagtgggacgtgccgaagttggggagggtggggaggcgaatccaggcctgagcgcggctgcgagcggataacgggggaggagatagcggggcgggcccgaccggggcgggctctgggacgcagtccctggctgtgcctggaggacagaggtggaggtgttgatggttctgctgtgtcgccgcgctgcgtttga

SEQ ID NO: 16892 - DNA, 2006 bp, Homo sapiens
  SIMILAR (3)..(2003): 1001254mologous to Homo sapiens KIAA0946 protein,accession number AB023163,Smith-Waterman Score=3655.
gaagaaggaggaggaggcccgcgtcgcctccggcggggctcgcgctcgccccgcgctcgccctccgcctcgcccgagccccgggagggtgaaacgctttctcccagcatgcagcgggaggagggatttaacaccaagatggcggacggcccggatgagtacgataccgaagcgggctgtgtgccccttctccacccagaggaaatcaaaccccaaagccattataaccatggatatggtgaacctcttggacggaaaactcatattgatgattacagcacatgggacatagtcaaggctacacaatatggaatatatgaacgctgtcgagaattggtggaagcaggttatgatgtacggcaaccggacaaagaaaatgttaccctcctccattgggctgccatcaataacagaatagatttagtcaaatactatatttcgaaaggtgctattgtggatcaacttggaggggacctgaattcaactccattgcactgggccacaagacaaggccatctatccatggttgtgcaactaatgaaatatggtgcagatccttcattaattgatggagaaggatgtagctgtattcatctggctgctcagttcggacatacctcaattgttgcttatctcatagcaaaaggacaggatgtagatatgatggatcagaatggaatgacgcctttaatgtgggcagcatatagaacacatagtgtggatccaactagattgcttttaacattcaatgtttcagttaaccttggtgacaagtatcacaaaaacactgctctgcattgggcagtgctagcagggaataccacagtcattagccttcttctggaagctggagctaatgttgatgcccagaatatcaagggcgaatcagcgcttgatttggcaaaacagagaaaaaatgtgtggatgatcaaccacttacaagaggcaaggcaagcaaaaggatatgacaatccgtccttccttagaaagctgaaagctgataaggaatttcggcagaaagtaatgttaggaactcctttcctagttatttggctggttgggtttatagcagacctaaatattgattcttggctcattaaagggctaatgtatggtggtgtttgggctacagtacagtttctttcaaaatcctttttcgatcattcaatgcatagtgcattgccccttgggatatatttggcaaccaaattctggatgtatgtgacgtggttcttctggttttggaatgatctcaactttttatttatccatcttccattccttgccaatagtgttgcacttttctacaattttggaaaatcttggaaatcagatccagggattattaaagcaacagaagagcaaaagaaaaagacaatagttgaacttgcagagacaggaagtctggacctcagtatattctgcagtacctgtttgatacgaaaaccggtgaggtccaaacattgtggtgtgtgcaaccgctgtatagcaaaatttgatcatcattgcccatgggtgggtaactgtgtaggtgcaggcaaccatagatattttatgggctacctattcttcttgctttttatgatctgctggatgatttatggttgtatatcttactggggactccactgtgagaccacttacaccaaggatggattttggacatacattactcagattgccacgtgttcaccttggatgttttggatgttcctgaacagtgttttccacttcatgtgggtggctgtattactcatgtgtcagatgtaccagatatcatgtttaggtattactacaaatgaaagaatgaatgccaggagatacaagcactttaaagtcacaacaacgtctattgaaagcccattcaaccatggatgtgtaagaaatattatagacttctttgaatttcgatgctgtggcctctttcgtcctgttatcgtggactggaccaggcagtatacaatagaatatgaccaaatatcaggatctgggtaccagctggtgtag

SEQ ID NO: 16893 - DNA, 654 bp, Homo sapiens
  SIMILAR (121)..(594): 981254mologous to Mus musculus alpha-adaptin (A) (AA 1- 977),accession number X14971,Smith-Waterman Score=784.
ttttcgtccggctcggctccttggcgctgcctggagtcctttccgcccggtccccgcttgccagcccccgctgctctgtgccctgtccggccaggcctgttatcctacaccaccgccatcatgccggccgtgtccaagggcgatgggatgcggtggctcgcggtgttcatctccgacatccggaactgtaatagcaaagaggcggaaattaagagaatcaacaaggaactggccaacatccgctccaagttcaaaggagacaaagccttggatggctacagtaagaaaaaatatgtgtgtaaactgcttttcatcttcctgcttggccatgacattgactttgggcacatggaggctgtgaatctgttgagttcccataaatacacagagaagcaaataggttacctgttcatttctgtgctggtgaactcgaactcggagctgatccgcctcatcaacaacgccatcaagaatgacctggccagccgcaaccccaccttcatgtgcctggccctgcactgcatcgccaacgtgggcagccgggagatgggcgaggcctttgccgctgacatcccccgcatcctggtggccggcctctgggaacagaagacaaagcttgtccgagaagttctcgaaggctgtacttcaaagtga

SEQ ID NO: 16894 - DNA, 275 bp, Homo sapiens
  SIMILAR (260)..(126): 1001254mologous to Homo sapiens PRO1474,accession number AF119846,Smith-Waterman Score=225.
ggaaagcgtggcggctgctgctagagcctttccctttaccgcacccaaggagctggagcgacaacaacgacgtcgtttccgtttccaccacctcttcctgttcccgtccttgaggacgccgtgccgggtacaatcctgagaacctggccaccctggagcgctatgtagagacgcaggccaaggaaaatgcctataatctggaagccaacctggctgtcctgaagctgtaccagttcaacccagccttctttcagaccacgggtcaacgcccagat

SEQ ID NO: 16895 - DNA, 273 bp, Homo sapiens
  SIMILAR (273)..(157): 871254mologous to Homo sapiens PRO1474,accession number AF119846,Smith-Waterman Score=166.
atgggcacagatgacgacaagagccaacgttggagcatttcctgtgcatcagataccatcttcacagagtggttaagtcatctgtccaaagccacacaagctcaggcagccagcagcagcactgctcctgacacagtgccgggaacactggaggtgcatggtacaccatggtacaatcctgagaacctggccaccctggagcgctatgtagagacgcatgccaaggaaaatgcctatgatctggaagccaacctggctgtcctgaagctgtaa

SEQ ID NO: 16896 - DNA, 912 bp, Homo sapiens
  SIMILAR (265)..(2976): 851254mologous to Homo sapiens putative p150,accession number U93572,Smith-Waterman Score=3919.
  misc_feature (1)...(912): n = a,t,c or g
gaaagcgtggcggctgctgctagagcctttccctttaccgcacccaaggagctggagcgacaacaacgacgtcgtttccgtttccaccacctcttcctgttcccgtccttgaggacgccgtgccgggntcaagtgttagcctccagccctggttgtgggaaggcgacagaagtcatggcgaatgtttgagcagatgagagccaacgtgggcaagttgctcaagggtatcgacaggtgacaatcctgagaacctggccaccctggagcgctaatgtagagacgcaggccaaggaaaatgcctatgatctggaacccaacctggctgttcctgaaagctgtaccaagttcaacccaagccttctttcagaccaacgggtcaaccgcccaagattcttgctgaaaggccctcaccaactttgccgcacaccagacttcaccctgtggcaagtgcattgattcgaccagggcacattcaagaaggaacggccaattccgacagatttttgttacctcgggggacctggctgggagacctggccattttccagggccttctgggaaagccctgggatgaaaacagtggaccttctttggaaggtataacttggcttttgaagactctgttccgaaagtttatcttgccatgttgttgggtatcacttaccagcacattgaccgcttggctgctggccgagatgctcggggatctgttcggacaagccagctaaaggtgttggattgagcaaatacggctggagtgccgacgagtcggggcagatcttcatctgtagccccagaagagagcatttaacccccaggaacattgtggagaagattgactttgacagtgtgtccagcatcatggcctcctcccagtaacttcaggtgtttaataaagatgtgttgactcag

SEQ ID NO: 16897 - DNA, 780 bp, Homo sapiens
  SIMILAR (13)..(426): 701254mologous to Mus musculus m51 olfactory receptor,accession number AF321234,Smith-Waterman Score=520.
atgagtggggagaatgtcaccaaggtcagcaccttcatcctggtgggcctccccacggccccagggctgcagtacctgctcttcctcctcttcctgctcacctacctctttgtcctggtggagaacctggccatcatcctcatcgtctggagcagcacctccctccacaggcccatgtactactttctgagctccatgtctttcctggagatctggtacgtgtctgacatcacccccaagatgctggagggcttcctcctccagcagaaacgcatctctttcgtcgggtgcatgacgcagctctacttcttcagctccctggtgtgcacagagtgtgtgcttctggcctccatgggctacgaccgctacgtggccatctgccacccgctgcgctaccaacctggcctgcacggacttctccactgcagagctggtgatttcatcctggccttcatcatcctggtgtttccgctcctggccaccatactgtcatattggcacatcaccctggctgtcctgcgcatcccctcggccaccggctgctggagagccttctctacctgcgcctctcacctcaccgtggtcaccgtcttctatacagccttgcttttcatgtatgtccggccccaagccattgattcccagagctccaacaagctcatctctgccgtgtacactgttgtcacgccaataattaaccctttgatttactgcctgaggaacaaggaatttaaggacgccttgaaaaaggccttgggcttgggtcaaacttcacactaa

SEQ ID NO: 16898 - DNA, 876 bp, Homo sapiens
  SIMILAR (86)..(505): 521254mologous to Rattus norvegicus olfactory protein,accession number M64378,Smith-Waterman Score=353.
gtctcccccatcagcatatgagctcacgggtgaggacctcatccaccctgctcactggcctgcagctcccaagcacagaggcatgagtggggagaatgtcaccagggtcggcaccttcatcctggtgggcttccccacggccccagggctgcagtacctgctcttcctcctcttcctgctcacctacctctttgtcctggtggagaacctggccatcatcctcaccgtctggagcagcacctccctccacaggcccatgtactactttctgagctccatgtctttcctagagatctggtacgtgtctgacatcacccccaagatgctggagggcttcctcctccagcagaaacgcatctctttcgtcgggtgcatgacgcagctctacttcttcagctccctggtgtgcaccgagtgtgtgcttctggcctccatggcctacgaccgctacgtggccatctgccacccgctgcgctaccacgtccttgtgaccccgggctgtgcctccagctgcgtcacgttctgtggctccaacgtcttgaaccacttcttctgtgacatttcccccatcctcaagctggcctgcacggacttctccactgcagagctggtggatttcattctggccttcatcatcctggtgtttccactcctggccaccatgctgtcatatgcgcacatcaccctggctgtcctgcgcatcccctcggccaccggctgctggagagccttcttcacctgcgcctctcacctcaccgtggtcaccgtcttctatacagccttgcttttcatgtatgtccggccccaggccattgattcccggagctccaacaagctcatctctgttttgtacacagttatcacccccagtgtatt

SEQ ID NO: 16899 - DNA, 897 bp, Homo sapiens
  SIMILAR (460)..(894): 571254mologous to Homo sapiens pot. ORF I,accession number X03145,Smith-Waterman Score=448.
atgcctgatgttcactgcactgacacatatggaagctgtgaggagtgtttcatatggtccatggatgcccttcattacagcatagttggaaaatacaggattcagatggctgtgattctgagcatcccagcagtatctgctagtagaatagggaagaatccctgtaatacaaaatcagaggaaaaaaaggatgatgagtactctgaaattttaattggtgaaataaggatgtgggatgtactattttggtctactggaaaggggcacatcaccccccaggactgttccttgatcactgtgggtgctgtcccacctcgggaacattcacttgctgtttcctcagcctgcaaccgtcttctctcaaatatctgcagagctggccttactcaccgtcctgacagagtttatcctctagcgtttggtggtggttgtggggcaaaattcgttggactttttgatgcacctaacaccggagctcccaaatttataaaacaattactaatagacctaagaaatgagatagacagcaacaccataatagtggaggacttcaatactccactgacagcattagacaggtcatctagacagaaagtcaacaaagaagcaatggatttaaactatgttcaggaacaaatggacttaacagatacatacagaacatttcatccaacaactgcagaatacacattctattcaacaatgcatggaactttctccaagatagaccatatgataggccataaaatgagcctcaataaatttaagaaaattgaaattatattaagcactctctcagagcacagtggaataaaactggaaatgaatgccaaaaggaaccttcaaaaccacacaaatacatggaaattaaataacctgctcctgaatcagcattga

SEQ ID NO: 16900 - DNA, 501 bp, Homo sapiens
  SIMILAR (392)..(499): 751254mologous to Homo sapiens dJ543J19.5 (CGI-107 Protein),accession number AL109840,Smith-Waterman Score=148.
agaagtgaggcagatgtggcctcagagggtctggcggatggctgccgggatcaccgggggctggactttgagatgtccaggacgaagtgttgccctttcagtgctgccctccctgtgtctgctggaactgttggagccgcagtgcagcctaattttgacttcaggctgtccccggaagctgctgaaaaccgacgattccatcaagaaggaacccggaaaggagagaaacccctgcctttctgcaggcctgcagtaggacctgcttcaactgctgccctggaagagcccgaggacctcagtgggaacctcatgctgtctctggggacttttgcactggaactgtgccctgcacgcataagagccttgagacatctagcagactgcctgcaccatcaagatctggactgcagagcacgtctttcaccacccgtgggaaactgttacaacagctgcaatgcacaaatacccaagccctgcgaacctgagcagggtgtgggttga

SEQ ID NO: 16901 - DNA, 824 bp, Homo sapiens
  SIMILAR (531)..(677): 891254mologous to Homo sapiens Similar to transmembrane 4 superfamily member 9,accession number BC002920,Smith-Waterman Score =256.
gtacttccaccccgggtgaagacatcccctggagagcagaccactgccaagagcacacctgcagaggctccaatacaatgctctgcacagccgcccagcaccgcctgacctcccggatagcagcgccagcacagaccaacgagtgtgtagacactcgcacagcactacaccacacgactactgctgtcacagaccgcctaggcccaaggtacgcctcgggccagtatgggtaccccaagtgtactaagtgcacttacgagtcctctacttacaaactgcttctcacaaaacatcgaaactccagggcagggcttggcatgcctgccagccttttcttgcctggcgatgactcatctggtgctcatgggccctactggcatgtttctgatgttgctagcacattcagacctgatagagaccagtgcagaaccccagagacagtggactttcagctggatgcagtgactggctgggacctgaaggtgtcccctataagaggtgaaccccaagttgttcagggagcagcagagatcccccctcttttaggaaagaaccagtgctgtggcgcatatggccctgaagactgggacctcaacgtctacttcaattgcagcggtgccagctacagccgagagaagtgcggggtccccttctcctgctgcgtgccagatcctgcgattgtcagtgccggctctcatgcaacaaaagcggaattgagtctgtgtctgaagtactcactctctagcccttcacagagaaagtttgccaccctgtcctggtctgaaggattagttggtggcatgattgaaggacatgagctgtaa

SEQ ID NO: 16902 - DNA, 874 bp, Homo sapiens
  SIMILAR (181)..(2): 381254mologous to Mus musculus CW17E,accession number Y08907,Smith-Waterman Score=90.
atgggaaagagtggacaagcagtgttatctcagtcccatgggaaaaggtggttcttggtgggaggtgtggagggagaggcactagtgggaaccgtggcacttgcaggccagctggagttccgggtgggcgtgggcttggcggccctgcactccgagcggcaggccggccctgccagccggggcaatgaggggcttagcacctgggccagcggctgcggaagccagtcctgtgcggctggagcctccccaacgagtgtcgccccctgctgcatggcgcccagtcccatcgaccacccaagggctgaggagtgtgggcgcacagcccaggactggcaggcagctccacctgtggccccagtgcaggatccactgggtgaagccagctggtttcctgactgggagataagacagtatgttttcctcaaaaggcttgtagtctggaaagcaaataggcaaacaggacgcaagcacacgaacgggtacaaaagcctgagaaagaaagctgctgccagtgaggagcagaggccgttctgtggctatctcagtcattctccaggttttaagtggggctcagctgttcttcttctgggaccacctacttggctgtgctcatctcagcagggctgcaggagatccagaagacatatggatgtccctcaacatctccactcagagctgacacaaggaaatagcatccttgtccttcctgcaagaatggaggggaagaaattgggagcaaatcaggctacagcttctaatagagctataacactcactgtgtggcccaagattccattctttggaatccctgaggccaagaaccccaggtcagagaacaagaggcttgctgccaccttgggagccggccacgaaa

SEQ ID NO: 16903 - DNA, 397 bp, Homo sapiens; identical to SEQ ID NO: 2151
  SIMILAR (364)..(11): 721254mologous to Homo sapiens p40,accession number U93566,Smith-Waterman Score=400.
  misc_feature (1)...(397): n = a,t,c or g

SEQ ID NO: 16904 - DNA, 1143 bp, Homo sapiens
  SIMILAR (2431)..(3939): 961254mologous to Homo sapiens putative p150,accession number U93564,Smith-Waterman Score=2549.
atggtaaatgtgggggattttattgccgatgaaagtggctctcagcaggaaagggagctgaaaggggacagaatgggaaggcaatcttcctctaaagtccggctgtccttggctggactcctctctgaagcctcttctgagatagcaaataagaggactggatcaatcctacactgttggcaaaggtctggattaccctgcaaggtaaagaaagcctgcacatatggggcctcaggccatttgccctcacatctacagaaaaggtcttactgcatagaaatgagtggttccttcctgaggccaagccagtccttcctgcagattataatttgtccaaacctttgtgcagagggctatgaggccagccccacagcagcatctggcagcagaataaccaatgcagagaagtccttaaaggacctgatggagctgaaaaccaaggcacgagaactatgtgacaaatgcacgagcctcagtagccgatttgatcaattggaagaaagagtatcagtgatggaagatcaaatgaatgaaatgaagcaagaagagaagtttagagaaaaaagaataaaaagaagcaaacaaagcctccaagaaatatgggactatgtgaaaagaccaaatctacgtctgattggtgtacctgaaagtgatggggagaatggaaccaagttggaaaacactctgcagaatattatccaggagaacttccccaatctagcaaggcaggccaacattcaaattcgggaaatacagagaatgccacaaagatactcctcgagaagagcaactccaagacacataattgtcagatacaccaaagttgaaatgaaggaaaaaatgttacaggcaatcagagagaaaggtcaggttacccacaaagggaagcccatcagaccaacagcggatctctcggcagaaactctacaagccagaagagagtgggggccaatatttaacattcttaaagaaaagaattttcaacccagaatttcatatccagccaaactaagcttcataagtgaaggagaaataaaatcctttacagacaagcaaatgctgggagattttgtcaccaccaggcctgccctaaaagagctcctgaaggaagcactaaacatggaaaggaacaactggtactag

SEQ ID NO: 16905 - DNA, 3138 bp, Homo sapiens; identical to SEQ ID NO: 7580
  SIMILAR (2050)..(3135): 941254mologous to Homo sapiens putative p150,accession number U93563,Smith-Waterman Score=1740.

SEQ ID NO: 16906 - DNA, 457 bp, Homo sapiens
  SIMILAR (189)..(455): 961254mologous to Mus musculus alpha N-catenin I,accession number D25281,Smith-Waterman Score=422.
tttcgtggagacccaggcgggcgggcagagcaggcggcaccgcacctcggccagaggcggctgcagcagctgctgcccttgtccctgccgccgcctctccagtcccttctgtgattaccactccagctgctgggaacgggcgagaaagaggaggaggcgagaaactcccaccgacccacagagggagcatgacttcggcaacttcacctatcattctgaaatgggaccccaaaagtttggaaatccggacgctaacagtggaaaggctggtggagccacttgttacacaggtgactacacttgtcaacacaagcaacaaaggcccatctggtaaaaagaaagggaggtcaaagaaagcccatgtactagctgcctctgtagagcaagccactcataatttccttggaaaaggtgaacagatcgctaaggagagtcaagatctcaaagaagagttggt

SEQ ID NO: 16907 - DNA, 2602 bp, Homo sapiens
  SIMILAR (1478)..(2029): 801254mologous to Homo sapiens p40,accession number U93570,Smith-Waterman Score=765.
ggattttgccgatttcggaaccaccatcaaacaggattttcgcctgctggggcaaaccagcgtggaccgcttgctgcaactctctcagggccaggcggtgaagggcaatcagctgttgcccgtctcactggtgaaaagaaaaaccaccctggcgcccaatacgcaaaccgcctctccccgcgcgttggccgattcattaatgcagctggcacgacaggtttcccgactggaaagcgggcaagtcaagcatgaaggtcagcacacgaagatgtcccaggttttatggagatcccaggaagagaacccagccacattaggaaacaatattcagctctttgattggataccccagaatgatcttcttggacatcccaaaaccaaagcttttatcactcatggtggaactaatgggatctacgaagctatttaccacggagtccctatggtgggagttcccatgtttgctgatcagcctgataacattgctcacatgaaggccaaaggagcagctgtggaagtgaacctaaacacaatgacaaggccaggcggtgaagggcaatcagctgttgcccgtctcactggtgaaaagaaaaaccaccctggcgcccaatacgcaaaccgcctctccccgcgcgttggccgattcattaatgcagctggcacgacaggtttcccgactggaaagcgggcagtgagcgcaacgcaattaatggattttgccgatttcggaaccaccatcaaacaggattttcgcctgctggggcaaaccagcgtggaccgcttgctgcaactctctcagggccaggcggtgaagggcaatcagctgttgcccgtctcactggtgaaaagaaaaaccaccctggcgcccaatacgcaaaccgcctctccccgcgcgttggccgattcattaatgcagctggcacgacaggtttcccgactggaaagcgggcaggattttgccgatttcggaaccaccatcaaacaggattttcgcctgctggggcaaaccagcgtggaccgcttgctgcaactctctcagggccaggcggtgaagggcaatcagctgttgcccgtctcactggtgaaaagaaaaaccaccctggcgcccaatacgcaaaccgcctctccccgcgcgttggccgattcattaatgcagctggcacgacaggtttcccgactggaaagcgggcagattttgcccgatttcggaccccaccatcaaacagaattttcgcctgctggggcaaaccagcgtggaccgcttgctgcaactctctcagggccaggcggtgaagggcaatcagctgttgcccgtctcactggtgaaaagaaaaaccaccctggcgcccaatacgcaaaccgcctctccccgcgcgttggccgattcattaatgcagctggcacgacaggtttcccgactggaaagcgggcagtgagcgcaacgcaattaataccaaaggtagataaaaccacaaagatagggaaaaaacagagcagaaaaactggaaactctaaaaatcagagtgcctctcctcctccaaaggaaagcagctcctcacacgcaacagaacaaaactggacggagaatgactttgacgagctgagagaagaaggcttcaaacgatcaaactgctccgagctacaggaagaagttcaaacccatggcaaagaggttaaaaaccttgaaaaaaaattagacgaatggctaactagaatcaccaatgaagaaaagcccttaaaggacctgatggagctgaaaaccaaggcacaagaactacgtgacaaatgcacaagcctcagtagccgattcaatcaactggaagaaagggtatcagtgatggaagatcaaatgaatgaaatgaagcgagaagagaagtttagagaaaaaagaataaaaagaaacgaacaaagcctccaagaaatatgggactatgtgaaaagaccaaatctacgtctgattggtgtacctgaaagtgatggggagaatggaaccaagttggaaaacactctgcaggatattatccaggattttgccgatttcggaaccaccatcaaacaggattttcgcctgctggggcaaaccagcgtggaccgcttgctgcaactctctcagggccaggcggtgaagggcaatcagctgttgcccgtctcactggtgaaaagaaaaaccaccctggcgcccaatacgcaaaccgcctctccccgcgcgttggccgattcattaatgcagctggcacgacaggtttcccgactggaaagcgggcatcaggcaccgtgtatgaaatctaacaatgcgctcatcgtcatcctcggcaccgtcaccctggatgctgtaggcataggcttggttatgccggtactgccgggcctcttgcgggatatcgtccattccgacagcatcgccagtcactatggcgtgctgctagcgctatatgcgttgatgcaatttctatgcgcacccgttctcgcagcactgtccgaccgctttggccgccgcacagtcctgctcgcttcgctacttggagccactatcgactacgcgatcatggcgaccacacccgtcctgtggatctacccactagtcaattcaccatcttgttga

SEQ ID NO: 16908 - DNA, 1495 bp, Homo sapiens
  SIMILAR (5852)..(8434): 951254mologous to Homo sapiens putative p150,accession number U93563,Smith-Waterman Score=4230.
atgggtactttaaaaaaccgagctacagataaagatttccagtctgacgctaatgaagagttcataagcggtatggaggaacaaaaggcaaggaaatgccgtatagagtgttttgatcaagacaaaagttcttttaaagtccaaatctcccttcctctcccctcgggactccacatcccaacaaacctcccttccgcggcagtcactacctttgcagcactctggccctgcgctcctcctgccacgtgtcggacccctgctgggctggcctcctttcctactctgcgacacccctcccccccccgcccctatcctgcccgctcccgcacccggtccctctccccgggcctcgcgactccggcgattcagctccgggtccccgcccgcatgtaacgcggttgtcatggacacggcacctgcgccctacggagtggcccttcggcgccgtcgctctctcccaactgcgacgtcgctttgcggacttccagagctccgccctaccccgccccgccctttcgggcctccccaggccgcgcgcgcccggcccccacccagccacccctcgatgcccggtgcctttccaggcgccgcggagccacggggaccgcgggggcgcgcgagcgagcaagcggccgcatgcgcactggctgcctcccctagcggcgatccgggccctgccgctcgcgcttgggcaggacgcggggcgattggggggaggggggagcggcttcgcttccagccccgagtgaggcggagacccaggcgggcgggcagagcaggcggcaccgcacctcggccagaggcggctgcagcagctgctgcccttgtccctgccgccgcctctccagtcccttctgtgattaccactccagctgctgggaacgggcgagaaagaggaggaggcgagaaactcccaccgacccacagagccactcgccctagagcacagctctgcatccctttcctcttgtctccatctcttcttcccccctttcttacctcttccccgtttttctgcagagtggtgtgggtgtatgccccagtttttgatactgtgcttagtatagaaacacaggaggaatttcaaacccatcgtaaagaagctaaaaaccttgaaaaaagattagatgaatggctaactagaataaccaatgtagagaagtccttaaaagacctgatggagctgaaaaccatggcacaagaactacatgacaaatgcacaagcttcagtagccgatttgatcaactggaagaaagggtatcagtgactgaagatcaaatgaatgaaatgaagcaagaagagaagtttagagaaaaaagagaaaaaagaaagaaacaaaacttccaagaaatttgggactatgtgaaaagaccaaatctacgtctgattggtgtacctgaaagtgacggggagaatggaaccaagttagaaaacactctgcaggatattatccaggagaactttcccaacctagcaaggcaggccaacatttaa

SEQ ID NO: 16909 - DNA, 2210 bp, Homo sapiens
  SIMILAR (758)..(405): 951254mologous to Escherichia coli Orf 2 downstream of phoQ,accession number D90748,Smith-Waterman Score=593.
acatccacaccaaaaccccatctgtatgtcaccatcatcaaagaccaaaggtagataaaaccacaaagatggggaaaaaacagagcagaaatactggaaactctaaaaatcagagcacttctcctcctccaaaggaatgcagctctgcaccagcaatggaacaaagctggatggagaatgactttgacgagttgagagaagaaggcttcagacgatcaaacttctctgaactaacggaggaagttcgaacccatcgcaaagaagctaaaaaccttgaaaaaaagattagacaaatggctaactagaataaccaatgtagagaagtccttaaatgacctgatggagctgaaaaacatggcacgagaactacgtgacaaatgcacaagcttcagtagccgattcgatcaactggaagaaagggtatcagtgattgaagaccaaatgaatgaaatgaagcaagaagagaagtttagagaaaaaagagtaaaaaagaaatgaacaaagcctccaagaaatacgggactatgtgaaaagaccaaaatctacgtctgattggtatacctgaaagtgacgaggagaatggaaccaagttggaaaacactctgcaggatattattccaggagaacttccccaatctagcaaggcaggccaacattcagattaaggaaatacagagaatgccacagagatactcctcgagaagagcaactccaagacaaataaattgtcagattcaccgaagttgaaatgagggaaaaaagtgttaagggcagccagagagaaaggtcgggttacccacaaagggaagaccatcagactaacagtggatctctctgcagaaaccatacaagccagaagagaatcaacaagacagaaagttaacaaagatatccaggaattgaactcagctcagcatcaagcagacctaacagacaactacagaactctccaccccaaatcaacagaatatacactcttctcagcaccacatcacacttattccaaaattgaccacatagttggaagtaaagcactcctcagcaaatgtaaaagaacagaaattataacaaactgtctctcagaccacagtgcaatcaaactagaactgaggattaagaaactcactcaaaacctctcaactacatggaaactgaacaacctgctcctgaatgactactgggtacataacgaaatgaaggcagaaataaagatgctctttgaaaccaatgagaacaaagacacaacataccagaatctctgggacacatttaaagcagtgtgtagagggaaatatatagcactaaatgcacacaagagaaagcaggaaagatctaaaattgacaccctaacgtcacaattaaaagaactagaaaagcaagagcaatcgcattcaaaagctagcagaaggcaagaaataactaagatcagagcagaactgaaggagatagagacacaaaaaactcttcaaaaaatcaatgaatccagggactggttttttgaaaagatcaacaaaattgatagacagctagcaagactaataaagaagaagagagagaagaatcaaatagacacaataaaaaatgtgttggaatttctggccaaggcaattaggcaggacaaggaaataaagggtattcaattaggaaaagaggaagtcaaattgttcctgtttgcagaagacatgattgtatatctagaaaaccccatcgtctcagcccaaaatctccttaagctgataagcaacttcagcaaagtctcaggatacaaaatcaatgtgcagaaatcacaagcattcttatacaccaataacagacaaacagagagccaaatcatgagtgaactcccattcacaattgcttcaaagagaataaaatacctaggaatccaacttacaagggatatgaaggacctcttcaaggagaactataaaccactgctcaacaaaataaaagaggatacaaagaaatggaagaacattccatgctcatgggtaggaagaatcaatatcatgaaaatggccatactgcccaaggtaatttatagattcaatgccatccccatcaagctaccaatgactttcttcacagaattggaaaaaactactttaaagttcacatggaaccaaaaaagagcccgcattgccatgtcaatcctaacccaaaagaacaaaattggaggcatcatgctacctgacttcaaactatactaa

SEQ ID NO: 16910 - DNA, 702 bp, Homo sapiens
  SIMILAR (355)..(570): 691254mologous to Homo sapiens Human secreted protein, SEQ ID NO: 4884,accession number G00803,Smith-Waterman Score=243.
ggtggacttctaactttttctgcacaggaatttggaagactttgttatggcaggtgccgtactcttactttacaaacaaacattaggggcagcccaggcagcacacctttctggatttaccaaaaatacacattttcctattctactgttgctttaccacatggttcagttgtagcctcagaattactttatggaagaaactgagtgtagacagaaagtaagaggtgtgatgaccaagtcatgggataaatgtttggagtccacagtatcatgagaacttcttaggaataaagtataggcttcccagtgatgttagtcttatccatcctcctctatacatgtgagatgtttcaggattcagtggcctttgaggatgtggctgtgaccttcacccaagaggagtgggctttgctggatccttcccagaaaaatctctacagggaagtgatgcaggaaaccttgaggaacctgacctccataggaaaaaaatggaacaaccagtacattgaagatgagcaccaaaatcctaggagaaacctaagcaatccttcctaccgcctcgaagttttagacaaagcttcacactctccaccaacggccaccttcagaatccctcaaccacctgcaccttctaaccccccttccacaggtcccgccctttctgccaaaggaacttacacctttccaggcattgatgcatga

SEQ ID NO: 16911 - DNA, 803 bp, Homo sapiens
  SIMILAR (326)..(760): 371254mologous to Mus musculus granuphilin-b,accession number AB025259,Smith-Waterman Score=270.
cgacccacgcgtccgtgcttttgtcttagatggatgtcagcagctgctgcagaacccggtgaaaacaccccccgggtagcacgaggctctgcgagccgtaactccgacaaacgcagaacttcttgaggctttcttcttctaaggagtatgacacagttaaaaaggaaaaaagaaccacaagcaaaacagttgccagtgaaataggagagggagctctttaaacaaggctggctgcagctggcctccgccgctcatctgcagggcgtgagcgcttggtccatgcagtgaagctcttccaacctgggtcaacgaaaacggagaagaaatggcccaagaaatagatctgagtgctctcaaggagttagaacgcgaggccattctccaggttctgtaccgagaccaggcggttcaaaacacagaggaggagaggacacgggctgcaggaaactgaaaacacacctgcagcatctccggtggaaagggaccgaagaacacggactgggagcacaaagagaagtgctgtgcgcgctgccagcaggtgctggggttcctgctgcaccggggcgccgtgtgccggggctgcagccaccgcgtgtgtgcccagtgccgagtgttcctgagggggacccatgcctggaagtgcacggtgtgcttcgaggacaggaatgtcaaaataaaaactggagaatggttctatgaggaacgagccaagaaatttccaactggagataactctgtgatgaacgtcttgtacaggcaaacatgagacagttggagggcagctcttgcaatcttatcagaag

SEQ ID NO: 16912 - DNA, 1176 bp, Homo sapiens
  SIMILAR (325)..(543): 411254mologous to Mus musculus granuphilin-b,accession number AB025259,Smith-Waterman Score=174.
atgaagcatttatccaagagaaatgaaagcatatgtccacacaaagctttatacacagatgttcatcgctgctttctttgtgacagccccaaactggaagtaattcaaatgtccatcaacagtgaagctcttccaacctgggtcaacgaaaacggagaagaaatggcccaagaaatagatctgagtgctctcaaggagttagaacgcgaggccattctccaggtcctgtaccgagaccaggcggttcaaaacacagaggaggagaggacacgcctggggtcaggtgttccatctaatactatcttctttaactctgagggctgcaggaaactgaaaacacacctgcagcatctccggtggaaaggagcgaagaacacggactgggagcacaaagagaagtgctgtgcgcgctgccagcaggtgctggggttcctgctgcaccggggcgccgtgtgccggggctgcagccaccgcgtgtgtgcccagtgccgagtgttcctgagggggacccatgcctggaagtgcacggtgtgcttcgaggacagggcaagatcaggagagcggaaggtaaagaaacagctgctctatgtgctgaagaataagaagccatccattggaagtgctggctcatttcttgaacccatttcagagttcctgtctgagcgatcgcttcaagtaaagaaggcgccccagataaaaaggcaggcagtccagacaccacagcatgtgcatgccacacgcatgcgcccccccaacccctatgatgagaagacacaccctcgagtgatgaacttctttctgtgctggagcccatggggtcctctgagtcccacttcctgccttcctcagaagataagaactgtatccgccttgccttccacaggagtgggtgtcaatggattgttcacactcacggataaccctgcccagttagatcctacaccaagagatcacacgacctctctggggagcgcatctgcacgttctcagcgggaacttggcctcctcacctggctgaccccgtgcatagtcaccgagtgtcactctgaggccatggccggcctgggtcaggccaaaggcgccagcggcagccgctcaggggagggaacacgaaaggaaactctccaggaagccagcgcgctcgacctgagcgcaggccccgcggctgcgggctaa

SEQ ID NO: 16913 - DNA, 1219 bp, Homo sapiens; identical to SEQ ID NO: 3629
  SIMILAR (499)..(621): 731254mologous to Mus musculus Pro-Pol-dUTPase polyprotein,accession number Y12713,Smith-Waterman Score=152.

SEQ ID NO: 16914 - DNA, 577 bp, Homo sapiens
  SIMILAR (388)..(56): 931254mologous to Homo sapiens High affinity immunoglobulin E receptor-like protein (IGERB),accession number W96745,Smith- Waterman Score=515.
agagctggtgatattcattcctagactacctcggaccaggccttttgtagttctaaatccctgctgcaattgacaaggatcctgaaataataaacattactgacccccaaattgtgtaccccgatatacacggaaataggggttacttcccataagtattagatgccatacacatcattgttattcccatgctaaggctcatcagggcagtcagaatctgcacaaccccaaggactttgggttctcccttcaagaacttctcttgcaatcctttccacagatgtgaatgtatgacagccatgtttcccagctggggcacaccagggccagcccctggcatggcctgttccattccttgcatggttgtcatggcagcagaaaaggtgctgaaaacagcaaaggagtagcagaaatcttgtagatcatagaaacccaggatggctacatgaagaaggagataaaacacctttcttccaccaccccttcccccagttaggacaatctctgagtcagcagagccttcttcctgcagggagaaggtaagcgagaggaccccagcagctcccatcaccaccat

SEQ ID NO: 16915 - DNA, 2526 bp, Homo sapiens
  SIMILAR (838)..(1416): 881254mologous to Homo sapiens putative p150,accession number U93565,Smith-Waterman Score=887.
atgggattaatatcagattacccagaaaatgaatatagagggagaagagaagatggcctacaactatattcagtgagcaagagaaagaagaacctcaaagatatcagagaagaattgactggagaaacagaagaaaatgtaggtttgtgtggtatcagaccaagaaaagagtttcaagaaaaaggaattaggacaatctctgagtcagcagagccttcttcctgcagggagaagtttattatttcaggatccttgtcaattgcagcaggaattagaactacaaaaggcctggttgtgcagattctgactgccctgatgagccttagcatgggaataacaatgatgtgtatggcatctaatacttatggaagtaaccctatttccgtgtatatcgggtacacaatttgggggtcagtaatgtgccctgagaacagccaccaccaatacagcagagcacatgcacaggcaaggccacctaagctcccaggtatctgccatggagtgatgggccatgagttacacacagtctcactcctggagaaagctctgcccttctgctatattgattgtctcttcctggtgggctcagatgaagggactgcccaacaaggactagacaccctgttgatccacatgcagcaacccagctgggccattaacacagacaagataaaaagacctaataatatccaaatgaaactaataaaactcctgggcataattcagaaagcagaaaagcctctcattgcaaagatgattgtcaagattttgaacttctctgtccctccccaccaaaaaccacaaaaaaaaccccagcaattggtagacctatttggctactgttcactggacaaagtgatgaaagaaaattatgaactcagggattctaactctaagcttcagaagcagatactgagcctcaaatcttctaagattgccctgagtgagagtcttatcttctgtagagaaagagctgaaattgtggacactcagacacaagcttttatcatgcgatttgctgacctgcaacaaaaggtaactggattggggaaagaaagaaaaaatgatcagaccttttgggaactactggacactgactctgagctgacattgattccaggggacccaaaaagtcattgtgatcctccagttatagtaggggcttatggaggtcatgtaattaatggagctttagctcaggttcaacttacagtggctccactgtcaggacccccacactggcccctgactcatagagtgaaggctactatggtggaaaaggccaaatggaagccattagagctgcctctacctagaaaagcagtaaatcaacaacaatatcccatccctgaagggattgcagacattagtgccaccatcaaggacttaaaatatgcaagggtgatgattcccaccacatccccattcaactctcccatttggccagtgcagaagacagatggatcttggagaatgacagtggattatcatgagcttaaccaagtagtgactccagttgcagttgctgtaccagatgtggtttcattgcttgagcaaattaacccatcttctggtacctgctggcaagaccagcaatgtacctttactgtcctacctcaggggtatatcaactcttctctggctttgtgtcatgaccttgttcagggagatcttgatcacttttcccttccacaaaatatcacactggtccattatattgatgccattatactgatgggatccagtgagcaagaagtagcaagcacactggacttattgcctgcactgatggtctcatggggagttccccaggatcaattaacagaggaagagaagacaagggccctgtttacagatggctctgcacgatatgcaggcaccacctcaaagtggtcagctgcagcactacagccccttcctaggacatccctgaaggacagcggtgaaggaaaatcgtcccaggatggaggatatgcatgggctcagcaacatggacttccattcactgacctggctatggccactgctgagcacctaatttgccagcagcaaagaccagcactgagccctcaatatagcaccattcctcggaatgatcagccagctacttggtggcaagttgattatattagacctcttccatcacggaaagggcagcggtttttcctcaccagaatagacacttactttggatatgggtttgcctatcctgcacacaatgcttctggcaagactacaatccaagaactcatggaatgccttaaccactgtcatggtatcccacatagcattgcctctgaccaaggcactcacttgttggctaaagaaatgcggcagtgggctcattctcatggaattcactggtcttaccatgtttcccatcatcctgaagcagctggattgatagaatggtggaatgtccttttgaagtcacaattacaacatcaaccaggtgacaatacttttcagggctggggcaatgttctccagaaggctgtgcatgctctgaatcagcgtctaatataa

SEQ ID NO: 16916 - DNA, 558 bp, Homo sapiens
  SIMILAR (314)..(541): 341254mologous to Rattus norvegicus calmodulin-dependent protein kinase II beta M isoform,accession number AF069731,Smith- Waterman Score=90.
tcagcgcatgcgccgtcctgaagtgcggagcccaacagctatattccccggtgtctgcgccagaggagttaccagcagcagctggctgcactggctgaagtgcttgattctcactggggccagctgctttggagccctcattttctgagcctttggagttctgccatgctccgggatttcaccactttcaggaggaaagcccagtccagttcctggaccaaggtcacacaaatagtgggttgcggaggcaagctttttcgtgctctgggaagcagggaaggcaggcagggaaaccagcagttgtaatccagcgctgcggaaagtgttccaggcagaggaaactgctggagcaaatgctcctagcaggaggccactggcgcctccgaggatcagcaggggggccagtgtggaggtgagaggctgctcataccctcctagcactggaagagccttgtccttgggaccggacactatggctttgccctctctcacaggtcccattgagagggaaataccagcacttgcacagtgcctgaaatcaaaagcttcctcctccat

SEQ ID NO: 16917 - DNA, 2498 bp, Homo sapiens
  SIMILAR (2628)..(2714): 741254mologous to Homo sapiens Human secreted protein, SEQ ID NO: 6532,accession number G02451,Smith-Waterman Score=98.
  misc_feature (1)...(2498): n = a,t,c or g
tttttttttaactgtccgcaagttaaaaaggattttattgcttattccaggctttcaaaatgagccccagaacttcagggctggtgtgtgtttcaagaagttgtttatgatgtaacagggaggatagaaaaatcccaggcaagtttgaatgtcgaggcccaccctctcttcccttggaccccctgctcccaaaagcagctgctgggtgaggctctttccccatctgccctcattccaccccaacaggactcccaagactgaaggcagcgcagccttagtgatccccccacagcctcacaggtgaagaggctgctcataccttctcctagcactggaagagcctttgtccttgggaccggacactatgggctttggccatagatggaagcggagaaatggttgccacaggagttgtcttaagaggacaagggcatgcacgggtctgagatcagaggggtgtgaccgtgggccaccccatgaagccaggnccgttttgggacacatcacactcgcacagctttttttaaaaaaataataagcggcccaatcttttaagtgggtaagatttcctatacaaattctggatttttggcttctctaggagttaacattggaaactttttttttgagacagagtctcactctgtcaccaggctggagtattgccagtatctggcagttgtcttcacagactggctatgcactctccaactgacttcagtccttggcacccttaattatatttccaactggagaccaggcctcagcagccttgtatcaatgggcacatgtgctgtgactttctgtgtaagaaatatttacattgtaatagcatctttaatcaaaaaggaaaaatcggctgggtgtagtggctcatgcctgtaatccagcgctttgcaaggccaaggtggacagatcacgaggtcaagagatcgagaccatcctggccaacatggtgaaaccccatctctactaaaaatacacaaattagccgggcgtggtggcagggcctgtagtccaagctacttgggaggctgaggcaggagaattgcttgaacccaggaggcggaggttgcagtgaggtgagattgcaccactgcactccagcctggtgacaaagtgagattctgtctcaaaaaaaaaaaaagcgaaaaatcgaaatcaagcctggaagcaacatgtttctcacggttcttatcagtcatttaagtctcttgctaggccctgcgggtaccgtgagtttgtaaacaacagagcactcctaatatctcccccaagggattcctcccccacacaccctacctctccaggatacactgcaccctagtattaattgggcaaatctagaaaggaaataaaaattagtcacagaagttaagggaggaatagactaagagcaaatacttttgccccttcattgtaacagggggccggaggagaacaaaaacgttaatactctcacttcgcttttaacttagtgacaaaaaaaaaaaagagtgaaagagagagagtcataaagattcttcaggtcctaaaacactctggttcccattccttaactgctttggaaatgaacgaggctctttagagagaatgttaacggggatgagtaacgtggtcagcccagcagatgccctgggctatcaagaactgtccaactcattctcccttaggtcagggctgcttgccccagcctaaaatgtaagtggtacaaaatgattttcagtgagggtagtggactcactgtagaaaggggattaaaggggggcagagagtgggagtttggccttggcaaacacaaaacagaggaaaagggaccttcctcacaccgctccattctgctgtggcagatgccatgttatatgccctttagagaggcagcgatcttgatgcagcccagacgcttcccactgctgctcaggacgctctctatgcggtagttcccggtggtgagccaactgggcagctccaggtcaggcacaacgaattcgctcttgggcagtgagtaggttccttctttgaagggacagtggcaaggaagcccataggtacgcaggggctctgggcagggctccccagtaggaattaacatgtcaagcacatcacagaagtgttcaaaggtacagctgccaatgtagtctgtgcatgggatcttgatccagaggccagccacctccttctccaaaactaaatccaccttcagaggagaactcagggggacactggtgctgcccacgacactgagggtcacatttccaggaacgacgatggggtcaggctccagagtcaggcttctgatcaccgcagggtccttcccttcatcacagttatcccaggaaaagctactgagctgggatggctttttcaggtgggcttgcgcaggggtcgcgagaagcaagcccagggcgatcaggaggggagcctgcatcagggactgcatcgggaagggtgggtcagggcggagttaactgcaaggtctgtggcggcagaggtgcctt

SEQ ID NO: 16918 - DNA, 738 bp, Homo sapiens
  SIMILAR (340)..(456): 661254mologous to Homo sapiens AIBC1,accession number AF041260,Smith-Waterman Score=118.
atgctcttcacagatgacctttcccctgaccgtaggctgagagtcagagactcacattgctgctcccagaacctctgcactcagaagcctgatgccactaccatcccacagctgccccccaccaggaagactgaaggcaaaggtggtgctgatctcttgttctcaagaggagagaggggaaccccagagatgcaggagagcgagactgtggagggcagcctccacccacctccggtggggcatctgggcttgcttctgaataaccagctggaaagcctgccctgcccgccagctctgggggaagggaagctggaggcccaggacagttctcttgatttgcaagctcacgaaacagtgcgtcagcaaagcagtgcccctagaagggttgacaacgcgtctgctctgaacggggttccagtggtggtgtcgacccacacagttcagcacttagaggaaggccctgttcagggcactttgcttatattcactggtttgactccataccagccccttgagatggaggctataattatccccatttttacagatgaggaaactgaggcccagcgaggctcagtgatgctcagggattccaaactccagagcccacattcctatcctatgtgctacactgatgtctacatagagcttcagcactgggctggcatacggcaagctctccatacaagtcatatatggttatcattattacgagttccaggacctttggggcactga

SEQ ID NO: 16919 - DNA, 2813 bp, Homo sapiens
  SIMILAR (1)..(1272): 831254mologous to Homo sapiens putative p150,accession number U93570,Smith-Waterman Score=1773.
ctccaccgacagccaggcactgggcagcacgcactggagacccaggaccctgtgcaggagcagctccgggtgacacgaggggactgaagatactcccacaggggctcagcaggagcaatgggtaaccaaatgagtgttccccaaagagttgaagaccaagagaatgaaccagaagcagagacttaccaggacaacgcgtctgctctgaacggggttccagtggtggtgtcgacccacacagttcagcacttagaggaagtcgacttgggaataagtgtcaagacggataatgtggccacttcttcccccgagacaacggagataagtgctgttgcggatgccaacggaaagaatcttgggaaagaggccaaacccgaggcaccagctgctaaatctcgttttttcttgatgctctctcggcctgtaccaggacgtaccggagaccaagccgcagattcatcccttggatcagtgaagcttgatgtcagctccaataaagctccagcgaacaaagacccaagtgagagctggacacttccggtggcagctggaccggggcaggacacagataaaaccccagggcacgccccggcccaagacaaggtcctctctgccgccagggatcccacgcttctcccacctgagacagggggagcaggaggagaagctccctccaagcccaaggactccagcttttttgacaaattcttcaagctggacaagggacaggaaaaggtgccaggtgacagccaacaggaagccaagagggcagagcatcaagacaaggtggatgaggttcctggcttatcagggcagtccgatgatgtccctgcagggaaggacatagttgacggcaaggaaaaagaaggacaagaacttggaactgcggattgctctgtccctggggacccagaaggactggagactgcaaaggacgattcccaggcagcagctatagcagagaataataattccatcatgagtttctttaaaactctggtttcacctaacaaagctgaaacaaaaaaggacccagaagacacgggtgctgaaaagtcacccaccacttcagctgaccttaagtcagacaaagccaactttacatcccaggagacccaaggggctggcaagaattccaaaggatgcaacccatcggggcacacacagtccgtgacaacccctgaacctgcgaaggaaggcaccaaggagaaatcaggacccacctctctgcctctgggcaaactgttttggaaaaagtcagttaaagaggactcagtccccacaggtgcggaggagaatgtggtgtgtgagtcaccagtagagattataaagtccaaggaagtagaatcagccttacaaacagtggacctcaacgaaggagatgctgcacctgaacccacagaagcgaaactcaaaagagaagaaagcaaaccaagaacctctctgatggcgtttctcagacaaatgtcagtgaaaggggatggagggatcacccactcagaagaaataaatgggaaagactccagctgccaaacatcagactccacagaaaagactatcacaccgccagagcctgaaccaacaggagcaccacagaagggtaaagagggctcctcgaaggacaagaagtcagcagccgagatgaacaagcagaagagcaacaagcaggaagccaaagaaccagcccagtgcacagagcaggccacggtggacacgaactcactgcagaatggggacaagctccaaaagagacctgagaagcggcagcagtcccttgggggcttctttaaaggcctgggaccaaagcggatgttggatgctcaagtgcaaacagacccagtatccatcggaccagttggcaaacccaagtaaacaaatcagcacggttcccaccaggttctcctgccaccaagatgtgttctccttactccatctcctccccaaacacgctccatgtatatattcttctgatggccagcaaatgaaattctgcctagaaattaagcccgagctgttgtatattgaggtgtattatttacgtctctggtccagtcttttctggcaaataacagtaaagatggtttagcaggtcacctagttgggtcagaagagtcgatgatcaccaagcaggaaagggagggaatagaggaatgtgttcgggttaagtgatgaaaatggcagtggtggccgggcgtggtggctctcgcctgtaatctcagcactttgggaggccgaggcaggtggatcacctgaggtcaggagttcaagactagcctggccaacatcatgaaaccccgtctctactaaaaatacaaaaattagccaggcatggtggcacacacctgtagtcccagctactcgggagcccaacgcacgagaaccgcttgtacccaggaggtggaggttgcagtgagccgaagttgcaccattgcactccaccctgggcgacagagcaagattctatcaaaaaaaaaaggcagtggcaagtaagttatagaagagaaatgctgctagaaggaattaagcgttgtagtaaacgcgtgctcatcctctaagcttgaagaagggagacgaaaatccatttgtttaaattcacatctcaaggagggagaacccgggctgtgttgggtggttgccaatttcctagaacggaatgtgtggggtatagaaaaaggaatgaataagcgttgtttttcaaatagggtccttgtaagttattgatgagagggaaaagattgactggggagggcttaaaatgatttgggaaaacaattgcttttgaggctcagtgacaacggcaaagattacaactt

SEQ ID NO: 16920 - DNA, 1302 bp, Homo sapiens
  SIMILAR (1)..(1512): 901254mologous to Homo sapiens putative p150,accession number U93563,Smith-Waterman Score=2353.
atgcacatttcttcaggcttggctagtaggagcacacagcttctagaacactgtagaggaacacctgcctcagaagggcagcttctccaagaaaaaaggacagatctgaaaacaaaggagagtttctgttccaattccagacctgtggcatatcggtggtcaatcccttttgctactcatggatgtctagaagctctttctggagcctgccatcaggcattgcccaaggccatgtcccatgatccatccatacagtgttgtcatcattctagctgtgatgttctgggagctgtccagacaagtattgaatgtgtaagcagacacaggggtaactctcaaggaacaaaattgcctgaaggcttttccacaggtacagtgttggaagttctggccagggcagtcaggcaggagaaagaaataaaggagattcaattaggaaaagaggaagtcaaattgtccctgtttgcagatgacatgattgtatatctagaaaaccccatcatctcagcccaaaatctccttaagctgataagcaacttcagcaaagtcttaggatacaaaatcaatgtgcaaaaatcacaagcattcttatacgccaataacagacaaacagagagccaaatcatgagtgaattcccattcacaattgcttcaaagagaataaaatacctaggaatccaacttacaagggatgtgaaggacctcttcaaggagaactacaaaccactgctcaccgaaataaaaaaggatacaaacaaatggaagaacattccatgctcatggataggaagaatcaatatcgtgaaaatggccatactgcccaaggtaatttatagattcaatgccatccccatcaagctaccaatgactttgttcacagaattggaaaaaactactttaaagttcatatggaaccaaaaaagagcccacattgccaagtcaatcctaagccaaaagaacaaagctggaggcatcatgctacctgacttcaaactatactacaaggctacagtaaccaaaacagcatgggcttgctcctactatccatgtcttgcggactcacaggtttatatcctcagcctggacatctatatacagagaccttcctctgtttgtctcacaggcatctccccctctacacgtctacacctgcgtttgcttcttatacctcttcttcctgggggtttctcatctctcatctgctctgtggttaacttccagtattgttcccttcagtactcccttaatactgctgccagaataattctaaaaagctggggatatttctacctgcagttatga

SEQ ID NO: 16921 - DNA, 262 bp, Homo sapiens
  SIMILAR (113)..(169): 1001254mologous to Homo sapiens dJ240B8.1 (novel protein similar to T-STAR, Etoile, Sam68, SLM1 and p62 Tyrosine Phosphoprotein),accession number AL049544,Smith-Waterman Score=110.
aaatatagtgattaaggtttctaaacacattgttacaattacagagattttaattaaaattatggcaattatcagtgatttggaacttaattacttcggtggttatagcagtgtgcctgaatactatgactacggtcatggagtaagtgaggatgcctatgacagctacggtgagaaactaagactgagagcattaagtaccttgcctcagttcaacaatttgccagtaacagaacaagaatgtgaattcaagtgtgtctga

SEQ ID NO: 16922 - DNA, 2572 bp, Homo sapiens
  SIMILAR (177)..(1733): 961254mologous to Homo sapiens zinc finger protein,accession number L35269,Smith-Waterman Score=2735.
ctcaggtcgggcttctcagctgcgcacagcagtactcatcttggccctgggaagaaactcaagaagaagcttttgaaacataaagcttggatggggtttgacctctgcagggcagcgcccagctataggagttcccctgctgagcagagaagatgactgcagaattgagagaagccatggccctagccccatggggcccagtgaaggtgaaaaaggaggaggaagaagaagaaaacttcccaggtcaggcatccagccaacaagtgcactccgagaacatcaaagtctgggccccagtgcagggtcttcagacaggccttgatggatcagaagaggaagaaaagggtcagaacatatcctgggatatggcggtagtcctgaaagcaactcaggaggcacctgctgcttcaacccttggcagctactcattaccagggactctggccaagagtgagatactggagactcatgggaccatgaactttctaggtgctgaaaccaagaacctacagttactggttccaaaaactgagatatgtgaggaagctgaaaaacccctcatcatatcagaaagaatccagaaagctgatcctcaaggacctgagttaggagaagcttgtgaaaagggaaacatgttaaagaggcagagaataaagagagaaaagaaagatttcagacaagtgatagtgaatgactgtcacttacctgaaagcttcaaagaagaggaaaaccagaaatgtaagaaatctggaggaaaatatagccttaattctggcgctgttaaaaatccaaaaacccagcttggacaaaagccttttacgtgtagcgtgtgtgggaaaggatttagtcagagtgcaaacctcgttgtgcatcagcgaatccacactggagagaaaccctttgaatgtcatgagtgtgggaaggccttcattcagagtgcaaacctcgttgtgcatcagagaatccacactggacagaaaccttatgtttgctcaaaatgtgggaaagccttcactcagagttcaaatctgactgtacatcaaaaaatccactccttagaaaaaacttttaagtgcaatgaatgtgagaaagcctttagttacagctcacaacttgctcggcaccagaaagtccacattacggaaaaatgctatgaatgtaatgaatgtgggaaaacatttactaggagctcaaacctcattgtccaccagaggatccacactggggagaagccctttgcctgtaacgactgtggcaaagcctttacccagagtgcaaatcttattgtacatcagcgaagccatactggtgagaagccatatgagtgtaaagagtgtgggaaagcctttagttgtttttcacaccttattgtgcaccagagaattcacagtggagatcttccttacgtgtgtaatgaatgtgggaaggccttcacatgtagctcatacctacttattcatcagagaattcataatggagaaaaaccttacacatgtaatgagtgtgggaaggccttcacatgtagctcatacctacttattcatcagagaattcataatggagaaaaaccttacacatgtaatgagtgtgggaaggccttcagacagaggtcgagcctcaccgtgcaccagagaacccacactggggagaagccctatgaatgtgagaagtgtggtgcagctttcatttccaactcacacctcatgcgacaccatagaacccatcttgttgaataacaagtaaggaagaggaagacctccagcattggtcataaccttctgcctccctaatgagacacctctttgctgttttcttcctcctctataaaagtgagggctgtgtccttaaaagttatagttttcaggaatgcagcagaagacacaagaaaagcatttcgagaggctaatttaaaacaaaaagtaagcacctaaagggaaggactttgttttaactgtaccttaagcggtcatgttctctgaagtggaatgtggctttcctaggaatgggtcgtacaaagctaagtggtaatgatgctatttggggaaaggtcttttttgcttaattttgttttttaaaactctgatgattgcttgagcaacaggcaggttatctgcctggttgaattctggttgaaccgtgtattctaatatttctggttaagtggtgactgggtaaggaaaccacttggggtagcagttcaacaatcacttacgaatgtttataagctttccatttcctaggtaattttttaaaagccagtcaaaacaaaaactttactgaaaatggacagaaaataggaaatggactttttccttactgtctatcctcctgaaccttggtattgtaaagatctggggacctctgggtctgttctgaccattccctagtctccatggccaagcactcaaggattgatggacaccacacaccagctatattcatttgccaagatcaacagctccttctccaaacaactcaagcccccaattcccatcgcattccatttgggtgagatgcaactaacagccccttcctggatgaaggagtcaaagaataaagcttgcctagaggc

SEQ ID NO: 16923 - DNA, 1185 bp, Homo sapiens
  SIMILAR (4)..(1221): 731254mologous to Homo sapiens putative p150,accession number U93569,Smith-Waterman Score=1466.
atggtcaccaaacatagtcttggggatgacttggtgagaggaagggttttcttggtgctggggtctcagggactccttcggggagctgatctcagaggatttgccatggatgaccaggttgcaaaaatccacaaggctgtggttgagatggcaaacagctttaacctgggtgtgaatgaggatgacattgaggagctcctagcggtggtttcagccccagcacagaaacaggaaatgcattttgaggagacaacagctctgggtacaacaaaggaatctcctcctacctcacccctcagtgggggctcagcccctggagcccacctggagcctccttatgacccagggacacaccacctccccagtggggacttcgtgaccctgtttgttccttttgcttattctctaatcattcgtgtagttagtaagttttcatcaagggcatgtcgtaggaaaggcactgccagagaccagagagatgtagtacatctattgtcactgatttcaaagagcttgttatctagatggagttcccctgctgagcagaaaaaagactgcagaattggaaaaaagcctggccctagcccctggggcccagtgaaggtgagaaaggaggaggaagaagaagaaaacttcccaggtcaggcatccagccaacaagtgcactccgagaacatcaaagtctgggccccagtgcagggtcttcagacaggccttgatggatcagaagaggaagaaaagtggcccttggggcagggaacacatgggtcccaggcagcaggtagccttagagggctgaagtcagaggaagctccggccctactctcagggtgcctttctcccagagctcatgctgttgtcaccaggctagtactgagacctggaaaaaaaaattctggagacaagtccactgatggcccttgggaggggaagctaaagaaggtcacagtgctgaccctaacttctccaccccttttgctggtgggcagtggccagaaccccatagtaagtaaaggtaaactttcagggagggtctggtgtttaaaggcaaaaaagactgagtggtcatctccaggatggaccctggccccatgcagcccacagaagcatccctcccaaagagcatcccttctcttcttggacaatgaccccaccctggttaataaccacagcgatgtcaaatga

SEQ ID NO: 16924 - DNA, 1132 bp, Homo sapiens
  SIMILAR (412)..(1119): 1001254mologous to Homo sapiens unnamed protein product,accession number AK001254,Smith-Waterman Score=1188.
cacgaattataaccagcaattgcgccaagaacttaaaacagtgaaaaaaaattatgaagctctcaaacagagacaagatgaggaaaggatggtacagagctctcctccaatatctggtgaagacaacaaatgggagcgagaaagtcaagaaacgactagagaacttctgaaagttaaagacagattaattgaagtagaaagaaataatgctacactgcaagcagagaagcaagcgttgaaaactcaactgaagcaacttgaggccacggaaccaataatttgcagggctccagattcttgcacttcagaggcagacagtgtcattaccaagaacagaataccactcttcaaacacagaatgccaagcttcaggttgaaaattccacccttaattcccaaagtacctcactcatgaaccagaatgcccaactcctaatccagcagtcttccttagaaaatgaaaatgaatctgtaatcaaagagcgagaagacctaaaatctctctatgattctctgatcaaagatcatgaaaagctggaacttcttcatgaacgtcaggcttcagagtatgaatctcttatctctaaacatggaactctgaagtctgcccacaaaaatcttgaggtggaacatagagaccttgaagaccgttacaatcagttattaaaacagaaaggacagttggaagatttggaaaaaatgctcaaagtagaacaggaaaaaatgctgcttgaaaataaaaatcatgaaacagtagctgcagaatacaagaaactttgtggtgaaaatgataggctgaatcatacctatagtcaacttttaaaagagactgaagttttacaaactgaccataaaaatttgaaaagtcttctgaataattccaaactggaacaaacaagattagaagctgaattttcaaaactaaaggaacaataccaacaattggatattacatcaaccaagctgaataaccagtgtgagttgctaagccaacttaaaggaaatttagaagaagaaaatcggcatctactagatcaaattcagacattaatgctacagaacagaacacttttggagcagaatatggaaagcaaggatctttttcatgttgaacaaaggacagtacatgtag

SEQ ID NO: 16925 - DNA, 610 bp, Homo sapiens
  SIMILAR (357)..(181): 941254mologous to Escherichia coli K12 putative activating enzyme,accession number AE000508,Smith-Waterman Score=273.
atgcctgatgcgaccttgtcgcgtctgatcatgcctacaagtctgtgccgaaccgtaggccggataaggcgttcacgccgcatccggcaattgagcgccggaaatatcaaccggctcaccccgcgcacctttaacgcatcagccaacggctcaacgtcttccggcgtggcgctcgcccatgctttgcgcctcgccatacacgccgtgggcatgaaacgcgttcaggcgtaccgttacatcgccgagtcttttgatgttcgccgccagttcttcgatgtgttgcaaataatccacctggccagggatcaccagcaaacgcagttccgccagcttgccgcgctctgccagcaaatagatttaagccagtatacactcaactatcgctacgtgactgggtcatggctgcgcaacgacacccgccaacacccgctgacgcgccctgacgggcttgtctgctcccggcatccgcttacagacaagctgtgaccgtctccgggagctgcatgtgtcagaggttttcaccgtcatcaccgaaacgcgcgaggcagctgcggtaaagctcatcagcgtggacgtgaagcgattcacagatgtctgcctgttcatctga

SEQ ID NO: 16926 - DNA, 2481 bp, Homo sapiens
  SIMILAR (2614)..(4026): 951254mologous to Homo sapiens zinc finger protein ZNF135,accession number U09413,Smith-Waterman Score=2539.
ccttaaagggagcccccgatttagagcttgacggggaaagccggcgaacgtggcgagaaaggaagggaagaaagcgaaaggagcgggcgctagggcgctggcaagtgtagcggtcacgctgcgcgtaaccaccacacccgccgcgcttaatgcgccgctacagggcgcgtcccattcgccattcaggctgcgcaactgttggaaagggcgatcggtgcgggcctcttcgctattacgccagctggcgaaagggggatgtgctgcaaggcgattaagttggaacctgtgccaaattgtgcagatgtacgagggacattcccagcagcctggtctgcaacccagattgcagagatggagctctcagactttgaggactgcctgacattatttgcaggagacccaggacttgggcctgaggaactgcgggcagccatgggcaaagcaaaacagaaacatgaaacagaatttttacaatgcccacaagggcccaatacacaacccccaaaacacacacatcccacccagatagtgtctgagcccctagatgggtaccgagctcgaattgatatacagggctcacagtgcacagggctgttcagcaccacagtgctgggtggctcctccagtgccccgaatcttcaggactacgcccgcagccatggcaaaaagctaccacctgccagtctgaagcaccgagatgggcagtttgatgtgccttcctggccaaaagccaaggcccaaggcatccctcaatggcaactctttaatctgagaagtagcaaccagttaaagaagcactactgggagaccagctgtgaaagagagattaaagtcagaactggcgtaagcatccgaggactcagtctgcctccagcttgcactcgagcagagcgacgagaggtgcaacgtgttgtggtggatgcactgagtggcctgaagggtgacctggctggacgttactataggctcagtgagatgacagaggctgaacagcagcagcttattgataaccactttctgtttgataagcatgtgtccccgttgctgactgcagcaggaatggctcgagtctggccatatgctcgtggattttggcacatcaatgagaagagcttcctgatctgggtgaatgaggaggatcatacacgggtgatctccatggacaagggtggtaacatgaagagagtgtttgaaagattctgccgaggcctcaaagagagccaggaagaggagcaaggtgcttccttgccacctctgtgcacgccttacaaagttgagaaaggactccctgggaggaaccaaggaaatattaattcttatgccatctgtgctgtgtcctccacctccattctgcacccaagtctgaagccctgttatttcctgcctctgcttctcatgatcccggggatcactctagagtcgggcaccgacattgcagcatttgatctatctgctcaggtagatggtaactctcaatttggcttcagtgatcaaccctccctaaattcacacgtgtctgaagaacatcaaggccttgggctgctccagcagctacctgagagtggagcacaagagctctccatagaaggggagcaagagctttttgaaccaaatcagtctccacaggtgccacctatggtaaccagccagccatctgaggaggtcagccagccatgtcagaaggtccttaacatcagtcagccatgccaggacatttctgaggcgctcagccagccatgtcagaaggtccctgacatcagacagcaatgcctggagaaccatggcaatggggttggtagcttggtccaggaaacccttgtagaagttggcagctcagctgaagagatccctgaggaggtcatccagccataccaggagttctctgtggagctggctcccaccagaagtacttccctgctcaactccatgactatcatccagaatcctgtgaaggtctgtgatcaggtatttgccctgatcgaaaacctcacccaccagatccgggaacgaatgcaggaccccaggaaaccagagttgtggagccaggatgaagtagagcaagctggacgcctagtattcactctgtctactgaggcaatttccttgatccccagggaggccttgggtccagagaccctggagcggcttctagaaaagcagcagagctgggagcagagcagagttggacagctgtgtagggagccacagcttgctgccaagaaagcagccctggtagcaggggtggtgcgaccagctgctgaggatcttccagggtttattgagaatatgtttttcgtctcagccaatccctgggtgagtttcaccagttttgatttaaacgtggccaatatggacaacttcttcgcccccgttttcaccatgggcaaatattatacgcaaggcgacaaggtgctgatgccgctggcgattcaggggtaccgagctcgaatgcgaaaagctgtggtgtgtccactcaattga

SEQ ID NO: 16927 - DNA, 2025 bp, Homo sapiens
  SIMILAR (808)..(1518): 761254mologous to Mus musculus LPIN3,accession number AF286724,Smith-Waterman Score=885.
atgactgttctggaggagagtacctaccacaagttggaaatacttattgagtacctgaacatgtcgacccatgttctagatgttgaagatgggaaaaacaaagttcccaccttcagagatattatagatgatattcagccgagtcgagcaaggccgaggggagccgtgcaaggccgagcagagccgagcgcctccgagagcggccgagcccagccgagcggcccggagtcggttggtgcagctgcgtccccgccgctcagcagtccgcggctccggcgtcgccgccgccgccgcctctgcggggcctgcgccggccgcccgcccggccgcggggagggaggcccgcagcgcgggaagagtggcccggtcgcgggcgccgccaccgccgccgctgccaggtctgtggtcttgctgacttcaagaaaggagctgcggacctttgtggtgagtgttacagctcttaaagatggcatggacctaaagactcccggagacggtcacagcttgtctgtaagcggatgccggaagcagacaagcccgtcagggcgcgtcaaccgggtgttggcgggttgtcggggctgttttaattatgcggcatcagagcagattgtactgaaaggtgcccccatatgcgggtgtgaaaataccgccaacagatgcgtaaggagaaaatccggcatcaggccgccattcgccattcaggttgcgcaactgttgggaaaggccgatcggtccgggcctcttcgctattacgccagctggcgaaaagggggatgtgctgcaaaggcgattaagttggcaccagccatgaactacgtggggcagctggcggagacggtgtttgggacggtgaaggagctgtaccggggcctgaacccagccacactgagcggcggcattgacgtgctggtggtgaagcaggtggacggctcgttccggtgctcacccttccacgtgcgttttggcaagctgggcgtcctgcggtcgcggaaaaaggtggtagacattgagctcaatggggagcctgtggacttgcacatgaagcttggggacagcggggaggccttctttgttcaggagctggagagcgatgatgaacatgtgcctcccggcctgtgcacctcacccatcccttgggggggtctgtctggcttcccctcggactcccagctgggcactgccagtgagcctgagggcctcgtcatggcaggcacggcctccactgggcggaggaagaggcgtcgcaggaggaaacccaagcagaaagaggatgcagtggcaactgattctagtccagaggaactggaggcaggcgctgagagtgagctatccctgccggaaaagctgaggccagagcccccaggcagtgtccagttggaagagaagtcttcactgcagcccaaagacatctacccctactcggatggcgagtggcccccccaggccagtgactctgggctgggggccagaagatggagtgaacccagcagtcagaagtccctgagggaccccaaccctgaacatgaacctgaacccactctggacacagtggatacaatagcactgtccctctgtggtggactggctgacagccgggacatctccctagagaaattcaaccagcacagcgtctcttaccaggacctcaccaaaaaccccggacttttggatgacccaaacctagtggtgaaaatcaatggaaagcattataactgggctgtggctgcccccatgatcctctccctgcaagccttccagaaaaacttgcccaagggcaagagggttaaagaaggagtaggaagagggggagctgatgagaggagcaatggtcagagtggagggggtggagagagaatacagtcacagatttccccaccccatcaactttccaagcagctcagagcggcagcagagccgcgagtgagggctgcgcaccacatatccggagctgtgtgccacgtggcagaagctgtcccgttgagtcatgggatgtactgctgcactgctctagagtttggtgtgtag

SEQ ID NO: 16928 - DNA, 403 bp, Homo sapiens
  SIMILAR (239)..(403): 811254mologous to Rattus norvegicus dlg 2,accession number AF087696,Smith-Waterman Score=218.
  misc_feature (1)...(403): n = a,t,c or g
naaccgtctccagcagggcgtcgtggtctgtgcggggtctttcttttcactacctggctgcccccgtaccagctgctgggaaagactacttcctccgagttgtgccggcctccgcgttctcctcacctcccctctcctacggacctccgccccctcgcggagaggccttgccgctttaagagccgggctagcgattgacaagcaataaacgctgagcgcccggctgcgctggagccgcccggagctaggggcttcccggggcgcagccatgcagcaagtcctggacaacttgggatccctccccagtgccacgggggctgcagagctggacctgatcttccttcgaggcattatggaaagtcccatagtaagatccctggccaaggcccatgagaggctggac

SEQ ID NO: 16929 - DNA, 1994 bp, Homo sapiens
  SIMILAR (264)..(1991): 1001254mologous to Homo sapiens DLG2,accession number X82895,Smith-Waterman Score=2973.
gtctcccaaaccactacctgtttgctcccgtaccagctgctgggaaagactacttcctccgagttgtgccggcctccgcgttctcctcacctcccctctcctccggacctccgccccctcgcggagaggccttgccgctttaagagccgggctagcgattgacaagcaataaacgctgagcgcccggctgcgctggagccgcccggagctaggggcttcccggggcgcaggagagacgtttcagagcccttgcctccttcaccatgccggttgccgccaccaactctgaaactgccatgcagcaagtcctggacaacttgggatccctccccagtgccacgggggctgcagagctggacctgatcttccttcgaggcattatggaaagtcccatagtaagatccctggccaaggtgataatggtattgtggtttatgcagcagaatgtctttgttcctatgaaatacatgctgaaatactttggggcccatgagaggctggaggagacgaagctggaggccgtgagagacaacaacctggagctggtgcaggagatcctgcgggacctggcgcagctggctgagcagagcagcacagccgccgagctggcccacatcctccaggagccccacttccagtccctcctggagacgcacgactctgtggcctcaaagacctatgagacaccaccccccagccctggcctggaccctacgttcagcaaccagcctgtacctcccgatgctgtgcgcatggtgggcatccgcaagacagccggagaacatctgggtgtaacgttccgcgtggagggcggcgagctggtgatcgcgcgcattctgcatgggggcatggtggctcagcaaggcctgctgcatgtgggtgacatcatcaaggaggtgaacgggcagccagtgggcagtgacccccgcgcactgcaggagctcctgcgcaatgccagtggcagtgtcatcctcaagatcctgcccaactaccaggagccccatctgccccgccaggtatttgtgaaatgtcactttgactatgacccggcccgagacagcctcatcccctgcaaggaagcaggcctgcgcttcaacgccggggacttgctccagatcgtaaaccaggatgatgccaactggtggcaggcatgccatgtcgaagggggcagtgctgggctcattcccagccagctgctggaggagaagcggaaagcatttgtcaagagggacctggagctgacaccaaactcagggaccctatgcggcagcctttcaggaaagaaaaagaagcgaatgatgtatttgaccaccaagaatgcagagtttgaccgtcatgagctgctcatttatgaggaggtggcccgcatgcccccgttccgccggaaaaccctggtactgattggggctcagggcgtgggacggcgcagcctgaagaacaagctcatcatgtgggatccagatcgctatggcaccacggtgccctacacctcccggcggccgaaagactcagagcgggaaggtcagggttacagctttgtgtcccgtggggagatggaggctgacgtccgtgctgggcgctacctggagcatggcgaatacgagggcaacctgtatggcacacgtattgactccatccggggcgtggtcgctgctgggaaggtgtgcgtgctggatgtcaacccccaggcggtgaaggtgctacgaacggccgagtttgtcccttacgtggtgttcatcgaggccccagacttcgagaccctgcgggccatgaacagggctgcgctggagagtggaatatccaccaagcagctcacggaggcggacctgagacggacagtggaggagagcagccgcatccagcggggctacgggcactactttgacctctgcctggtcaatagcaacctggagaggaccttccgcgagctccagacagccatggagaagctacggacagagccccagtgggtgcctgtcagctgggtgtactga

SEQ ID NO: 16930 - DNA, 381 bp, Homo sapiens
  SIMILAR (34)..(183): 961254mologous to Rattus norvegicus dlg 2,accession number AF087696,Smith-Waterman Score=232.
gagagacgtttcagagcccttgcctccttcaccatgccggttgccgccaccaactctgaaactgccatgcagcaagtcctggacaacttgggatccctccccagtgccacgggggctgcagagctggacctgatcttccttcgaggcattatggaaagtcccatagtaagatccctggccaagggtgggggtgactccatccagagaggaagagaaaggagcgggggctttggtccagggcacgtgctggcctggggctgtggaagtcggatgcagggaattgtgaagggagctggtgagagaggctcagagaaaagaggcccaggctggaaagaggcagaacagggagaaaatggaggtgaaggctcggtggctctctga

SEQ ID NO: 16931 - DNA, 1181 bp, Homo sapiens
  SIMILAR (555)..(1178): 931254mologous to Homo sapiens CGI-56 protein,accession number AF151814,Smith-Waterman Score=1000.
tttcgtcacagcctgaccctctgtgaccttcctcaaaggctccccaaagaggctttcccttgaagtgcaagtcatagtggcgcccctgccacgtccctatatgaacggggtgtgtgcccgcctgccctccgacgtccgccggctgtgctggtctgcagagctgccgccagctgcaccctcctcgccatgagtgacctgcaggaagaaggcaagaatgccatcaactcaccgatgtcccccgccctggtggatgttcaccctgaagacacccagcttgaggagaacgaggagcgcacgatgattgaccccacttccaaggaagaccccaagttcaaggaactgggcaaggtcctcctcgactggattaatgacgtgctggcggaggagaggatcattgtgaagcaagctggaggaagacctgtatgacggccaggtgctgcagaagctctttggaaaaacttggcagggttgcaaagcttgaatgtggctgaggtgacacagtccgaaatagggcagaaacagaagctgcagaaggtgctggaacagttacatgaacttgctgcggccccgaagttgggcgctccggttggcttgggaattcaattcacgggaaaaaccttgttggcaatcctcaactgctggtctctctggccatgcacttcagggcccccatccgccttcctgagcatgtaacggtgcaggtggtggtcgtgcggaaacgggaaggcctgctgcattccagccacatctcggaggagctgaccacaactacagagatgatgatgggccggttcgagcgggatgccttcgacacgctgttcgaccacgccccggataagctcagcgtggtgaagaagtctctcatcacttttgtgaacaagcacctgaacaagctgaatttggaggtgacggaactggagacccagtttgcagatggcgtgtacctggttctgctcatgggccttctggaagactactttgttcctctccaccacttctacctgactccggaaagcttcgatcagaaggtccacaatgtgtccttcgcctttgagctgatgctgggacggaggccttcaagaaacccaaggctcgtcctgaagacgtggttaacttgggacctcaaatcccccctgagggttctttacaacctgttcaccaagtacaagaacgtggagtga

SEQ ID NO: 16932 - DNA, 780 bp, Homo sapiens
  SIMILAR (183)..(365): 721254mologous to Homo sapiens bK414D7.1 (isoform 1),accession number AL033543,Smith-Waterman Score=189.
tggcctgctgctccaaagccatcatgccacacccccttgctgttccatcatctgccgctgtggaggctggatgtccagagctagaggtgttcaaggttcaaggtgattctggtgttaaaagaggaaataccattttacttctgaacctgtttcatggagaaagaggtacagctccgggcacagaaggcaagaatgccatcaactcaccgatgtcccccgccctggtggatgttcaccctgaagacacccagcttggtacgggggttcctccaagctaccccacggggacaggtaaagaccggagatgcacgatgattgaccccacttccaaggaagaccccaagttcaaggaactggtcaaggtaaggagctccgtcttcatggtccccaaagatgaccatgtgataatccctggagccattgactatcatcttacatggcaaagggacatggtgggtgtagttagtgctgatagagtgcaacccaaagccccctccctgaatgacatagttactccctggctggcccgagggccccaggtaagcagaggtacttttaatgacgtgctggtggaggagaggatcattgtgaagcagctggaggaagacctgtatgacggccaggtgctgcagaagctcttgggtgagttcacagcaggcgccttcgacaggtggggacgttggggcccacagtctcctggtgaacagccgggcagcctggccccaagcatagctcttgagcccggccgcggggcctttctctgacctgtctacggagcag

SEQ ID NO: 16933 - DNA, 1233 bp, Homo sapiens
  SIMILAR (364)..(516): 981254mologous to Homo sapiens corin,accession number AF133845,Smith-Waterman Score=245.
atgttctttctatcagtcaaggttactgcaggtacccggaaaagaaatccagtgataggtatacagggtcaagctaatcatgctttggaggggaaaacacaacacaacacaactcaacacaacacaacacaacacagtactcttatccttttaaacttggataaatcagaaaaatattgtagtatcaagtcagatgataaaaacgaaaataaaaacgacccagagaagaaaaagaagaaaaaggacaaagagaagaaaaagaaagaggagaaaagcaaagataagaaagaagaggacctcggtgacaacgctgtgaacatctatggattccgcattcaagtactttgtcacaactgtctccacaagttggtcttgagagctgatgacaataacatgggcaatggctgctctcagaagctggcgactgctaacctcctccggttcctattgctggtcctgattccatgtatctgtgctctcgttctcttgctggtgatcctgctttcctatgttggtggtggttctttctcagcttttggattgtttcctctcacacacatacagaccagtactcagccaaagacccaagaagttctttctggagttcttcagagctttttctgtactgctgccttctctgcacaaattctagccacactggcctctctgaactacgaattttgcctactcaactttatgagacagccagattctgcttatgatcttcctccttgtgctatagccagaagtcttcatgttgttgccctggaaactgtccaccttgtgatcaaaactgtggacggactttatgatgtagaaaccataagtgtccatctgtctgtcacagagtttttagattcccgagagagaaaacctaatagactcaccatggatccaagggctccttttggcacaggcagccacagtcagggaactagaacaggtagcatagccatggctgtggctactgggggaattatggtgaaccaggcagccatcccaatgtatgtcttctacaaattttaccagtatgtggcagggtcaaatgaagggtttagagaaaaaaagatacatttattgaaggcagaagacctagccagagaaaagacagactttgaagtcgtcaatgaaattgtgaagatgagtatgaggtcttttaggaggcagaaagatataacatcaagaccagtgatttttaacttttcatcaacccccagcgcaacagaatactga

SEQ ID NO: 16934 - DNA, 424 bp, Homo sapiens
  SIMILAR (1)..(270): 981254mologous to Homo sapiens ATP synthase gamma- subunit,accession number D16562,Smith-Waterman Score=444.
  misc_feature (1)...(424): n = a,t,c or g
aaatatgcccgagctgagagagagctgaaaccagctcgaatatatggattgggatctttagctctgtatgaaaaagctgatatcaaggggcctgaagacaagaagaaacacctccttattggtgtgtcctcagatcgaggactgtgtggtgctattcattcctccattgctaaacagatgaaaagcgaggttgctacactaacagcagctgggaaagaagttatgcttgttggaattggtgacaaaatcagaggcatactttataggtctgtcatctcctataaggacagaagaaaagcccatcttttcccttaataccgttggcaagtgctgacagcatggagtatcttatggacgatatttgatggcttgacgtggctggcaaaatttacccagggattacaattntggggccaaccttcat

SEQ ID NO: 16935 - DNA, 503 bp, Homo sapiens
  SIMILAR (863)..(2296): 891254mologous to Homo sapiens putative p150,accession number U93563,Smith-Waterman Score=2181.
ataagaaaaacaatgattttattttaagttgtttattttaagataatttacaaatatcttgctgtcttcagtaattcaaataatggaggaacagtttcttcggacaaaggcagcagtaagctaaaaacaaaatcaactggctgaattttccttctttacctgaaaaacaaagtacagaacaagtaagaaatcaaacagcattttttggggaaaataatgtcaagagataataatacatatttaacgtggggtacagagaactgaatttacacaaataaagtgttacccttataccagtgattctaaaattttgggtctgggggaacctttcatgggggttcatgagggtcaaaactatttttcatggataatgttattttgcctgttatattctcattcttcgagtatacagtagagttttccagaggccacatgatccatgacatcacaacaaaatgaatagagacagatgaaaatctagctggcttctgctacatgaatca

SEQ ID NO: 16936 - DNA, 1113 bp, Homo sapiens
  SIMILAR (32)..(952): 731254mologous to Homo sapiens ATP synthase gamma- subunit,accession number D16562,Smith-Waterman Score=1055.
ctgaccgaccttcagcagggctgtggctaccatgttctctcgcgcgggtgtcgctgggctgtcggcctggaccttgcagccgcaatggattcaagttcgaaatatggcaactttgaaagatatcaccaggagactaaagtccatcaaaaacatccagaaaattaccaagtctatgaaaatggtagcggcagcaaaatatgcccgagctgagagagagctgaaaccagctcgaatatatggattgggatctttagctctgtatgaaaaagctgatatcaaggggcctgaagacaagaagaaacacctccttattggtgtgtcctcagatcgaggactgtgtggtgctattcattcctccattgctaaacagatgaaaagcgaggttgctacactaacagcagctgggaaagaagttatgcttgttggaattggtgacaaaatcagaggcatactttataggactcattctgaccagtttctggtggcattcaaagaagtgggaagaaagccccccacttttggagatgcgtcagtcattgcccttgaattactaaattctggatatgaatttgatgaaggctccatcatctttaataaattcaggtctgtcatctcctataggacagaagaaaagccgatgcttttcccttaatacccgttgcaagtgctgaccagcatggagtatctatgacggatattgatgctgacgttgctgcaaaaattacccaagaatacaaatctgggccaacatcatcttacttactctctggaaggagtccaccactagtggaggcaggagtgccaggggttgacagccatgggacaatggccaggcaaggattgctttctggaggatggatttggacaatttggacatttggacatttcaaccgttacccgccaagctgtcatcacaaaagagttgattgaaattatctctggtgctgcgagctctgtaaagaaggaaaattcagccagttgattttgtttttagcttactgctgcctttgtccgaagaaaccgttcctccattatttgaattactgaagacagcaagatatttgtaaattatcttaaaataaaacaacttaaaataaaatcattgtttttctt

SEQ ID NO: 16937 - DNA, 1790 bp, Homo sapiens
  SIMILAR (1361)..(1789): 841254mologous to Homo sapiens ATP synthase gamma- subunit,accession number D16562,Smith-Waterman Score=597.
aataaggcacagaactgggctgaggctgtggctgcagccctttccctctacgttgtccccatagaggctagacattttaaggtcagtggagcactaccaaatcaaaagagcctcttaaattgtcttctactaaaaaattttaatagtagcatattaatatttttaaatgttttagtatcatctcatttcaaaaactatatctattgttcttatatataagaaaaacaatgattttattttaagttgtttattttaagataatttacaaatatcttgctgtcttcagtaattcaaataatggaggaacagtttccttcggacaaaggcagcagtaaagctaaaaaacaaaatcaaactggctgaaatttcccttctttaccctcttgtctgaggatggaaacttggattttccattaatcccagaagctgcaagcaccagaagataatttcaaatccaactccttttgtgatgaacagcttggcggggtacgggttgaatgtcaatgtcaaatttgtcaatcatctcaggaaggcattcttgcttggcattggtcatggggcttgtcatcctgggcactctgcttcactagtgggtgggacttccttcaggggaggtaggtaggatggatgttgggcccaggattgtattcttggggtaatttttgccagcacgtcagcctccaatatccgtcatagatactccatggtggtcaggcaccttgcaacgggtattaaagggaaaagatggggcttttccttcctgtccttaataggagatgaacaagaccctgaaatttatttaaagatgaatggagcccttcatcaaaattcatatcccagaatttagtaattccaagggcaatgactgacgcatctcccaaaaagtgggggggctttcttcccccacttcttttgaatgcccacccagaaaactgggtcaagaaatgaagtcctaataaagtaatgccctctggatttttggtcaacccaattcccaaacaagcattaacttcttttccccagctgctggttaggtgtaggcaaccctcgctttttcatcttgtttagcaaatggaggaatgaaataggcaccaacacaagtcctcgaatctgagggacacacccaattaaggaaaggtgtttttcttttcttggttcttcaggccccttgatatccagctttttccatacagagctaaagatccccaaatccataatattgaggcgggtttcagctctctctccagctacgggcatatttttgctgccgctaccattttcatagacttggtaattttctggatgtttttgatggactttagtctcctggtgatatctttcaaagttgccatatttcgaacttgaatccattgcggctgcaaggtccaggccgacagcccagcgacacccgcgcgagagaaagctgaaaccagctcgaatatatggattgggatctttagctctgtatgaaaaagctgatatcaaggggcctgaagacaagaagaaacacctccttattggtgtgtcctcagatcgaggactgtgtggtgctattcattcctccattgctaaacagatgaaaagcgaggttgctacactaacagcagctgggaaagaagttatgcttgttggaattggtgacaaaatcagaggcatactttataggactcattctgaccagtttctggtggcattcaaagaagtgggaagaaagccccccacttttggagatgcgttcagtcattgccccttgaaattactaaattctggatatgaatttgatgaaggct

SEQ ID NO: 16938 - DNA, 930 bp, Homo sapiens
  SIMILAR (745)..(930): 1001254mologous to Homo sapiens leptin receptor gene-related protein,accession number Y12670,Smith-Waterman Score=320.
atgagcaataaaatccaggctgaggtggtctcagatggaaatgaagaacttgttcagaaatggaggaagggtgactcttgttatgctttagcaaagagagtggtggcattttgccgctgccctagagatctgcagaactttgtacttgagagagatgatttagggtatctggcagaagaaatttctaagcagcaaagcattcaagaggtgacttgggtgctgttaaaggcatttagttttataagggaagcaaagaataaaagtttggaaaatttgcagcctgataatgtgatagaaaagaaaatcctattttctgaggagaaattcaagccagttgcagaaatttgcataagtaatgagaagctgaatgctaacccccaagacaatagggaaaatatctccaggacatgtcagaggtcttcatggcaatccctcccatcacaggcccagaggtttagaagcaaaaaatggttttgtgggccaggcccagggtccctctgctgtatgcagtctagggacttggtgtcctgtgtcccagccactccagctgtgattaaaggggccaatgcagagcttgagatgtggcttcagagggcacaagccccaagccttggcagctttcaagtggtgttgagcctacagggctcaatgactttgacagcagtgataacagagtgccggaaggtagattcagatgactttctgcttggccctcctgtttatgtccttggtttttataaaatcgtttactggcccttattcgtcctgattttccacgccatctcccccatcccccatttcattgccaaaagagtcacctatgactcagatgcaaccagtagtgcctgtcgggaactggcatatttcttcactactggaattgttgtttctgcctttggatttcctgttattcttgctcgtgtggctgtg

SEQ ID NO: 16939 - DNA, 1134 bp, Homo sapiens
  SIMILAR (261)..(467): 501254mologous to Homo sapiens MY047 protein,accession number BC000642,Smith-Waterman Score=148.
  misc_feature (1)...(1134): n = a,t,c or g
gtctggcttgggcaggctgcccgggccgtggcaggaagccggaagcagccgcggccccagttcgggagacatggcgggcgttaaagctctcgtggcattatccttcagtggggctattggactgacttttctnatatgctgggatgtgccttagaggattatggcgtttactggcccttattcgtcctgatttttccacgccatttcctccatcccccatttcattgccaaaagagtcacctatgactcagatgcaaccaagtagtgcctgtcgggaactggcatatttcttcactactggaattgttgtttcctgcctttggatttccccggtaatccttgcccgtgtggctttgatcaaaatggggagcctgcggcctttgtgttggcaaggcaatgcagtcattttcccttacaattcaaggggtttttccctatatttgggaagaggagatgattttagctggggagcagtggtagcactttattctgattacagtgcattgaatttcttaggaactcatactatctgtatacatgtgcacatgcgggcattttactatgaaattttaataatgctgggggtttttaatacctttatatatcatgttcactttaagaaaagacttcataagtaggagatgagttttattcacagcaaatagacctgtcaaatttagattatgttactcaaattatgttacttgtttggctgttcatgtagtcacggtgctctcagaaaatatattaacgcagtcttgtaggcagctgccaccttatgcagtgcatcgaaaccttttgcttggggatgtgcttggagaggcagataacgctgaagcaggcctctcatgacccaggaaggccggggtggatccctctttgtgttgtagtccatgctattaaaagtgtggcccacagaccaagagcctcaacatttcctagagccttattagaaatgcagaatctgaagccccactctggacccaggacattttgatgagatccaaaggagttgtatgcacatgaaagtttgagaagcatcatcatagagaagtaaacatcacacccaacttccttatctttccagtggctaaaccacttaacctctctgggtgttacctgctcatttgttta

SEQ ID NO: 16940 - DNA, 434 bp, Homo sapiens
  SIMILAR (157)..(432): 961254mologous to Homo sapiens kappa B and V(D)J recombination signal sequences binding protein,accession number AF278765,Smith-Waterman Score=456.
ccgtgcaaaaaactcccaaagccgtcttgggtttggctcccacagctcttgaccaatgtggccaaagctggacacctccttgggacactgggattattcataaatgcagcccgccctgactctccctgaatagcatctgaagtctttgtgaaggtcatggatcctgaacaaagtgtcaagggcaccaagaaggctgagggaagtccccggaagcggctgaccaaaggagaggccattcagaccagtgtttcttccagcgtcccatacccaggcagcggcacagctgccacccaagagagccccgcccaagagctcttagccccgcagcccttcccgggcccctcatcagttcttagggaaggctctcaggagaaaacgggccagcagcagaagcccaccaaaaggccccccatcgaagcatccgtccatgtatt

SEQ ID NO: 16941 - DNA, 1368 bp, Homo sapiens
  SIMILAR (1236)..(1274): 531254mologous to Homo sapiens kappa B and V(D)J recombination signal sequences binding protein,accession number AF278765,Smith-Waterman Score=41.
atggccggggctcacccactgcatctgggccccagaggaatggctctggctctggctctcttcgcccccgccccacccccaccatatctggtacacagggttggactttgtccacactacaaggcccacagcaccctgcatcccaaggtgagtggggaagggaagcagaagtgggtgggcagtgccttcctgagccaggcagaggccagctctcacactggctccaccatgaagcactcccagcagctgccaggccgtctgcacagtgtgtgcctgcagcaaagacactgtgtcccttctactggggctgcaaacagaacttcccaaaacccggtggggccaggtgtcgatggggaaatgactggttttgcacaggtgaaggagcagaagggctcaagctgcaagagccatgctgctggagtctcctgggcctccttctggggagctctaaactcagtggggtccttcctgacggcctttctccaagggacccaggatcctgggctcagtttggacccctgggagagcttcacgggtgtacaggaaagggttaccggacccatggcagccaaggtgactccaggcctcctgatctgcccttgctggaagaaacccacagaccaacccccagagaaagttgaagaaagcaagccagggaggcagccggctgcctgtggtgaggagacccaggtgctcagccccctggctctcaccagggcactgactggacaaggaaaggctgcaaagccagaggaaccttccagaatgatcctcctggcaattgcttggatcaagcaaatggtcacagctgtgtcagattcatctgaagtctttgtgaaggtcatggatcctgaacaaagtgtcaagggcaccaagaaggctgagggaagtccccggaagcggctgaccaaaggagaggccattcagaccagtgtttcttccagcgtcccatacccaggcagcggcacagctgccacccaagagagccccgcccaagagctcttagccccgcagcccttcccgggcccctcatcagttcttagggaaggctctcaggagaaaacgggccagcagcagaagccccccaaaaggccccccatcgaagcatccgtccacatctcacagcttccgcagcaccctctgacaccagcattcatgtcgcctggcaaacctgagcatctcctggaggggatactgtggctctgtgacgatgtttctgtttgcatcctctctttcctctacatcctcgtcaccttcatcatcttcctcttcctcatgctgctcctcttctacttcatcggaatattgaccttcctggggacaagactctcatcaggagagatgggcacaaaggaatcttctctgtga

SEQ ID NO: 16942 - DNA, 839 bp, Homo sapiens
  SIMILAR (689)..(838): 411254mologous to Hydra sp. mini-collagen,accession number X61046,Smith-Waterman Score=115.
ttgagcatatagtgatctttattcaacttcccaagatccagtcctcagctaatttacaaaactacaatagtgttacatactctcctaggtctacacggcaaagtacagtttgactgttgcaactagtgctgccttacaaaaaaaggctttatcccatgccacccatcctaaacccagctgttcagagcagtgtacctggaaatcagcctcaaagtacggactgcaagacaaggcacaaggaaaccctaacacgaagtcctatgttctgggcaaagggatggggatggcaggtgggacgcacccaggtcagggcgagggcgcggcaagttttctattaaatctcagtagattacaactcatatccaatgtctgatatattttcgagggaaaatggtgcttgaaagatgtttctacgagaaataagcttcatctcggtcaatctgttcgacccaacttctggcagcaggtgtgggggcggcgccaaggtctgcgcggtaatccaaacaggcagtcccacccagggccaccccaaagccagatgctccgacgcaactcgagcaggccacactgtctttcggacaaagcgacgcggtcctcacaggcgggaaggagagtgcgtcccggtcgggaaggacgccgtcggagagcggcctaaccacgtgacgcccgcggcgaccttgggggtcaccctgcggacgcaccgccctctccctcacatccgccgccgcgcccgccccccgctcgcccaccgccaatgagccgtcgctccgcgcccgcgcgacctcggagcccgcccgtacccgccaatctccgcccgccggcaggccccgcggctccat

SEQ ID NO: 16943 - DNA, 195 bp, Homo sapiens
  SIMILAR (1)..(195): 1001254mologous to Homo sapiens Zinc-finger protein,accession number D70833,Smith-Waterman Score=369.
ggcaaaggctttactatgttctcaatccttactaaacataaggtaattcataatggagagaaaccctacaaatgtgaagaatgtgataaggcaactcatgctggagagaaaccctacaaatgtgaagaatgtggcaaagctttcaactggtcctcaaaccttatggaacatagagaattcatactgagagaacct

SEQ ID NO: 16944 - DNA, 1320 bp, Homo sapiens
  SIMILAR (58)..(1305): 641254mologous to Homo sapiens BC273239_1,accession number AC007204,Smith-Waterman Score=1470.
atgactcttaacgagcatgctgccttcaagcatctgtttaacaaagcacatcttgcaccgcccttaatccatttaaccctgagtggacacagcacatgtttcagagagcacagggttggggttatatgttctcattttgctcaagacctttggccagagcagggcagagaagattctttccaaaaagtgatattgagaagatatgaaaaatgtggacatgagaatttacagttaaaaattggttgtaccaatgtggatgagtcccttacttataagagaattcatactggagagaaaccctgcaaatgtgaagaatgtgacaaagcctttagtaagttctcaatccttactaagcataaggtaattcatactggagagaaacattacaaatgtgaagaatgtggcaaagccttcacccggtcctcaagccttattgaacataagagaagtcatgctggagagaaaccctacaaatgtgaagaatgtggcaaagcctttagtaaggcctcaacccttactgcacataagacaattcatgctggagagaaaccctacaaatgtgaagaatgtggcaaagctttcaaccggtcctcaaaccttatggaacataagagaattcatactggagagaagccctgcaaatgtgaagaatgtggcaaagcctttggtaacttctcaacccttactaaacataaggtaattcatactggagagaaaccctacaaatgtgaagaatgtggcaaagccttcagctggccctcaagccttactgaacacaagagaattcatgctggagacaaaccttacaaatgtgaagaatgtggcaaaacctttaagtggtcctcaacacttactaaacataagataattcatactggagagaaaccctacaaatgtgaagaatgtggcaaagcctttactacattttcgagccttactaaacataaagtaattcatactggagagaaacactacaaatgtgaagaatgtggcaaagtcttcagctggtcctcaagccttactacacataaggcaattcatgctggagagaaactctacaaatgtgaagaatgtggcaaagcctttaagtggtcctcaagacttagtgaacataagagaattcatactggagagaaaccctacaaatgtgaagaatgtggcaaagcctttagctgggtctcagtccttaacaaacataagaaaattcatgctggaaagaaattctacaaatgtgaagaatgtggtaaagacttcaaccaatcctcacaccttactactcataagagaattcatactggaggaaaaaccctacaaatgtga

SEQ ID NO: 16945 - DNA, 2185 bp, Homo sapiens
  SIMILAR (125)..(2173): 771254mologous to Homo sapiens ZNF91L,accession number AC003973,Smith-Waterman Score=2895.
acctgaaactgattcagtgaccatggggcccaatcagagtaaaatatgtgcattgagcagacctgtagacatgagaatccacttctccctccctcctcatgctaaaatgcccacaaatgttcagggatcgttgacatttcgggatgtggccatacaattctctctggaggagtggcaatgcctggacactgcacagcagaatttatataggaatgtgatgttagagaactacagaaacctggtcttcctgggtattgctgcctttaagccagacctgatcatttttctggaggaaggaaaagagtcctggaatatgaagagacatgagatggtggaagaacccccagttatatgttctcatttttcccaagagttttggccagagcaaggcatagaagattctttccaaaaaatgatattgagaagatatgacaaatgtggacatgagaatttacacttaaaaattagttgtaccaatgtggatgagtgtaacgtgcacaaaaaaggttataataaacttaaccagagtttgacaactacacaaagcaaagtatttcaatgtggcaaatatgcaaacatctttcataaatgttcaaattcaaaaagacataagataaggcatactggaaagaaacttttgaaatgtaaagaatatgtcagatcattttgcatgctttcacacctatctcaacataaaagaatttatactagagagaattcctacaaaagtgaagaacatggcaaagcctttaactggtcctcagcccttacttataagagaattcatactggagagaaaccctgcaaatgtgaagaatgtggcaaagcctttagtaagttctcaatccttactaagcataaggtaattcatactggagagaaacattacaaatgtgaagaatgtggcaaagccttcacccggtcctcaagccttattgaacataagagaagtcatgctggagagaaaccctacaaatgtgaagaatgtggcaaagcctttagtaaggcctcaacccttactgcacataagacaattcatgctggagagaaaccctacaaatgtgaagaatgtggcaaagctttcaaccggtcctcaaaccttatggaacataagagaattcatactggagagaagccctgcaaatgtgaagaatgtggcaaagcctttggtaacttctcaacccttactaaacataaggtaattcatactggagagaaaccctacaaatgtgaagaatgtggcaaagccttcagctggccctcaagccttactgaacacaagagaattcatgctggagacaaaccttacaaatgtgaagaatgtggcaaaacctttaagtggtcctcaacacttactaaacataagataattcatactggagagaaaccctacaaatgtgaagaatgtggcaaagcctttactacattttcgagccttactaaacataaagtaattcatactggagagaaacactacaaatgtgaagaatgtggcaaagtcttcagctggtcctcaagccttactacacataaggcaattcatgctggagagaaactctacaaatgtgaagaatgtggcaaagcctttaagtggtcctcaaaccttatggaacataagagaattcatactggagagaaaccctacaaatgtgaagaatgtggcaaagccttcagtaaggttgcaaaccttactaaacataaggtaattcatactggagagaaacaatacaaatgtgaagaatgtggcaaagccttcatctggtcctcaagacttagtgaacataagagaattcatactggagagaaaccctacaaatgtgaagaatgtggcaaagcctttagctgggtctcagtccttaacaaacataagaaaattcatgctggaaagaaattctacaaatgtgaagaatgtggagggaaaccctacaaatgtgaagaatgtggcaaattttttaactgttcctcaatccttactaaacataaggtaattcatactggagggaattcctacaattgtgtggaatgtggcaaagcctttaatcagtccttaaggcttactacgtacaagacaactcatactggagagaaaccatacacgtgtgaagaatgtgggaaagcctctaacagatcctcaattcttaacagacataagctaattcatactagagagaaactgcaaacctga

SEQ ID NO: 16946 - DNA, 1443 bp, Homo sapiens
  SIMILAR (635)..(682): 1001254mologous to Homo sapiens b24o18.4 (protease, serine, 16 (thymus)),accession number AL021808,Smith-Waterman Score=72.
agataaaggtcctcctgggggagaacagagtcccgaacaccatggccgtctggcttgcccagtggctgggtaagggggccagcctgacttccttccctccatgtcccacagcctcccttcttaggcgcctgggtgagcacattcagcagtttcaggagagctctgcccagggcctgggcctgagcctggggccaggtgctgcagccctcccaaaagtggggtggctggagcaactgctggaccccttcaacgtgtccgacagacgatcccacctctcagcgttactgggtgaatgaccaacattgggttggccaggatggacccatattcctgcatctgcatctcacctccccaccccccacccatacactcttcacaggccatcccgcagccttggccccagcctggggcgccctggtgataagcctggaacacagattttatggcctgagtatacctgctggaggccgcctggcactttcccgcctctttaacatctcctcctccagcccctggatctgcttcggaggctcctatgccggctccttaccctcccaccacgcccctaccttcctcccgcgcccaaagaatttcttgacacttccggataccttcctctgcggtccgcccacaggtggtatcccgaagcctaatgagcaccgcgatcggcgggtccctggaggtaggaggtggggcctagtccgagggggactgggagggaaaagaggcctcggatgccagggaagaggaggcccagcctaagtcttggcggacatcgcctcttgcttcccacagtgccgggcggcggtgtccgtcgccttcgctgaagtggagcggcggctgcgctcgggtggggcggctcaagcagcattgcggacggagctgagcgcttgcgggcccctgggccgcgctgaaaaccaggcggagctgttgggggcgctgcaggcactggtgggaggtgtagtgcagtatgatgggcagacgggagcgccgctaagcgtgcgacagctctgcggacttctcctcgggggcgggggcaaccgcagaggaggaatttatgtcttatgtatgtacattgttccctagattgtcttgcacagcctgggccagaagtgtttaagcttttcccgagcagagacagtggcacagctgaggagcacagaacctcaactgtctggtgtgggtgaagcacccatctacctagccccatcctatcctttctttccaggggacacagacccctggcatgtgctaagtgtaacacaggctttaggatcctcagaatcaactcttcttatccgcactggctcccactgcttggacatggcacctgagaggccctcagactcccccagcctccgcctagggcgccagaacatcttccagcagctacagacctggctcaagctggcaaaggagagccagattaagggtgaagtctga

SEQ ID NO: 16947 - DNA, 2727 bp, Homo sapiens
  SIMILAR (41)..(1582): 1001254mologous to Homo sapiens thymus specific serine peptidase,accession number AF052514,Smith-Waterman Score=2653.
tcccgggtcgacgatttcgtagaacagagtcccgaacaccatggccgtctggcttgcccagtggctgggccctctgctcttggtttccctctggggactcttggctccagcctcccttcttaggcgcctgggtgagcacattcagcagtttcaggagagctctgcccagggcctgggcctgagcctggggccaggtgctgcagccctcccaaaagtggggtggctggagcaactgctggaccccttcaacgtgtccgacagacgatccttcctacagcgttactgggtgaatgaccaacattgggttggccaggatggacccatattcctgcatctagggggtgagggcagccttgggcctggctcagtgatgagaggccatcccgcagccttggccccagcctggggcgccctggtgataagcctggaacacagattttatggcctgagtatacctgctggaggcctggaaatggcccagctccgcttcttgtccagccgccttgcgctggctgatgtggtctctgcccgcctggcactttcccgcctctttaacatctcctcctccagcccctggatctgcttcggaggctcctatgccggctccttggccgcctgggcccggctgaagttcccccatctcattttcgcgtcggtcgcctcctccgccccggtgcgggccgtgctggatttctccgagtataatgacgtggtatcccgaagcctaatgagcaccgcgatcggcgggtccctggagtgccgggcggcggtgtccgtcgccttcgctgaagtggagcggcggctgcgctcgggtggggcggctcaagcagcattgcggacggagctgagcgcttgcgggcccctgggccgcgctgaaaaccaggcggagctgttgggggcgctgcaggcactggtgggaggtgtagtgcagtatgatgggcagacgggagcgccgctaagcgtgcgacagctctgcggacttctcctcgggggcgggggcaaccgcagccactccacgccctactgcgggcttcgtcgggcggtgcagattgtcttgcacagcctgggccagaagtgtttaagcttttcccgagcagagacagtggcacagctgaggagcacagaacctcaactgtctggtgtgggtgaccggcagtggttgtatcagacatgtaccgagttcggcttctatgtcacctgtgagaatcccagatgtcctttctcccagctcccagcactgccctcccagctagacctrtgtgagcaggtgtttgggctctcagccttgtcagtagcccaggctgtggctcagacgaactcctactacggtggccagacccctggggctaacaaagtgctgtttgttaatggggacacagacccctggcatgtgctaagtgtaacacaggctttaggatcctcagaatcaactcttcttatccgcactggctcccactgcttggacatggcacctgagaggccctcagactcccccagcctccgcctagggcgccagaacatcttccagcagctacagacctggctcaagctggcaaaggagagccagattaagggtgaagtctgaatctcataccctttccactccctgcatggtcacctcagtcctggacatacttgttcactgaacaaaagaaagcagcttgttttgaaagaagaaactcccaggaattggaattcagcacctgttccgcacgtaattggcatgtgtctgcaaacatccttattcccaacttaaagtgctttattgcagagagttatggaaatataagtggatgattattctcattgtaaatattggtattttgaatgttaaatgtcaaacaaatgtgacttatgctggtgccctcgccctgctgatcagattctggttcaaattctgccactccagctcctgggttaggggctttgctgtaagtttctttttctggactttagatcctgaacctgtccttgcttctcagtttctctcactgtacccctttccctcagtctcttcctctctctttcccctgtcactatttgtctttctaatctccttctgtttctctgaatatcttcatttctatctctgtgtttctgtctatttctctgtttatctttctgtccttcaatctgtgtttttgtttctggctctccgtcagtgtctttttctctcctctctctcttgctctgccatggctatttccactgctctatttctgactctcatttttggtctctgtgtgtctcctagtcactttctttctcactctgtctctgtctctatttctgtctctcctctgctgtgtcctcaatctctctgtctccctgaggctctatttctgtctctcctctgctgtgtcctcaatctctctgtctccctgaggctctatttctgtctctgatgctcttcttctgtgtctctatttctcttcctgtcacttaatcttttccttctctatctctcttatttagtcttccttccacacccttcactcaccatcttttcccacaatcaaatatcactcccctggtacttccagcttccaactctagggattcatgattctggtggagattccttcttccagggcctgggaggatagggctaatcccaagggtgcctgcttaggctatgttagctgtgacaggaacctgccatagatttgcactgttctttcctaaagatcaattattttcagcaataaatacttctcagctttttgt

SEQ ID NO: 16948 - DNA, 1255 bp, Homo sapiens
  SIMILAR (934)..(1017): 861254mologous to Homo sapiens thymus specific serine peptidase,accession number AF052514,Smith-Waterman Score=128.
tcatctaaatccagaaatgttcttcttcttgtatttctggatatgtacatgttgtcctgcccttaaattgccattaatgtcccatttctgcatcccctccatggcattgctaagccagtagccatgttctgggcaatgcttgctgctgtacccttgtgtcagggacacctgccacatgaaaacatagccatggatgtccacatgtttctcatctttcccagtgcttcttacttcttcagttttagagacctgtttgtagtcttgtcctctttggccaaaatttccagtggagaagacataggaaaccctaatacagaccatctctaagttctctactaagatctgctggcgtatttcctcctctggtcccaggtccagctgtgcagacccagacagccccaaaatatctgcctccctgtttagttgtaagttctgtcctctgaccagatgatggctggcatggtggggggcagctggccgggcaccccaggcttgttcaaatggcagctgggcagaggtataaggaccatctgcgggcatgcaaggcttcttgaggactaagctgagaacttccaccatatttgagtaaacgctgtctttacaccatccggttgctccatcactttgagcttcacttccttccagctgtatctcgttggaaagatcccagggtggtccccggttctggcgaagaaggagagttgccattgagttaaggaagtaaaagctgtccaggtgggtcatgtcggtagaattccactgcccccttgtatgattgtagagtctggccagttcagattctgcacggtatgccagcagggctgccaggaaaggaaagaaacctgagcctctgctgaaaggtgatggatttaaggcccggctgctgaggataagataaaggtcctcctgggggagaacagagtcccgaacaccatggccgtctggcttgcccagtggctgggccctctgctcttggtttccctctggggactcttggctccaggtaagaggaggctttgctgctaaaaatactgcttggttctctaaaagaagcttggagtttgatgcaggtggaaggagatgctgccagatgccaatttttggagccagaaagtgcttgtgggtctcatcccctgccactttatgtgacagagagaaatctgaaggaactgctgtgctctccctgtccgatacatatccaggtgacacaggatgcccatctggtccttggcttgcttttctcactagtacatac

SEQ ID NO: 16949 - DNA, 1605 bp, Homo sapiens
  SIMILAR (761)..(1081): 851254mologous to Homo sapiens similar to rat integral membrane glycoprotein; accession number Z21513,accession number D87002,Smith-Waterman Score=439.
atggactctctgtggggcccaggagctgggagtcacccctttggggtccacaacagccggctgtccccagacttgtgtccagggaagatagtgttgagggccctcaaggagagcggggcagggatgcctgagcaggacaaggaccctagagtccaagagaatcctggtgatcagagaagggtccccgaggtcaccggggatgcaccgtctgcatttcggcccctgcgggacaatggaggcctctctccctttgtgcccgggcccgggcctctgcagacagacctccatgcccagaggtcagaaatcagatatgaccagtcatcccagacctcctggacgagctcgtgcaccaaccgaaatgccatctccagctcctacagctccacgggaggcttgccggggctaaagcggaggagggggccagcctcatcccactgccagctgaccctcagttcctcaaagacagtgagtgaggacaggcctcaggctgtctcttcgggtcacacccagtgtgaaaaggtggcagagaaagcaccagggcagacactcgccctcaggaatgactcctccagatccgaggcctctaggcccagtacacgcaagtttcccctgctgccacacaggcgaggggagcctttgatgctgccacctcccgtagagctggggtaccgggtcactgctgaagacctggactgggagaaggaggcggcattccagtgcatcaagagtgcactgcaggttgaggacaaggccatctcagactgcagaccctcacggccttcccacactttgtcctcacttgcaacaggggcttctggactcagcccaggtcacctcgctgattcctgcccccttcccagctgcaagcatggatgcgggcatgagaagaacaaggcctggcacttctgctcctgcagctgccgcagcagcccctcccccctccacattgaaccgcacattggggtcactattggagtggatggaggcccttcacatttctgggcctcagccacagctgcagcaggtgcccagaggtcagaaccagagatcccagacctcccggaccagctcgtgccccaaacgaaatgccatctcgagctcctgcagctctacgggagacctcccgggacgaaagcggaagaggcgccagcctcatcccactgccagctgaccctcagttcctcaaacacagtgagtgaggacggacctgaggctgtctcttcgggtcacacccagtgtgaaaagacggcagatacagcaccagggcagacactcggccccaggggtggctcccccagatcccagtcctctaggccccgtagacacaagtttcccctgctgccacgcaggcgaggggagcctttgatgctgccacctcccttagagctggggtactgggtcactgctgaagacctggaccgggagaaggaggcggcattccagcgcatcaacagtgcactgcaggttgaggacaaggccatctcggactgcagaccctcacggccttcccacactttgtcctcacttgctacaggggcttctggtctgcctgccatttctaaagcacccagtatggatgcacagcaggagagacacaagtcctaa

SEQ ID NO: 16950 - DNA, 1158 bp, Homo sapiens; identical to SEQ ID NO: 11081
  SIMILAR (241)..(1056): 801254mologous to Homo sapiens mutant beta-actin (beta'- actin),accession number X63432,Smith-Waterman Score=1146.

SEQ ID NO: 16951 - DNA, 1238 bp, Homo sapiens
  SIMILAR (519)..(28): 791254mologous to Homo sapiens p40,accession number U93569,Smith-Waterman Score=638.
atggactctctgtggggcccaggagccgggagtcacccctttggggtccacaacacccggctgtccccagacttgtgtccagggaagatagtgttgagggccctcaaggagagcggggcagggatgcctgagcaggacaaggaccctagagtccaagagaatcctggtgatcagagaagggtccccgaggtcaccggggatgcaccgtctgcatttcggcccctgcgggacaatagaggcctctctccctttgtgcccgggcccgggcctctgcagacagacctccatgcccagaggtcagaaatcagatataaccagacatcccagatctcctggacgagctcctgcaccaaccgaaatgccatctccagctcctacagctccatgggaggcttgccggggctaaagcggaggagggggccagcctcatcccactgccagctgaccctcagttcctcaaagacagtgagtgaggacaggcctcaggctgtctcttcaggtcacacccagtgtgaaaaggcagcagatatagcaccagggcagacactcgccctcaggaatgactcctccacatccgaggcctctaggcccagtacacacaagtttcccctgctgccacgcaggcgaggggagcctttgatgcttgccaccttccttagaagtgggggtaccggggtcacttgtgaaggaactggaccgggagaaggaggcggcatttccagcgcatcaacagtgcactgcaggttgaggacaaggccatctcggactgcagaccctcatggccttcccacactttgtcctcacttgcaacagggacttctggtctgcctgccatttctaaagcacccagtatggatgcacagcaggagacacacaagtcccaagactgcctgggcctactggcccccttagcatctgctgcaggggtcccctctacagctcccatgtctgggaagaagcacagaccaccaggccccctgttctcctcctcagatccccttcctgccacctcttcccattcccaggactcagcccaggtcacctcgctgattcctgcccccttcccagctgcaagcatggatgtgggcatgagaagaacaaggcgaggggagcctttgatgctgccacctcccttagagctggggtaccgggtcactgctgaagacctggaccaggagaaggaggcggctttccagcgcatcaagagtgcactgcaggttgaggacaaggccatttag

SEQ ID NO: 16952 - DNA, 836 bp, Homo sapiens
  SIMILAR (61)..(402): 311254mologous to Mycoplasma hominis P120,accession number U22017,Smith-Waterman Score=119.
tgccctcacttcctttttgggcccaagcccaaggccctgcgagtagaactcattggcataaagccccttcagcccatcgaccagttcactttgctagtgggatctctccgttgctcctgcccctggactgagtggcaggccatcctacaaacacccgcacactcgacatcagtggtgtcaagacaactctaagaaggttttccgtgatcctgcaagacctgtgttccatcctggtgattctgtcttcaatttcactgcacaggtaccacagtaagccagtgctgtgtgctctgagttccacggcatcccccagctcagccactacactgagcacaaggactctgtggggcccaggagcaggtagtcacccctttggggtccacaacacccggctgtccccagacttgtgtccagcgaagatagtgttgagggccctcaaggagagcggggcagggatgcctgagcagcacaaggaccccagagtccaagaaaatcctgatgatcagagaacggtccccgaggtcaccggggatgcacggtctgcattttggcccctgcgggacaatggaggcccctctccctttgtgcccaggcccgggcctctgcagacagacctccacgcccagagctcagaaatcagatataagcacacatcccagacatcctggacgagctcgagcaccaaacgaaatggcatctgcagctcctacagctccacgggaggcttgccggggctaaagcagaggatggggccagcctcatcccgacggggcaaccaccggcccaccggggagcgcgacacgaggcccctcaaccgctacccatcgggaggttga

SEQ ID NO: 16953 - DNA, 2948 bp, Homo sapiens
  SIMILAR (269)..(114): 521254mologous to Homo sapiens Human secreted protein sequence encoded by gene 11 SEQ ID NO:72,accession number B24447,Smith-Waterman Score=132.
  misc_feature (1)...(2948): n = a,t,c or g
atgcctgagcaggacaaggaccctagagtccaagagaatcctgatgatcagagaagggtccccaaggtcaccggggatgcacggtctgcatttcggcccctgcgggacaatggagtcctctctccctttgtgcccaggcccgggcctctgcagacatacctccatgcccagaggtcagaaatcagatataaccagacatcccagaatacctggacgagctcgtgcaccaaccaaaatgccatctccagctcctatagctccgtgggaggcttgctggggctaaagtggaggaggggaccagcagggcaggagagcggggcagggatgcctgagcaggacaagggaccccagagtcccaanaaaatcctgatgatcacagaacggtccccgaggtcaccggggatgcacggtctgcattttggcccctgcgggacaatggaggcctctctccctttgtgcccaggcccgggcctctgcagacagacctccatgcccagagctcagaaatcagatataaccagacatcccagacatcctggacgagctcgagcaccaaacgaaatgctatctccagctcctacagctccacgggaggcttgccggggctaaagcagaggaggggaccagcctcatcccgctgccagctgaccctcagttactcaaagacagtgagtgaggacaggcctcaggctgtctcttcgggtcacacacggtgtgaaaaggcggcagatacagcaccagggcagacactcgcccccaggggtggctcccccagatcccaggcctctaggccccgtagacgcaagattcccctgctgccaagcaggcgaggggagcctttgatgctgccacctcccttagagctggggtaccgggtcacggctgaagacctgcacctggaaaaagagacggcattccagcgcatcaacagtgcactgcacgttgaggacaaggccatcccggactgcagaccctcacggccttcccacactttgtcctcacttgcaacaggggcttcgggtgggcctcccgtttctaaagcacccactatggatgcacagccggacaaactcaagtcccaagactgcctgggcctagtggccgccctagcatctgctacagaggtctcctctacagctcccatgtctgggaagaagcacagaccaccaggacccctgttctcctcctcagatccccttcctgccacctcttcccactcccaggactcagcccaggtcacctcgatgattcctgcccccttcacagctgcaagcagggatgccagcatgagaagaacaaggcctggcacctcggctcctgcawwtgccgcagcagcccctcccccctccacattgaaccccacgtcggggtcactactcaatgcagtggatgaaggcccctcacatttcttggcctcagccacagctgcagcaggtgcccagaggtcagaagtgagatataaccagagatcccagacctcccggaccagatcgtgcaccaaacgaaatgccagctcgagctcctacagctctacggaaggcctcccggaactaaagcggaggaggggaccagcctcatcccactgccagctggccctcagttcctcaaacacagtgagtgaggacggacctcaggctgtctcttcgggtcacagccactgtgaaaacaacgcagatacagcaccagggcagacactcgcccccaggggtggctcccccagatcccaggcctctaggccctgcatcaacagtgcactgcaggttgaggacaaggccatctcgcactgcagacactcacggccttcccacactttgtcctcacttgcaacaggggcttctggtgggtctagcgtttctaaagcacccactatggatgcacagcaggacagacccaagtcccaagactgcctgggcctagtggcccccctagcatctgctgcacaggtcccctctacagctcccgtgtctgggaagaagcacagaccaccaggacccctgttctcctcctcagatccccttcctgccacatcttcccactcccgggactcagcccaggtcacctcgctgattcctgcccccttcacagctgcaagcatggatgccggcatgagaagaacaaggcctggcacgtcggctcctgcagctgccgcagcagcccctcccccctccacattgaaccccatgttggggttactactcaatgcaatggatgcaggcccctcatatttctgggcctcagccacagctgcagcaggtgcccagaggtcagaagtgagatataaccagagatcccagacctcccggaccagatcgtgcaccaaacgaaatgccagctcgagctcctacagctctacggaaggcctcccggaactaaagcggaggagggggccagcctcatcccactgccagctggccctcagttcttcaaacacagtgagtgaggacggacctcaggctgtctcttcgggtcacagccactgtgaaaacaacgcagatacagcaccagggcagacacttgcccccaggggtggctcccccagatcccaggcctctaggccccgcatcaacagtgcactgcaggttgaggacaaggccatctggcactgcagacactcacggccttcccacactttgtcctcacttgcaacaggggcttctggtgggtctagcgtttctaaagcacccactatggatgcacagcaggacagacccaagtcccaagactgcctgggcctagtggcccccctagcatctgctgcacaggtcccctccacagctcccgtgtctgggaagaagcacagaccaccaggacccctgttctcctcctcagatccccttcctgccacatattcccactcccgggactcagcccaggtcacctcgctgattcctgcccccttcacagctgcaagcatggatgccggcatgagaatgaatgccggcatgtga

SEQ ID NO: 16954 - DNA, 624 bp, Homo sapiens
  SIMILAR (1)..(612): 651254mologous to Mus musculus Pro-Pol-dUTPase polyprotein,accession number Y12713,Smith-Waterman Score=698.
ggagttccctatgatcagttgacagaggaagagaagactagggcctggttcacagatggttctgcacgatatgcaggcaccatccgaaggtggacagctgcagcactacagcccctttctaggacatccctgaaggagagcggtgaagggaaatcttcccagtgggcagaagttcgagcagtgcaccttgttgtgcattttacatggaaggagaaatggccagatctgatggtttggctggatgatcaaggacttggaagaagcatgattggaaaattggtgacaaataaatttggggaagagatgtgtggatggacctctctgagtgagtggccaaaaactgtgaaaatattggtatcccgtgtgagtgctcaccaacgggtgacctcagcagaggagaattttaataatcaggtggatgagataagccattctgtggacaccactcagcctctttccccagccacccctgtcattgcccaatgggcccatgaacaaagtggccatggtggcagagatagaggttacgaatgggctcagcaacatgtacttccactcaccaaggctgacctggctacagccactgctgatgcccaatttgccagcagcagagaccaacaatga

SEQ ID NO: 16955 - DNA, 1011 bp, Homo sapiens; identical to SEQ ID NO: 5545
  SIMILAR (1264)..(1992): 971254mologous to Plasmid F Protein A,accession number M12987,Smith-Waterman Score=1240.

SEQ ID NO: 16956 - DNA, 597 bp, Homo sapiens
  SIMILAR (1165)..(1356): 611254mologous to Homo sapiens lamin-like protein,accession number M24732,Smith-Waterman Score=183.
cctgcactaatggcctcatggggagttccctattatcagttgacagaggaagagaagactagggcctggtttatagatggttctgcacgatatgcaggcaccacccgaaagtggatagctgcagcactacagcccctttctaggacatccctgaaggatagcagtgaagggaaatcttctcagtgggtgggacttcaagcagtgcacctggttgtgcactttacatggaaagaaaaatggccagatgtgcagttatatactgattcatgggctgtagccaatggtttggctgggtggtcagtgacttggaagaagcatgattggaaaattgtgacaaagaaatttggggaagaggtggccttggcagaggaggattttaataatcaagtgaataggatgactcgttctgtggacaacactcagcctctttccccagccatccctgtcattgcccaatgggcccatgaacaaagtggccatggtggcagggatgggggttacacatggactcagcaacatggatttccactcagcaaggctgacctggccacggcactgctgagtgtccaatttgccagcagcagagaccgacactga

SEQ ID NO: 16957 - DNA, 555 bp, Homo sapiens; identical to SEQ ID NO: 5478
  SIMILAR (318)..(548): 741254mologous to Mus musculus Pro-Pol-dUTPase polyprotein,accession number Y12713,Smith-Waterman Score=305.

SEQ ID NO: 16958 - DNA, 474 bp, Homo sapiens; identical to SEQ ID NO: 7710
  SIMILAR (226)..(471): 741254mologous to Mus musculus Pro-Pol-dUTPase polyprotein,accession number Y12713,Smith-Waterman Score=317.

SEQ ID NO: 16959 - DNA, 2715 bp, Homo sapiens; identical to SEQ ID NO: 6685
  SIMILAR (418)..(3057): 221254mologous to Dictyostelium discoideum interaptin,accession number AF057019,Smith-Waterman Score=325.

SEQ ID NO: 16960 - DNA, 738 bp, Homo sapiens
  SIMILAR (502)..(651): 781254mologous to Mus musculus Pro-Pol-dUTPase polyprotein,accession number Y12713,Smith-Waterman Score=211.
atgtcgcaggggacgactccctgggggccgaccccggcgggaaccacgcccgaatcggaggtacaccgcccctttcccttcccggtaccggtgccggtaccagagacctccgagcgctcattcccagtccgcggagtctgcggccaagccaaatccggtctccgaagaggcgccgcacgtctggccccggctgcttatctcttcacccggcagcagacaagggagttaatacacagcgcgtgtgtgtccatttccgttaacacaatgcacgggctatcagtcgctattaattccaggaggtgtacctattatagaaaatatgttattgatttttccaaatctgagatcattggaataccaatatccaagaatatagatctaacagtgggaaccacagtcactcaactacaaaatttaaatacagtgggaataattggatcccgaggtggcagaggccaagtggcagcactcaactgtgacaggcaaggacacctctggctttttaccagggtaactgtgcactggagaatgggaaatgatcggacattttggggactactggacactgtctctgagctgatgtttattccagggaacccaaaacatcattgtggccctccagttaaagtaggggcttatggagatcaggttgcactgatggcctcatggagagttccctatgatcagttgacagaggaacagaagactagggcctggttcacagatggttctgcatga

SEQ ID NO: 16961 - DNA, 773 bp, Homo sapiens
  SIMILAR (358)..(1197): 971254mologous to Mus musculus gag protein,accession number M17551,Smith-Waterman Score=1418.
atgacccagcagatccaatggtgcttgaggtgtcagaggcagatagggatgcaggtacccataagtgaatcacagcagaggcctctaggattttggagcaaggccctgccatcttctgcaaataactactctttttttaagagacagctcttggcctgttactgggttttggtggaaattgaacatttgactatgggtcatcaagtcaccatgcgacctgaactgcctatcataaactgcgtgctttctgacccatgtagccataaagtgggtcatgcacagcagcattccatcatcaaatggaggtggtatatacattatcaggctcaagcaggtcctgaaggcacaagtaatttacacgaggaagtggctcaaatgcccacggtctccacttctgccaccttgccttctcttcccgagcccacacagatggccttatagggaagttccctatgattcagttcacagaggaagagaagactggggcctggttcacagatggttctgcacattacacaggcaccacctgaaagtggacagttgcagcactacagcccctttctaggacaacactgaaggacagctgtgaaggaaaatctccccaccaccccgtcatcgcccaatgggcccatgaacaaagtggccatggtggcagggatggaggttacttgtgggctcagcaacatggatttccactcaccaaggctgacctggctatggccactgctgagtgcccaatttgccagcagcagaaacgaacattgaacccttga

SEQ ID NO: 16962 - DNA, 2055 bp, Homo sapiens
  SIMILAR (534)..(58): 311254mologous to Homo sapiens mucin,accession number L07518,Smith-Waterman Score=127.
tcattggttataaacatagacgggaatcactgtgattctccagtgtccacggtgggaagtgtgtggcgagaaggattctccagtatccacagcgggatgtgtgtgagtagaaggattctccagtgtccacggcgcgacgtgtgtgtgagtagaaggattctccagagtccacggcgggacgtgtgtggtgagaaggattctccagtgtccacggcgggatgtgtgtggcgagaaggattctccggtgtccacggcaggacgtgtgtggcaagaaggattctccagtgtccacggcgggacgtgtgtggagatggattctccagtgtccacagcaggacatgtatggcgagaaggattctccggtgtccacggtgggacgtgtgtggcgagaaggattctccagtgtccacggcgggacgtgtgtggcgagaaggattctccagtgtctacggctggggacatgtgtggggaggattctccagtgtccacggcgggacgtgtgtggggagaaggattctccagtgtccacggcgggatgtgtgtgggcagaatgattctccagtgtccacagtgggacacgtgtggcaagaaggattctccagtgtccacagcaggacgtgtgtgggcagaaggattctccagtgtccacagtgggacgtgtgtgtggaaaaggattctccagtgtccacggcaggacgtgtgtgtggagaaggattctccagtgtccacggcaggacgtgtgtgtggagaaggattctccagtgtccacagagggacgtgtgtggcgagaaggattctccagtgtccatggcaggacttgtgtgggcagaaggattctccagtgtccacagcaggacgtgtatggcgagaaggattctccagtgtccatggcgggacgtgtgtggagaaggattctccagtgtccacggcaggacttgtgtgggcagaaggattctccagtgtccacagcaggacgtgtatggcgagaaggattctccagtgtccatggcgggacgtgtgtgggcagaaggattctccagtgtccacagtgggacacgtgtggcaagagggattctccagtgtccacggcgggacgtgtgtgggaagaaggattctctggtgtcgttttcgctggctcctcactcccagctcaccatgctggggtggcctggcttgctgtctcttgagtaccgtgggaactgaggcgggctggccttgtctccccagcgcctgctcacagaaggtgccccatgatgtctgtcgtgcagatgaatgtgtccacgcgtgctgggctagtacagaagatcgtgtaggcaggggtcttcgtgggcctagggcctgaggaggaccgatagccttggggactgcatgggttttgagagtctgttccggagagggcccctgagccaggctgtctgctgtggatggctctgccatggcgctatctccttcatccttatctatctcttcattgttagtggagggtgttgggcatctgttatttgctttattcgagtctaggccacgagctgccccccactggaaaggctgaacctctctggctacattgttgtagaaaagctcccaggcggggctctgctcaggctctctgcatttctgggagacatccttgctgtccctgctccgcccgtgacagccaccatgactgagcccacactggcctcctggactcccaccttccgcattgatatacgcctttcttgggcgctcttcaaggaataaacggagactgatgaagacgatgaaggtggaagcctgtgaggacctgtccgctcctaaatatctgaggatccagctccccacgggatccccaagaagaagatctgaagctcctgaagtttgcattttccaggggtcctcctctctctctagtgcacccaccacctttgctgagctatccctctgccaggagatagccccagactcctcctcgcccccctccacggcacccaagtctgcacccgctgcatcctccaagcgcccaaccttaattctagctttgaattgttgagtggaaatggccaagaaaaacat

SEQ ID NO: 16963 - DNA, 1077 bp, Homo sapiens
  SIMILAR (73)..(675): 301254mologous to Danio rerio Znr-1,accession number U87758,Smith-Waterman Score=107.
atgaaggcactcagccctgggcacaggaggcagctcttcctgcaggcaacaaagacccagggatacctgggtcccagagaccaccatcctcacagcctggtcatctcactgcagcagcttggtccctggctgcaggtgacggtggccggccaagtaaacaccttggcaggaatccagaaaacgatccacgcagaacattgcaatgtcacagaaatggccgcccactggccacgaagccctggccccaccctgcgagcagggcccaccccaggtgctagactcaaatgctgtggctccgaccgcagactgtggctaccaattatcaactgccatcaacagaaaccaggagctctgcggcaggaagccggccgtgtcaccgagcagagaataagtccggggtctccgatcctgagaccagctgtacacccagggcactactgtttacagcaacgtctatcagggcagaaaagcaacagaagaaccacccagaagagtttccagaagcttcacgtggataaaaggaaaccagagaatttcagcaaggaaagtgaccatttattaatatacagccgcgagggaaatccggatgttgcctccctggccactccccctggtatctggatgatgtctgccacagaccttttctatggggacccctttgcctttccaggagggggaccattcactctgtccctggagaggggtcctagcgtgatcctcggcacagatgcctcagaagagcttctcttcacaaaggcatctttagctgtcagcacctcggtcttccagttcagcacagggaagatctacactgagtgggtgtggcaaaaaaacaagagtttcctctctccccacttcccaacaaagcctatggcatctccagtgaaaggcaagcacagcacgtccctgttgcagaggttaaattacagggaccgctggcagtgcctgcaggaaggggcagggctggctctgctcagtgcccacatgaaggtgcccacaggctccaaagaaccccagcaagcaggcaagttgcccagcaagcccagaaaacaaaccacaccaactttcaaggactaa

SEQ ID NO: 16964 - DNA, 699 bp, Homo sapiens
  SIMILAR (236)..(340): 481254mologous to Lymantria dispar nucleopolyhedrovirus LdOrf -121 peptide,accession number AF081810,Smith-Waterman Score=73.
atgctctgcttgccctgtaagccatccctggctgctgccctggcagtcgggatctgccttcagcttgccctagagagccctgcaaaggccaccacagcatggccacagactctcaaaacccatgcagtccccaaggctatcggtcctcctcaggccctggccacgaagacccctgcctaccgatcttctgtactagcccagcacgcgtggacacattcatctgcacgacagacatcatggggcaccttctgtgagcaggcgctggggagacaaggccagcccgcctcagttcccacggtactcaagagacagcaagccaggccaccccagcatggtgaggtgggcactgtgttcaccaacaataaaggcggacaaagtcagcaacgtcaacatgggaagtccaatctgctgaatgccagaaggcccccgaggcaggccccacccctcccagcacagctggagatgctgaaggagccaatgcgctcagacaagagtcagagggaaactggggatcagaggctaaaagcccacatgtggctgaggcgggctcttggcgcccgcagcagggcagctgtcatcatctccatcctcctgacaagacaaaagatgcagccaggaaaactcattccccaggagataatggatgtcagcccagacctccacgtccatgcaaaaccctttggtctctcagcagaataa

SEQ ID NO: 16965 - DNA, 1614 bp, Homo sapiens
  SIMILAR (1318)..(1542): 701254mologous to Homo sapiens clone 22,accession number AF009424,Smith-Waterman Score=282.
aatacactatgcattgtatcaggcaaactactctacgccatcatgcgtgagcttaaagaacatgttttctctgaccctgctggggatgagcccaggtcttcctcttatggggttaccagaggcagtagtgtggcatggaagagtgcttgcttcttagtaatatccaggggcatacattttggtgttgccaaaaggattcgttgatatataacttggacataaagatcagagtccccgaggagtcccctttgcttccctagagttctccagttccaggcgtctgccctgaacgtgcgcagctcaatgatgtggtcaaagaggctggggctcggggagcaagatcaaaaacacgcagcccttcagagtcctggagccatcttcccagaatgcagcagcccccaggggcctcaacactcaaggtttccacctccacctccactcagggaccgctggcagtgcctgcaggaaggggcagggctggctctgctcagtgcccacatgaaggtgcccacaggctccaaagaaccccagcaagcaggcaagttgcccagcaagcccagaaagaaagcagcatcaatcatgaagcgcaacaggagctccacgtcgcccactgacagatgtgctttccatgtgtattggaggtctgtgggtgatgaggaccatatccacctggcagtatcaacagaggcagatgcacagactctcaaaacccatgcagtccccaaggctatcggtcctcctcaggccctggccacgaagacccctgcctaccgatcttctgtactagcccagcacgcgtggacacattcatctgcacgacagacatcatggggcaccttctgtgagcaggcgctggggagacaaggccagcccgcctcagttcccacggtactcaagagacagcaagccaggccaccccagcatggtgaggtgggcactgtgttcaccaacaataaaggcggacaaagctctgccagttgtggagctgcccggaagagacccagcatgaagaaattcgcagaaattcataaaaagagaaagcaagcctgtcagcaacgtcaacatgggaagtccaatctgctgaatgccagaaggcccccgaggcaggccccacccctcccagcacagctggagatgctgaaggagccaatgcgctcagacaagagtcagagggaaactggggatcagaggctaaaagcccacatgtggctgaggcgggctcttggcgcccgcagcagggcagctgtcatcatctccatcctcctgacaagacagactggtccttcctacacagcagatggatatttagaggccaaagagtgcaaattcacctgcaccagtggtaaatgcttgtatcttggttcgctggtctgtaaccaacagaacgactgtggggacaacagtgacgaagagaactgtctcctggtgaccgagcacccgcctccgggcatcttcaactggcacgacgcactgagtgggcacactgcctctgtggtgttcttcccagtaatgcagaatcttattctaatcgtgataagacaccgcacagacccaaatcgaaggacgttctgcaaaacactggaccagcagttttcaaaagtgtcaaggctctga

SEQ ID NO: 16966 - DNA, 311 bp, Homo sapiens
  SIMILAR (12)..(203): 671254mologous to Oryctolagus cuniculus retrovirus related reverse transcriptase,accession number X62677,Smith-Waterman Score= 214.
ctggaacatgacaaggatgcccacttacaccacttctattaaacatggtacttgaaatcctagccggagcaatcagacaagagaaagaaagaaaggacatccatactggtaaagaggaattcaaactgtcacggtttgctgattatataattgcatgtcaagaaaaccctaacgactcatccaagaagctcctagaactggtcatagtggctgcctgtgttcctcgacttatgaccccttccttcatcttcaaaactcctcactccaatatctgctgctgtcatcacattgcccattgccttttcctctga

SEQ ID NO: 16967 - DNA, 430 bp, Homo sapiens
  SIMILAR (2)..(409): 391254mologous to Arabidopsis thaliana arginine/serine-rich protein,accession number AF151366,Smith-Waterman Score=139.
cggaggtcgtaagccccggagcagcggtagttgcaagctgtgcggttgttcacactacccaccacctcctcggggctctgaaagctccggacggtgcccacatggccctcgccgccgtcctgcttcccccacttccagtccgggccgcgcactacccgagcgccaaccccttccaccatcacccggttattccgggagttactcatcggggcccccttctctctgcccccgcaccagccgccgcgctccgccccgccacagagtcccagccgggcgagagcgactccacatccgggtaccgccgtacccaaggccggagcggcaccttctcagagtgtctaggagggggatcctcggcaataatagagtgggaaggcttccagagagccgcgcaatcgcgggaagaaaggaggagaaaactgatacgaaa

SEQ ID NO: 16968 - DNA, 477 bp, Homo sapiens
  SIMILAR (205)..(408): 821254mologous to Drosophila melanogaster CG5841 gene product,accession number AE003529,Smith-Waterman Score=288.
atgccggccactagggttctgccctttcatttccccccgggcccttggggtggggccgttgcccctcataagctaccgccgcgcgctcctctgcggcatcggggctgtacgcggccatcggcggcttacaactggcgccaaaaaaaaagcaacgaaaggaaacgcttgcgggctgaccccaggttgactctagagatcccccgcattatggataaagatggtgatagagcagttcaccatgcagcttttggagatgaaggcgctgatatagaagtactacatcgaggtagtgctgatttgaatgctcgaaacaagcgccgacagacaccacttcatattgctgtcaataaaggtcatcttcaagttgtgaagactttattggactttggctgtcatcccagtctccagcggtgtcctccccgttttggggaattcatcgaccttaccgcatgtggagaagggcctaaagatgcataa

SEQ ID NO: 16969 - DNA, 1224 bp, Homo sapiens
  SIMILAR (2019)..(25): 541254mologous to Mus musculus mSin3A,accession number U22394,Smith-Waterman Score=1850.
tcaatggcttattagataggcctctccagaccccttcccaagaggaggagtcgggttgggggacctgtgtctgttctcttcccggtgctttgtgtcttccaggcttgaaagcatcccggtgatggtgctgccatcatttcccttgggggtagagggtcttttctgaaagtgtttgttcacccgttcggaacctagaattcctttggcgctttgcctttccgctcgctccagccgggcgctgcccaccaggtgtcccactgcagacctctccccgcgacaccgacgcccaccgcagctcgccccttccccccgcgcgcgcaagccctggccaggtggccgcggcttaccggtgggcgcgctgtccaggatgcggaggtcgtaagccccggagcagcggtagttggcagctgtgccgttgtcccacactaccaccacctcctcggggctctcgaagctccggacggtgcccacatggccctcgccgccgtcctgcttcccccacttccagtccgggccgcgcactacccgagcgccaaccccttccaccatcacccggttattccgggagttactcatcggggcccgggcggtaggggctctcgccgctgcacgccgccgctcgccgccgctgccgccggggggcccgtgagggagttgggcccgggccggacttggaagcatcgcttcagcccattctccatgtcctctttgtagaagtttaattcgttccaggtcataacaaacttgtacaagatcacccacttgaaactgcgaggtgcctccttctgcaccctgagcagcatctccacttcggacaatgttcgctttagtgagaacagcaggattgaaggtccacctattgccacttggatactgtactacaatgtcatgatcttcatcaatgccacaaacagttccagttgtagttaaagtctcaaacattccatcagtccatcctccatgaccatgctgcaaagactgtacaatttcgaggtcgagatctatatttaccaggtcaccaatctgcaatccaccaggattcctgttgccattctgctcacctagcacagggcagtgatctctgtagaaagaacctcccttggcatcctggacacatttcagatcagacgtgcttttgttgttctctgtctcaatgaatggctctaccctttcacttggttgcccaagccagaaagctgtaattgcactggtccaggtcaccat

SEQ ID NO: 16970 - DNA, 1246 bp, Homo sapiens
  SIMILAR (84)..(149): 441254mologous to Mycobacterium tuberculosis SEQ ID N_ 5C,accession number AX004973,Smith-Waterman Score=50.
atgtggagtcgctctcgcccggctgggactctgtggcggggcggagcgcggcggctggtgcgggggcagagagaagggggcctgagggcccgggcgctcgccggacgccgggaggtaccaccgctgacaacgggggacgaggcgctgctggcacttggatatccgcccccgaactgggggccgattgagagagtggacgcacagtctgatctgaaatgtgtcccaggatgccaagggaggttctttctacagagatcactgccctgtgctaggtgagcagaatggcaacaggaatcctggtggattgcagattggtgacctggtaaatatagatctcgacctcgaaattgtacagtctttgcagcatggtcatggaggatggactgatggaatgtttgagactttaactacaactggaactgtttgtggcattgatgaagatcatgacattgtagtacagtatccaagtggcaataggtggaccttcaatcctgctgttctcactaaagcgaacattgtccgaagtggagatgctgctcagggtgcagaaggaggcacctcgcagtttcaagtgggtgatcttgtacaagtttgttatgacctggaacgaattaaacttctacaaagaggacatggagaatgggctgaagcgatgcttccaactttaggtaaagttggccgagtacaacagatttattcagacagtgatttaaaggtggaagtttgtggaacatcttggacatacaatccagcagcagtttccaaggtggcatctgcaggatcagccattagcaatgcatctggtgaaagactctcacaactcctgaagaaattatttgaaacccaagaatctggtgacctcaatgaagaattagttaaggctgctgccaatggagatgttgctaaagtggaagatttgcttaaaagaccagatgtggatgtaaatgggcaatgtgctggccacacagctatgcaagctgctagtcagaatggacatgttgacattttgaagttacttttgaagcaaaacgtggatgtcgaagcagaggataaagatggtgatagagcagttcaccatgcagcttttggagatgaaggcgctgttatagaagtactacatcgaggtagtgctgatttgaatgctcgaaacaagcgccgacagacaccacttcatattgctgtcaataaaggtcatcttcaagttgtgaagactttattggactttggctgtcatcccagtctccag

SEQ ID NO: 16971 - DNA, 675 bp, Homo sapiens
  SIMILAR (516)..(659): 381254mologous to Homo sapiens Human secreted protein, SEQ ID NO: 4462,accession number G00381,Smith-Waterman Score=83.
tcagatctgcctgccgcctccctgtgcctcctctggctctgcaccatcctcctctggactgtctgagttgcttctgacgatttgccggccacctccatccatccagatattcttggcaatattgttctcctggtccatgttcctgggaagcaagccccgcccccccaaccccagcgcgtccacctggggctgccttgctgggatgtggcacccatgcctgtcgtgctctgggagcccctctacgtatggaggatctggcttgtgtctgccccgctgctgggcagcaatgaacacagcacagtctgcacacaggaagagctcaggaacccggttactagaggacccccgaaggctcactgaggccggctgcagactgcctttggcttccgggagccactgagggcagcagccaatcgtctggtggggggcaacgctgcagctcctggggctgacagagatcacaggagggatgctgtcactgagcgcgcggtgcccagcgcgcgccagggctcccatcaagtcctctcggagcccgcagcaggctcccacttctgtttttctctgacagccatgcaggcagcaggccttcagccaggctccccgccgcgcttccacgcacgcacactcacagtcacgctcgtgcacactcgcacgcacacgcacgctcacgctcat

SEQ ID NO: 16972 - DNA, 599 bp, Homo sapiens
  SIMILAR (331)..(576): 291254mologous to Mus musculus nuclear localization signal binding protein,accession number S79410,Smith-Waterman Score=108.
ccctcggctggcacatctgtgaagcaggcagaatgccaatcgagccgccaatcctacagagcagggcgaagtcttttgaaaacaattaaacctataatcgtgtgttgcttggtgaagggcatcattcggcctcttgagctgcagcagcccgaggcagtcactgtccctaccctccttccttagcgctgccttggtgatgcctctcagatctgcctgccgcctccctgtgcctcctctggctatgcaccatcctcctctggactgtatgagttgcttctgacgatttgccggccacctccatccatccagatattcttggcaatattgttctccgcgcggtgcccagcgcgcgccagggctcccatcaagtcctactcggagcccgcagcaggctcccacttctgtttttctctgacagccatgcaggcagcaggccttcagccaggctccccgccgcgcttccacgcacgcacactcacagtcacgctcgtgcacactcgcacgcacacgcacgctcacgatcatgcacactcacattcgtgtacatgtacacattcacaccctcatgcacactcaacgaaatagtcgacccgggaatt

SEQ ID NO: 16973 - DNA, 1170 bp, Homo sapiens
  SIMILAR (1120)..(1719): 1001254mologous to Escherichia coli 2-C-methyl-D-erythritol 4 -phosphate cytidylyltransferase,accession number AB037143,Smith- Waterman Score=1044.
atggatgagaagtacagggataaaggaaatggtaacataagcttcgtcagtgtttactggacactcatgaggcctgaaaacgcggtgctggggggaccttcctctacattcaaggaacttccacactgttttctgaaggttgcttctctttcttcttcactgatgcacactctacacacccaagtaaacaaccagcctaatgcagaacttgtctctttcaacaaatgtgctgtttcctactttccctggggcaagaagggcactgtgtccctgacctgcccactcacgattgtcatcacccttcttcttgcatttgccaactcaattcatgtgagcatcgggccatctgtctacctgcctaccacacatgagaatgtaggtgaaagccctgcaaagcttgtaggaatcactgtcaacaatccgtggcatccagtcacctttcccaacacactgcacaatatgggcacctggatagtcagcccaacaaaggccacaggtggccaaatgtaccagacaacaaaagctgatgaagacgctgctgccgtgcacaagggtacctctgggaccatcttctcctctagcatgcaacctgtgcatgaaagaccagagagcaaagaagagaagaagtggcctgtgggcctccgaggcacagacggcagcctcctgctacaggaaccggccccgcagtgtggccagtctgacctagtctgccacccttaccccagtcctactttcaaggaaggagtagcctcagtacccctccctgagcttggtgtccgggaccccagcctgactgcatggtactggtaccaaaacagagatatagaccaacggaacagaacagagccctcagaaataatgccgcgtatctacaactatctgatctttgacaaacctgacaaaaacaagaaatggggaaaggattccctatttaataaatggtgctgggaaaactggctagccaaatgtagaaagctgaaactggatcccttccttacaccttacacaaaaattaattcaggatggattaaagacttaaatgtcagacctaaaaccataaaaaccctagaagaaaacctaggcaataccattcaggacataggcatgggcaaggacttcatgtctaaaacaccaaaagcaatggcaacaaaagccaaaattgacaaatag

SEQ ID NO: 16974 - DNA, 2267 bp, Homo sapiens
  SIMILAR (3)..(341): 951254mologous to Homo sapiens KIAA0700 protein,accession number AB014600,Smith-Waterman Score=535.
cttttgccagggaagaatgctgagaaggttccagaaaaatagaatccaaaagccttccgaagttggttgcaacggctcttcatgatttctatgcacaagcagttatcatttattacccagagtctgactaactttgtggaacctataaataaaagaatatctcttttgtcaaagcgataaacctcttcttgcagaatagcacaaagcaaaggtagcccgaggccaagtattataacaagtaggatcgtggagcgtgcgtgggctccacagccatttttgcaagctgtgcccaccagccctgtaaagtgtcctaggcccttccttttgaggctggaacaagggaactggagtcgcagggcgtgggaaatccagcggaggcataacagaatccatacctcttgagggcctaataagttgcatgtgattacaatctaacttttctttttccaagagcattttaagactttaaacactttgttgactgcttggatggctgtgtctttccatgaggtttaggccctactgtaatagcaacagcccacaggttgcgatgccccagagctggccctcactggcagccggcagcagcacccttgttcccctgggtattcgggggggggggggagacgacgagggagccccgcccccaccggcaccacagacccgccaaaggggacaggcacagtcacggcaaatccaggcaccatcgggcaaactgcagaggtcactccaggctgtggctccacatcccgaggaacaaaagcgggcctgctcagctgtctgcaaggacggccgttccagaccaagtggcctgctactccgaggacccagctcgctccaggctgtgactccacatcccgaggtcgctgcctggcgaccgggcagcgaggaccggccaccccagactgcctgtgccgccgccccgagctcggacagagccgcgaccgcgaggacagcgacgcctgcacagctctggcgagatggcggcagggtccactacgctgcgcgcagtggggaagctgcaggtgcgtctgggcactaagacggagccgaaaaagctagagaaatatttgcagaaactctccgccttgcccatgaccgcagacatcctggcggagactggaatcagaaagacggtgaagcgcctgcggaagcaccagcacgtgggcgactttgccagagacttagcggcccggtggaagaagctggaaaaacgccccttgtgtgcccagggagattggcactcccctactttgatcagggagaaatcattcggggcctgcttaagagaggaaaccccaaggatgccctcctgggcaagtgccagggacaggcagccttcggacttcaagacagacaaggaaggggggcaagctggcagcggccagcgtgtccctgccttggaggaggctccagacagtcaccagaagaggcctcagcacagtcactcgaacaagaagaggcccagtctagacggccgggacccaggaaatgggacacacggcctgtcgcccgaggagaaagagcagctttccaacgaccgagagactcaagaggagaagccaccgactgctcatttggacagaacgtccgtgagctccctctctgaggtggaggagatatggaaattgatctcagagaggctgagatctgctcagggtcagcaagctctcaaaactgttactagtactttttcttcaaaatatgtgtgtcgagcgtttttggctgagcctggatggattgccattttgtatatcgatacagcaaatgctttggagcaagaaactaaactggggttacgacggtttgaagtttgtgacaacattgatcttgaaactattttgatggaatatgagagttattattttgtaaaatttcagaaataccccaaaattgtcaaaaagtcatcagacacagatagagctcccgtggaagaggaaggcacggcccgtagtggctctaatcgggagagaagagggaaaggagggacgtcgctgcccgagggagtagttaatggaggaagcaagaggtgccagccgccccagccatgtctgaaagcggccaacgtagagctcagggtgtggcttcagagggggaaagccccaagccctggcagcttccacatggcgttgagtctgcaaggacacagaagtcaagaattgaggggaaattcccttctggagatagcttgtttgaatgagctggactacagtgcaaatgctggggcctatgttgactgtatggtcaccacggtggctgtgttctga

SEQ ID NO: 16975 - DNA, 1891 bp, Homo sapiens
  SIMILAR (154)..(687): 351254mologous to Bos taurus GTPase binding protein (AA 1 - 1044),accession number X12602,Smith-Waterman Score=152.
attaaattttttacaaaattatatgatgaaccatattctcatccttacttccttttcagattagatacacaacactctgaagacatgaatgccaccagatctgaagagcagttccatgttataaaccacgcagagcaaactcttcgtaaaatggagaactacttgaaaatgcttttcagtgaaattattgactcatttaaattcctacaaatatttcctatttccaggttggttctcagcgcagtgtctgattattttgctgcaatgtttactaatgatgtgcttgaagccaaacaagaagaggttgacgtagtttttactttatggaacttataatcattctttgctttttcaaaccatctaggagtcctgcaattgaaagaagataccattgaaagtttgctggctgcagcttgtcttctgcagctgactcaggtcattgatgtttgctccaattttctcataaagcagctccatccttcaaactgcttagggattcgatttattccattaagaaatttctaaagtgcaaagttttagtagatgacctttcttttctaggaacacttcattgaggtaataaaaaaccaagaattcctcctgcttccagctaatgaaatttcaaaacttctgtgcagtgatgacattaatgtgcctgatgaagagaccatttttcatgctctaatgcagtgggtggggcatgatgtgcagaataaatacgttctttctaatggtgaactctccattcatataccatgcatcactacttttcagttactggcagatcttgaaaccagttccatgtttactggtgatcttgagtgtcagaagctcctgatggaagctatgaagtatcatcttttgcctgagagaagatccatgatgcaaagccctcggacaaataccaattcaaaatttcaatagaagtagattttaccgttgttcaatatccctttgtcaggtactactactattgaaaaatatgacctcaggaccaacagttggctacatattggcaccatgaatggccgtaggcttcaatttggagtcgcagttattgataataagctctatgtcgtgggaggaagagacggtttaaaaactttgaatacagtggaatgttttaaaacaatattcagtgtgtggcatacctaggtgaacccacatattattttaatttttttaggtgtagccactcttgaaggaccaatgtatgctgtaggtggtcatgatggatggagctatctaaatactgtagaaagatgggaccctgagggacgacagtggaattttgtgtgtatatgtatacacacacatatacatacacacaattctgtctttttatctagattatatgctattggtggacgtgatggaagttcctgcctcaaatcaatggaatactttgacccacacactaacaagtggagtttgtgtgctccaatgtccaaaagacgtggaggtgtgggagttgccacatacaatggattcttatatgttgtaagatgcagaaaaagcatttgacgaaatccagcaacctttatgattaaaattctcagcagaatcagcatacaagggacataccttaatgtaataaaaaccatctatgacaaacccacagccaacacaatactgaatgtggaaaagttgaaaacattccctctgagaactggaacaagacaaggctgcccactgtctgcactcctcttcaacatggtactggaagtcatagccagagcaatcagacaagagaaaggaataaagggcatccaaatcagtaaaaaggaagtcaaactctcactgtttgctgatgatatgatcgttcacattgaaaaccctaaagactcctcaagaaagctcctagaactgataaaagaattcagcaaagttt

SEQ ID NO: 16976 - DNA, 842 bp, Homo sapiens
  SIMILAR (283)..(432): 581254mologous to Drosophila melanogaster Misexpression suppressor of ras 6,accession number AF195499,Smith-Waterman Score= 177.
atggcccaacatctgcttggcttcttctacggactcaggaagatttcactcatagcagaaggcaaaggaggagcaggcatgtcacatgaaagagagggagcaagagagagagaaggagtattggaagtcctagccagagcagtcggacaagataaagaaataaagggcatccaaattggtaataaggaagtcaaactgtcactgtttgctgatgacatgattgtatacctagaaaaccctaaagactcatccagaaagctcctagaactggtaaatgaattcagcaaagtttcaggttacaaaattaatgtacacaaatcagaattggaatcatcatggtggacaatcagcatacaagggacataccttaatgtaataaaaaccatctatgacaaacccacagccaacacaatactgaatgtggaaaagttgaaaacattccctctgagaactggaacaagacaaggctgcccactgtctgcactcctcttcaacatggtactggaagtcatagccagagcaatcagacaagagaaaggaataaagggcatccaaatcagtaaaaaggaagtcaaactctcactgtttgctgatgatatgatcgttcacattgaaaaccctaaagactcctcaagaaagctcctagaactgataaaagaattcagcaaagtttctggatataagattaatgtacacaaaccagtagctcttctatacaccaacagcgaccaagcggagaatcaaatcaagaactcaaccccttttacagtagctgcaaaaataataaaatacttagaaatatacctaatcaataacatgaaagacctctacaaggaaaacta

SEQ ID NO: 16977 - DNA, 531 bp, Homo sapiens; identical to SEQ ID NO: 14145
  SIMILAR (196)..(447): 981254mologous to Homo sapiens unnamed protein product,accession number AX056883,Smith-Waterman Score=461.

SEQ ID NO: 16978 - DNA, 1776 bp, Homo sapiens; identical to SEQ ID NO: 3395
  SIMILAR (585)..(283): 941254mologous to Homo sapiens NAG13,accession number AF194537,Smith-Waterman Score=505.

SEQ ID NO: 16979 - DNA, 1428 bp, Homo sapiens
  SIMILAR (838)..(1284): 751254mologous to Mus musculus Pro-Pol-dUTPase polyprotein,accession number Y12713,Smith-Waterman Score=608.
atggaggagaacaaagcagagaagaggatgagaagatgcagtacgaaggtcgaggatagctctgggtgtcaacagagatcactggagcagttgtcactctcggtccttcatgcagcaaggtggctggaatcatctgaaagctggtcacgggcatgtctggtgcctcagccatctgaggactgtgactccttgggtgtctctctctgtctgtgtggtctctctgcattgcctgggcagcatgacagcttcagggtatccaacttcttacagggagagtcagtgcttcaggggcatgtgctttgggagagagaaagcagtagatgcagcatcgctttcagggagccagttttgggagtcccaaacaccaaaccaggtttaggaaaggagaaacagattctacctctggaaaggatatactgtggtggcaaaggtgttggaaagtaccatctgtatcagtccaccctctggacaaaacaatttgtatccctctgtcatacaaactatactcacccctaccccagactccccaaagcctccttcatcatctcatctggctcaggttcaagggccagatcgcatcgtctaaaccagatccacatgtgctggtgcctccggtataagccactggctgatacattcctgcgtgagaagaaggaacagtcagctgccgagcgatgtcgacttgttctccagcagtgtaaattacaaggctggcagaagacagacagatcttggagaatgacagtggattattgtaagcttaaccaagtggtgactccaattgcagctgctgtaccagatgtggtttcattgcttgaccaaattaacacatctcctgtgacccaaaagactgtcagttttgagtggggtccagaacaggagaaggttctgcaacgggtccaggctgctgtgcaatctgctctgccacttgggccatataacccagcagatccaaagatgcttgaggtatcagtggcagatagggatgctgtttggagcctttggcaggcccccataggtgaatcacagcggaggcctctaggattttggggcaaggccctgccatcttctgcagataacgactctcctttggagagacagctcttgacctattactgggctttagtggaaactgaatgtttgactatgggtcatcaacttatcatgaactgggtgctttctgacccatctagccataaagtgggtcatgcacagcagcttcccatcatcaaatggaagtggtgtatatgtgatgaggctcaagcaggtcctgaaggcacaactacccctatgatcgcccaatgggcccatgaacaaagtggctatggtggcaaggatggaggttatgcatgggctcagaaatatgggcttccactcaccaaggctgacgtggctgtggccactgctgagtgtccaatttgccagtag

SEQ ID NO: 16980 - DNA, 227 bp, Homo sapiens; identical to SEQ ID NO: 4494
  SIMILAR (3)..(137): 911254mologous to Mus musculus Pro-Pol-dUTPase polyprotein,accession number Y12713,Smith-Waterman Score=212.

SEQ ID NO: 16981 - DNA, 207 bp, Homo sapiens; identical to SEQ ID NO: 14654
  SIMILAR (1)..(159): 731254mologous to Mus musculus Pro-Pol-dUTPase polyprotein,accession number Y12713,Smith-Waterman Score=185.

SEQ ID NO: 16982 - DNA, 789 bp, Homo sapiens; identical to SEQ ID NO: 6680
  SIMILAR (226)..(789): 841254mologous to Mus musculus Pro-Pol-dUTPase polyprotein,accession number Y12713,Smith-Waterman Score=834.

SEQ ID NO: 16983 - DNA, 435 bp, Homo sapiens
  SIMILAR (1)..(342): 861254mologous to Mus musculus Pro-Pol-dUTPase polyprotein,accession number Y12713,Smith-Waterman Score=514.
atgacagtggactattgtaagcttaaccaagtggtgattccaattgcagctgctgtatcagatgtggtttcattgcttgagcaaattaacacatctcctggtacctggtatgcagccattgacttggcaaatgcctttttctccattcctgtccataaggcccagcagaagcaatttgccttcagctggcaaggccagcaatatacctttactgtcctacctcagtggtatatcaactctccagctttgtgtcataatcttattcggagagaccttgattgcttttcgcttccactagatatcacactggtccattacattgatgacattatgctgattggatccaccataaagtgggttgtgcacagcagcattccatcatcaaatggaagtggtatgtacatgattgggctcgagcaggtcctgaaggcacaa

SEQ ID NO: 16984 - DNA, 808 bp, Homo sapiens
  SIMILAR (40)..(612): 831254mologous to Mus musculus Pro-Pol-dUTPase polyprotein,accession number Y12713,Smith-Waterman Score=838.
ccctcttatttggcttgtgcagaagacagatggatcttgagaatgacagtggactattgtaagcttaaccaagtggtgattccaattgcagctgctgtatcagatgtggtttcattgcttgagcaaattaacacatctcctggtacctggtatgcagccattgacttggcaaatgcctttttctccattcctgtccataaggcccagcagaagcaatttgccttcagctggcaaggccagcaatatacctttactgtcctacctcagtggtatatcaactctccagctttgtgtcataatcttattcggagagaccttgattgcttttcgcttccactagatatcacactggtccattacattgatgacattatgctgattggatccagtgagcaagaagtagcaaacacactggacttattcgtgagacatttgcgtgccagaggatgggaaataaatccaactaaaattcagggaccttctacctcagtaaaatttctagggttccagtggtgtggggcctgtcaagctattccttctaagatgagggataagttgctgcatttagtccctcctacaaccaagaaagaggcacaatgtctaacagctcttggcctgttactggctttggtggaaactgaacatttgactataagtcatcaagtcaccatgcgacctgaactgcctatcatgaactgggtgctttttgacccatctagccataaagtgggttgtgcacagcagcattccatcatcaaatggaagtggtatgtacatgattgggctcgagcaggtcctgaaggcacaa

SEQ ID NO: 16985 - DNA, 544 bp, Homo sapiens
  SIMILAR (224)..(544): 791254mologous to Mus musculus Pro-Pol-dUTPase polyprotein,accession number Y12713,Smith-Waterman Score=451.
gtataagccactggctgatacattcctgcgtgagaagaaggaacagtcagctgccgagcgatgtcgacttgttctccagcagtgtaaattacaaggctggcagaagacagacagatcttggagaatgacagtggattattgtaagcttaaccaagtggtgactccaattgcagctgctgtaccagatgtggtttcattgcttgaccaaattaacacatctcctgtgacccaaaagactgtcagttttgagtggggtccagaacaggagaaggttctgcaacgggtccaggctgctgtgcaatctgctctgccacttgggccatataacccagcagatccaaagatgcttgaggtatcagtggcagatagggatgctgtttggagcctttggcaggcccccataggtgaatcacagcggaggcctctaggattttggggcaaggccctgccatcttctgcagataacgactctcctttggagagacagctcttgacctattactgggctttagtggaaactgaatgtttgactatgggtcatcaa

SEQ ID NO: 16986 - DNA, 636 bp, Homo sapiens; identical to SEQ ID NO: 6687
  SIMILAR (1)..(360): 461254mologous to Mus musculus Pro-Pol-dUTPase polyprotein,accession number Y12713,Smith-Waterman Score=240.

SEQ ID NO: 16987 - DNA, 3228 bp, Homo sapiens
  SIMILAR (2997)..(3227): 831254mologous to Mus musculus Pro-Pol-dUTPase polyprotein,accession number Y12713,Smith-Waterman Score=350.
atggtgacatcttccctgactgtggctatcacctccctggttgtggttattacctctttggttgtgatcatcacctccttcgttgtggttaccacctccctggttgtggttatcacctccctggttgtggttatcacctccattgctatagctatcgctaccctggttgtggttctcaccttcactgttgtggttctcacctccctggttgtagtcaccacctccctggtcatggttatcactcccccgtttgcagttatcacctccctgggtgtggttatcacctccctggttgtgatcatcacctgccttgttctggttatcactgccctgggtgtagttatcacctccctgggtgtagttgtcacctccctggtcatggttatcactcccctggttgcagttatcactcccctgggtgtagttatcacctccctggttgtggtcatcacctccctggtcatggttatcacttcccttactgtggtcattacctcctccattgtggtcatcactcccctggtcatggttatcacttcccttactgtgatcatcacctccctctttgtggtcatcactcccctggtcatggttatcactttcctgattgtggttaacacctctctggttgtggttcttatcactcttattgtgtcaccacctccctcattgtgctccctggttgtggttatcaccttcctggttgtggctatcacttccctggttgtggttatcacctccctggttgtggttatcacctctctggttgtggtcatccctccttcattgtggttatcactcccctgggtgtggtcctcattcccctggttgtggttctcacctccctggttgtggttcttacctctcttgtttgtggtcaccacctcccttgttgtggttctcacctctctgattgtgagcatcacctccctctttgtggtcatcattcccctggttgtggttatcacttccctgattgtggttatcacctctctggttgtggttcttatcgctgttattgtggtcaccccctccctcattgtggttatcagctccctggttgtggttattgcctccctggttgtggtttttatctctctcattgtggtcatcagctccctcattgtggttatcacttccctggttgtggttatcacctccctggttgtggtcatcacctccctcattgtggttatcacttccctggtcgtggttatcacctccctggttgtggtcatcacctccctcattgtggtcatcattcccctggttgtgctctgggtacgacagccaggggaccctgctgaaatggtgaaggagttccactggggtggggctggggggtcagacaaccaagctgaaaacacagctcagggggaccaaaaaaaagaaaaaaagaagaagaagaagaaaaagaagaaagtattgtcactgttcagccttttcaagatgagtcacccagcagatatgctgactctaggtgacctctaccggcagcatatcccccaacagaaggagactcccaggcttggcattaatacctgccagaccctggaggcagctcctggcctttttgctatcctgcacaaggatttgcagccattttcaggtaaaaagaagaaaccacagatgcaaagaggcttcggaagctgccagcagactgtgcccccagtgttgaggattcgaggtctgcgcattgtcaggaagttctggaagctgccttcaagtccccctggacatgactggacagaacctggatggagtctttcctgccggtggctctgggtgctagaacagcagtctccactgatgccgatttgtgtgcatgagtattgcagaaggtgtggggataacagaccttctgatgccgatttgtatgccttccctgccagtcaagctgcaaattggccctgggctgttggcacagcagcatctgccaaggaaccagagggtttcctggacttctgctcccacagtggagaagtcgtgagatggggacataggaaatgggatggaaatcctaataattattatcaccgccggaacgagatgaccaccactgatgacctggattttaagcaccacaattataaggaaatgcgccagatttgtgagggcagcaactgcatctttgaagctccctggattcatcctgtggtcacttccccagtgccagaatgcataattggcatagacatacttagaagctggcagaacccccacattggctccctggctggtaggaagacagatggatcttggggaatgacagtggattatcataagcttaaccaagtggtgactccaattgcagctgctgtaccagatgtggtttcattccttgagcaaattaacacatctcctggcaactggtatgcagccattgacttggcaaatgcctttttctccattcctgtccataaggcccaccagaagcaatttgtcttcagctggcaaggccagcaatatacctttactgtcctacatcaggggtatattaactctccggctttgtatcataatcttatttggagagatcttgatcgcttttcacttccacaagatatcacattgatccattacattgatgacatgacactgattggatccagtgagcaagacgtagcaaacacactggacttattggtgacctcagcagaggaggattttaataatcaagtggataggatgacccattctgtggacatcactcagcatctttccccagccacccctgtaatcgcccaatgggcccgtgaacaaagtagccatgggggcagggatggaggttacgcatgggctcagcaacatgtactcccactcaccaaggctgacctggctatggccactgctgagtacccaatttgccagcagcagagaccaacactaagccctcaatatggcaccattcctcagggtgatcagccagctaccaggcagcaggttgattatattggacctctttcatcatggaaagggcagaggttcgtcctcctggagtacatgcttattgtggatatgggtttgcctatcctgcacgcaatgcttctgccaagactaccatctgtggactcacggaatgccttatccactgtcacggtattctgcacagcattgcctctgaccaaggcactcactttacagctaaagaagtgtggcagtgggctcctgctcatggaattcactggtcttaccatgttccccatcatcctgaagcagttggattga

SEQ ID NO: 16988 - DNA, 474 bp, Homo sapiens; identical to SEQ ID NO: 7710
  SIMILAR (226)..(471): 741254mologous to Mus musculus Pro-Pol-dUTPase polyprotein,accession number Y12713,Smith-Waterman Score=317.

SEQ ID NO: 16989 - DNA, 1593 bp, Homo sapiens
  SIMILAR (487)..(897): 811254mologous to Mus musculus Pro-Pol-dUTPase polyprotein,accession number Y12713,Smith-Waterman Score=562.
atgactggacaatcatatttgagaatgatgtgcatagaattggatatgaccaaattgctccaacgatctcaggttgactttatggaaccaatacttacaaagtacttacaaccaatacttccctctcagaaaccaacctggtatctagctcagagtgtttccatcgttacaggagatgtatggccttttaccagagtgactatgcattggggaaagggaaataatcagacatttcagagactactggacactggctgtgagctgacattgattctggaagactcaaaacatcatcatggtcctccagttaaagtaggggcttatggagatcaggtaattgatggacttttagctcaggtccaacttacagtgggtccagagggtccccagactcatcctgtggtcatttccccagtgccagaatgcataattgtgatagacatacttagaagctggcagaacccctacattggctccctgactggtaggaagacagatggatcttggagaatgacagtggattattgtaagcttaaccaagtggtgactccaattgcagttgctgtaccagatgtggtttcattgcttaagcaaattaacacatctcctggtacctgttatgcagccattgacttggaaaatgcctttttctccattcctgtccataaggcccaccagaatcaatgtgccttcagctggcaaggccagcaatatgcctttactgtcctacctcaggggtatatcaactctccagctttgtgtcataatcttatttggagagaccctgattgctttttgcttccacaagatatcacgctggtcccttacattgatgacattatgctgattggatccagtgagcaagaagtagcaaacagactggacttattggtatcaatggcctcatcgagagttccctatgatcagttgacagaggaagagaaggctaggttcacagatggttctgcacgatatgcaggcaccacccgaaagtggacagctgcagcactgcagcccctttctaggatatccctgaaggacagcggtgaagccaggattcatgggtccaggaatcaaggagtggaagtggcacctctcatcatcacccctagtgagccactagcaaaatttttgcttcctgttcccatgacattacattctgctgtcctagaggtcttagttacagagggaagaatgctgctaccaagagacacaacaataattgcattaaactggaagttaagattgccacctggacactttgagctcctcctacctttaagtcaacaggctaagaagggaactacagttttggctgtggtgattgacccagactatcaagatgaaatcagtcttctactccataatggaggaaaaaatccacgacttgctgagatgcttgctgaaggcaatgggaatacagaatggatagtagaagaaggtagtcatcaataccagctaccactatgtgaccagatgcttcctgccctcaaatatcggacttcaagttcttcagttttgagactcggactgactctccttgctcctcaagcttgtagacagccagtattgtgggatcttgtgattgtgtaa

SEQ ID NO: 16990 - DNA, 1707 bp, Homo sapiens
  SIMILAR (1788)..(3431): 681254mologous to Homo sapiens putative p150,accession number U93572,Smith-Waterman Score=1752.
atgaaactcatggaaacacttaaccagtgcataaacgctggtcatgaaatgacgaaggctatcgccattgcacagtttaatgatgacagcccggaagcgaggaaaataacccggcgctggagaataggtgaagcagcggatttagttggggtttcttctcaggctatcagagatgccgagaaagcagggcgactaccgcacccggatatggaaattcgaggacggcgacgtgctgaagacgtatttccaccggtgatcggggttgctgcccataaaggtggcgtttacaaaacctcagtttctgttcatcttgctcaggatctggctctgaaggggctacgtgttttgctcgtggaagaagacagatggatcttgagaatgacagtggactattgtaagcttaaccaagtggtgattccaattgcagctgctgtatcagatgtggtttcattgcttgagcaaattaacacatctcctggtacctggtatgcagccattgacttggcaaatgcctttttctccattcctgtccataaggcccagcagaagcaatttgccttcagctggcaaggccagcaatatacctttactgtcctacctcagtggtatatcaactctccagctttgtgtcataatcttattcggagagaccttgattgcttttcgcttccactagatatcacactggtccattacattgatgacattatgctgattggatccaagacagctcttggcctgttactggctttggtggaaactgaacatttgactataagtcatcaagtcaccatgcgacctgaactgcctatcatgaactgggtgctttttgacccatctagccataaagtgggttgtgcacagcagcattccatcatcaaatggaagtggtatgtacatgattgggctcgagcaggtcctgaaggcacaaccacccctgtcatttcccaatggccccatgaacaatgtggccatggtggcagggatggaggttatgcatgggctcagcaatgtagacttccactcactaaggctgacctgaatacagccaccgctaagcgcccaatttgccaacagcagagaccaacactgagccctcaatatggcaccattcctcagggtgatcaaccagctacctggtggtgggttgattatatgggatctcttccatcatggaaagggcagaggtttgtcctcactggaatagatacttactctggatatgggtttgcctatcctgcatgcaatgcttctgccaagactgccatttgtggactcacggaatgccttatccaccatcatgatatcccacacagcattgcctctgaccaaggcactcactttatggctaaagaagtgcggcagtgggctcatgatcatggaattcactggtcttaccatgtttcccatcatcctgaagcagctggattgatagaatggtggaatggccttttgaagtcacaattacagtgtcaactaggtgacaatacttggcagggctggggcaaagttctccagaaggtcgtgtatgctctgaatcagcatccaatatatggtactgtttctcccatagccaagattcacaggagggtggccgattccctgaagggaggaagtgggtcctgggtctggggcttttccactttggctgcacttgacaacgacttggggacttttagaaaggtacgagcaccctccaccaattaa

SEQ ID NO: 16991 - DNA, 2061 bp, Homo sapiens; identical to SEQ ID NO: 6689
  SIMILAR (1039)..(2646): 941254mologous to Homo sapiens putative p150,accession number U93563,Smith-Waterman Score=2696.

SEQ ID NO: 16992 - DNA, 1626 bp, Homo sapiens
  SIMILAR (163)..(783): 681254mologous to Mus musculus Pro-Pol-dUTPase polyprotein,accession number Y12713,Smith-Waterman Score=702.
cctcaccaggtgtctactgttagaatgagggcattgattggaaaagaatgggaccctgcaacttggaatggggacatgtgggaggaccctgatgaagctggggacactgagttaataaactctgatgaacatttttggccagaagtaacagcttccccatccccagtagtggcaacgtcctctcccccacccatgctgctatcagcctttccacctttgtctgaagagataaaccctgcgctgcctgaggcagttgccaggcaaaataatgttgattctcctcagaagccacccccaacacctctgtttgcttctaggcctataactagactaaaggcttggtgggcccctagagtgtcagaatgcataattggtatagacatatttagcagctggcagaacccctgcattggctccctgactggtagggtgagggctactgttgtgggaaaggccaaatggaagccattggagctgccatcacctagaaaaattgcaaatcaaaaagaataccacatccctggagggattgtggagattactgccaccatcaaggacttaaaagatgcaggggtggtgattccgattcccaccacattcccattaaactctcccatttggcctgtgcggaagacagatggatgttggagaatgacagtggattattgtgagcttaaccaagtggtgactccaactgcagctacagtaccagatgtggtttcattgcttgagcaaattaacacatctcctggtacctggtatgcagacattgacttggcaaatgccgttttctccattcctgtccataaggcccaccagaagcaatttgccttcagctggcaaggccagcaatatacctttactgtcctacctcaggagtatatcaactctctaggtttgtgtcataatcttattcagagagaccttgaccacttttcgcttctgcaagatatcacactggttcattacattgaagacattatgctgattggatccactgagcaagaaatagcaaacacactggacttattgtttatggctaaagaagtgtggcagtgggctcatgctcatggaattcactggtcttaccatgtttcccatcatcctgaagcagctggattgatagaatggtggaaaggccttttgaagttacaattacaatgccaactgggtgacaatactttggagggctggggcaaagttctccagaaaaccgtgtatgctctgaatcaacatccaatatatggtactgtttctcccatagccaggatccacaggtccaggaataaaggggtggaagtggcaccattcaccatcacccccagtgatccactaccacaatttttgcttcctgttcctgctacattatgttctgctggcctggaggtcttagctccagagggaggaacgttgccaccaggagacagaacaacgattccattaaactggaagttaagattgccacctgaagactttgggctcctcccatctttaagtcaacaggctaagaagggagttacagtgttggctggcgtgattcacccagactatcaagatgaaatcagtctactactccacaacggatgtaaggaagatcttctgaatggaatacagcagatccattag

SEQ ID NO: 16993 - DNA, 744 bp, Homo sapiens
  SIMILAR (188)..(547): 551254mologous to Mus musculus Pro-Pol-dUTPase polyprotein,accession number Y12713,Smith-Waterman Score=282.
gttacttggagtgatatagcaggtttagatgatgtcattacggatctgaaagacacagtcatcttacctatcaaaaagaaacatttgtttgagaattccaggcttctgcagcctccaaaaggtgttcttctctatgggcctccaggctgtggtaaaacgttgattgccaaggccacagccaaagaagcaggctgtcgatttattaaccttcagccttcgacactgaccgataagtggtatggagaatctcagaaattggctgctgctgtcttctcccttgccataaagctacaaccatccatcatctttatagatgaaataggtttagaagttatacgttcttttactttagtgaaacgtttagaatatcaacttaaaagtcaagggtcacagagcaaatcagccgtgaagcaggtttcaaatccaggtctgcttgactccaaaatcgatactcatgctactccgatgcatgctacagagagtttttctgggccagtagtgggaagaagtgggtacaatgcaggatcgagtgaacccaggtgccagggtggaagccccgacccctcgttgccccttgctctgagacagttgctaggagttgccaatcggccaggacgcacactaggtatacagcacagcaaattagaaggcatcgaatgtggtattcagagaagctacatcttcagcagcaagaaatgtccaatgacagctggaccacaaaggaagagacaggaaaactactga

SEQ ID NO: 16994 - DNA, 680 bp, Homo sapiens
  SIMILAR (471)..(668): 741254mologous to Caenorhabditis elegans Similarity to Yeast MSP1 protein (TAT-binding homolog 4) (SW:MSP1_YEAST), contains similarity to Pfam domain: PF00004 (ATPases associated with various cellular ac,accession number Z69664,Smith-Waterman Score=250.
cgtatttttcaaataaaatgattaattctactaccaaataaatcttaatttctagtctacttctagtttgcaagaggagctttaaatgtatttgtttacttaacatttaaaaatccatttctccttaaaatgaaacactttttttaaggtaggtaatattttaatttgactagaagttagtttttctttcttagtttaagctactttgttagtcttacaattttaataagtatagttattacctagtgacatttctgtttgtttttttaaggttaacattcaagatggtacatgctgaagccttttctcgtcctttgagtcggaatgaagttgttggtttaattttccatttgacaatatttggttcagtaacatactttagtatcaaatggatggtagatgcaattgatccaatcagaaagcaaaaagcagaagctcagaaacaggcagaaaaactaatgaagctaattggctgtggtaaaacgttgattgccaaggccacagccaaagaagcaggctgtcgatttattaaccttgagccttcgacactgaccaataagtggtatggagaatctcaaacactggctgctgctgtcttctcccttgccataaagctacaactgtccatcatcattatagacgaaatagactcctttgtacgaaaccgttcagagttctga

SEQ ID NO: 16995 - DNA, 854 bp, Homo sapiens
  SIMILAR (33)..(755): 971254mologous to Homo sapiens Human secreted protein sequence encoded by gene 7 SEQ ID NO:142,accession number Y91421,Smith-Waterman Score=1199.
cacaggttggagcagagaaagaggaaacatagaggtgccaaaggaacaaagacataatgatgtcatccaagccaacaagccatgctgaagtaaatgaaaccatacccaacccttacccaccaagcagctttatggctcctggatttcaacagcctctgggttcaatcaacttagaaaaccaagctcagggtgctcagcgtgctcagccctacggcatcacatctccgggaatctttgctagcagtcaaccgggtcaaggaaatatacaaatgataaatccaagtgtgggaacagcagtaatgaactttaaagaagaagcaaaggcactaggggtgatccagatcatggttggattgatgcacattggttttggaattgttttgtgtttaatatccttctcttttagagaagtattaggttttgcctctactgctgttattggtggatacccattctggggtggcctttcttttattatctctggctctctctctgtgtcagcatccaaggagctttcccgttgtctggtgaaaggcagcctgggaatgaacattgttagttctatcttggccttcattggagtgattctgctgctggtggatatgtgcatcaatggggtagctggccaagactactgggccgtgctttctggaaaaggcatttcagccacgctgatgatcttctccctcttggagttcttcgtagcttgtgccacagcccattttgccaaccaagcaaacaccacaaccaatatggtcccaactattcagcaactgggtgattggaaatgctgtgtccttcaccataaagctcaacagctcagcaaaagtgaagacaaagatttcatggtctaa

SEQ ID NO: 16996 - DNA, 1250 bp, Homo sapiens
  SIMILAR (158)..(319): 721254mologous to Mus musculus Pro-Pol-dUTPase polyprotein,accession number Y12713,Smith-Waterman Score=186.
ggccgagagcgagggaggagccccccgacccaggtagacgttacatccaagaggaaataatccaggcaaggaagcacaagctgatcaagatgtgtagttctgtggctgccaagttgtggtttttgacagatcgtcgcatcagggaagactatcctcaaaaagagattttacgagcattgaaggccaaatgttgtgaggaggaactggactttagggctgtggtgatggatgaggtggtgctgacaatcgagcaaggaaacctgggtctgcggatcaatggagagctaatcactgcctacccacaagtggtggtagtcagagtaccaaccccttgggtgcaaagtgatagtgacatcactgttttgcgccatctagagaagatgggatgtcggttaatgaaccgacctcaagccatcctgaactgcgttaataagttctggacatttcaagagttggctggccatggtgttcctctgccggatactttctcttatggtggccacgaaaattttgctaaaatgattgatgaggctgaagttctggagttcccaatggtagtaaagaatacgcggggtcacagaggtaaagctgttttcttggctcgagataagcaccatttggctgatctaagccatcttattcgccatgaagcgccatacctgttccagaagtatgttaaagagtctcatggacgggatgtacgtgtcattgtcgtgggaggccgtgtggttggcaccatgttacgttgttcaacagatgggagaatgcaaagcaactgctcattaggtggtgtggggatgatgtgctcattgagtgaacaagggaagcagctagctatccaggtgtctaatatcctggggatggatgtgtgtggcattgacctgctgatgaaagatgacggctccttctgcgtctgtgaggccaatgcaaatgtaggtttcatcgcctttgataaggcttgtaatctagatgtagctggtatcatagcagactatgccgcctcccttctaccctctggccggctcacccggcgtatgtccctgctctccgtggtgtccactgccagtgagactagtgagccggagctgggtcccccagccagcactgctgttgacaacatgagtgcaagttccagctctgttgacagcgaccctgaaagcacggagcgagagctgctcaccaagctcccagggggcctgttcaacatgaaccagctgctagccaatgaaatcaaactactggtggactga

SEQ ID NO: 16997 - DNA, 772 bp, Homo sapiens
  SIMILAR (243)..(151): 511254mologous to Lycopersicon esculentum glycine-rich protein,accession number X55691,Smith-Waterman Score=70.
tttcgtccgggtgtgagtgtgtggaagtgtgagtgttttggagtggggtgagggagaagctgacgggacgcgaggctgtgagaaactgggcgagtgtgcgaggacgcccggccagcctgcgggagccgcagtcggcggaggagaaaggaggcggctcccggtatcccgaccccctccccctcctctccttcccccacttccagccgcccggcggcccgcgctttctcgaacgccccagcccggctcagtcggtcgagagcgagggaggagccccccgacccaggtgagcggtagacgttacatccaagaggaaataatccaggcaaggaagcacaagctgatcaagatgtgtagttctgtggctgccaagttgtggtttttgacagatcgtcgcatcagggaagactatcctcaaaaagagattttacgagcattgaaggccaaatgttgtgaggaggaactggactttagggctgtggtgatggatgaggtggtgctgacaatcgagcaaggaaacctggtgcattggcccttcacattcaaatttgagcttgcccttttgggctcctcccctgacagcatcacccccaccaggtaccccaacggccttgctcctgatttggatccagtgaagatggaagcttttcagtttgatttagtcccactttttatttatgcttttattgcctattctttcggtgtcatagccaaaaacatcattgccaaggccaacgtcaagaagctgcccattcccactcccattttcttctag

SEQ ID NO: 16998 - DNA, 469 bp, Homo sapiens
  SIMILAR (553)..(969): 741254mologous to Mus musculus Pro-Pol-dUTPase polyprotein,accession number Y12713,Smith-Waterman Score=539.
tttcgtgccaggcagagagagagagggacttctgtaaggcggcacgaccacaccaaataacagcatcaaagggaggtgggggagagggaaataaaggggagtcatgcttaaaatgctacagcggtgtgaaacagcagagcaaagaagcgcccccagcttctgagagccctggcccgagtcccctcccccgttagaaacagggctttgggatggtcatggagcactgccagtaactccaaccgcagcacgccggcctgctcgcccatcctccggaagcggtctcgctcgccaaccccgcagaaccaggacggagacaccatggtggagaagggctcagatcactcctcggacaagtccccgtccacaccggagcagggcgtgcagcgcagctgctcctcccagtccggccggagcggcggcaagaattccaagaaaagccagagttggtataatgtgttaagccccacct

SEQ ID NO: 16999 - DNA, 1428 bp, Homo sapiens
  SIMILAR (1)..(654): 641254mologous to Mus musculus Pro-Pol-dUTPase polyprotein,accession number Y12713,Smith-Waterman Score=668.
atggaagggaaggagaaagggattccgtacacagtgagttctgccgagcagccggaggctttgtgtatggcgctgttccggtttctggatgcaggaacaaatgaggtaatagattgtcatgccatacgcttgtcactggacatcctggtgtgtgccagtgctacagcaatcacaaagaataattataccctgtcccttccgtgggagagcccatggcctgaggataagcaccatggagacaaggactgtgtgtcattcagcaatctctatatccccactgaggaggagggcttggggattgtaggctcctggagcctgtacccaggccatactttcagcacagatattgaagggatgcaacagattccagaagtacaaagagttgtcctttatgacctagataattcactcaatggaaataccagcactgccagtaactccaaccgcagcacgccggcctgctcgcccatcctccggaagcggtctcgctcgccaaccccgcagaaccaggacggagacaccatggtggagaagggctcagatcactcctcggacaagtccccgtccacaccggagcagggcgtgcagcgcagctgctcctcccagtccggccggagcggcggcaagaattccaaggtgagcgggaccccgttgaggcggtacctccttgtcaggggctgcggggagcgatattggggtggtgagccggagaacatctgcgagggtcctcacgtgatgaacagccctgatggctcagagacagtcattatccaaagggccggccccactgtcccccggcaggctggcttggaagtcattgaaggcccattttcactgcacctgatgtcggagaacagaccctcccccactcccgaccctgcacccatgtctgcctgctccctggacactgcctctggctgggagtttattccctccttacatggtgaggatgacaagcacccatcaggttgctatgcggagcggatgacactaagagcaaagcacttgccaccaccatcccctgagaaccagctggttgataacaaaccacctacaacctcaagagctagttcactagaggctttgcaaggccctggtgaagacagacagcagcgttcccaccagagagcaaactgcttgcagcagtttgggatccaaacacagttgcagatgcctgctttcatggtcgccactgcccactgtcaaggtcaggatgaggggggcatgtgggaagaggccagctggcagggtaacgcagaagttaaggagtctgaatggctaagctgccagtggggaattttcttcctgaccccagtgggcaaactgctggccctgaagcaggtgtttagacctggggccaaggctggcccggagagcctggaggtggttgctgggttgctgtgtgtacaagagcttgatgaaacctga

SEQ ID NO: 17000 - DNA, 885 bp, Homo sapiens
  SIMILAR (457)..(651): 981254mologous to Homo sapiens Human secreted protein, SEQ ID NO: 5779,accession number G01698,Smith-Waterman Score=323.
atgggtcaggttacttgtagccaagtaaatgcttctcacacctatgacctcacttcagcccctcatatgaacaacagtgcacagccctatgcgcacagccaaggcagcacctgtgtagcgtcattttccaggctgatgtctggaattccccttagtaatatttctgccattttttatgaaaccatcttccttgatggccagttccttgcctcccaggaaactgatgaggaggcaagacgaatgtattgggaaagcccagcggaggaagagctcctgaggaggtctggtggccgagccctgaggggcgctgttgctcccaggtggcagaattcagcatcagagagccacacagctgaaagagatggatggtgtgtattagccaagtactgggggcactgggagccttgtctgctcccagtcggcgttgggaaaccagaacgctcaggaacgatcaagatgaatgccatgctggagactcccgaactcccagccgtgtttgatggagtgaagctggctgcagtggctgctgtgctgtacgtgatcgtccggtgtttgaacctgaagagccccacagccccacctgacctctacttccaggactcggggctctcacgctttctgctcaagtcctgtcctcttctgaccaaagagaattgccgaagcctgaaagatctaaaaaaagggccctactatgtctccaaaaaaggagtatatgtcttccaaaaggaagtatatgctacaactgattccatcacgtggtatcaaattcagtacatgtggacggacttacatggaatcagatctacttttatactccttctcaatgtgtggttgactgaaaattgctccactatccgggagcaggaaatggaccttgttttctag

SEQ ID NO: 17001 - DNA, 1520 bp, Homo sapiens
  SIMILAR (297)..(1454): 431254mologous to Drosophila melanogaster ANON-23D,accession number U29170,Smith-Waterman Score=883.
ccgggcgacgatttcgtggcgggagctgcactggccatgggttccggctgtatatccatgagcgccgctggcagccggggagctgcaggaaccagactgggggcgagctgagcacctgtagtcaatcacacgcagcttttaggtttgtttgaataagagatctgacctgaccggcccaactgtacaactcttcaaggaaaattcgtatttgcagtgggaagaataagtaacattgatcaagatgaatgccatgctggagactccgacactctcacgccgtgtctgatggagtgaagctgtctgcagtggctgctgtgctgtacgtgatcgtccggtgtatgaacctgaagagcgccacagccgcacctgacctctacttacaggactcggggctctcacgctttctgctcaagtcctgtcctcttctgaccaaagaatacattccaccgttgatctgggggaaaagtggacacatccagacagccttgtatgggaagatgggaagggtgaggtcgccacatccttatgggcaccggaagttcatcactatgtctgatggagccacttctacattcgacctcttcgagcccttggctgagcactgtgttggagatgatatcaccatggtcatctgccctggaattgccaatcacagcgagaagcaatacatccgcactttcgttgactacgcccagaaaaatggctatcggtgcgccgtgctgaaccacctgggtgccctgcccaacattgaattgacctcgccacgcatgttcacctatggctgcacgtgggaatttggagccatggtgaactacatcaagaagacatatcccctgacccagctggtcgtcgtgggcttcagcctgggtggtaacattgtgtgcaaatacttgggggagactcaggcaaaccaagagaaggtcctgtgctgcgtcagcgtgtgccaggggtacagtgcactgagggcccaggaaaccttcatgcaatgggatcagtgccggcggttctacaacttcctcatggctgacaacatgaagaagatcatcctctcgcacaggcaagctctttttggagaccatgttaagaaaccccagagcctggaagacacggacttgagccggctctacacagcaacatccctgatgcagattgatgacaatgtgatgaggaagtttcacggctataactccctgaaggaatactatgaggaagaaagttgcatgcggtacctgcacaggatttatgttcctctcatgctggttaatgcagctgacgatccgttggtgcatgaaagtcttctaaccattccaaaatctctttcagagaaacgagagaacgtcatgtttgtgctgcctctgcatgggggccacttgggcttctttgagggctctgtgctgttccccgagcccctgacatggatggataagctggtggtggagtacgccaacgccatttgccaatgggagcgtaacaagttgcagtgctctgacacggagcaggtggaggccgacctggagtga

SEQ ID NO: 17002 - DNA, 1305 bp, Homo sapiens
  SIMILAR (871)..(1239): 731254mologous to Homo sapiens Amino acid sequence for a CAT- hANP hybrid protein,accession number R05425,Smith-Waterman Score= 468.
atgcaggccaaactcgctgatctcgatcatcgtctgttgtcaggcaggagcctggacgagcagatggacagcgtcgccgacgtcgcggcggacctgggcttagaagccctggtgaacgacaacagccccgtcccgctcgaccatgtcggcgagctcatcaccccggcgatcctgcgggtgcgcaacacccccgaagactggaaagacctgtggtgcgccgaaggctactaccagatcgacccggtgcagcatctcgcggtgacctccatttccccgttcgtcctgtcctaccagcccaagggcgacaccatcctccagcgcttcatcgacagccgccatgcgccggtggttggttacctgcaggatgcccaactggcgtgcgtgattaaaaaggaatttgccgaaatcggaaccaccatcaaacaggattttcgcctgctggggcaaaccagcgtggaccgcttgctgcaactctctcagggccaggcggtgaagggcaatcagctgttgcccgtctcactggtgaaaagaaaaaccaccctggcgcccaatacgcaaaccgcctctccccgcgcgttggccgattcattaaagaagctggcacgacaggtttcccgactggaaagcgggcaggattttgccgatttcggaaccaccatcaaacaggattttcgcctgctggggcaaaccagcgtggaccgcttgctgcaactctctcagggccaggcggtgaagggcaatcagctgttgcccgtctcactggtgaaaagaaaaaccaccctggcgcccaatacgcaaaccgcctctccccgcgcgttggccgattcattaatgcagctggcacgacaggtttcccgactggaaagcgggcatttctacacatacattcgcagcgatgtggcgtgttacggtgaaaacctggcctatttccataaagggtttattgagaatatgtttttcgtctcagccaatccctgggtgagtttcaccagttttgatttaaacgtggccaatatggacaacttcttcgcccccgttttctccatgggcaaatattatacgcaagtcgacaaggtgctgatgccgctggcgattcaggttcatcatgccgtttgtgatggcttccatgtcggcagaatgcttaatgaattacaacattcggaggggaaggaaagtctgttcaccgccaatggccgatttacccaaaggcttggcggtgtcgggacaataccctatcgcgagtcggtagaaagctccctcacccccccacctcaaccttccccatctgttaaatgggaagtctga

SEQ ID NO: 17003 - DNA, 423 bp, Homo sapiens
  SIMILAR (266)..(358): 411254mologous to Lycopersicon esculentum extensin (class II),accession number X55686,Smith-Waterman Score=64.
tcagacttcccatttaacagatggggaaggttgaggtgggggggtgagggagctttctaccgactcgcgatagggtcctgtcccgacaccgccaagcctttgggtaaatcggccattggcggtgaacagactttccttcccctccgaactgtagtagcggtcatccttgaagggcgtgaggtcctccttgagctcgcggtacgcttcccgcagccgccggcacaggtgcttgagctcgctgcagagcgggggctcaaaggcagggtactcggcgtccatgccgcgcagcctcccgggtcccggtcccgccgctccaccctttgtgtcgccgcctgcgccccctctcttctcccagcactggggatcgggctgctggcgcgccacacagccagcccccagccctggtctcatgactgtccccat

SEQ ID NO: 17004 - DNA, 1854 bp, Homo sapiens
  SIMILAR (1327)..(1848): 441254mologous to Arabidopsis thaliana contains similarity to cell wall-plasma membrane linker protein~gene_id:MKA23.5,accession number AP001306,Smith-Waterman Score=483.
atggacttttaccgctacgaggtgtcgcccgtggccctgcagcgcctgcgcgtggcgttgcagaagctttccggcacagaggtcactcacacccacactctcaccatagagctgacgcccgcagacgtcactcacaccgacactctcaccataagagctgacacctgcagacgtcactcacacccacactctcacctcgccgtggaaagcacacgggaaaagttcaatgtggaagtagcagatgatccgacagccccatttgattttacacccaatacctgcaagcagggctcgcgcagaggctcaggcagccatgctggtggcacatgggctgtcgcgactgctcccggtggaatcagccccatttctgattttacacccaacacctgcaagcagagctcgcgcagaggctcaggcagccatgctcgtggcacgtgggctgtcgcggctgctcccggtggaatcagccccctttctgattttacacccaacacctgcaagcagggctcgcgcagaggctcaggcagccatgctcgtggcacgtgggctgtcgcggctgctcccagtggaatcacagctacaatcgagctcagggtggagcaagagaaagaacaaagacaaaggccaccggttttggaagccccaggtagaaggagacagggtcttccacccccgtggaaaaacctcctgaagctacaagctggggccaaagctggtgtggcagcagtggtcacccagagctttccaatgccgtccactcatcccagccccagagccaccctggggtccccattcacagtccagtatgccccacaatggctgcaccaagatgtatgggatctgtaccaagacatgggtaaaaagaaggccctggcatgttcacctgattgttactcaaaagccccacagatggaggctccattgagcattgaccctgaggccctaagagttgctgcccgaggagagatgctcaacatcagccggcacttccatctccgctccctctggcaggaacaaactccactgaaacaggcggctctttcccaagcaggggcaggactggctggttgccgtgttcccaggaaacatgtacaggggcaagagagtgcaactcaacaactccatgtgaacacctgccctggcatgcaggcagccgggccagtccacagccagtcacggccccacgggaggagccttctgagtgacagatatcattttcattcaggggggcttgaactctggccatcagaagagctggttactacaaaggtagcagaacaggaagtactgagaagaaagtgcacctttctgaccacccactcccagcccagctcccctcctgtctgctcgcctcctgtccgctcccctcctgtccgctcccctcctgtccgctcccctcctgaccgctcccctcctgtccgctcccctcctgaccgctcccctcctgtccgctcccctcctgtccgctcccctcctgaacgctcccctcctgtccgctcccctcctgaccgctcccctcctgaccgctcccctcctgtccgctcccctcctgtccgctcccctcctgtccgctcccctcctgtgcgctcccctcctgtccgctcccctcctgtccgctcccctcctgaccgctcccctcctgtccgctcccctcctgtccgctcccctcctgactgctcccctcctgatcgctcccctcctgtccgctcccctcctgactgctcccctcctgactgctcccctcctgtccgctcccctcctgtccgctcccctcctgactgctcccctcctgtccactcccctcctgtctgctcccctcttgactgctcccctccctgccagctaccctcctga

SEQ ID NO: 17005 - DNA, 1107 bp, Homo sapiens
  SIMILAR (760)..(1020): 741254mologous to Mus musculus pecanex 1,accession number AF096286,Smith-Waterman Score=339.
atgcatgtcaaaagcccggttcatcttgatccaaatcctgtatacaccacagagagaaaagcacgggctccccagatgggcaagcatgcattcctcattaccccatctcctgccatgaggagtaggaggtggaaagaacctcttccccatcagcagactcagaggatgggcaggacacaaaaaactaaggctcgaaaagatgaagctaataattcaaggcagcgccagcactggattcctgtcattgcgaggatgtatccaccaactttggactcttcctgcccccttattctccttaataacaaagctgtcatggagctacagggtattgacaagacacccatttctcagcatcgtgctgtttgccttggctggagccgtggggttggtaacacattacgtgctccctcagctccgcaagcatcatccttggatgtggatttcacaccccattctcaaaaacaaagagtatcatcaacgggaagtgagagtacaaggcgagtggataattccaacacaagactggcagtccaaattgaaagagatccagagcgtgcaaggcattcccccatcgccaacccaccgccagaatcctcagtacatgaggaagatcatccagaaaatggttctcaaactggagcatgtatcagaatcacttgtaggactcgtcaaaacacagattgccttgcccagggcccaatccgcagaatttctgactcattgggtccaggattgaatctgagaatttacatttgtaacaaattcctacccgatgctggtactgctggctctgctgaacctgaaaggaatgatgacaacaatctcaattccattttttatgaacacttgacaaggaccctccaggagtccctctgtggagacttagttcttggacgttggggcaagtacagctctggcgattgctttattttggcttcagatgacctcaatgcctttgttcacctgattgaaattggaaatggtcttgtcacctttcaacttcgaggactggaattccgagattttggactaggtgtggtacaggaaaggattcccaatccagaccccaaaagagggttcttggatctcgcacaagaaagaatttag

SEQ ID NO: 17006 - DNA, 432 bp, Homo sapiens
  SIMILAR (276)..(386): 861254mologous to Homo sapiens ankyrin-like protein,accession number Y10601,Smith-Waterman Score=162.
tttcgtgctcttaatgtgtagattacaacaaattcgctgcatccacaccgacctgacacgcttgactctgggagtgcgctgctgcagctgcaggacagcgggacgggggagtcactttgttcctgaaggggcgagtcctcggcagacgctgcgccgcctccctctttgctagggaggtctgtgtttctacctcctcttcacgccccgcttgcttcctgcactgtgcccgcgctcgtggggagcagatgcaccagatggcgtccggggtggggtcaatgaagcgcagcccgaggaagatgtggcgccctggagaaaagaaggagccccagggcgttgtctatgaggatgtgcgggacgacacggaggactgcaaggaaccgcttaaggaaaaggtcaattcgactagatggagatgttctctgaagatttcct

SEQ ID NO: 17007 - DNA, 5190 bp, Homo sapiens; identical to SEQ ID NO: 5652
  SIMILAR (894)..(19): 981254mologous to Escherichia coli L-rhamnose isomerase,accession number L19201,Smith-Waterman Score=1530.

SEQ ID NO: 17008 - DNA, 1314 bp, Homo sapiens
  SIMILAR (601)..(822): 361254mologous to Carassius auratus putative odorant receptor,accession number AF083080,Smith-Waterman Score=119.
atggagttttacagagctggtagaaaattcagtcaccataccactggacataaacttggaagatttcagcctgaggctgccatagataaagagtgcgctgctgcagctgcaggacagcgggacgggcgagtcactttgtccctgaaggggcgagtccaaggcagacgcggcgccgccgccctctttgcgaaggagctccgcgtttctacctcctctccgcgccccgcctgcttcctgcactacaaaagtagcgcgggcctgagaactccttccagaagttctccagggcttccgcagagcgactttttcgctgcctgtgcccgcgcgcgtggtgagcagctgcaccaggtggcgtccggggtggggtcaatgaagcgcagcctgaggaagatgtggcgccctggagaaaagaaggagccccagggcgttgtctatgaggatgtgccggacgacacggaggatttcaaggaatcgcttaaggtggtttttgaaggaagtgcatatggattacaaaactttaataagcaaaagaaattaaaaagatgtgacgatatggacaccttcttcttgcattatgctgcagcagaaggccaaattgagctaatggagaagatcaccagagattcctctttggaagtgctgcatgaaatggatgattatggaaatacccctctgcattgtgctgtagaaaaaaaccaaattgaaagcgttaagtttcttctcagcagaggagcaaacccaaatctccgaaacttcaacatgatggctcctctccacatagctgtgcagggcatgaataatgaggtgatgaaggtcttgcttgagcatagaactattgatgttaatttggaaggagaaaatggaaacacagctgtgatcattgcgtgcaccacaaataatagcgaagcattgcagattttgcttaaaaaaggagctaagccatgtaaatcaaataaatggggatgtttccctattcaccaagctgcattttcaggttccaaagaatgcatggaaataatactaaggtttgatattgaaatgcagactatagagaaagaacttactgcagcatcagcaaaatataggaaaagtgtaagtcaaacaggaagacataccaatattcacatgataccaaagaagtgcattttattacctgtatttaccaatgattcagtcagaccgaagctcccaggagagtttatagcacttagtgggagagacaaaaatggagaaacaaagaattatgaacagtgtgatgtttccagtagaatcagaggcatagggagaacaaagtactcaaaggatacatcctag

SEQ ID NO: 17009 - DNA, 753 bp, Homo sapiens
  SIMILAR (73)..(414): 621254mologous to Human endogenous retrovirus K gag protein,accession number Y10392,Smith-Waterman Score=355.
atggatctggggggtaccggggcgcgcttgtcagtttctgtaggatgcccagaacggctccgctcctcctccaggtgtaaagcagaggccaactcgagggctgcatccccgaaattgttgccaacctcagatttgatgaggggggaccacatactatttaaccttacgaatcccaggttggcacggacgcgtttcagggcgagggcaccggggactcgagcggcgttgggcaggggaagaggctttcccagtggacggtgcagtttctcccccctttttgagaatcatcctcagggtccctccaaagttaggagcctcctggccggggcaccccggagagagctctattccacccctctcccccagctcaccctcctgctcctcaatcccgcttccccccaaccaaccagctgcgacggcgtgaagagcccgtcagtgcccggcgagctgcggcccgagaggcgcgggtctgggcacggtcctgaccgctctcctcgcccgcccccgcccgcacctcaccactggcagcctccgcctcccgctcgcctctgcctgcctcacttcccagccaagcagaccccggccagccccgctggaggacagctgtctgaggggcggcctttgcagggcgcctgtccattgttcgctaaggccggcccggagtcctctcggcgaggctgggctccccgccaggccagcggtgcaccagaggtggagagcgcagcagcctggcgctccagctgttcgcgttag

SEQ ID NO: 17010 - DNA, 915 bp, Homo sapiens
  SIMILAR (65)..(688): 991254mologous to Homo sapiens Gag-Pro-Pol protein,accession number AF164615,Smith-Waterman Score=1086.
atgggggctgccatcgctgggaataggggccagaaaggcagctggcagcagactccagggtctgagtgggccaaccttgactaccccggcccatggctcacctacaagaccgccaatgactccttccgctgggccacaggggagcaccaggccttcaccagttttgcctttgggcagcctgacaaccacaggcaaccacactggtgcatcccgtccacgttgcatgacttttttaagttcactggcaaaatcgatatcgcgcgcctgataaccaggggtatcggcattggcgatgtttgctgccagcacttcctgacgctgggcgcgcagattgagcgcctcttgttgaaaaccgcccaactcgcgggggtaagtgatgaggttcgtgtttctattcgtacagcgcccaatctactaccgccatgcgagcagccattgctttcgatgagcaataattcccgcctgtggggcaatgtgaatgtgttggcacgctgcggtaacgacaaacgatatttacaggttaatgtacaggccacaggaaattatgtggttgccgcgatgcccattgcgcggggaggaaagctggaagctggcaatgtcaaactgaaacgcggacggctggataccctgccaccgcgtacggtgctggatatcaatcaacttgttgatgccattagcctgcgcgatctatcacccgatcaacctatccagttaacccagtttcgccaggcatggcgggtaaaagcgggacaacgcgtcaatgtgatcgccagcggtgatgggtttagcgccaacgcagaaggtcaggcgctgaacaatgcagccgtcgcacagaatgcgcgggtgcgcatggtatcgggacaggtagtcagcggcgttgttgatgcagatgggaatattcttataaacctgtaa

SEQ ID NO: 17011 - DNA, 480 bp, Homo sapiens
  SIMILAR (480)..(325): 861254mologous to Caenorhabditis elegans AlaRS A,accession number U41660,Smith-Waterman Score=258.
tcaaccataattctcgtcgtcaatagcacacgtctgattcatgcttcgaattaataaaaggatattcgacgaggtccggtcttgatggtcgtttaaacagtcgtaatatccatccaacacgatccagaagttcctggtctcgaagtcactgtcaatcacctcgttggtggtctccaggcggcccagatagaaggcgaggatgtcctgcactttctggctcttgatctgggccagcaccccgcctttcctctgtaaccccacccggtcatagcattttgtgctcaccacgaaggatggtctctgccttctcttgtcggtgtatgcaatctgaaccttaaagtaatctccaaaagaccaagagcccagcatctcgaagaaggtgtgatgatagacatccttgcccacatcgtccaggtcattatgtttgcccccagcccggatgcacttctgggtattggcagctctgctcagctttgccat

SEQ ID NO: 17012 - DNA, 3925 bp, Homo sapiens
  SIMILAR (406)..(990): 701254mologous to Human endogenous retrovirus K gag,accession number Y08032,Smith-Waterman Score=711.
ggcacgaggctcgccgcggactcaagatggcggcgtgtggacgtgtacggaggatgttccgcttgtcggcggcgctgcatctgctgctgctattcgcggccggggccgagaaactccccggccagggcgtcccacagccagggccagggtcccggggccaactttgtgtccttcgtagggcaggccggaggcggcggcccggcgggtcagcagctgccccagctgcctcagtcatcgcagcttcagcagcaacagcagcagcagcaacagcaacagcagcctcagccgccgcagccgcctttcccggcgggtgggcctccggcccggcggggaggagcgggggctggtgggggctggaagctggcggaggaagagtcctgcagggaggacgtgacccgcgtgtgccctaagcacacctggagcaacaacctggcggtgctcgagtgcctgcaggatgtgagggagcctgaaaatgaaatttcttcagactgcaatcatttgttgtggaattataagctgaacctaactacagatcccaaatttgaatctgtggccagagaggtttgcaaatctactataacagagattaaagaatgtgctgatgaaccggttggaaaaggttacatggtttcctgcttagtggatcaccgaggcaacatcactgagtatcagtgtcaccagtacattaccaagatgacggccatcatttttagtgattaccgtttaatctgtggcttcatggatgactgcaaaaatgacatcaacattctgaaatgtggcagtattcggcttggagaaaaggatgcacattcacaaggtgaggtggtatcatgcttggagaaaggcctggtgaaagaagcagaagaaagagaacccaagattcaagtttctgaactctgcaagaaagccattctccgggtggctgagctgtcatcggatgactttcacttagaccggcatttatattttgcttgccgagatgatcgggagcgtttttgtgaaaatacacaagctggtgagggcagagtgtataagtgcctctttaaccataaatttgaagaatccatgagtgaaaagtgtcgagaagcacttacaacccgccaaaagctgattgcccaggattataaagtcagttattcattggccaaatcctgtaaaagtgacttgaagaaataccggtgcaatgtggaaaaccttccgcgatcgcgtgaagccaggctctcctacttgttaatgtgcctggagtcagctgtacacagagggcgacaagtcagcagtgagtgccagggggagatgctggattaccgacgcatgttgatggaagacttttctctgagccctgagatcatcctaagctgtcggggggagattgaacaccattgttccggattacatcgaaaagggcggaccctacactgtctgatgaaagtagttcgaggggagaaggggaaccttggaatgaactgccagcaggcgcttcaaacactgattcaggagactgaccctggtgcagattaccgcattgatcgagctttgaatgaagcttgtgaatctgtaatccagacagcctgcaaacatataagatctggagacccaatgatcttgtcgtgcctgatggaacatttatacacagagaagatggtagaagactgtgaacaccgtctcttagagctgcagtatttcatctcccgggattggaagctggaccctgtcctgtaccgcaagtgccagggagacgcttctcgtctttgccacacccacggttggaatgagaccagtgaatttatgcctcagggagctgtgttctcttgtttatacagacacgcctaccgcactgaggaacagggaaggaggctctcacgggagtgccgagctgaagtccaaaggatcctacaccagcgtgccatggatgtcaagctggatcctgccctccaggataagtgcctgattgatctgggaaaatggtgcagtgagaaaacagagactggacaggagctggagtgccttcaggaccatctggatgacttggtggtggagtgtagagatatagttggcaacctcactgagttagaatcagaggatattcaaatagaagccttgctgatgagagcctgtgagcccataattcagaacttctgccacgatgtggcagataaccagatagactctggggacctgatggagtgtctgatacagaacaaacaccagaaggacatgaacgagaagtgtgccatcggagttacccacttccagctggtgcagatgaaggattttcggttttcttacaagtttaaaatggcctgcaaggaggacgtgttgaagctttgcccaaacataaaaaagaaggtggacgtggtgatctgcctgagcacgaccgtgcgcaatgacactctgcaggaagccaaggagcacagggtgtccctgaagtgccgcaggcagctccgtgtggaggagctggagatgacggaggacatccgcttggagccagatctatacgaagcctgcaagagtgacatcaaaaacttctgttccgctgtgcaatatggcaacgctcagattatcgaatgtctgaaagaaaacaagaagcagctaagcacccgctgccaccaaaaagtatttaagctgcaggagacagagatgatggacccagagctagactacaccctcatgagggtctgcaagcagatgataaagaggttctgtccggaagcagattctaaaaccatgttgcagtgcttgaagcaaaataaaaacagtgaattgatggatcccaaatgcaaacagatgataaccaagcgccagatcacccagaacacagattaccgcttaaaccccatgttaagaaaagcctgtaaagctgacattcctaaattctgtcacggtatcctgactaaggccaaggatgattcagaattagaaggacaagtcatctcttgcctgaagctgagatatgctgaccagcgcctgtcttcagactgtgaagaccagatccgaatcattatccaggagtccgccctggactaccgcctggatcctcagctccagctgcactgctcagacgagatctccagtctatgtgctgaagaagcagcagcccaagagcagacaggtcaggtggaggagtgcctcaaggtcaacctgctcaagatcaaaacagaattgtgtaaaaaggaagtgctaaacatgctgaaggaaagcaaagcagacatctttgttgacccggtacttcatactgcttgtgccctggacattaaacaccactgcgcagccatcacccctggccgcgggcgtcaaatgtcctgtctcatggaagcactggaggataagcgggtgaggttacagcccgagtgcaaaaagcgcctcaatgaccggattgagatgtggagttacgcagcaaaggtggccccagcagatggcttctctgatcttgccatgcaagtaatgacgtctccatctaagaactacattctctctgtgatcagtgggagcatctgtatattgttcctgattggcctgatgtgtggacggatcaccaagcgagtgacacgagagctcaaggacaggtagagccaccttgaccaccaaaggaactacctatccagtgcccagtttgtacagccctcttgtatagcatccccactcacctcgctcttctcagaagtgacaccaaccccgtgttagagcattagcagatgtccactgcgttgtcccatccagcctccactcgtgtccatggtgtcctcctcctcctcaccgtgcagcagcagcagctggtcgctggggttactgcctttgtttggcaaacttgggtttacctgcctgtagacaagtctctctcataccaacagaacttccggtacttccagaaccaactcacctgacctgcaactcaaaggcttttttaagaaaaccaccaaaaaaaaaa

SEQ ID NO: 17013 - DNA, 602 bp, Homo sapiens
  SIMILAR (46)..(615): 911254mologous to Homo sapiens josephin MJD1,accession number U64821,Smith-Waterman Score=867.
ccagatagaaggcgaggatgtcctgcactttctggctcttgatctgggccagcaccccgcctttcctctgtaaccccaccctgacatttcatcctggctctgtaataggtgtctgcctctgaagacaccatgaagcagtctccgtcgatcctcaggtcacaggtgtggaagggaaaatgcaccttggtggcacactgggctcccccgtagccgatgtcacagacgcacgagcactcctcctcccggaaccggccgtgcacacactgcaggctgcacctcacttggcagtatctgcccgtgtagccagggggacagtggcagtggcaggtgctgatgttgagacgtccatggttctggcagctcatgcgacaaggattcctggggacctcacagagcccccctgcatggtcccaggctttgaagcagcctgagacactggctgtgcagagcgaacaccaggcacccttcttataggggacgattgtcttcccgttgacctcccagttgcctctgggggagtaggcacagacaaaggcttctatcaatgcctggcctgcagagccgaacgcgtgggtcgggccgggtattccaaccaggtgccg

SEQ ID NO: 17014 - DNA, 1482 bp, Homo sapiens
  SIMILAR (385)..(594): 701254mologous to Homo sapiens Human tumour-associated protein PRO347,accession number Y06483,Smith-Waterman Score=285.
atgagaagtgataccatctcaactctccggaacaaaggcaggactgataatggagcatctcagaaggtagagaaagccatcgtggagaacaagtgcatgtcagtgcgcaccgggaagcagccgatgctgccgagaccccagcacacacaaacatcccaacaaaaagcagcagttggggcagacaaataccaagagactgaggtaactggaactacaggccattttaaacttgtaagaaaaccgaaaatccttcatctgcacctgaaagatgtagggcaccatggacttttacagactgagggacatactctggatgagaatagtttaccctatcaaggaaaagtaagttccccagatgaaacgccacagataacaggcatattaggcaactgggaggtcaacgggaagacaatcatcccctataagaagggtgcctggtgttcgctctgcacagccagtgtctcaggctgcttcaaagcctgggaccatgcaggggggctctgtgtgaggtgcagcctgcagtgtgtgcacggtcggttccgggaggaggagtgctcgtgcgtctgtgacatcggctacgggggagcccagtgtgccacatggaacacttttgtaaaacagctactttattttgagcagattaaagaatgtgctgatgaaccggttggaaaaggttacatggtttcctgcttggtggatcaccgaggcaacatcactgagtatcagtgtcaccagtacattaccaagatgacggccatcatttttagtgattaccgtttaatctgtggcttcatggatgactgcaaaaatgacatcaacattctgaaatgtggcagtattcggcttggagaaaaggtcagtcaactggctgagaaatggtcaagaaaagaaacaatgacccttctggggatggtggggttacagaggaaaggcggggtgctggcccagatcaagagccagaaagtgcaggacatcctcgccttctatctgggccgcctggagaccaccaacgaggtgattgacagtgacttcgagaccaggaacttctggatcggtagggagcacatgggggctgccagcgctgggaagaggggccagaaaggcagctggcagcagactccagggtctgagtgggccaaccttgactaccccggcccagggctcacctacaagaccgccaaggactccttccgctgggccacaggggagcaccaggccttcaccagttttgcctttgggcagcctgacaaccacggcccagcaatgcccagggccagggtggaggtggtccggctgcgaggccaccaagggctccagcgatttcagccagccctccttgccaacagccggcctgtgcccctggccttttgcctggaggaagtctgggccttgtgttgggagtacaggggtgagcttccgcgctacggcacttacaatttggtattggcggggagtgaaaagaaatattacagccctgcctaa

SEQ ID NO: 17015 - DNA, 8906 bp, Homo sapiens
  SIMILAR (67)..(8649): 1001254mologous to Homo sapiens Trio,accession number U42390,Smith-Waterman Score=14844.
gaggcggccaaggacctggccgacatcgcggccttcttccgatccgggtttcgaaaaaacgatgaaatgaaagctatggatgttttaccaattttgaaggaaaaagttgcatacctttcaggtgggagagataaacgtggaggtcccattttaacgtttccggcccgcagcaatcatgacagaatacgacaggaggatctcaggagactcatttcctatctagcctgtattcccagcgaggaggtctgcaagcgtggcttcacggtgatcgtggacatgcgtgggtccaagtgggactccatcaagccccttctgaagatcctgcaggagtccttcccctgctgcatccatgtggccctgatcatcaagccagacaacttctggcagaaacagaggactaattttggcagttctaaatttgaatttgagacaaatatggtctctttagaaggccttaccaaagtagttgatccttctcagctaactcctgagtttgatggctgcctggaatacaaccacgaagaatggattgaaatcagagttgcttttgaagactacattagcaatgccacccacatgctgtctcggctggaggaacttcaggacatcctagctaagaaggagctgcctcaggatttagagggggctcggaatatgatcgaggaacattctcagctgaagaagaaggtgattaaggcccccatcgaggacctggatttggagggacagaagctgcttcagaggatacagagcagtgaaagctttcccaaaaagaactcaggctcaggcaatgcggacctgcagaacctcttgcccaaggtgtccaccatgctggaccggctgcactcgacacggcagcatctgcaccagatgtggcatgtgaggaagctgaagctggaccagtgcttccagctgaggctgtttgaacaggatgctgagaagatgtttgactggatcacacacaacaaaggcctgtttctaaacagctacacagagattgggaccagccaccctcatgccatggagcttcagacgcagcacaatcactttgccatgaactgtatgaacgtgtatgtaaatataaaccgcatcatgtcggtggccaatcgtctggtggagtctggccactatgcctcgcagcagatcaggcagatcgcgagtcagctggagcaggagtggaaggcgtttgcggcagccctggatgagcggagcaccttgctggacatgtcctccattttccaccagaaggccgaaaagtatatgagcaacgtggattcatggtgtaaagcttgcggtgaggtagaccttccctcagagctgcaggacctagaagatgccattcatcaccaccagggaatatatgaacatatcactcttgcttattctgaggtcagccaagatgggaagtcgctccttgacaagctccagcggcccttgactcccggcagctccgattccctgacagcctctgccaactactccaaggccgtgcaccatgtcctggatgtcatccacgaggtgctgcaccaccagcggcacgtgagaacaatctggcaacaccgcaaggtccggctgcatcagaggctgcagctgtgtgttttccagcaggaagttcagcaggtgctagactggatcgagaaccacggagaagcatttctgagcaaacatacaggtgtggggaaatctcttcatcgggccagagcattgcagaaacgtcatgaagattttgaagaagtggcacagaacacatacaccaatgcggataaattactggaagcagcagaacagctggctcagactggggaatgtgaccccgaagagatttatcaggctgcccatcagctggaagaccggattcaagatttcgttcggcgtgttgagcagcgaaagatcctactggacatgtcagtgtcctttcacacccatgtgaaagagctgtggacgtggctggaggagctgcagaaggagctgctggacgacgtgtatgccgagtcggtggaggccgtgcaggacctcatcaagcgctttggccagcagcagcagaccaccctgcaggtgactgtcaacgtgatcaaggaaggggaggacctcatccagcagctcagggactctgccatctccagtaacaagaccccccacaacagctccatcaaccacattgagacggtgctgcagcagctggacgaggcgcagtcgcagatggaggagctcttccaggagcgcaagatcaagctggagctcttcctgcacgtgcgcatcttcgagagggacgccatcgacattatctcagacctcgagtcttggaatgatgagctttctcagcaaatgaatgacttcgacacagaagatctcacgattgcagagcagcgcctccagcaccatgcagacaaagccttgaccatgaacaacttgacttttgacgtcatccaccaagggcaagatcttctgcagtatgtcaatgaggtccaggcctctggtgtggagctgctgtgtgatagagatgtagacatggcaactcgggtccaggacctgctggagtttcttcatgaaaaacagcaggaattggatttagccgcagagcagcatcggaaacacctggagcagtgcgtgcagctgcgccacctgcaggcagaagtgaaacaggtgctgggttggatccgcaacggagagtccatgttaaatgccggacttatcacagccagctcgttacaagaggcagagcagctccagcgagagcacgagcagttccagcatgccattgagaaaacacatcagagcgcgctgcaggtgcagcagaaggcagaagccatgctacaggccaaccactacgacatggacatgatccgggactgcgccgagaaggtggcgtctcactggcaacagctcatgctcaagatggaagatcgcctcaagctcgtcaacgcctctgtcgctttctacaaaacctcagagcaggtctgcagcgtcctcgagagcctggaacaggagtacaagagagaagaagactggtgtggcggggcggataagctgggcccaaactctgagacggaccacgtgacgcccatgatcagcaagcacctggagcagaaggaggcattcctgaaggcttgcacccttgctcggaggaatgcagacgtcttcctgaaatacctgcacaggaacagcgtgaacatgccaggaatggtgacgcacatcaaagctcctgaacagcaagtgaaaaatatcttgaatgaactcttccaacgggagaacagggtattgcattactggaccatgaggaagagacggctggaccagtgtcagcagtacgtggtctttgagaggagtgccaagcaggctttggaatggatccatgacaatggcgagttctacctttccacacacacctccacgggctccagtatacagcacacccaggagctcctgaaagagcacgaggagttccagataactgcaaagcaaaccaaagagagagtgaagctattgatacagctggctgatggcttttgtgaaaaagggcatgcccatgcggcagagataaaaaaatgtgttactgctgtggataagaggtacagagatttctctctgcggatggagaagtacaggacctctttggaaaaagccctggggatttcttcagattccaacaaatcgagtaaaagtctccagctagatatcattccagccagtatccctggctcagaggtgaaacttcgagatgctgctcatgaacttaatgaagagaagcggaaatctgcccgcaggaaagagttcataatggctgagctcattcaaactgaaaaggcttatgtaagagacctccgggaatgtatggatacgtacctgtgggaaatgaccagtggcgtggaagagattccacctggcattgtaaacaaagaactcatcatcttcggaaacatgcaagaaatctacgaatttcataataacatattcctaaaggagctggaaaaatatgaacagttgccagaggatgttggacattgttttgttacttgggcagacaagtttcagatgtatgtcacatattgcaaaaataagcctgattctactcagctgatattggaacatgcagggtcctattttgacgagatacagcagcgacatggattagccaattccatttcttcctaccttattaaaccagttcagcgaataacgaaatatcagctccttttaaaagagctgctgacgtgctgtgaggaaggaaagggagagattaaagatggcctggaggtgatgctcagcgtgccgaagcgagccaatgacgccatgcacctcagcatgctggaagggtttgatgaaaacattgagtctcagggagaactcatcctacaggaatccttccaagtgtgggacccaaaaaccttaattcgaaagggtcgagaacggcatctcttcctttttgaaatgtccttagtatttagtaaagaagtgaaagattccagtgggagaagcaagtacctttataaaagcaaattgtttacctcagagttgggtgtcacagaacatgttgaaggagacccttgcaaatttgcactgtgggtggggagaacaccaacttcagataataaaattgtccttaaggcttccagcatagagaacaagcaggactggataaagcatatccgcgaagtcatccaggagcggacgatccacctgaagggagccctgaaggagcccattcacatccctaagaccgctcccgccacaagacagaagggaaggagggatggagaggatctggacagccaaggagacggcagcagccagcctgatacgatttccatcgcctcacggacgtctcagaacacgctggacagcgataagctctctggtggctgtgagctgacagtggtgatccatgacttcaccgcttgcaacagcaacgagctgaccatccgacggggccagaccgtggaagttctggagcggccgcatgacaagcctgactggtgtctggtgcggaccactgaccgctccccagcggcagaaggcctggtcccctgtggttcactgtgcatcgcccactccagaagtagcatggaaatggagggcatcttcaaccacaaagactcgctctccgtctccagcaatgacgccagtccacccgcatccgtggcttccctccagccccacatgatcggggcccagagctcgccgggccccaagcggccgggcaacaccctgcgcaagtggctcaccagccccgtgcggcggctcagcagcggcaaggccgacgggcacgtgaagaagctggcgcacaagcacaagaagagccgcgaggtccgcaagagcgccgacgccggctcgcagaaggactccgacgacagtgcggccaccccgcaggacgagacggtcgaggagagaggccggaacgagggcctgagcagcggtactctctccaaatcctcctcctcggggatgcagagctgtggagaagaggaaggcgaggagggggccgacgccgtgcccctgccgccacccatggccatccagcagcacagcctcctccagccagactcacaggatgacaaggcctcttctcggttattagtccgccccaccagctccgaaacaccgagtgcagccgagctcgtcagtgcaattgaggaactcgtgaaaagcaagatggcactggaggatcgccccagctcactccttgttgaccagggagatagtagcagcccttccttcaacccttcggataattcccttctctcttcctcctcgcccattgatgagatggaagaaaggaaatccagctctttaaagagaagacactacgttttgcaagaactagtggagacagagcgtgactatgtgcgggaccttggctatgtggttgagggctacatggcacttatgaaagaagatggtgttcctgatgacatgaaaggaaaagacaaaattgtgttcggcaacatccatcagatttacgactggcacagagacttttttttaggagagttagagaagtgccttgaagatccagaaaaactaggatccctttttgttaaacacgagagaaggttgcacatgtacatagcttattgtcaaaataaaccaaagtctgagcacattgtctcagaatacattgataccttttttgaggacttaaagcagcgtcttggccacaggttacagctcacagatctgttgatcaaaccagtgcagagaatcatgaagtatcagctgttactgaaggacttcctcaagtattccaaaaaggccagcctggatacatcagaattagagagagctgtggaagtcatgtgcatagtacccaggcggtgcaacgacatgatgaacgtggggcggctgcaaggattcgacgggaaaatcgttgcccagggtaaactgctcttgcaggacacattcttggtcacagaccaagatgcaggacttctgcctcgctgcagagagaggcgcatcttcctctttgagcagatcgtcatattcagcgaaccacttgataaaaagaagggcttctccatgccgggattcctgtttaagaacagtatcaaggtgagttgcctttgcctggaggaaaatgtggaaaatgatccctgtaaatttgctctgacatcgaggacgggtgacgtggtagagaccttcattttgcattcatctagtccaagtgtccggcaaacttggatccatgaaatcaaccaaattttagaaaaccagcgcaattttttaaatgccttgacatcgccaatcgagtaccagaggaaccacagcgggggcggcggcggcggcggcagcggggcagcggcgggggtgggggcagcggcggcggcggggcccccagtggcggcagcggccacagtggcggccccagcagctgcggcggcgcccccagcacgagcaggagccggccctcccggatcccccagcctgtccgacaccacccccccgtgctggtctcctctgcagcctcgagccaggcagaggcagacaagatgtcagagtgaaagcagcagcagtagcaacatctccaccatgttggtgacacacgattacacggcagtgaaggaggatgagatcaacgtctaccaaggagaggtcgttcaaattctggccagcaaccagcagaacatgtttctggtgttccgagccgccactgaccagtgccccgcagctgagggctggattccaggctttgtcctgggccacaccagtgcagtcatcgtggagaacccggacgggactctcaagaagtcaacatcttggcacacagcactccgtttaaggaaaaaatctgagaaaaaagataaagacggcaaaagggaaggcaagttagagaacggttatcggaagtcacgggaaggactcagcaacaaggtatctgtgaagcttctcaatcccaactacatttatgacgttcccccagaattcgtcattccattgagtgaggtcacgtgtgagacaggggagaccgttgttcttagatgtcgagtctgtggccgccccaaagcctcaattacctggaagggccctgaacacaacaccttgaacaacgatggtcactacagcatctcctacagtgacctgggagaggccacgctgaagattgtgggcgtgaccacggaagatgacggcatctacacgtgcatcgctgtcaatgacatgggttcagcctcatcatcggccagcctgagggtcctaggtccagggatggatgggatcatggtgacctggaaagacaactttgactccttctacagtgaagtggctgagcttggcaggggcagattctctgtcgttaagaaatgtgatcagaaaggaaccaagcgagcagtggccactaagtttgtgaacaagaagttgatgaagcgcgaccaggtcacccatgagcttggcatcctgcagagcctccagcaccccctgcttgtcggcctcctcgacacctttgagacccccaccagctacatcctggtcttagaaatggctgaccagggtcgcctcctggactgcgtggtgcgatggggaagcctcactgaagggaagatcagggcgcacctgggggaggttctggaagctgtccggtacctgcacaactgcaggatagcacacctggacctaaagcctgagaatatcctggtggatgagagtttagccaagccaaccatcaaactggctgactttggagatgctgttcagctcaacacgacctactacatccaccagttactggggaaccctgaattcgcagcccctgaaatcatcctcgggaaccctgtctccctgacctcggatacgtggagtgttggagtgctcacatacgtacttcttagtggcgtgtcccccttcctggatgacagtgtggaagagacctgcctgaacatttgccgcttagactttagcttcccagatgactactttaaaggagtgagccagaaggccaaggagttcgtgtgcttcctcctgcaggaggaccccgccaagcgtccctcggctgcgctggccctccaggagcagtggctgcaggccggcaacggcagaagcacgggcgtcctcgacacgtccagactgacttccttcattgagcggcgcaaacaccagaatgatgttcgacctatccgtagcattaaaaactttctgcagagcaggcttctgcctagagtttgacctatccagaagttctttctcattctctttcacctgccaatcagctgttaatctgaattttcaagagaaaacaagcaaacataactgatcagctgccggtatgttcatcgtgtgaaattgcattccaagtgagctgtgctcagcagtgcttggacacagagctgcaagctgcgctggggtggaggaccgtcacttacactctgccaaggacggaggtcgcattgctgtatcacagtattttttacggatttctg

SEQ ID NO: 17016 - DNA, 9437 bp, Homo sapiens
  SIMILAR (67)..(9180): 1001254mologous to Homo sapiens Trio isoform,accession number AF091395,Smith-Waterman Score=15771.
gaggcggccaaggacctggccgacatcgcggccttcttccgatccgggtttcgaaaaaacgatgaaatgaaagctatggatgttttaccaattttgaaggaaaaagttgcatacctttcaggtgggagagataaacgtggaggtcccattttaacgtttccggcccgcagcaatcatgacagaatacgacaggaggatctcaggagactcatttcctatctagcctgtattcccagcgaggaggtctgcaagcgtggcttcacggtgatcgtggacatgcgtgggtccaagtgggactccatcaagccccttctgaagatcctgcaggagtccttcccctgctgcatccatgtggccctgatcatcaagccagacaacttctggcagaaacagaggactaattttggcagttctaaatttgaatttgagacaaatatggtctctttagaaggccttaccaaagtagttgatccttctcagctaactcctgagtttgatggctgcctggaatacaaccacgaagaatggattgaaatcagagttgcttttgaagactacattagcaatgccacccacatgctgtctcggctggaggaacttcaggacatcctagctaagaaggagctgcctcaggatttagagggggctcggaatatgatcgaggaacattctcagctgaagaagaaggtgattaaggcccccatcgaggacctggatttggagggacagaagctgcttcagaggatacagagcagtgaaagctttcccaaaaagaactcaggctcaggcaatgcggacctgcagaacctcttgcccaaggtgtccaccatgctggaccggctgcactcgacacggcagcatctgcaccagatgtggcatgtgaggaagctgaagctggaccagtgcttccagctgaggctgtttgaacaggatgctgagaagatgtttgactggatcacacacaacaaaggcctgtttctaaacagctacacagagattgggaccagccaccctcatgccatggagcttcagacgcagcacaatcactttgccatgaactgtatgaacgtgtatgtaaatataaaccgcatcatgtcggtggccaatcgtctggtggagtctggccactatgcctcgcagcagatcaggcagatcgcgagtcagctggagcaggagtggaaggcgtttgcggcagccctggatgagcggagcaccttgctggacatgtcctccattttccaccagaaggccgaaaagtatatgagcaacgtggattcatggtgtaaagcttgcggtgaggtagaccttccctcagagctgcaggacctagaagatgccattcatcaccaccagggaatatatgaacatatcactcttgcttattctgaggtcagccaagatgggaagtcgctccttgacaagctccagcggcccttgactcccggcagctccgattccctgacagcctctgccaactactccaaggccgtgcaccatgtcctggatgtcatccacgaggtgctgcaccaccagcggcacgtgagaacaatctggcaacaccgcaaggtccggctgcatcagaggctgcagctgtgtgttttccagcaggaagttcagcaggtgctagactggatcgagaaccacggagaagcatttctgagcaaacatacaggtgtggggaaatctcttcatcgggccagagcattgcagaaacgtcatgaagattttgaagaagtggcacagaacacatacaccaatgcggataaattactggaagcagcagaacagctggctcagactggggaatgtgaccccgaagagatttatcaggctgcccatcagctggaagaccggattcaagatttcgttcggcgtgttgagcagcgaaagatcctactggacatgtcagtgtcctttcacacccatgtgaaagagctgtggacgtggctggaggagctgcagaaggagctgctggacgacgtgtatgccgagtcggtggaggccgtgcaggacctcatcaagcgctttggccagcagcagcagaccaccctgcaggtgactgtcaacgtgatcaaggaaggggaggacctcatccagcagctcagggactctgccatctccagtaacaagaccccccacaacagctccatcaaccacattgagacggtgctgcagcagctggacgaggcgcagtcgcagatggaggagctcttccaggagcgcaagatcaagctggagctcttcctgcacgtgcgcatcttcgagagggacgccatcgacattatctcagacctcgagtcttggaatgatgagctttctcagcaaatgaatgacttcgacacagaagatctcacgattgcagagcagcgcctccagcaccatgcagacaaagccttgaccatgaacaacttgacttttgacgtcatccaccaagggcaagatcttctgcagtatgtcaatgaggtccaggcctctggtgtggagctgctgtgtgatagagatgtagacatggcaactcgggtccaggacctgctggagtttcttcatgaaaaacagcaggaattggatttagccgcagagcagcatcggaaacacctggagcagtgcgtgcagctgcgccacctgcaggcagaagtgaaacaggtgctgggttggatccgcaacggagagtccatgttaaatgccggacttatcacagccagctcgttacaagaggcagagcagctccagcgagagcacgagcagttccagcatgccattgagaaaacacatcagagcgcgctgcaggtgcagcagaaggcagaagccatgctacaggccaaccactacgacatggacatgatccgggactgcgccgagaaggtggcgtctcactggcaacagctcatgctcaagatggaagatcgcctcaagctcgtcaacgcctctgtcgctttctacaaaacctcagagcaggtctgcagcgtcctcgagagcctggaacaggagtacaagagagaagaagactggtgtggcggggcggataagctgggcccaaactctgagacggaccacgtgacgcccatgatcagcaagcacctggagcagaaggaggcattcctgaaggcttgcacccttgctcggaggaatgcagacgtcttcctgaaatacctgcacaggaacagcgtgaacatgccaggaatggtgacgcacatcaaagctcctgaacagcaagtgaaaaatatcttgaatgaactcttccaacgggagaacagggtattgcattactggaccatgaggaagagacggctggaccagtgtcagcagtacgtggtctttgagaggagtgccaagcaggctttggaatggatccatgacaatggcgagttctacctttccacacacacctccacgggctccagtatacagcacacccaggagctcctgaaagagcacgaggagttccagataactgcaaagcaaaccaaagagagagtgaagctattgatacagctggctgatggcttttgtgaaaaagggcatgcccatgcggcagagataaaaaaatgtgttactgctgtggataagaggtacagagatttctctctgcggatggagaagtacaggacctctttggaaaaagccctggggatttcttcagattccaacaaatcgagtaaaagtctccagctagatatcattccagccagtatccctggctcagaggtgaaacttcgagatgctgctcatgaacttaatgaagagaagcggaaatctgcccgcaggaaagagttcataatggctgagctcattcaaactgaaaaggcttatgtaagagacctccgggaatgtatggatacgtacctgtgggaaatgaccagtggcgtggaagagattccacctggcattgtaaacaaagaactcatcatcttcggaaacatgcaagaaatctacgaatttcataataacatattcctaaaggagctggaaaaatatgaacagttgccagaggatgttggacattgttttgttacttgggcagacaagtttcagatgtatgtcacatattgcaaaaataagcctgattctactcagctgatattggaacatgcagggtcctattttgacgagatacagcagcgacatggattagccaattccatttcttcctaccttattaaaccagttcagcgaataacgaaatatcagctccttttaaaagagctgctgacgtgctgtgaggaaggaaagggagagattaaagatggcctggaggtgatgctcagcgtgccgaagcgagccaatgacgccatgcacctcagcatgctggaagggtttgatgaaaacattgagtctcagggagaactcatcctacaggaatccttccaagtgtgggacccaaaaaccttaattcgaaagggtcgagaacggcatctcttcctttttgaaatgtccttagtatttagtaaagaagtgaaagattccagtgggagaagcaagtacctttataaaagcaaattgtttacctcagagttgggtgtcacagaacatgttgaaggagacccttgcaaatttgcactgtgggtggggagaacaccaacttcagataataaaattgtccttaaggcttccagcatagagaacaagcaggactggataaagcatatccgcgaagtcatccaggagcggacgatccacctgaagggagccctgaaggagcccattcacatccctaagaccgctcccgccacaagacagaagggaaggagggatggagaggatctggacagccaaggagacggcagcagccagcctgatacgatttccatcgcctcacggacgtctcagaacacgctggacagcgataagctctctggtggctgtgagctgacagtggtgatccatgacttcaccgcttgcaacagcaacgagctgaccatccgacggggccagaccgtggaagttctggagcggccgcatgacaagcctgactggtgtctggtgcggaccactgaccgctccccagcggcagaaggcctggtcccctgtggttcactgtgcatcgcccactccagaagtagcatggaaatggagggcatcttcaaccacaaagactcgctctccgtctccagcaatgacgccagtccacccgcatccgtggcttccctccagccccacatgatcggggcccagagctcgccgggccccaagcggccgggcaacaccctgcgcaagtggctcaccagccccgtgcggcggctcagcagcggcaaggccgacgggcacgtgaagaagctggcgcacaagcacaagaagagccgcgaggtccgcaagagcgccgacgccggctcgcagaaggactccgacgacagtgcggccaccccgcaggacgagacggtcgaggagagaggccggaacgagggcctgagcagcggtactctctccaaatcctcctcctcggggatgcagagctgtggagaagaggaaggcgaggagggggccgacgccgtgcccctgccgccacccatggccatccagcagcacagcctcctccagccagactcacaggatgacaaggcctcttctcggttattagtccgccccaccagctccgaaacaccgagtgcagccgagctcgtcagtgcaattgaggaactcgtgaaaagcaagatggcactggaggatcgccccagctcactccttgttgaccagggagatagtagcagcccttccttcaacccttcggataattcccttctctcttcctcctcgcccattgatgagatggaagaaaggaaatccagctctttaaagagaagacactacgttttgcaagaactagtggagacagagcgtgactatgtgcgggaccttggctatgtggttgagggctacatggcacttatgaaagaagatggtgttcctgatgacatgaaaggaaaagacaaaattgtgttcggcaacatccatcagatttacgactggcacagagacttttttttaggagagttagagaagtgccttgaagatccagaaaaactaggatccctttttgttaaacacgagagaaggttgcacatgtacatagcttattgtcaaaataaaccaaagtctgagcacattgtctcagaatacattgataccttttttgaggacttaaagcagcgtcttggccacaggttacagctcacagatctgttgatcaaaccagtgcagagaatcatgaagtatcagctgttactgaaggacttcctcaagtattccaaaaaggccagcctggatacatcagaattagagagagctgtggaagtcatgtgcatagtacccaggcggtgcaacgacatgatgaacgtggggcggctgcaaggattcgacgggaaaatcgttgcccagggtaaactgctcttgcaggacacattcttggtcacagaccaagatgcaggacttctgcctcgctgcagagagaggcgcatcttcctctttgagcagatcgtcatattcagcgaaccacttgataaaaagaagggcttctccatgccgggattcctgtttaagaacagtatcaaggtgagttgcctttgcctggaggaaaatgtggaaaatgatccctgtaaatttgctctgacatcgaggacgggtgacgtggtagagaccttcattttgcattcatctagtccaagtgtccggcaaacttggatccatgaaatcaaccaaattttagaaaaccagcgcaattttttaaatgccttgacatcgccaatcgagtaccagaggaaccacagcgggggcggcggcggcggcggcagcgggggcagcggcgggggtgggggcagcggcggcggcggggcccccagtggcggcagcggccacagtggcggccccagcagctgcggcggcgcccccagcacgagcaggagccggccctcccggatcccccagcctgtccgacaccacccccccgtgctggtctcctctgcagcctcgagccaggcagaggcagacaagatgtcaggtacgtccacccccgggccctccctgcctccccctggcgcggcccccgaggccggccccagcgcgcccagcaggcggccccccggcgcggacgccgaggggtccgagcgagaagcggagccgatccccaagatgaaggtgctggagagccccaggaaaggcgccgcgaacgcctcggggtcgagcccagacgcccccgccaaggacgcgcgcgctagcctgggcaccctgccgcttgggaagccccgggccggggccgcttcgccgctgaactcgccgctctccagcgcggtcccttctctcggcaaggagcccttcccccccagcagccccctgcagaaggggggctccttctggagctccatccccgcctcccccgccagccgacccggctccttcaccttcccgggggacagcgactccctccagcggcagacaccccgccacgcggcccctggcaaggatactgaccgcatgagcacgtgctcctcggccagcgagcagtccgtgcagtccacccagagcaacgggagtgaaagcagcagcagtagcaacatctccaccatgttggtgacacacgattacacggcagtgaaggaggatgagatcaacgtctaccaaggagaggtcgttcaaattctggccagcaaccagcagaacatgtttctggtgttccgagccgccactgaccagtgccccgcagctgagggctggattccaggctttgtcctgggccacaccagtgcagtcatcgtggagaacccggacgggactctcaagaagtcaacatcttggcacacagcactccgtttaaggaaaaaatctgagaaaaaagataaagacggcaaaagggaaggcaagttagagaacggttatcggaagtcacgggaaggactcagcaacaaggtatctgtgaagcttctcaatcccaactacatttatgacgttcccccagaattcgtcattccattgagtgaggtcacgtgtgagacaggggagaccgttgttcttagatgtcgagtctgtggccgccccaaagcctcaattacctggaagggccctgaacacaacaccttgaacaacgatggtcactacagcatctcctacagtgacctgggagaggccacgctgaagattgtgggcgtgaccacggaagatgacggcatctacacgtgcatcgctgtcaatgacatgggttcagcctcatcatcggccagcctgagggtcctaggtccagggatggatgggatcatggtgacctggaaagacaactttgactccttctacagtgaagtggctgagcttggcaggggcagattctctgtcgttaagaaatgtgatcagaaaggaaccaagcgagcagtggccactaagtttgtgaacaagaagttgatgaagcgcgaccaggtcacccatgagcttggcatcctgcagagcctccagcaccccctgcttgtcggcctcctcgacacctttgagacccccaccagctacatcctggtcttagaaatggctgaccagggtcgcctcctggactgcgtggtgcgatggggaagcctcactgaagggaagatcagggcgcacctgggggaggttctggaagctgtccggtacctgcacaactgcaggatagcacacctggacctaaagcctgagaatatcctggtggatgagagtttagccaagccaaccatcaaactggctgactttggagatgctgttcagctcaacacgacctactacatccaccagttactggggaaccctgaattcgcagcccctgaaatcatcctcgggaaccctgtctccctgacctcggatacgtggagtgttggagtgctcacatacgtacttcttagtggcgtgtcccccttcctggatgacagtgtggaagagacctgcctgaacatttgccgcttagactttagcttcccagatgactactttaaaggagtgagccagaaggccaaggagttcgtgtgcttcctcctgcaggaggaccccgccaagcgtccctcggctgcgctggccctccaggagcagtggctgcaggccggcaacggcagaagcacgggcgtcctcgacacgtccagactgacttccttcattgagcggcgcaaacaccagaatgatgttcgacctatccgtagcattaaaaactttctgcagagcaggcttctgcctagagtttgacctatccagaagttctttctcattctctttcacctgccaatcagctgttaatctgaattttcaagagaaaacaagcaaacataactgatcagctgccggtatgttcatcgtgtgaaattgcattccaagtgagctgtgctcagcagtgcttggacacagagctgcaagctgcgctggggtggaggaccgtcacttacactctgccaaggacggaggtcgcattgctgtatcacagtattttttacggatttctg

SEQ ID NO: 17017 - DNA, 1443 bp, Homo sapiens
  SIMILAR (646)..(885): 981254mologous to Escherichia coli UmuC protein,accession number D90752,Smith-Waterman Score=393.
atggggatttcgaccgtggtgattggtctgctgccgggctatgccacgattatcacggcaatagcagcaaaggcgcggcgcagtatctgctgcaacagggctacgatgtggtctatagcattgacggcggctttgaagcctggcaacgcctcttctcggttattagtccgccccaccagctccgaaacaccgagtgcagccgagctcgtcagtgcaattgaggaactcgtgaaaagcaagatggtgaggcctcccagagaaagtctgacttttggaagctgctctgtgttgctacttgcagatggatttgcccttgtctttgtattgctctgggctgcagaatgtggctgtggcttatggcacatctcaggagtccccatgaccaacctcgggttcactgatttgaaggactcagagaactcaggaaagccattatacccacatttggcagtgtatacccatgaacggacacagatcaaaataggccacggaagaactgcatcaggcagggcccaaattcacctgctagagttatcccagtggttacaatgtgaatctgcaacaatacaagaggctgaagataaaccaccaatatgtacaaagaaaataatctctaccaggcctctagctgtcaaagctgtgacctttatcagagaaattcgcgcaacggtgctacaacgtacccatcttactgttggtgtggggatcgcccagaccaaaacgctggctaagcttgccaatcatgcggcaaaaaaatggcagcggcagacgggtggggtggtggatttatcaaatctggaacgccagcgtaaattaatgtctgctctccccgtggatgacgtctgggggattggacggcggatcagcaaaaaactggacgcgatgccacgacagaaattcaccaaaccacaattattcaagaggttctcccccaagcatttgtcccggaaaatgtgtaagggacccccttctccaagtgatcttactagatcttcatataactcgctcagtttctccatcagcactgccggcttcacgtggacttggatgtatggaggagctctgatggagatgtacaaggagattaatgttgttttcatgtctgctaacacaacatgcattctgcagcccatggatcaaggagtaattttgactttcaagtcgtattatatcagaaatacattctgtaaggctgtagctgccatagatagtgattcctctgatggatctgggcaaagtaaattgaaagccttccagaaaggattcactattctagatgccatcaagaacatttgtgattcacaggaggagaaattgccacagccacctcaacctttggccactaccctgatcagtcagcagctatcaacatcaagaccagccttccaccaggaaaacgattacaactcactgaaggctcagatgattgctagcaatttttag

SEQ ID NO: 17018 - DNA, 422 bp, Homo sapiens
  SIMILAR (90)..(362): 821254mologous to Homo sapiens rap2 interacting protein x,accession number AF112221,Smith-Waterman Score=382.
tttcgttggaaggagctgctggacaggcctttggagccttcgcccgagaccgcgcagccgccgccgccatggctacaaaagaccccacagctgtagagagagcaaacttgttaaacatggctaaactgagtatcaaaggactcattgaatctgctctgagctttggccgcactttggattctgactatccccccttgcagcaattctttgttgttatggaacattgcctgaaacacggtcttaaagtaagaaaatcatttttgagttacaacaaaaccatctggggccctttggaactggtggagaagctgtaccccgaagcagaggaaataggagctagtgtccgggatctacctggtctgaatgagttttatgagtatcacgcactaatgatggaagaagaaggagcagtaattgttggg

SEQ ID NO: 17019 - DNA, 587 bp, Homo sapiens
  SIMILAR (148)..(585): 781254mologous to Homo sapiens rap2 interacting protein x,accession number AF112221,Smith-Waterman Score=591.
atggatgggcagctgtgggctgcaccgggcctggctgcaaatgcggtggtggccggagagcgcctggaaggagctgctggacaggccgagggagcctccgcccgagaccgcgcagccgccgccgccatggctacaaaagaccccacagctgtagagagagcaaacttgttaaacatggctaaactgagtatcaaaggactcattgaatctgctctgagctttggccgcactttggattctgactatccccccttgcagcaattctttgttgttatggaacattgcctgaaacacggtcttaaagtaagaaaatcatttttgagttacaacaaaaccatctggggccctttggaactggtggagaagctgtaccccgaagcagaggaaataggagctagtgtccgggatctacctggtctgaagacccctctgggtcgagcaagagcgtggcttcgattagccctcatgcaaaaaaaaatggccgattacttacgttgcttaattattcagagggatctcttgagtgagttttatgagtatcacgcactaatgatggaagaagaaggagcagtaattgttgggctgct

SEQ ID NO: 17020 - DNA, 493 bp, Homo sapiens
  SIMILAR (348)..(488): 701254mologous to Homo sapiens Human secreted protein, SEQ ID NO: 6804,accession number G02723,Smith-Waterman Score=150.
gtccggcattcccgggtcgacgatttcgtcgcccgggttctgaggcatagtggccgagggctcgttgtgccactgcgtccaggagcgaggacagggccaggcagggtgtcactcccgggtcggggagcaggcggggaggggcgatgacttttcaggtttgggggtggcggagggaagacgcatctcaggttttggcctgggtgcctgacgccgagggcgggagacggggaatgctgacgcgcaggatcctggtcatgcaatacagaactactgtcagattgaagaagccagacagatagagggtagactgaaagaattggacggcttcttctgtgttcctttctacaaaagaccccacagctgtagagagagcaaacttgttaaacatggctaaactgagtatcaaaggactcattgaatctgctctgagctttgtccgtactttggattctgactatcccctcttgcagcaatttctttgtgttatgaacat

SEQ ID NO: 17021 - DNA, 419 bp, Homo sapiens
  SIMILAR (3)..(275): 1001254mologous to Homo sapiens CAP-binding protein complex interacting protein 1,accession number Y10776,Smith-Waterman Score= 486.
agttttcgaaacactacaacatccacaaggatactgcagtagattacaacgtgtttttgaagaatctcagcataaataacgacttgaaccttagatattgtatgggaaatcaagaggtctcattggagaatcaacaagccaaaaattccaaaaaggaacgtttgctaggttctgcatcatctgaagatatctggagaaactactccttggatgaaattgagaggaacttttgtctacaagtaagatgttttcctaagccacaattacctacagagtaaacacagcaaagtagacaatatggaaaactattaggtttacacattatttctaaaatttgtttcgatcctacctatgtcttctccaatactgagaccccctctacctcccaataacagcaatacattgatcatggataaaaa

SEQ ID NO: 17022 - DNA, 420 bp, Homo sapiens
  SIMILAR (370)..(723): 981254mologous to Mus musculus putative pyroglutamyl- peptidase I,accession number AJ278829,Smith-Waterman Score=619.
  misc_feature (1)...(420): n = a,t,c or g
naaggcacataactgctctgggctggagcgacccccactggacaatcccagtgtatcaaatcgcctctttgcctccttcctctccccaagggacctgaagggcagaatgatgtagtgactagtcacaggtgctgaaatgaggcttcaaatcccagctccgcacctgttattcaggtaacctggggaaagcagcctgattcctctaacttcagcttccttgcctgtgaaatgagaatgaataaggatataggtgtgtggtgtgtgcttaagatgaaaggagctcatgtgtgcaggtgcttcacacacggaacacgttcaataaatggtggtgaaatgagaattgctgcctgggatcaaaggctaagaatagagatccaaataaccacacacccatgtcagggaatattaagcggcacgaaa

SEQ ID NO: 17023 - DNA, 2051 bp, Homo sapiens
  SIMILAR (282)..(70): 1001254mologous to Homo sapiens Human secreted protein, SEQ ID NO: 7594,accession number G03513,Smith-Waterman Score=372.
atgagagcatcagcccagaggcagggaggcgaggcttttgtgaaaggaatatcttcagcagatctggtggctctctggtcacatttaggtctaaacaggtccagtgcaggcgagttcagtttaaacctcaagtgtggggctggttcagcacgcccttctcagctcctccaagcccgagggccctggactcccactcctggtggtccagctcacttcctttggctgcttgggtccccttccctgatgagcagtcccttgggaacaggacagctcaagatttctacctgtcatggtgtcctcttaacccatggaaaattcacaagtcccgtccataccaaaataggtgttcaggctgctttcatctgctgcttctgccttgctctgctgtgtctgtctgagtctcagttcctcttcccaggcaaggaagctgaagttagaggaatcaggctgctttccccaggttacctgaataacaggtcccttgtggagaggaaggaggcaaagaggcgatttgatacactgggattgtccagtgggggtcgctccagcccagagcagttatgtgcctttcagtgggcaaaccaccctgcctgggagagggttcattttccccactctccggctttcatcttaaagcccttgccaaacttcagtctgacaaatgataagagccttggagacgtcgctctggtgggtgtgagctcgctgccaggttgctgcttcccggtgctcacgctagagatccatatgggttgctctggggttttaaaaaagcgcatcgtgctcatgtcctccattttaccaaaggaggtaaatctggctttggcagcagacaaagtgcagagatttttatccggccatgagagcaggcgctgtcagtggctggggctccctctttcaggcagagcggtggagtggaggacagaggcactggagccggctttgcttctgccggttttcaaaaacattaagactgttatgaaagcctttgagctcattgatgttaacaagactggactggttcgaccgcaggagctaagaagggttctggagaccttctgtatgaagttaagagacgaggaatacgaaaagttttcgaaacactacaacatccacaaggatactgcagtagattacaacgtgtttttgaagaatctcagcataaataacgacttgaaccttagatattgtatgggaaatcaagtaaaaagcttcttgaaagaaaacctaggcaataccattcaggacataggcgtgggcaaagacttcatgactaaaacaccaaatgcaattgcagtgaaagccaaaattgacaaatgcgatctaattaaactaaagagcttctgtgcagcaaaacaaactatgatcagaacccaaagccataggaaggcagaatggtttttggcaattaccctaaaaagcctgctcgatgggcttgctgcccagggccatctccggactctgcccccacattccggtgcagggctccttggtcccagctgtggcttaggtgcccctctgaaaagtacaagctgtaaagcttggtggcagcacactggggctcacgtgggcccagatgtggcttatgccataactctggaaggtgcaagcaaggaaattttgagaaaatcagaaggttgcaggcattatcaagctgccctggagaatgaaagctggtataattgtggtgagagaggcgtcactgaatacaccgtaccgagtgctgtcagccagcctgtgagagcagccacagggcgtgtgcacagacctgtgggccaggtctcgttggagaatcaacaagccaaaaattccaaaaaggaacgtttgctaggttctgcatcatctgaagatatctggagaaactactccttggatgaaattgagaggaacttttgtctacaactttcgaagtcttatgaaaaggttgaaaaggccctcagtgcaggggacccctgtaaaggtggctacgtgtcttttaattatctaaagattgtcctcgacacttttgtataccaaataccaagaagaatttttatccagttaatgaaaag

SEQ ID NO: 17024 - DNA, 501 bp, Homo sapiens
  SIMILAR (298)..(417): 771254mologous to Homo sapiens dJ874C20.1 (Zinc Finger Protein ZFP47 LIKE),accession number AL021997,Smith-Waterman Score= 157.
atggagcttacatttggagggagcaaacaaatgatgaaacacgtgcatttatacacagctaccgaatacagtgagagattgatgaatgatgaagaagaaggccaacaggaatgcggttactttagaacaccaggaccagagcgggtgggaagggagtggaaagtttatctgacatggtacctcttttgtgaagtggcagctgaggagactctggcagtcaccatggccaacaaaaagcccaaggaagaagtcaaaactgagaacaacgatcatattaacttgaaggtggcagggcagaatggttctgtggcagaactctcatctgattgtgggtcaaaagaccctcattccagagaggttctgtctcatatcctggaggaaggaatgctgcacaggggtcaagaacaatctaaacaggccttactgggtttagatcataccctttacattcaatcacattttgacacagttgcgcatacttcaatcatacctatccaatga

SEQ ID NO: 17025 - DNA, 426 bp, Homo sapiens
  SIMILAR (53)..(337): 981254mologous to Homo sapiens SMT3B protein,accession number X99585,Smith-Waterman Score=491.
  misc_feature (1)...(426): n = a,t,c or g
gacctggtacctcttttgtgaagcggcagctgatgagactccggcgctcgccatggccgacgaaaagcccaaggaaggagtcaagactgagaacaacgatcatattaatttgaaggtggcggggcaggatggttctgtggtgcagtttaagattaagaggcatacaccacttagtaaactaatgaaagcctattgtgaacgacagggattgtcaatgaggcagatcacattccgatttgacgggcaaccaatcaatgaaacagacacacctgcacagttggaaatggaggatgaagatacaattgatgtgttccaacagcagacgggaggtgtctactgaaaagggaacctgcttctttactccagaactcttgttctttaaagaccaagattacattctcaattagaanactggcatttgggtcc

SEQ ID NO: 17026 - DNA, 396 bp, Homo sapiens
  SIMILAR (152)..(394): 831254mologous to Homo sapiens BC-2 protein,accession number AF042384,Smith-Waterman Score=352.
  misc_feature (1)...(396): n = a,t,c or g
cccacgcgtccgccggaaacggcggcggcggcgacaggaccgaggggccttagttggtgggcaagtcggggatcccagaaagagaagcgtgacccggaagcggaaacgggtgtccgtcccagctccggcctgccagtgagcttctaccatcatggacctattgttcgggcgccggaagacgccagaggagctggaccgcgagcgacagaaactagagacccaggagaagaaaatcattgcagacattaagaagatggccaagcaaggccagatggatgctgttcgcatcatggcaaaagacttggtgcgcacccggcgctatgtgcgcaagtttgtattgatgcgggccaacatccaggctgtgtccctcaagatccagacacttcagtccaacan

SEQ ID NO: 17027 - DNA, 912 bp, Homo sapiens
  SIMILAR (997)..(659): 311254mologous to Homo sapiens Human secreted protein HUSXE77, SEQ ID NO:180,accession number Y86265,Smith-Waterman Score =98.
  misc_feature (1)...(912): n = a,t,c or g
ctcaggcagaagtcaaggtctcacgaatattttgggctttcaagtggaggttgggtggaaagcgcccaccccggtactggcttgggtcactcgggcgggactcaaaacatgaaacactcggacgcgcagaggaaacgggagctgttgcgcatgcgctcggacgctggcccgttccggggcacgggcgcacgcgcgctcctggagtttcccaaccttccgggtgcgggcggggcatgttacctcacgtcgtttaatccggaaacggcgggggcggcgacaggaccgaggggccttagttggtgggcaaggcggggatcccagaaagagaagcgcgacccggaagcggaaacgggtgtccgtcccagctccggagagaggcccctgctggaccgtggatcccgggcggcagtgcgggcggcagcgtacgaggccttctacttctccccggagtccggtgcctcgcttctccctgggaccctgtcatcaacatcgaggtctccaacaccacctttngctttggtgccgggcccactgactgtcctcggtgtatagtgcgacccgaaatctccatcatcccgtcctcagtgtacaggatgccccagcgcccccaaccgtctccctcagcattcagggtccccaaatcctaatgccttgtcctgagcttcacagccccacattcacctgttcttggcctgccagtgagcttctaccatcatggacctattgttcgggcgccggaagacgccagaggagctactgcggcagaaccagagggccctgaaccgtgccatgcgggacatggaccgcgagcgacagaaactagagacccaggagaagaaaatcattgcagacattaagaagattgccaagcaagggcagattgatgctggtcgcatcatggcaaaagacttg

SEQ ID NO: 17028 - DNA, 912 bp, Homo sapiens
  SIMILAR (361)..(447): 1001254mologous to Homo sapiens Secreted protein encoded by gene 113 clone HCE3Q10,accession number W88646,Smith-Waterman Score =153.
ggcccctgctggaccgtggatcccgggcgggcgtgcgggcggcacgtacgaggcccttctactcgcccgggtttccggtgcctcgcttctccctgggaccctgtcgtcaacatcgaggcctgccaattaagcttttaccatcatggacccatttttttcgggcgcccgaagacgccagagagagctactgcggcagaaccatgagggccctgaaccgtgccatgcgggagctgtactgcgagcgacagaaactaaagacccaggagaagaaaatcattgcatacattaagaagatggccaagcaaggccagatggatgctgttcgcattcatgggcaaaagatttggtgcgcacccggcgctatgtgcgcaaagttttgtatttgatgcgggccaacatccagggttgttgtcccttcaagattccagacactcaagtccaacaactcgatggcacaagccatgtaagggtgttaccaagggcatgggcaccatgaacagacagctgaagttgccccagatccagaagatcatgatggagtttgagcggcaggcagagatcatggatatgaaggaggagatgatgaatgatgccattgatgatgccatgggtgatgaggaagatgaagaggagaggtatggggaaactggatgggagggtggagatgtttgcctggccctcacggagtgcatagccctcactgagttctctctcttccctagtgatgctgtggtgtcccaggttctggatgagctgggacttagcctaacagatgagctgtcgaacctcccctcaactgggggctcgcttagtgtggctgctggtgggaaaaaagcagaggccgcagcctcagccctagctgatgctgatgcagacctggaggaacggcttaagaacctgcggagggactga

SEQ ID NO: 17029 - DNA, 1595 bp, Homo sapiens
  SIMILAR (679)..(515): 781254mologous to Homo sapiens Human calcium channel SOC- 3/CRAC-2 C-terminal polypeptide,accession number Y95434,Smith- Waterman Score=234.
  misc_feature (1)...(1595): n = a,t,c or g
cacaaggagaaccaccaggagctcgccctgcaccatggattcgcctgcacattttgtctttctcagttaactcacatcatgccagacacaggacaagggacttccgtgtggatccttcagtgccagccttggactgtggatctggaatctcttgatgcctgtatccagaggacgctctctgccttgtacccaccgtttgaagccacggcagccacggtgctctggcagctgttcagcgtggccgagaggtgccacggtggggacgggctgcactgcctcaccagcttcctcctcccagccaagagggccctgcagcacctgcagcaggaagcctgtctgataagcaacttcagcaaagtctcaggatacaaaatcgacgtgcaaaaatcacaagcattcttatacaccaataacagagaaacagagagccaaatcatgagtgaactcccattcagaattgcttcaaagagaataaaatacctaggaatccaacttacaagggacgtgaaggacctcttcaaggagaaccacaaaccactgctcaatgaaataaaagaggatacaaagaaatggaagaacattccatgctcatgggtaggaagaatcaatatcgtgaaaatggccatactgcccaagctcctcgctacacccccagttaactggggctttaagacattgcccagtgcatcctccatccggcacctgttcgtgtggcggctgccacttctgcctcccatcgaggcttccccgaccaccctgcctcccatcgaggcttccccgaccaccctgcctcccatcgaggcttccccgaccaccctgcctctcatcgaggcttccctgaccaccctgcctctcatcgagccttccctgaccacccggcctctcatcgatgcttccccgaccaccctgcctcccatcgaggcttccccgaccacccggcctctcatcgagccttccctgaccagccggcctcccatcgagccttccccgaccaccctgcatcccatcgaggcttcccagaccacccggcatcccatcgaggcttccccgaccacccggcctctcatcgaggcttccccgaccacccggcatctcatcgagccttccccgaccacccggcctctcatcaaggcttccccgaccacccggcctctcatcgagccttccccgaccacccggcctcccatcgaggcttccccgaccacccggcctctcatcgaggcttccccgaccaccatgcctcccatcgaggcttccctgaccacccggcctctcatcgagccttccctgaccacccggcctctcatcaaggcttccccgaccacccggcctcccatcgaggcttccccgaccaccctattcccatcgatgaagatactaccnnnnnnnnnnnnnnnnnnnncagtagttcatcatgagggagtggacagtgagtgggacccggcctgctgtgttccagggcctccggggagaggacaggcctctggggagtggacagtgagtgggacccggcctgctgtgttccagggcctctggggagtggacagtgagtgggacccggcctgctgtgttccagggcctctggggagtggaca

SEQ ID NO: 17030 - DNA, 431 bp, Homo sapiens
  SIMILAR (11)..(220): 611254mologous to Homo sapiens PRO1546,accession number AF116638,Smith-Waterman Score=220.
actgagcatgcctgcaggctccatgtctactacaggctatcctggggtctgcagtaccacatcatacagaactcactgttatatcccagtgacctcttctgttactcttagctccagtgatttaagccctacctttggacactgcttacccagtagctaccaaggaaatctctggctcctggattactgccaagaatcctacggtgaagcaccaacctgcaaatctcccagctgtgagcccaagacctgcagtaccactggttgtgacccgtcaaactcctctgtgccctgcaactccccatcagcaggccaagtcttcagtgtctgtgaaactaccaacgtcagccccagccccagctgcagcccaagcacccagaccaatgggtatgtatgcaattgccacatacccactcgaaatgcatacacagccc

SEQ ID NO: 17031 - DNA, 1157 bp, Homo sapiens
  SIMILAR (332)..(162): 431254mologous to Homo sapiens Human secreted protein sequence SEQ ID NO:103,accession number Y87064,Smith-Waterman Score =97.
tgttggaagttctggccagggcaatcaggcaagagaaagaaataaagggtattcaattaggaaaagaggaagtcaaattgtccctgtttgcagatgacatgattgtatatctagaaaaccccatcgtctcagcccaaaatctccttaaactgataagcaacttcagcaaagtctcaggatacaaaatcaatgtgcaaaaatcacaagcattcctatacaccaataacagacaaacagagagccaaatcatgagtgaactcccattcacaattgcttcaaagagaataaaatacctaggaatccaacttacaagggatgcaaaggacgtcttcaaggagaactacaaaccactgctcaatgaaataaaagaggacacaaacaaatggaagaacattccatgctcatggataggaagaatcaatatcgtgaaaatggccatactgcccaggaattggaaaaaactacttcaaagttcatatggaaccaaaaaagcccgcatcaccaagacaatcctaagcaaaaagaacaaagctggaggcatcacgctacctaacttcaaactatactacaaggctacagtaaccaaaacagcatggtactggtaccaacacagagatatagaccaatggaacagaacagaggcctcagaagtaacaccacacatctacaaccatctgatctttgacaaacctgacaaaaacaagaaatggggaaaggattccctgtttaataaatggtgctgggaaaactggctagccatatgtagaaagctgaaactggatctcttccttacaccttatacaaaaattaatccaaggtggattaaagacttaaatcttagacctagaaccataaaaaccctagaagaaaacctaggcagtatctttagggacataggcatgagcaagggcttcatgactaaaacaccaaaagcaaaggcaacaaaagccaaaacagacaaatgggatctaattaaactaaagagcttctgcacggcaaaagaaactaccatcagagtgaacaggcaacctacagaatgggagaaaatttttgcaatctatccatctgacaaagggctaatatccagaatctataaagaactcaaacgaatttacaagaaaaaaacaaccccatcaaaaagtgggcaaagggtatga

SEQ ID NO: 17032 - DNA, 891 bp, Homo sapiens
  SIMILAR (442)..(891): 961254mologous to Homo sapiens putative p150,accession number U93564,Smith-Waterman Score=733.
atgcagctgaaagccaaggctcgagaactacgtgaagaatgcagaagcctcaggagccgatggaatcaactggaagaaagggtatcagtgatggaagatgaaatgaatgaaatgaagcgagaagggaagtttagagaaaaaagaataaaaagaaacgaacaaagcctccaagaaatatgggactatgtgaaaagaccaaatctacgtctgattggtgtacctgaaagtgacggtgagaatgcaaccaggttggaaaacactctgcaggatatcatccaggagaacttccccaatctagcaaggcaggccaacattcagattcaggaaatacagagaatgccacaaagatactcctcaagaagagcatctccaagacacataattgtcagattcaccaaagttgaaatgaaggaaaaaatgttaagggcagccagagagaaagtgttggaagttctggccagggcaatcaggcaggagaaggaaataaagggtattcaattaggaaaagaggaagtcaaattgtccctgtttgcagatgacatgattgtatatctagaaaaccccatcatctcagcccaaaatctccttaagctgataagcaacttcagcaaactctcaggatacaaaatcaatgtgcaaaaatcacaagcattcttatacaccaataacagacaaacagagagtcaaatcatgagtgaactcccattcacaattgcttcaaagagaataaaatacctaggaatccaacttacaagggacgtgaaggacctcttcaaggagaactacaaaccactgctcaatgaaataaaagaggatacaaacaaatggaagaacagtccatgctcatgggtaggaagaatcaatatcatgaaaatggccatactgcccaag

SEQ ID NO: 17033 - DNA, 2723 bp, Homo sapiens
  SIMILAR (895)..(218): 501254mologous to synthetic construct lac repressor,accession number A14595,Smith-Waterman Score=350.
cccccctcgagtagcctaactgggaggcaccccccagtaggggcagactgacacatcacacacctgggtactcctctgagacaaaacttccagaggaacgatcaggcagcaacatttgctgctcaccaatatctgctgttctgcagcctctgctgctgatacccaggcaaacagggtctggattggacctccagcaaactccaacatacctgcagctgagggtcctgactcttagaaggaaaactaacaaacagaaaggaatagcatcaacatcaacaaaaaggacatccacaccaaaaccccatctgtacgtcaccatcatcaaagaccaaagttacataaaaccacaaagatggggaaaaaacatagcagaaaagctgaaaattctaaaaatcagagtggctctctccctccaaaggaatgcagctcctcaccagcagtggaacaaagctggacggagaatgagtttgatgagttcacagaagaaggcttcagaagtgattgaaagtcaaatgaatgaaataaagggagaagagaagtttagagaaaaaagagtaaaaagaaacgaacaaagcctacaagaaatatgggactatgtgaaaagaccagatctacgtctgattggtgtacctgatagtgacggggagaatggaaccaggttggaaaacactctgcaggatattatccgggagaatttccccaacctagcaaggcaggccagcattcaaattcaggaaatacagagaacgccacaaagatactcctcaagaagagcaactccaagacacataattgtcagattcaccaaagttgaaatgaaggaaaaaatgttaagggcagccagagagaaagaactcaagattaagaaactcactcaaaactgcttaactacatggaaactgaacaacctgctcctgaatgactactgggtacataatgaaatgaagggagaaataaagatgttctttgaaaccaatgagaacatagacacaacataccagaatctctggcatacatttaaggcagtgtgtagagggaaatttatagcactaaatgcgcacaagagaaagcaggaaagatctaagattgacaccctagcatcacaattaaaagaaatagagaagcaagagcaaacacattcaaaagctagcagaagacaagaaataactaagatcagagtagaactgaaggagatagagacacaaaaaagccttcaaaaaatcaatgaatccaggagctggttttttgaaaagatcaacaaaattgatagaccactaccaagactaataaagaagaaaagagagaagaatcaaatagacacaataaaaaatgataaaggggatatcaccaccaatcccacagaaatacaaactatcagcagagaatactataaacacctctatgcaaataaactagaaaatctagaagaaatggataaattcctggacacatacaccctctcaggactaaacaaggaagaagttgaatctctgaatacatcaataacaggctctgaagttgaggcaataattaatagcataccaaccaaaaaaaagtccaggaccagatggattcacagccgaattctaccagagcttagcagagacacaacaaaaaaagagaattttagaccaatatccctgatgaacatcgatgtgaaaatcctcaataaaatgctggcaaacggaatccagcagcacatcaaaaagcttatccaccatgatcaagtgggcttcatccctgggatgcaaggctggttcaacatacacaaatcaataaatgtaatccagcatataaacagaaccaaggacaaaaaccacatgattatctcaatagatgcagaaaaggcctttgacaaaattcaacagcccttcatgctaaaaactctcaataaattagatattgatgggacatatctcaaaataataagagctatttatgacaaacccacagccaatatcatactgaatgggcaaaaactggaagcattccctttgaaaagcagcacaagacagggatgccctctctcaccacacctattcaacatagtgttggaagttttggccagggcaatcaggcaagagaaagaaataaagggtattcaattaggaaaagaggaagtcaaattgtccctgtttgcagatgacatgattgtatatttagaaaaccccatcatctcagcccaaaatctccttaagctgataagcaacttcagcaaagtctcaggatacaaaatcaatgtgcaaaaatcacaagcattcctatacaccagtaacagacaaacagagagtcaaatcatgagtgaactcccattcacaattgcttcaaagagaataaaatacctagaaatacaacttacaagggatgtgaaggacctcttcaaggagaactacaaaccactgctcaacgaaataaaagaggacacaaacaaatggaagaacattccatgctcatggataggaagaatcaatattgtgaaaatggccatattgcccaaggatgacaaaaaatgtgtcagtgatgatcatgatgctgacaatgacagtgacaatgacggcgataactttctgcaagtctcagcagcaaaatcttacatctctcattactttcctgtgataaggctcctcacagcatactggaggagactctccaacagccttgaaaaggcaaagggccatgatgtggaagggccatgtggcaaggaattagtagttggcctttag

SEQ ID NO: 17034 - DNA, 2937 bp, Homo sapiens
  SIMILAR (232)..(462): 771254mologous to Homo sapiens PRO2221,accession number AF116695,Smith-Waterman Score=282.
atggataaattcctcgacatatacactctcccaagtctaaaccaggaagaagttgaatctctgaatagaccaataacaggagctgaaattgtggcaataatcaatagtttaccaaccaaaaagagtccaggaccagatggattcacagccgaattctaccagaggtacaaggaggaactggtaccattccttctgaaactattccaatcaatagaaaaagagggaatccttcctaactcattttatgaggccagcatcattctgataccaaagccgggcagagacacaaccaaaaaagagaattttagaccaatatccttgatgaacattgatgcaaaaatcctcaataaaatactggcaaaacgaatccagcagcacatcaaaaagcttatccaccatgatcaagtgggcttcatccctgggatgcaaggctggttcaatatatgcaaatcaataaatgtaatccagcatataaacagagccaaagacaaaaaccacatgattatctcaatagatgcagaaaaagcctttgacaaaattcaacaacccttcatgctaaaaactctcaataaattagtgttggaagttctggccagggcaattaggcaggagaaggaaataaagggtattcaattaggaaaagaggaagtcaaattgtccctgtttgcagacgacatgattgtatatctagaaaaccccattgtctcagcccaaaatctccttaagctgataagcaacttcagcaaagtctcaggatacaaaatcaatgtacaaaaatcacaagcattcttatacaccaataacagacaaacagagagccaaatcatgagtgaactcccattcacaattgcttcaaagagaataaaatacctagggatccaacttacaagggatgtgaaggacctcttcaaggagaactacaaaccactgctcaaggaaataaaagaggatacaaacaaatggaagaacattccatgctcatgtgtaggaagaatcaatatcgtgaaaatggccatactgcccaaggtaatttacagattcaatgccatccccataaagctaccaatgactttcttcacagaattggaaaaaactactttaaggttcatatggaaccaaaaaagagcccgcatcgccaaggcaatcctaagccaaaagaacaaagctgtaggcatcaccctacctgacttcaaactatactacaaggctacagtaaccaaaacagcatggtactggtaccaaaacagagatatagatcaatggaacagaacagagccctcagaaataacgccgcttatctacaactatcagatctttgacaaacctgagaaaaacaagcaatggggaaaggattccctatttaataaatggtgctgggataactggctagccatatgtagaaagctgaaactggatcccttccttacaccttatacaaaaatcaattcaagatggattaaagccttaaaccttagacctaaaaccataaaaaccctagaagaaaacctaggcattaccattcaagacataggcacgggtaaggacttcatgactaaaacaccaaaagcaatggcaacaaaagacaaaattgacaaatgggatctaattaaactaaagagtttctgcacagcaaaagaaactaccatcagagtgaacaggctacctacaaaatgggagaaaatttttgcaacctactcatctgacaaagggctaatatccagaatctacaatgaactcaaacaaatttacaagaaaaaaacaaacaaccccatcaaaaagtgggagaaggacatgaacagacacttctcaaaagatgacattcttgcagccaaaaaacacatgaaaaaatgctcatcactggccatcagagaaatgcaaatcaaaaccacaatgagataccatctcacaccagttagaatggcaatcattaaaaagccgggaaacaacagccagaaagacatccctgattggagaaatggacctaagagaaaagatcggcagataacgacatttagaggtcctacaaagctgcaggtggtagttcctacactgggggcggcgcctggacgcgggtgtccctggccaaggcggcctcgctgtcctggaagggagggtgaagagctgcatcccgcactaggcggcgaaagagggcagcgccaagcggcggggtccggaggcgctcgacggctcgcgcccagcgccggagacgggctgtgtgttgggccagtggaagacaccggagaaacccagacgtggaagaccgggcagcctggacttcgcgagccctggtggggctggcggcccacagagcccccacctgccccgagctcccacagcgaggagtggccgcgccgcccgccagtgcgccgggctccgagaccggcaggggagcacgcgggcgaaggaggggccgccgtcgctgacaccaccgccttcagcccttggcttccgcgcgtcggaggctggcacctccaggttcaccgcggcggccggagctgtgcgggggccagacggttcggcgggagccggggctgggacctgggtgacctgtcgtccgcccctgtagcgagtctccagtgggcatgtttcaggtgggcaggtccagcatccccaaacctgccccccgcagcctggaggacctggactcagtgcagcgtgtcctgttacacaggtcagtgcagggccccgggacgcggggcgagaccgtcctcttgccccggaaatgttggcgagggaggggccgcttttctttctggggtctttctggaagcatctgacttgggattcgccttagtgcggcgctggccgcgaagggccgttgggacctgcaccccaccctttccagaatcgggtgccagcgatccaccctgtcccgctgccgagactggccccgcgcgggtcccggtcacccatctcctccggaaaacgctaccttag

SEQ ID NO: 17035 - DNA, 2301 bp, Homo sapiens
  SIMILAR (1)..(531): 981254mologous to Escherichia coli No definition line found,accession number U00039,Smith-Waterman Score=866.
atggacctgaaggccattatccttagtgaaatgactcagaaacaatcagatgtacctagtaccatcattttgtggattgcgcgaactttccccggacgtatgccatatccgatgggccggtcgctgaacccttccggaaagaaatgccggtgcaattttatcaagccagaaatacccaatcaggcagacatttatccctgcgggctatttgttgggtgcacatgggttgaagactcagccagtgtcagggaaaggcagtcttccaaaaaaaaaaaaaatagaaaactgaagcttgtgatcagcagcttccagttaagatctccgaagttggagaagcggcccagaatgaggctcaaaaggcgaatggccggtgaacgggtgcaaacttcttgggacctcttgccaggctgtgcttatgcaattctaacgtgtatgtggaaaaaggacacagggtcccctcctgcctctgaaggggtcatggatggcagtagggagaccctagctgcccgagatgtggtactgcaccagacatctggccatatccacaacaagaatatctccactcacctaactggcaacaacaaacaaggccatggcactgagagtagtggctctggcatctttgccgtgagcacactggatgggatgctgaagctcatggaggaagcagacaagctgttgtggtcagcgcagctggtgaaggattcttctgaacccctaccctacctcctcaagctatctttgatattggcaggatggggaatacacattacagaagtgcaggatttgactctgggcatgaaagatggcagcagccctagggtgaccacaagctatacacctcatggtctttttggtgaaagaagggacaagttgaccctttgcccattttcttatggacctcacccatcacaccagcaagtcaggacccttagctgcaggtctgttggagtttgccggagatccaacgcagaccctgtttgcctgggtatcagcagtggaggctgcagaacagcagatattggtgaacagcagatgttgctgcctgatcgttcctctggaagttttgtctcagaggagtacccggccatatttcagaagatgtatggaaatgcctggatgcccaggaagaagtttgctgcaggggtggggccctcatggagaacctctgcgagggcaatgcagacgggaaatgtggggttggagcccacacacagaatccctagtggggcactgccttgtggagctgtgagaagagggccaccgttttccagaccccagaatggtagatcgactggcagcttgcaccatgtgcatggaaaagctgcagacgctcaagaccagcctgtgaaagcagctgggagggaggctatatcctgcaaatccaaaggagcagagcttcccaagaccaggggaacccacctcttgcatcagcgtgacctggatgtgagacatggagtcaaaggagatcatattggtgctctaagattcgactgcgttgctggatttctgacttccatgggacctgtatccccttgttttggtgaatacatctcacaagacctgatggttttaaaaacaggagtttccgtgcacaaactctttcacttttggcatgctgccattcatgtgagacatgacttgctcctctttgccttcttccatgattgtgaggtctccccagccatgtggaaattgttggaagttctggccagggcaatcaggcaagagaaagaaataaagggtattcacttaggaaaagaagaagtcaaattctccctgtttgcagatgacatgattgtatacttagaaaaccccatcatctcagcccaaaatctccttaagctgataagcaacttcagcaaagtctcaggatacaaagtgaatgtgcaaaaatcacaagtattcctatacaccaataacagacaaacagagagccaaatcatgaatgaattcacattcacaattgcttcaaagagaataaaatacctagggatcatacttacaagggatgggaagcacctcttcaaggagaactacaaaccactgttcaacgaaataaaagaggacacaaacaaatggaagaacattccatactcgtgcataggaagaatcaatattgtgaaaatggccacactgcccaagatgaggttgggtgctcaacagcatgctccttcatggttgaaagaaactgctgatagtacatatgttcctggcttcagtagtggtacaggagggacgtcaactgatgtgtttgcatcggtcgatactgggaaaaatttccagacaagaacattttga

SEQ ID NO: 17036 - DNA, 482 bp, Homo sapiens
  SIMILAR (15)..(482): 931254mologous to Homo sapiens retinoic acid receptor-epsilon (AA 1 - 448),accession number X07282,Smith-Waterman Score=785.
tattgccctacgcgtccgccagatcagaggaactcgttccaagcccgccatctcctttgtcttcccctcgatatttcaaaccctgctccgtgggccaggacaaagggtcagggtaccactatggggtcagcgcctgtgagggatgtaagggctttttccgcagaagtattcagaagaatatgatttacacttgtcaccgagataagaactgtgttattaataaagtcaccaggaatcgatgcctatactgtcgactccagaagtgctttgaagtgggaatgtccaaagaatctgtcaggaatgacaggaacaagaaaaagaaggagacttcgaagcaagaatgcacagagagctatgaaatgacagctgagttggacgatctcacagagaagatccgaaaagctcaccaggaaactttcccttcactctgccagctgggtaaatacaccacgaattccagtgctgaccatcgagtccgactg

SEQ ID NO: 17037 - DNA, 1029 bp, Homo sapiens
  SIMILAR (361)..(630): 651254mologous to Homo sapiens retinoic acid receptor beta 4,accession number AF157483,Smith-Waterman Score=287.
atgtacaaagaagcaccgccggatattcacagacttggaggggagggctttgatgcaggcttgacagtgtttgctcctctctttgcctctccattccctcccagaggtgcaccgtacctgaaagcagcttgtcaaactcccaggtctggcataggtgctactgccatctcgggggaggctctgaaaggagctgtctcctctggagttgaccccaggtgggcatcccatttgagggtaaagctcttggaaaaatccttctctcttcaagagatccagtccacagaaaaagttctctcacaacaagccaagactctgagcctcctgggtgagcccaagctctccaaacaactgacgggcacatgcatatacagaaagacaaacctagctctctgccggggtcccgcggctgccaaatcccttttccagggagctgtcaggaatgacaggaacaagaaaaagaaggagacttcgaagcaagaatgcacagagagctatgaaatgacagctgagttggacgatctcacagagaagatccgaaaagctcaccaggaaactttcccttcactctgccagctgggtaaatacaccacgcgttccactaggaatggcctttcactgagattggaaataaagagaggcaggaaaaagagaagtgagataaaaagaccagactctgaagagcaaatgagccgggctttgagaagcaacacccagggtggcactctggggtccacctcgcccattggtgtcagccaggagaaacactggcatgtctgccaggccgagggagagtctcggcttaacctcaaccagtcttcactgagtttggggaacactgtcccatcccagagcagggacacaggccaggacaagactggacacttcaacaagtggtcagaggtgagacttgaacctaaacagtctgactccagggcagctcttttaaccagtatactatacacagaatcccttgagagggttgccaaaaagggagaatggaagctggggccattggcggcatctagctag

SEQ ID NO: 17038 - DNA, 623 bp, Homo sapiens
  SIMILAR (1)..(336): 811254mologous to Homo sapiens ribosomal protein L29,accession number Z49148,Smith-Waterman Score=453.
atgcgctttgccaagaagcacaacaagaagggcctaaagaagatgcaggccaacaatgccaaggccatgagtgcacgtgcaaaggctatcaaggccctggtaaagcccaaggaagttaagcccaagatcccaaagggtgtcagccacaagctccatcgacttgcccacattgcccactccaagcttgggaagcatgatcatgcccacattgccaaagggctcaggctgtgtgggccaaaggccaagaccaaggatcaaaccaaggcccagcctgcagctccagcttcaattccagctcaggctcccaaaggcgcccaggccactacaaagggttcaaattgggccctaaattgcattccaaagaccctgctcctggaacagccttctgcaatcaacacaacctcttggaggttttactgcgtctggcactcgcaggttcccctgctctcactctctctctctctgtttccttgctgtgaaaaacgtgttgaccatcaggcatatggcagaataattggatttcaggcaagccaatgtgagaaaccagaaggcaaatctggtcatttgtgggtatacacaggacaaagaaaaaggagtgtagagaaacagaggctgtcctggag

SEQ ID NO: 17039 - DNA, 580 bp, Homo sapiens
  SIMILAR (242)..(385): 501254mologous to Mus musculus ribosomal protein,accession number L08651,Smith-Waterman Score=103.
ataagaatctctgtgtttttataagaatctcttaagggagcggaccccaagttcctgaggaacatgcgctttgccaataagcacaacaagaaaggcctaaaaaagatgcaggccaacagtgccagggccacgagtgcacgtgccgacgctatcaaggcccttgtaaagcccaaggagggtaagcccgacatcccaaagggtgtcagccgcaagctcgatccacttgcctacattgcccacccccaggcttgggaaatgtgctcattcctgcattgccaaggggctcaagctatgtcggttacaggccaaggacaaagatcaaaccaaggcccaggctgcagctccagcttaggctcccaaaggtgcccggacacctacgaaggcttcagagtagatatctctgtctgccaatgtgaggacagaaggactgtctatcaggtgtttgaaagtgtggctaagaagtatgatgtgatgaatgatatgatgagtcttggtatccatcgtgtttggaaggatttgctgctctggaagatgcacccacttcctgggacccagctgcttgatgttgctggaggcacag

SEQ ID NO: 17040 - DNA, 510 bp, Homo sapiens
  SIMILAR (115)..(387): 651254mologous to Sus scrofa ribosomal protein L29/cell surface heparin binding protein HIP,accession number AB016798,Smith -Waterman Score=283.
atgggccaggacattcctacagaattccaaaaaccgttcacctgtggccagcagcagaagaaggtatgcaaagagaagagaaagaaggatgcaatgtccacacatgctaaaggaagaaatggtatcaagaaacctcagtcacaaagatcggtgtctctaaagggggtggatcccaaattcctgaggaacatgccctttgccaagaagcacagcaagaagggcctaaagaagatgcaggccaacagtgccaaggccatgagtgcacgtgccaaggctatcaaggccctcgtaaagcccaaggagacacaggcctctactcgggagccttcacggctgcctgagcacctttgggagcctgagctggagccagaactgaggctggagctgaagccgtggtctgagccttgtttggagccttggcctttgggtcaagtgactggtattgcgggcagctcagacgctgcaggagcagatggccaagtagaagattatgaaatgtgcaaaaattga

SEQ ID NO: 17041 - DNA, 811 bp, Homo sapiens
  SIMILAR (210)..(617): 451254mologous to Homo sapiens ribosomal protein L29,accession number U10248,Smith-Waterman Score=241.
gtaccgattttccggtccaacaattcgttcaattcagaaccacaccacacacaaccagggccgaaaatggcacaaaaaagggatcaagaaaccccgagcacaaagatacgaatctcttaaggggcctgaagtgtaaccctctggtcagggtgtaacctgcctcctgagggcagattggctatctcccttgcttggcagcggcacttatggtgggccccaagttcctgaggaacacgcgctttgccaagaagcacaacaaaaagggcctaaagaagatgcaggccaacaatgccaaggccatgagtgcacgttgccgaggcttatcaaggccctcgtaaagcccaaggaggttaagcccaagatcccaaagggtggtcagccgcaagctccgatcgactttgcctgacattgtccacccccaagcttgggaaaagtgctcgtgccccgtatttgccaaggggcttcaggctgtgcctgccaaatgccaatgccaagtccatatccagccaaggccaaggccaaggccaaggccaaggatcaaaccaaggcccagggttcaagccccagcttcaagttccagcttcaggggtcccaaacgtacccagggcccttacaaaagggtttcagagtagatattctcttgcccaacatgaaggacaagaaaggacttgggtgcgaccccccaccccccgcccctggggttaccattttgcatggggctggggttctcctgttgctatttgtacaaataaacctgaggcaggaaaaagaaggaacgaaaaagaaaaattgtgccaaggggatggatata

SEQ ID NO: 17042 - DNA, 636 bp, Homo sapiens
  SIMILAR (331)..(564): 531254mologous to Mus musculus CDV-1R protein,accession number Y10495,Smith-Waterman Score=179.
atgatagaccatctgcaagctggagaaagagaaaatccaatagcggctcagtccaaggccaaaagcctcaaaaccagggaagacgacagtgcagccttcagcctgcagccaaaaggcctagagccccaggaagctgttggtcctgtaccaaaattccagaaagaagaaagaaagaaagagagagagagaggaaggaaggaaggaaggaaggaaggaaggaaggaaggaaggaaggaaggaaggaagggaggaaggaaaagaaagaaagacaaagaaagaggcaagcaagcaggagctcgacataaagcacactcttcatatactttaggcaagataaatgaaataaacacagaaattaaccagttgattgaaaagaaaatgatgagaaatgagcccattgaaggcaaactctcactgtataggcaacaggttgagacagctcagaatcatcaatggatgcttaaaatagcaaggcaacttcgagttgaaaaagagagagaagaatatcttgcacaacagaaacaggaacaaaagaatcagataaatgaaataaacacagaaattaaccagttgattgaaaagaaaatgatgagaaatgagcccattgaaggcaaactctcactgtataggcaacag

SEQ ID NO: 17043 - DNA, 410 bp, Homo sapiens
  SIMILAR (235)..(408): 981254mologous to Homo sapiens ubiquitous Kruppel like factor,accession number AB015132,Smith-Waterman Score=293.
  misc_feature (1)...(410): n = a,t,c or g
tttcgtgagagaaaaaaatgcaacctcccaaaatatagagcaaagattgtattaggagcgaacagcgctgcagaaatagatggcagcttcgtgtcattgactgnnnnnnnnnnnnnnnnnnnngccactggatgtctgccttcttggggggtgagccagacagactgacaaacaaacagccccaactgtgttcgggggagggtttcgcctcccgttttgcccggcagcagcagcatggacgtgttggctagttatagtatattccaggagctacaacttgtccacgacaccggctacttctcagctttaccatccctggaggagacctggcagcagacatgccttgaattggaacgctacctacagacggagccctggaggatctcagagacctttggtgaggacttgga

SEQ ID NO: 17044 - DNA, 1362 bp, Homo sapiens
  SIMILAR (451)..(1359): 961254mologous to Homo sapiens ubiquitous Kruppel like factor,accession number AB015132,Smith-Waterman Score=1502.
tccgagaagcgatcgcgagagaaaaaaatgcaacctcccaaaataaagagcaaagattgcattaggagcgaacagcgctgcagaaatagatggcagcttcgtgtcagtgagtttgcatcccccttcctgatccacgagctggagtgattagagccctggaagggaattgttactcccgtggagaagtccccttttcctggcagtcgtctgcactgtacacgctggatgcctctctccatccaccccactcactcgctcctctctcacctcctctctccctctcctgcattgatttttttttttcctttttagttgactgaaacaaaacaaaacaaaagggccactggatgtctgccttcttggggggtgagccagacagactgacaaacaaacagccccaactgtgttcgggggagggtttcgcctcccgttttgcccggcagcagcagcatggacgtgttggctagttatagtatattccaggagctacaacttgtccacgacaccggctacttctcagctttaccatccctggaggagacctggcagcagacatgccttgaattggaacgctacctacagacggagccccggaggatctcagagaccttttggtgaagacttggactggtttccttcaacgctttcccttccccgtgcattgaggaaagcttccgtcgcttagaccccctgctgctccccgtggaagcggccatctgtgagaagagctcggcagtggacatcttgctctctcgggacaagttgctatctgagacctgcctcagcctccagccggccagctcttctctagacagctacacagccgtcaaccaggcccagctcaacgcagtgacctcattaacgcccccatcgtcccctgagctcagccgccatctggtcaaaacctcacaaactctctctgccgtggatggcacggtgacgttgaaactggtggccaagaaggctgctctcagctccgtaaaggtgggaggggtcgcaacagctgcagcagccgtgacggctgcgggggccgttaagagtggacagagcgacagtgaccaaggagggctaggggctgaagcatgtcccgaaaacaagaagagggttcaccgctgtcagtttaacgggtgccggaaagtttatacaaaaagctcccacttaaaggcccaccagaggactcacacaggtgagaagccttataagtgctcatgggagggatgtgagtggcgttttgcacgaagcgatgagctcacgaggcactacaggaaacacacaggtgcaaagcccttcaaatgcaaccactgcgacaggtgtttttccaggtctgaccatcttgccctccacatgaagagacatatctaa

SEQ ID NO: 17045 - DNA, 951 bp, Homo sapiens
  SIMILAR (556)..(660): 971254mologous to Homo sapiens ubiquitous Kruppel like factor,accession number AB015132,Smith-Waterman Score=177.
atgccacaagctgaaggaaaggttgatcctgcagaggaaattcaggtcagaactgacaaagatcacagcatcagcaccacttcttctgtaagtgtcaacacgcagttccaacctgtggccctccacagttgtgaggattacagaagcgagggtgtcaaggagatggtccaaggagctcagaaaaggtggcacatgggaaaaagtagggaagctcctttcaaacagcaggctttgtggtatgaattccatggtcagaaacaggaatgctatgggagacctatggatgttatctgggatgggttccctcctctgaatccctccacagtggcctacactacaatccaagttcaggaaaaaacgagaaccttatttaaggtagtggcaagaaatgaatggattaactggacatttaaaaagtatttgatagaacttggtgataggagatgtaacagatctctctatgtctacatcccaactccagaaaacgagaaatcgagttcctcctctcaccatcgaagctctgcagacacctcgctggagaccccatgcagcagcatggacgtgttggctagttatagtatattccaggagctacaacttgtccacgacaccggctacttctcagctttaccatccctggaggagacctggcagcagagtgccgagctgagcagccggtgcgagctgcctgcgtttcagtcgccaacacacatccctgcgcacacgttgtcgggtttgctgtcccctatcagagacctgccgaacttctggggttcggaggagccgggtgggaagggaagctctagtttagtttctacaggcaaaggatttttcacccctcggaaccccctcattttttgccttaaccctctccaactgccagccactctcaccttaaaacccttagccaacttattcagcgtcatgcttatagccaatgctgatgcatag

SEQ ID NO: 17046 - DNA, 446 bp, Homo sapiens
  SIMILAR (202)..(113): 931254mologous to Homo sapiens Human secreted protein clone dh1073_12 protein sequence SEQ ID NO:106,accession number Y94950,Smith-Waterman Score=154.
gcatgtcatgatcctttcagggtgccctgatttctggtcctccccaaccagctccctgtccctgcttctgggtgctccttccttcctgagctcccagggttcctcaaggtcacttcctcaggtactcgcatgggcatgtcactgactttacatgctgctgcagctccttggtgagctggctctggtcatgcgacaggaactcagttttcttctgtgtgaaacaggaacaatagtttcattcgtcattcagtttctctcaaggtttcacgagatcatacctttagtgactgaggtgtggtttaggacttcaaggttggatggcccaggcgggaaacagagtggagagctcagtaggccgtctgagactgctgctggcggtagccaccgcggcgcatgtagccctcgtttttgcggtagccgtccttctggtctcgggaattccaccg

SEQ ID NO: 17047 - DNA, 10917 bp, Homo sapiens
  SIMILAR (1)..(10914): 1001254mologous to Homo sapiens polycystic kidney disease- associated protein,accession number L39891,Smith-Waterman Score= 18946.
atgccgcccgccgcgcccgcccgcctggcgctggccctgggcctgggcctgtggctcggggcgctggcggggggccccgggcgcggctgcgggccctgcgagcccccctgcctctgcggcccagcgcccggcgccgcctgccgcgtcaactgctcgggccgcgggctgcggacgctcggtcccgcgctgcgcatccccgcggacgccacagcgctaacggcgatggcaaaagcagatggagacgtgaaaaagtacgggagcaagcgaggggctctggccctgacccacggccactcactcctcagagacgtctcccacaacctgctccgggcgctggacgttgggctcctggcgaacctctcggcgctggcagagctggatataagcaacaacaagatttctacgttagaagaaggaatatttgctaatttatttaatttaagtgaaataaacctgagtgggaacccgtttgagtgtgactgtggcctggcgtggctgccgcgatgggcggaggagcagcaggtgcgggtggtgcagcccgaggcagccacgtgtgctgggcctggctccctggctggccagcctctgcttggcatccccttgctggacagtggctgtggggccaccctggtggggccccacggacctctggcctctggccagctagcagccttccacatcgctgccccgctccctgtcactgccacacgctgggacttcggagacggctccgccgaggtggatgccgctgggccggctgcctcgcatcgctatgtgctgcctgggcgctatcacgtgacggccgtgctggccctgggggccggctcagccctgctggggacagacgtgcaggtggaagcggcacctgccgccctggagctcgtgtgcccgtcctcggtgcagagtgacgagagcctcgacctcagcatccagaaccgcggtggttcaggcctggaggccgcctacagcatcgtggccctgggcgaggagccggcccgagcggtgcacccgctctgcccctcggacacggagatcttccctggcaacgggcactgctaccgcctggtggtggagaaggcggcctggctgcaggcgcaggagcagtgtcaggcctgggccggggccgccctggcaatggtggacagtcccgccgtgcagcgcttcctggtctcccgggtcaccaggagcctagacgtgtggatcggcttctcgactgtgcagggggtggaggtgggcccagcgccgcagggcgaggccttcagcctggagagctgccagaactggctgcccggggagccacacccagccacagccgagcactgcgtccggctcgggcccaccgggtggtgtaacaccgacctgtgctcagcgccgcacagctacgtctgcgagctgcagcccggaggcccagtgcaggatgccgagaacctcctcgtgggagcgcccagtggggacctgcagggacccctgacgcctctggcacagcaggacggcctctcagccccgcacgagcccgtggaggctgggatggggtctgtggagctgaggcggccccctgcccaccaggtcatggtattcccgggcctgcgtctgagccgtgaagccttcctcaccacggccgaatttgggacccaggagctccggcggcccgcccagctgcggctgcaggtgtaccggctcctcagcacagcagggaccccggagaacggcagcgagcctgagagcaggtccccggacaacaggacccagctggcccccgcgtgcatgccagggggacgctggtgccctggagccaacatctgcttgccgctggacgcctcctgccacccccaggcctgcgccaatggctgcactgagggggagcacgtggtggacgtggtggtggaaaacagcgccagccgggccaacctcagcctgcgggtgacggcggaggagcccatctgtggcctccgcgccacgcccagccccgaggcccgtgtactgcagggagtcctagtgaggtacagccccgtggtggaggccggctcggacatggtcttccggtggaccatcaacgacaagcagtccctgaccttccagaacgtggtcttcaatgtcatttatcagagcgcggcggtcttcaagctctcactgacggcctccaaccacgtgagcaacgtcaccgtgaactacaacgtaaccgtggagcggatgaacaggatgcagggtctgcaggtctccacagtgccggccgtgctgtcccccaatgccacgctagcactgacggcgggcgtgctggtggactcggccgtggaggtggccttcctgtggacctttggggatggggagcaggccctccaccagttccagcctccgtacaacgagtccttcccggttccagacccctcggtggcccaggtgctggtggagcacaatgtcatgcacacctacgctgccccaggtgagtacctcctgaccgtgctggcatctaatgccttcgagaaccggacgcagcaggtgcctgtgagcgtgcgcgcctccctgccctccgtggctgtgggtgtgagtgacggcgtcctgagccagccggctgccaaccacacctatgcctcgaggggcacctaccacgtgcgcctggaggtcaacaacacggtgagcggtgcggcggcccaggcggatgtgcgcgtctttgaggagctccgcggactcagcgtggacatgagcctggccgtggagcagggcgcccccgtggtggtcagcgccgcggtgcagacgggcgacaacatcacgtggaccttcgacatgggggacggcaccgtgctgtcgggcccggaggcaacagtggagcatgtgtacctgcgggcacagaactgcacagtgaccgtgggtgcggccagccccgccggccacctggcccggagcctgcacgtgctggtcttcgtcctggaggtgctgcgcgttgaacccgccgcctgcatccccacgcagcctgacgcgcggctcacggcctacgtcaccgggaacccggcccactacctcttcgactggaccttcggggatggctcctccaacacgaccgtgcgggggtgcccgacggtgacacacaacttcacgcggagcggcacgttccccctggcgctggtgctgtccagccgcgtgaacagggcgcattacttcaccagcatctgcgtggagccagaggtgggcaacgtcaccctgcagccagagaggcagtttgtgcagctcggggacgaggcctggctggtggcatgtgcctggcccccgttcccctaccgctacacctgggactttggcaccgaggaagccgcccccacccgtgccaggggccctgaggtgacgttcatctaccgagacccaggctcctatcttgtgacagtcaccgcgtccaacaacatctctgctgccaatgactcagccctggtggaggtgcaggagcccgtgctggtcaccagcatcaaggtcaatggctcccttgggctggagctgcagcagccgtacctgttctctgctgtgggccgtgggcgccccgccagctacctgtgggatctgggggacggtgggtggctcgagggtccggaggtcacccacgcttacaacagcacaggtgacttcaccgggcccggccctggccggcagcggcaaaggcttctcgctcaccgtctcgaggccggcacctaccatgtgcagctgcgggccaccaacatgctgggcagcgcctgggccgactgcaccatggacttcgtggagcctgtggggtggctgatggtggccgcctccccgaacccagctgccgtcaacaaaagcgtcaccctcagtgccgagctggctggtggcagtggtgtcgtatacacttggtccttggaggaggggctgagctgggagacctccgagccatttaccacccatagcttccccacacccggcctgcacttggtcaccatgacggcagggaacccgctgggctcagccaacgccaccgtggaagtggatgtgcaggtgcctgtgagtggcctcagcatcagggccagcgagcccggaggcagcttcgtggcggccgggtcctctgtgcccttttgggggcagctggccacgggcaccaatgtgagctggtgctgggctgtgcccggcggcagcagcaagcgtggccctcatgtcaccatggtcttcccggatgctggcaccttctccatccggctcaatgcctccaacgcagtcagctgggtctcagccacgtacaacctcacggcggaggagcccatcgtgggcctggtgctgtgggccagcagcaaggtggtggcgcccgggcagctggtccattttcagatcctgctggctgccggctcagctgtcaccttccgcctgcaggacacagatgagcccagggccgagcactcctacctgaggcctggggactaccgcgtgcaggtgaacgcctccaacctggtgagcttcttcgtggcgcaggccacggtgaccgtccaggtgctggcctgccgggagccggaggtggacgtggtcctgcccctgcaggtgctgatgcggcgatcacagcgcaactacttggaggcccacgttgacctgcgcgactgcgtcacctaccagactgagtaccgctgggaggtgtatcgcaccgccagctgccagcggccggggcgcccagcgcgtgtggccctgcccggcgtggacgtgagccggcctcggctggtgctgccgcggctggcgctgcctgtggggcactactgctttgtgtttgtcgtgtcatttggggacacgccactgacacagagcatccaggccaatgtgacggtggcccccgagcgcctggtgcccatcattgagggtggctcataccgcgtgtggtcagacacacgggacctggtgctggatgggagcgagtcctacgaccccaacctggaggacggcgaccagacgccgctcagtttccactgggcctgtgtggcttcgacacagagggaggctggcgggtgtgcgctgaactttgggccccgcgggagcagcacggtcaccattccacgggagcggctggcggctggcgtggagtacaccttcagcctgaccgtgtggaaggccggccgcaaggaggaggccaccaaccagacggtgctgatccggagtggccgggtgcccattgtgtccttggagtgtgtgtcctgcaaggcacaggccgtgtacgaagtgagccgcagctcctacgtgtacttggagggccgctgcctcaattgcagcagcggctccaagcgagggcggtgggctgcacgtacgttcagcaacaagacgctggtgctggatgagaccaccacatccacgggcagtgcaggcatgcgactggtgctgcggcggggcgtgctgcgggacggcgagggatacaccttcacgctcacggtgctgggccgctctggcgaggaggagggctgcgcctccatccgcctgtcccccaaccgcccgccgctggggggctcttgccgcctcttcccactgggcgctgtgcacgccctcaccaccaaggtgcacttcgaatgcacgggctggcatgacgcggaggatgctggcgccccgctggtgtacgccctgctgctgcggcgctgtcgccagggccactgcgaggagttctgtgtctacaagggcagcctctccagctacggagccgtgctgcccccgggtttcaggccacacttcgaggtgggcctggccgtggtggtgcaggaccagctgggagccgctgtggtcgccctcaacaggtctttggccatcaccctcccagagcccaacggcagcgcaacggggctcacagtctggctgcacgggctcaccgctagtgtgctcccagggctgctgcggcaggccgatccccagcacgtcatcgagtactcgttggccctggtcaccgtgctgaacgagcaccgagcccagatacgcaagaacatcacggagactctggtgtccctgagggtccacactgtggatgacatccagcagatcgctgctgcgctggcccagtgcatggggcccagcagggagctcgtatgccgctcgtgcctgaagcagacgctgcacaagctggaggccatgatgctcatcctgcaggcagagaccaccgcgggcaccgtgacgcccaccgccatcggagacagcatcctcaacatcacaggagacctcatccacctggccagctcggacgtgcgggcaccacagccctcagagctgggagccgagtcaccatctcggatggtggcgtcccaggcctacaacctgacctctgccctcatgcgcatcctcatgcgctcccgcgtgctcaacgaggagcccctgacgctggcgggcgaggagatcgtggcccagggcaagcgctcggacccgcggagcctgctgtgctatggcggcgccccagggcctggctgccacttctccatccccgaggctttcagcggggccctggccaacctcagtgacgtggtgcagctcatctttctggtggactccaatccctttccctttggctatatcagcaactacaccgtctccaccaaggtggcctcgatggcattccagacacaggccggcgcccagatccccatcgagcggctggcctcagagcgcgccatcaccgtgaaggtgcccaacaactcggactgggctgcccggggccaccgcagctccgccaactccgccaactccgttgtggtccagccccaggcctccgtcggtgctgtggtcaccctggacagcagcaaccctgcggccgggctgcatctgcagctcaactatacgctgctggacggccactacctgtctgaggaacctgagccctacctggcagtctacctacactcggagccccggcccaatgagcacaactgctcggctagcaggaggatccgcccagagtcactccagggtgctgaccaccggccctacaccttcttcatttccccggggagcagagacccagcggggagttaccatctgaacctctccagccacttccgctggtcggcgctgcaggtgtccgtgggcctgtacacgtccctgtgccagtacttcagcgaggaggacatggtgtggcggacagaggggctgctgcccctggaggagacctcgccccgccaggccgtctgcctcacccgccacctcaccgccttcggcgccagcctcttcgtgcccccaagccatgtccgctttgtgtttcctgagccgacagcggatgtaaactacatcgtcatgctgacatgtgctgtgtgcctggtgacctacatggtcatggccgccatcctgcacaagctggaccagttggatgccagccggggccgcgccatccctttctgtgggcagcggggccgcttcaagtacgagatcctcgtcaagacaggctggggccggggctcaggtaccacggcccacgtgggcatcatgctgtatggggtggacagccggagcggccaccggcacctggacggcgacagagccttccaccgcaacagcctggacatcttccggatcgccaccccgcacagcctgggtagcgtgtggaagatccgagtgtggcacgacaacaaagggctcagccctgcctggttcctgcagcacgtcatcgtcagggacctgcagacggcacgcagcgccttcttcctggtcaatgactggctttcggtggagacggaggccaacgggggcctggtggagaaggaggtgctggccgcgagcgacgcagcccttttgcgcttccggcgcctgctggtggctgagctgcagcgtggcttctttgacaagcacatctggctctccatatgggaccggccgcctcgtagccgtttcactcgcatccagagggccacctgctgcgttctcctcatctgcctcttcctgggcgccaacgccgtgtggtacggggctgttggcgactctgcctacagcacggggcatgtgtccaggctgagcccgctgagcgtcgacacagtcgctgttggcctggtgtccagcgtggttgtctatcccgtctacctggccatcctttttctcttccggatgtcccggagcaaggtggctgggagcccgagccccacacctgccgggcagcaggtgctggacatcgacagctgcctggactcgtccgtgctggacagctccttcctcacgttctcaggcctccacgctgaggcctttgttggacagatgaagagtgacttgtttctggatgattctaagagtctggtgtgctggccctccggcgagggaacgctcagttggccggacctgctcagtgacccgtccattgtgggtagcaatctgcggcagctggcacggggccaggcgggccatgggctgggcccagaggaggacggcttctccctggccagcccctactcgcctgccaaatccttctcagcatcagatgaagacctgatccagcaggtccttgccgagggggtcagcagcccagcccctacccaagacacccacatggaaacggacctgctcagcagcctgtccagcactcctggggagaagacagagacgctggcgctgcagaggctgggggagctggggccacccagcccaggcctgaactgggaacagccccaggcagcgaggctgtccaggacaggactggtggagggtctgcggaagcgcctgctgccggcctggtgtgcctccctggcccacgggctcagcctgctcctggtggctgtggctgtggctgtctcagggtgggtgggtgcgagcttccccccgggcgtgagtgttgcgtggctcctgtccagcagcgccagcttcctggcctcattcctcggctgggagccactgaaggtcttgctggaagccctgtacttctcactggtggccaagcggctgcacccggatgaagatgacaccctggtagagagcccggctgtgacgcctgtgagcgcacgtgtgccccgcgtacggccaccccacggctttgcactcttcctggccaaggaagaagcccgcaaggtcaagaggctacatggcatgctgcggagcctcctggtgtacatgctttttctgctggtgaccctgctggccagctatggggatgcctcatgccatgggcacgcctaccgtctgcaaagcgccatcaagcaggagctgcacagccgggccttcctggccatcacgcggtctgaggagctctggccatggatggcccacgtgctgctgccctacgtccacgggaaccagtccagcccagagctggggcccccacggctgcggcaggtgcggctgcaggaagcactctacccagaccctcccggccccagggtccacacgtgctcggccgcaggaggcttcagcaccagcgattacgacgttggctgggagagtcctcacaatggctcggggacgtgggcctattcagcgccggatctgctgggggcatggtcctggggctcctgtgccgtgtatgacagcgggggctacgtgcaggagctgggcctgagcctggaggagagccgcgaccggctgcgcttcctgcagctgcacaactggctggacaacaggagccgcgctgtgttcctggagctcacgcgctacagcccggccgtggggctgcacgccgccgtcacgctgcgcctcgagttcccggcggccggccgcgccctggccgccctcagcgtccgcccctttgcgctgcgccgcctcagcgcgggcctctcgctgcctctgctcacctcggtgtgcctgctgctgttcgccgtgcacttcgccgtggccgaggcccgtacttggcacagggaagggcgctggcgcgtgctgcggctcggagcctgggcgcggtggctgctggtggcgctgacggcggccacggcactggtacgcctcgcccagctgggtgccgctgaccgccagtggacccgtttcgtgcgcggccgcccgcgccgcttcactagcttcgaccaggtggcgcagctgagctccgcagcccgtggcctggcggcctcgctgctcttcctgcttttggtcaaggctgcccagcagctacgcttcgtgcgccagtggtccgtctttggcaagacattatgccgagctctgccagagctcctgggggtcaccttgggcctggtggtgctcggggtagcctacgcccagctggccatcctgctcgtgtcttcctgtgtggactccctctggagcgtggcccaggccctgttggtgctgtgccctgggactgggctctctaccctgtgtcctgccgagtcctggcacctgtcacccctgctgtgtgtggggctctgggcactgcggctgtggggcgccctacggctgggggctgttattctccgctggcgctaccacgccttgcgtggagagctgtaccggccggcctgggagccccaggactacgagatggtggagttgttcctgcgcaggctgcgcctctggatgggcctcagcaaggtcaaggagttccgccacaaagtccgctttgaagggatggagccgctgccctctcgctcctccaggggctccaaggtatccccggatgtgcccccacccagcgctggctccgatgcctcgcacccctccacctcctccagccagctggatgggctgagcgtgagcctgggccggctggggacaaggtgtgagcctgagccctcccgcctccaagccgtgttcgaggccctgctcacccagtttgaccgactcaaccaggccacagaggacgtctaccagctggagcagcagctgcacagcctgcaaggccgcaggagcagccgggcgcccgccggatcttcccgtggcccatccccgggcctgcggccagcactgcccagccgccttgcccgggccagtcggggtgtggacctggccactggccccagcaggacaccccttcgggccaagaacaaggtccaccccagcagcacttag

SEQ ID NO: 17048 - DNA, 14934 bp, Homo sapiens
  SIMILAR (5137)..(9693): 931254mologous to Homo sapiens polycystic kidney disease 1 protein,accession number L43619,Smith-Waterman Score=7485.
atggggtctgtggagctgaggcggccccctgcccaccaggtcatggtattcccgggcctgcgtctgagccgtgaagccttcctcaccacggccgaatttgggacccaggagctccggcggcccgcccagctgcggctgcaggtgtaccggctcctcagcacagcagggaccccggagaacggcagcgagcctgagagcaggtccccggacaacaggacccagctggcccccgcgtgcatgccagggggacgctggtgccctggagccaacatctgcttgccgctggacacctcctgccaccccaggcctgcgccaatggctgcacgtcaggggccagggctactcggggccccctatgcgctatggagagagttcctcttctccgttcccgcggggccccccgcgcagtactcggtcaccctccacagccaggatgtcctcatgctccctggtgacctcgttggcttgcagcacgacgctggccctggcgccctcctgcactgctcgccggctcccggccaccctggtccccaggccccgtacctctccgccaacgcctcgtcatggctgccccacttgccagcccagctggagggcacttgggcctgccctgcctgtgccctgcggctgcttgcagccacggaacagctcaccgtgctgctgggcctgaggcccaaccctgggctgcggctgcctgggcgctatgaggtccgggcagaggtgggcaatggcgtgtccaggcacaacctgtcctgcagctttgacgtggtctccccagtggctgggctgcgggtcatctaccctgccccccgcgacggccgcctctacgtgcccaccaacggctcagcctcggtgctccaggtggactctggtgccagcgccacggccacggctcgctggcctgggggcagtgtcagcgcccgctttgagaatgcctgccctgccctggtggccaccttcgtgcccagctgcccctgggagaccaatgataccctgttctcagtggtagcactgccgtggctcggtgagggggagcacgtgatggacgttgtggtggaaaacagcgccagccgggccaacctcagcctgcgggtgacggcggaggagcccatctgtggcctccgcgccacgcccagccccgaggcccgtgtactgcagggagtcccagtcctgctggctggctcctcaggctacctggtgggctttaaattcctggaaagtcacggctctgacagcggctccgctaactcattccaccgtctcatttcacgaaatgaatttaaaactccgctccctgacctcacacgagtccccaggtacagccccgtggtggaggccggctcggacatggtcttccggtggaccatcaacgacaagcagtccctgaccttccagaacgtggtcttcaatgtcatttatcagagcgcggcggtcttcaagctctcactgacggcctccaaccacgtgagcaacgtcaccgtgaactacaacatcaccgtggagcggatgaacaggatgcagggcctgcgggtctctacagtgccagccgtgctgtcccccaatgccacgctggcactgacggcgggcgtgctggtggactcggccgtggaggtggccttcctgtggacctttggggatggggagcaggccctccaccagttccagcctccgtacaacgagtccttcccggttccagacccctcggtggcccaggtgctggtggagcacaatgtcacccacacctacgctgccccaggtgagtacgtcctgaccgtgctggcatctaatgccttcgagaaccggacgcagcaggtgcctgtgagcgtgtgcgcctccctgccctctgtgagcgtgtgcgcctccctgactggggcctgctgggtccagctgggtccagtacaccagaacgcacaccccagtgtcctctgccctgtgtatgcccttccgccgcccaggttggaaggtggcaaaccggatgagtatcctgggaggggaccttccagcaggccaaatagacctgtgttggaggtaaccccactcccacgccaggtgctgatccgcagtggccgggtgcccattgtgtccttggagtgtgtgtcctgcaaggcacaggccgtgtacgaagtgagccgcagctcctacgtgtacctggagggccgctgcctcaattgcagcagcggctccaagcgagggggatacaccttcacgctgacggtgctgggccgctctggcgaggaggagggctgcgcctccatccccctgtcccccaaccgcccgccgctggggggctcttgccgcctcttcccactgggcgctgtgcacgccctcaccaccaaggtgcacttcgaatgcatgggctggcatgacgcggaggatgctggcgccccgctggtgtacgccctgctgctgcagcgctgtcgccagggccactgcgaggagttctgtgtctacaagggcagcctctccggctacggagccgtgctgcccccgggtttcaggccacacttcgaggtgggcctggccgtggtggtgcaggaccagctgggagccgctgtggtcgccctcaacaggtctctggccatcaccctcccagagcccaacggcagcgcaatggggctcacagtctggctgcacgggctcaccgctagtgtgctcccggggctgctgcggcaggccgatccccagctcgtcatcgagtactcgctggccctggtcactgtgctgaacgagtacgagcgggccctggacgtggcggcagagcccaagcacgagcggcagcgccgagcccagatacgcaagaacatcacggagactctggtgtccctgagggtccacactgtggatgacatccagcagatcgctgctgcgctggcccagtgcatggggcccagcagggagctcgtatgccgctcgtgcctgaagcagacgctgcacaagctggaggccatgatgcgcatcctgcaggcagagaccaccgcgggcaccgtgacgcccaccgccatcggagacagcatcctcaacatcacaggagacctcatccacctggccagctcagacgtgcgggcaccacagcgctcagagctgggagccgagtcaccatcgcggatggtggcgtcccaggcctacaacctgacctctgccctcacgcccatcgtcacgcgctcccgcgtgctcaacgaggagcccctgacgctggcgggtggcctcgatggcgttccagacacaggccggcgcccagatccccatcgagcggctggcctcagagcgcgcctcaccgtgaaggtgcccaacaactcggactgggctgcccggggccaccgcagctccgccaactccgttgtggtccagccccaggcctccgtcggtgctgtggtcaccctggacagcagcaaccctgcggccgtgctgcatctgcagctcaactatacgctgctggacggccgctacctgtctgaggaacccgagccctacctggcagtctacctgcactcggagccccggcccaatgagcgcaactgctcggctagcaggaggatccgcccagagtccctccagggtgccgaccaccggccctacaccttcttcatttccccggggaccagagacccagtggggagttaccgtctgaacctctccagccacttccgctggtcggcgctggaggtgtccgtgggcttgtacacgtccctgtgccagtacttcagcgaggaggacgtggtgtggcggacagaggggctgctgcccctggaggagacctcgccccgccaggccgtctgcctcacccgccacctcaccgccttcggcaccagcctcttcgtgcccccaagccatatccgctttgtgtttcctgagccaacagcggatgtaaactacatcgtcatgctgacatgtgctgtgtgcctggtgacctacatggtcatggccgccatcctgcacaagctggaccagttggatgccagccggggctgcgccatccccttctgtgggcagcggggccgcttcaagtacgagatcctcgtcaagacaggctggggccggggctcaggtaccacggcccacgtgggcatcatgctgtatggggtggacagccggagcggccaccggcacctggacggcgacagagccttccaccgcaacagtctggacatcttccagatcgccaccccgcacagcctgggtagcgtgtggaagatccgagtgtggcacgacaacaaagggctcagccctgcctggttcctgcagcacatcatcgtcagggacctgcagacggcacgcagcaccttcttcctggtcaatgactggctttcggtggagacggaggccaacgggggcctggtggagaaggaggtgctggccgcgagtaaggcctcgttccgtgttcccactccgtcacgcagccctgttgcgcttccggcgcctgctggtggctggctgcagcgtggcttctttgacaagcacatctggctctccatatgggaccggccgcctcggagctgtttcactcgcatccagagggccacctgctgcgttctcctcatctgtctcttcctgggcgccaacgccgtgtggtacggggctgttggagactctgcctacagcacggggcgtgtgtccaggctgaacccgctgagcgtcgacacagtcgctgttggcctggtgtccagcgtggttgtctatcccgtctacctggccatcctctttctcttccggatgtcccggagcaaggtggctgggagcccgagccccacacctgccgggcagcaggtgctggacgtcgacagctgcctggactcatccgtgctggacagctccttcctcacgttctcaggcctccacgctgagcttggactcaagaccctgtgcacctctcagcaggcctttgctggacagatgaagagtgacttgtttctggatgattctaagagatcgggcccggtccccgtccccttccctcccccctgccctaagccacctccacctctgtcctggctgcctcagggcgccctgaaaggaccaggacatgcgggaattaaaattgtcctggaagacatctttactttatggagacaggtggaaaccaaagttcgagctaaaatccgtaagatgaaggtgacaacaaaagtcaaccgtcatgacaaaatcaatggaaagaggaagaccgccaaagaacaatcaccccttctgcaagaaagcctctttgcaaccggagacgtctcccacaacctgctccgggcgctggacgttgggctcctggcgaacctctcggcgctggcagagctggatataagcaacaacaagatttctacgttagaagaaggaatatttgctaatttatttaatttaagtgaaataaacctgagtgggaacccgtttgagtgtgactgtggcctggcgtggctgccgcgatgggcggaggagcagcaggtgcgggtggtgcagcccgaggcagccacgtgtgctgggcctggctccctggctggccagcctctgcttggcatccccttgctggacagtggctgtggtgaggagtatgtcgcctgcctccctgacaacagctcaggcaccgtggcagcagtgtccttttcagctgcccacgaaggcctgcttcagccagaggcctgcagcgccttctgcttctccaccggccagggcctcgcagccctctccgagcagggctggtgcctgtgtgggtcagcccagccctccagtgcctccttcgcctgcctgtccctctgctccggccccccgccgcctcctgcccccacctgtaggggccccaccctcctccagcacgtcttccctgcctccccaggggccaccctgctagcagccttccacatcgctgccccgctccctgtcactgccacacgctgggacttcggagacggctcccccgaggtggatgccgctgggccggctgcctcgcatcgctatgtgctgcctgggcgctatcacgtgatggccgtgctggccctgggggccggctcagccctgctggggacagacgtgcaggtggaagcggcacctgccgccctggagctcgtgtgcccgtcctcggtgcagagtgacgagagcctcgacctcagcatccagaaccgtgttggttcaggcctggaggctgcctacagcatcgtggccctgggcgaggagccggcccgagcggtgcacccgctctgcccctcggacacggagatcttctctggcaacgggcactgctaccgcctggtggtggagaaggcggcctggctgcaggcgcaggagcagtgtcgggcctgggccggggccaccctggcaatggtggacagtcccgccgtgcagcgcttcctggtctcccgggtcaccaggagcctagacatgtggatcggcttctcgactgtgcagggggtggaggtgggcccagcgccgcagggcgaggcctttagcctggagagctgccagaactggctgcccggggagccacacccagccacagccgagcactgcgtccggctcgggcccaccgggtggtgtaacaccgacctgtgctcagcgctgcacagctacgtctgcgagctgcggcctggaggcccagtgcaggatgccgagaacctcctcgtgggagcgcccagtggggacctgcagggacccctgatgcctctggcacggcagtacggcctctcagccccgcatgagcccgtggaggtcatggtattcccgggcctgcgtctgagccgtgaagccttcctcaccacggccgaatttgggacccaggagctccggcggcccgcccagctgcggctgcaggtgtaccggctcctcagcacagcagggaccccggagaacggcagcgagcctgagagcaggtccccggacaacaggacccagctggcccccgcgtgcatgccagggggacgctggtgccctggagccaacatctgcttgccgctggacgcctcctgccaccccaggcctgcgccaatggctgcacgtcaggggccagggctactcggggccccctatgcgctatggagagagttcctcttctccgttcccgcggggccccccgcgcagtactcggtcaccctccacggccaggatgtcctcatgctccctggtgacctcgttggcttgcagcacgacgctggccctggcgccctcccgcactgctcgccggctcccggccaccctggtccccaggccccgtacctctccgccaacgcctcgtcatggctgccccacttgccagcccagctggagggcacttgggcctgccctgcctgtgccctgcggctgcttgcagccacggaacagctcaccgtgctgctgggcctgaggcccaaccctgggctgcggctgcctgggcgctatgaggtccgggcagaggtgggcaatggcgtgtccaggcacaacctgtcctgcagctttgacgtggtctccccagtggctgggctgcgggtcatctaccctgccccccgcgacggccgcctctacgtgcccaccaacggctcagcctcggtgctccaggtggactctggtgccagcgccacggccacggctcgctggcctgggggcagtgtcagcgcccgctttgagaatgcctgccctgccctggtggccaccttcgtgcccggctgcccctgggagaccaatgataccctgttctcagtggtagcactgccgtggctcggtgagggggagcacgtgatggacgttgtggtggaaaacagcgccagccgggccaacctcagcctgcgggtgacggcggaggagcccatctgtggcctccgcgccacgcccagccccgaggcccgtgtactgcagggagtcccagtgaggtacagccccgtggtggaggccggctcggacatggtcttccggtggaccatcaacgacaagcagtccctgaccttccagaacgtggtcttcaatgtcatttatcagagcgcggcggtcttcaagctctcactgacggcctccaaccacgtgagcaacgtcaccgtgaactacaacatcaccgtggagcggatgaacaggatgcagggcctgcgggtctccacagtgccggccgtgctgtcccccaatgccacgctggcactgacggcaggcgtgctggtggactcggccgtggaggtggccttcctgtggacctttggggatggggagcaggccctccaccagttccagcctccgtacaacgagtccttcccggttccagacccctcggtggcccaggtgctggtggagcacaatgtcacgcacacctacgctgccccaggtgagtacgtcctgaccgtgctggcatctaatgccttcgagaaccggacgcagcaggtgcctgtgagcgtgcgcgcctccctgccctccgaggctgtgggtgtgagtgacggcgtcctggtggccggccggcccgtcaccttctacccgcatctgctgccctcgcctgggggtgttctttacacgtgggacttcggggacggctcccctgtcctgacccagagccagccggctgccaaccacacctatccctcgaggggcatctaccacgtgcgcctggaggtcaacaacacggtgagcggtgcggcggcccaggcggatgtgcgcgtctttgaggagctccgcgggctcagcgtggacatgagcctggccgtggagcagggcgcccccgtggtggtcagtgccgcggtgcagacgggcgacaacatcacgtggaccttcgacatgggggacggcaccgtgctgtcgggcccagaggccacagtggagcatgtgtacctgcgggcacagaactgcacagtgaccgtgggtgcggccagccccgccggccacctggcccggagcctgcacgtgctggtcttcgtcctggaggtgctgcgcgtcgagcccgccgcctgcatccccactcagcctgacgcgcggctcacggcctacgtcaccgggaacccggcccgctacctcttcgactggacctttggggatggctcctccaacacgaccatgcgggggtgcccgacggtgacacacaacttcacgcgtagcggcacgttccccctggcgctggtgctgtccagccgcgtgaacagggcgcgttacttcaccagcatctgcgtggagccagaggtgggcaacgtcaccctgcagccagagaggcagtttgtgcagctcggggacgaggcccggctggtggcatgtgcctggcccccgttcccctaccgctacacctgggactttggcaccgaagaagccgtccccgcccgtgtcgggggccctgaggtgacgttcatctaccgagacccaggctcctatcttgtgacagtcaccgcgtccaacaacatctccgctgccaatgactcagccctggtggaggtgcaggagcccatgctggtcaccagcatcaaggtcaatggctcccttgggctggagctgcactacctgtgggatctgggggacggtgggcggctcgagggtccggaggtcacccacgcttacaacagcacaggtgacttcaccgttagggtggccggctgcaatgaggtgagccgcagcgaggcctggctcaatgtgacggtgaagcggcgcgtgcgggggctcatcgtcaatgccagctgcacggtggtgcccctgaatgggagcatgagcttcagcacctcgctggaggccggcagtgatgtgcgctattcctgggtgctctgtgaccgctgcacgcccatctctggggctgagaacgaggtgggctccgcccaggacagcatcttcgtctatgtcctgcagctcatagaggggctgcaggtggtgggcggtggccgctacttccccaccaaccacacggtacagctgcaggccgtggtcagggatggcaccaacatctacagctggactgcctggagggacaggggcccggccctggccggcagcggcaaaggcttctcgctcactgcgctcgaggccggcacctaccatgtgcagctgcgggccaccaacatgctgggcagcgcctgggctgactgcaccgtggacttcgtggagcctgtggggtggctgatggtggccgcctccccgaacccagctgccgtcaacacaagtgtcaccctcagtgccgagctggctggtggcagtggtgtcgtatacacttggtccttggaggaggggctgagctgggagacccccgagccatttaccacccacagcttccccacacccggcctgcacttggtcaccatgacggcagggaacccgctgggctcagccaacgccaccgtggaagtggatgtgcaggtgcctgtgagtggcctcagcatcagggccagcgagccgggaggcagcttcgtggcggccgggtcctctgtgcccttttgggggcagctggccacgggcaccaatgtgagctggtgctgggctgtgcccggcggcagcagcaagcgtggccctcatgtcaccatggtcttcccggatgctggcaccttcaacatccggctcaatgcctccaacgcagtcagctgggtctcagccacgtacaacctcacggtggaggagcccatcgtgggcctggtgctgtgggccagcagcaaggtggtggcgcccgggcagcttgtccattttcagatcctgctggctgccggctcagctgtcaccttccgccggcaggtcggcggggccagccccgaagtgctccctgggccccgtttctcccacagcttcccccgcatcggagaccacgtggtgagcgtgcagagcaaaaaccacgtgagctgggcccaggcgcaggtgcgcatcgtggtgctggaggccgtgagcgggctgcaggtgcccaactgctgtgagcctggcatcgccatgggcactgagaggaacttcacagcccgcgtgcagcgcggctctcgggtcgcctacgcctggtatttctcgctgcagaaggtccggggcgactctctgttcatcctgtcgggccgcgacgtcacctacacgccgtggccgcggggctgttggagatccagtgagaaccgcacgctggtgctggaggttcaggacgccgtccagtatgtggccctgcggagcggcccctgcttcaccaaccgcttggcgcagtttgaggccgccaccagccccagcccccggcgcgtggcctaccactgggactttggggatgggtccccagggcaggacacagataagcccagggccgagcactcctacctgaggcctggggactaccgcgtgcaggtgaacgcctccaacctggtgagctttttcgtggcgcaggccacggtgaccgtccaggtgctggcctgccgggagccggaggtggacgtggtcctgcccctgcaggtgctgatgcgacgatcacagcgcaactgcctggatgcctacgttgacctgcgcgactgtgtcacctaccagactgagtaccgctgggaggtgtaccgcaccgccagctgccagcggccggggtgcccggcgcgtgtggccctgcccggcgtggacgtgagccggcctcagctggtgctgccgcggctggcgctgcctgtggggcactactgctttgtgtttgtcgtgtcatttggggacacgccactggcacggagcatccaggccaatgtgacggtggcccccgagcgcctggtgcccatcactgagggtggctcctaccgcgtgtggtcagacacacaggacctggtgctggatgggagcgagtcctacgaccccaacctggaggacggcgaccagacgccgctcagtttccagtgggcctgtgtggcttcgacacagagggaggctggcgggtgtgcgctgaactttgggccccgcgggagcagcacggtcaccattccacgggaacggctggcagctggcgtggagtacaccttcagcctcaccgtgtggaaggccggccgcaaggaggaggccaccaaccagacgtgctggtggaggccgcgcgctctcccctctctgtttctgatgcaaattctatgtaacacgacagcctgcttcagctttgcttccttccaaacctgccacagttccacatacagtcttcaagccacatatgctctagtgacaaaagctacacagtcccccagcaataccaacaggtccagctggctccagtacaccagaacacacaccccagtgtcctctgccctgtgtatgcccttccgccgcccaggttggaaggtggcaaaccggatgagtatcctgggagggggctggcatgacgcggaggatgctggcgccccgctggtgtatgccctgctgctgcagcgctgttgccagggccactgcaaagagttctgtgtctacaagagcagcctctccggctacggagccgtgctgcccccgggtttcaggccacacttcgaggtgggcctggccgtggtggtgcaggaccagctgggagccgctgtggtcgccctcaacaggtctctggccatcaccctcccagagcccaacggcagcgcaatggggctcacagtctggctgcaccggctcaccgctagtgtgctcccggggctgctgcggcaggccgatccccagcacgtcatcgagtactcgctggccctggtcactgtgctgaacgaggggcccagcagggagctcgtatgccgctcgtgcctgaagcagacgctgcacaagctggaggccatgatgcgcatcctgcaggcagagaccaccgcgggcaccgtgacgcccaccgccatcggagacagcatcctcaacatcacaggagacctcatccacctggccagctcagacgtgcgggcaccgcagcgctcagagctgggagccgagtcaccattgcggatggtggcgtcccaggcctacaacctgacctctgccctcatgcgcatcctcacgcgctcccgcgtgctcaacgaggagcccgctttcagcagggccccggccaacctcagtgacgtggtgcagctcgtctttctggtggactccaatccctttctctttggctatatcagcaactacaccgtctccaccaaggtggcctcgatggcgttccagacacaggccggcgcccagatccccatcgagcggctggcctcagagcgcgccatcaccgtgaaggtgcccaacaactcggactgggctgcccggggccaccgcagctccgccaactccgttgtggtccagccccaggcctccgtcggtgctgtggtcaccctggacagcagcaaccctgtggccgtgctgcatctgcagctcaactatacgctgctggacggccgctacctgtctgaggaacccgagccctacctggcagtctacctgcactcggagccccggcccaatgagcgcaactgctcggctagcaggaggatccgcccagagtccctccagggtgccgaccaccggccctacaccttcttcatttccccggggaccagagacccagtggggagttaccgtctgaacctctccagccacttccgctggtcggcgctggaggtgtccgtgggcttgtacacgtccctgtgccagtacttcagcgaggaggatgtggtgtggcggacagaggggctgctgcccctggaggagacctcgccccgccaggccgtctgcctcacccgccacctcaccgccttcggcgccagcctcttcatgcccccaagccatgtacgctttgtgtttcctgagccgacagcggatgtaaactacatcgtcatgctgacatgtgctgtgtgcctggtgacctacatggtcatggccgccatcctgcacaagctggaccagttggatgccagccggggctgcgccatccccttctgtgggcagcggggccgcttcaagtacgagatcctcgtcaagacaggctggggccggggctcaggtaccacggcccacgtgggcatcatgctgtatggggtggacagccggagcggccaccggcacctggacggcgacagagccttccaccgcaacagtctggacatcttccagatcgccaccccgcacagcctgggtagcgtgtggaagatccgagtgtggcacgacaacaaagggctcagccctgcctggttcctgcagcacatcatcgtcagggacctgcagacggcacgcagcaccttcttcctggtcaatgactggctttcggtggagacggaggccaacgggggcctggtggagaaggaggtgctggctgcgagtcacgcagccctgttgcgcttccggcgcctgctggtggctgagctgcagcgtggcttctttgacaagcacatctggctctccatatgggaccggccacctcgtagctgtttcactcgcatccagagggccacctgctgcgttctcctcatctgcctcttcctgggcgccaacgccgtgtggtacggggctgttggtgactctgcctacagcacggggcatgtgtccaggctgagcccgctgagcgtcgacacagtcgctgttggcctggtgtccagcgtggttgtctatcccgtctacctggccatcctctttctcttccggatgtcccggagcaaggtgctggacatcgacagctgcctggactcgtccgtgctggacagctccttcctcacgttctcaggcctccacgctgaggtgagggctctactgggggtcctgggctgggctgggggtcctgccgccttggcgcagcttggactccagacactgtgcacctctcagcaggcctttgctggacaggtgaagagtgacttgtttctggatgattctaagagatcgggcccggtccccgtccccttccctcccccctgccctaagccacctccacctctgtcctggctgcctcagggcgccctgaaaggaccaggacatgcgggaattaaaattgtcctggaagacatctttactttatggagacaggtggaaaccaaagttcgagctaaaatccgtaagatgaaggtgacaacaaaagtcaaccgtcatgacaaaatcaatggaaagaggaagaccgccaaagaacagtaa

SEQ ID NO: 17049 - DNA, 3012 bp, Homo sapiens
  SIMILAR (316)..(1962): 991254mologous to Homo sapiens polycystic kidney disease 1 protein,accession number L33243,Smith-Waterman Score=2862.
atgtctgcaggagacctcatccacctggccagctcggacgtgcgggcaccacagccctcagagctgggagccgagtcaccatctcggatggtggcgtcccaggcctacaacctgacctctgccctcatgcgcatcctcatgcgctcccgcgtgctcaacgaggagcccctgacgctggcgggcgaggagatcgtggcccagggcaagcgctcggacccgcggagcctgctgtgctatggggggcccccagggcctggctgccacttctccatccccgaggctttcagcggggccctgggcaacctcagggggggcaactacaccgtctgcaccaaggtggcctcgatggcattccagacacaggccggcgcccagatccccatcgagcggctggcctcagagcgcgccatcaccgtgaaggtgcccaacaactcggactgggctgcccggggccaccgcagctccgccaactccgccaactccgttgtggtccagccccaggcctccgtcggtgctgtggtcaccctggacagcagcaaccctgcggccgggctgcatctgcagctcaactatacgctgctggacggccactacctgtctgaggaacctgagccctacctggcagtctacctacactcggagccccggcccaatgagcacaactgctcggctagcaggaggatccgcccagagtcactccagggtgctgaccaccggccctacaccttcttcatttccccggggagcagagacccagcggggagttaccatctgaacctctccagccacttccgctggtcggcgctgcaggtgtccgtgggcctgtacacgtccctgtgccagtacttcagcgaggaggacatggtgtggcggacagaggggctgctgcccctggaggagacctcgccccgccaggccgtctgcctcacccgccacctcaccgccttcggcgccagcctcttcgtgcccccaagccatgtccgctttgtgtttcctgagccgacagcggatgtaaactacatcgtcatgctgacatgtgctgtgtgcctggtgacctacatggtcatggccgccatcctgcacaagctggaccagttggatgccagccggggccgcgccatccctttctgtgggcagcggggccgcttcaagtacgagatcctcgtcaagacaggctggggccggggctcaggtaccacggcccacgtgggcatcatgctgtatggggtggacagccggagcggccaccggcacctggacggcgacagagccttccaccgcaacagcctggacatcttccggatcgccaccccgcacagcctgggtagcgtgtggaagatccgagtgtggcacgacaacaaagggctcagccctgcctggttcctgcagcacgtcatcgtcagggacctgcagacggcacgcagcgccttcttcctggtcaatgactggctttcggtggagacggaggccaacgggggcctggtggagaaggaggtgctggccgcgagcgacgcagcccttttgcgcttccggcgcctgctggtggctgagctgcagcgtggcttctttgacaagcacatctggctctccatatgggaccggccgcctcgtagccgtttcactcgcatccagagggccacctgctgcgttctcctcatctgcctcttcctgggcgccaacgccgtgtggtacggggctgttggcgactctgcctacagcacggggcatgtgtccaggctgagcccgctgagcgtcgacacagtcgctgttggcctggtgtccagcgtggttgtctatcccgtctacctggccatcctttttctcttccggatgtcccggagcaaggtggctgggagcccgagccccacacctgccgggcagcaggtgctggacatcgacagctgcctggactcgtccgtgctggacagctccttcctcacgttctcaggcctccacgctgaggtgaggactctactgggggtcctgggctgggctgggggtcctgccgccttggcgcagcttggactcaagacactgtgcacctctcagcaggcctttgttggacagatgaagagtgacttgtttctggatgattctaagagtctggtgtgctggccctccggcgagggaacgctcagttggccggacctgctcagtgacccgtccattgtgggtagcaatctgcggcagctggcacggggccaggcgggccatgggctgggcccagaggaggacggcttctccctggccagcccctactcgcctgccaaatccttctcagcatcagatgaagacctgatccagcaggtccttgccgagggggtcagcagcccagcccctacccaagacacccacatggaaacggacctgctcagcagcctgtgtgctgaggtccacacggccctgccgttgcactgcagctgcctgcaggattcagtgcagtggcatgcagtgcagggtcttccggctttttgtcggggggaccctgtgacccaagaggctcaagaaactgcccgcccagcagcacagaacctggtgctgatcccgctgcacgcggcgccgcatcaagccgtggcggagatcgacgcgctctacgacgtgtacctggacgtgatcgacaagtggggcaccgacgacatgctgttcctgggcgacttcaacgccgactgcagctatgtgcgggcgcaggactgggccgccatccgtctgaggagcagtgaggtcttcaagtggctcatccctgacagcgccgacaccacggtgggcaactcagactgcgcctacgaccgcattgtggcctgtggcgcccgcctgcgccggagcctgaagccccagtcggccaccgtgcacgacttccaggaggaattcggcctggaccagactcaggcgagtgggccgtggggcggtgctggtcttgggtccccaccgcccgggcgcacgcaggcagcagggagggctcttgccatcagcgaccactttccagtggaggtgaccctcaagttccaccgatga

SEQ ID NO: 17050 - DNA, 363 bp, Homo sapiens
  SIMILAR (52)..(354): 301254mologous to Rattus norvegicus MeCP-2,accession number M94064,Smith-Waterman Score=103.
atgcgggcgctacttggcattgtccattgtgaggcactgtccattgtgaggcaccaccggggtcatcagggattggtggagagggagtataaagccccagggttgacccgttcttcttctcctcctcctcctccaactcctccaggtgcccaagaggccacttctcctcctctaccttccattagttccccacttccagatagagtagaagaagaaagcaggagaacagtcaacggagtagacgaagaggcaagagaacggacgaaagaagcaggatcggacaccgacggaacaacaactaagagtgaagtagaaaagcagaagtacgaagaaaagaaggaagcagagcagaagcgagagtaa

SEQ ID NO: 17051 - DNA, 12879 bp, Homo sapiens
  SIMILAR (1)..(12876): 1001254mologous to Homo sapiens polycystic kidney disease 1 protein,accession number L43619,Smith-Waterman Score=22422.
atgccgcccgccgcgcccgcccgcctggcgctggccctgggcctgggcctgtggctcggggcgctggcggggggccccgggcgcggctgcgggccctgcgagcccccctgcctctgcggcccagcgcccggcgccgcctgccgcgtcaactgctcgggccgcgggctgcggacgctcggtcccgcgctgcgcatccccgcggacgccacagcgctagacgtctcccacaacctgctccgggcgctggacgttgggctcctggcgaacctctcggcgctggcagagctggatataagcaacaacaagatttctacgttagaagaaggaatatttgctaatttatttaatttaagtgaaataaacctgagtgggaacccgtttgagtgtgactgtggcctggcgtggctgccgcgatgggcggaggagcagcaggtgcgggtggtgcagcccgaggcagccacgtgtgctgggcctggctccctggctggccagcctctgcttggcatccccttgctggacagtggctgtggtgaggagtatgtcgcctgcctccctgacaacagctcaggcaccgtggcagcagtgtccttttcagctgcccacgaaggcctgcttcagccagaggcctgcagcgccttctgcttctccaccggccagggcctcgcagccctctcggagcagggctggtgcctgtgtggggcggcccagccctccagtgcctcctttgcctgcctgtccctctgctccggccccccgccacctcctgcccccacctgtaggggccccaccctcctccagcacgtcttccctgcctccccaggggccaccctggtggggccccacggacctctggcctctggccagctagcagccttccacatcgctgccccgctccctgtcactgccacacgctgggacttcggagacggctccgccgaggtggatgccgctgggccggctgcctcgcatcgctatgtgctgcctgggcgctatcacgtgacggccgtgctggccctgggggccggctcagccctgctggggacagacgtgcaggtggaagcggcacctgccgccctggagctcgtgtgcccgtcctcggtgcagagtgacgagagccttgacctcagcatccagaaccgcggtggttcaggcctggaggccgcctacagcatcgtggccctgggcgaggagccggcccgagcggtgcacccgctctgcccctcggacacggagatcttccctggcaacgggcactgctaccgcctggtggtggagaaggcggcctggctgcaggcgcaggagcagtgtcaggcctgggccggggccgccctggcaatggtggacagtcccgccgtgcagcgcttcctggtctcccgggtcaccaggagcctagacgtgtggatcggcttctcgactgtgcagggggtggaggtgggcccagcgccgcagggcgaggccttcagcctggagagctgccagaactggctgcccggggagccacacccagccacagccgagcactgcgtccggctcgggcccaccgggtggtgtaacaccgacctgtgctcagcgccgcacagctacgtctgcgagctgcagcccggaggcccagtgcaggatgccgagaacctcctcgtgggagcgcccagtggggacctgcagggacccctgacgcctctggcacagcaggacggcctctcagccccgcacgagcccgtggaggtcatggtattcccgggcctgcgtctgagccgtgaagccttcctcaccacggccgaatttgggacccaggagctccggcggcccgcccagctgcggctgcaggtgtaccggctcctcagcacagcagggaccccggagaacggcagcgagcctgagagcaggtccccggacaacaggacccagctggcccccgcgtgcatgccagggggacgctggtgccctggagccaacatctgcttgccgctggacgcctcttgccacccccaggcctgcgccaatggctgcacgtcagggccagggctacccggggccccctatgcgctatggagagagttcctcttctccgttgccgcggggccccccgcgcagtactcggtcaccctccacggccaggatgtcctcatgctccctggtgacctcgttggcttgcagcacgacgctggccctggcgccctcctgcactgctcgccggctcccggccaccctggtccccaggccccgtacctctccgccaacgcctcgtcatggctgccccacttgccagcccagctggagggcacttgggcctgccctgcctgtgccctgcggctgcttgcagccacggaacagctcaccgtgctgctgggcttgaggcccaaccctggactgcggatgcctgggcgctatgaggtccgggcagaggtgggcaatggcgtgtccaggcacaacctctcctgcagctttgacgtggtctccccagtggctgggctgcgggtcatctaccctgccccccgcgacggccgcctctacgtgcccaccaacggctcagccttggtgctccaggtggactctggtgccaacgccacggccacggctcgctggcctgggggcagtgtcagcgcccgctttgagaatgtctgccctgccctggtggccaccttcgtgcccggctgcccctgggagaccaacgataccctgttctcagtggtagcactgccgtggctcagtgagggggagcacgtggtggacgtggtggtggaaaacagcgccagccgggccaacctcagcctgcgggtgacggcggaggagcccatctgtggcctccgcgccacgcccagccccgaggcccgtgtactgcagggagtcctagtgaggtacagccccgtggtggaggccggctcggacatggtcttccggtggaccatcaacgacaagcagtccctgaccttccagaacgtggtcttcaatgtcatttatcagagcgcggcggtcttcaagctctcactgacggcctccaaccacgtgagcaacgtcaccgtgaactacaacgtaaccgtggagcggatgaacaggatgcagggtctgcaggtctccacagtgccggccgtgctgtcccccaatgccacgctagcactgacggcgggcgtgctggtggactcggccgtggaggtggccttcctgtggaactttggggatggggagcaggccctccaccagttccagcctccgtacaacgagtccttcccggttccagacccctcggtggcccaggtgctggtggagcacaatgtcatgcacacctacgctgccccaggtgagtacctcctgaccgtgctggcatctaatgccttcgagaacctgacgcagcaggtgcctgtgagcgtgcgcgcctccctgccctccgtggctgtgggtgtgagtgacggcgtcctggtggccggccggcccgtcaccttctacccgcacccgctgccctcgcctgggggtgttctttacacgtgggacttcggggacggctcccctgtcctgacccagagccagccggctgccaaccacacctatgcctcgaggggcacctaccacgtgcgcctggaggtcaacaacacggtgagcggtgcggcggcccaggcggatgtgcgcgtctttgaggagctccgcggactcagcgtggacatgagcctggccgtggagcagggcgcccccgtggtggtcagcgccgcggtgcagacgggcgacaacatcacgtggaccttcgacatgggggacggcaccgtgctgtcgggcccggaggcaacagtggagcatgtgtacctgcgggcacagaactgcacagtgaccgtgggtgcggccagccccgccggccacctggcccggagcctgcacgtgctggtcttcgtcctggaggtgctgcgcgttgaacccgccgcctgcatccccacgcagcctgacgcgcggctcacggcctacgtcaccgggaacccggcccactacctcttcgactggaccttcggggatggctcctccaacacgaccgtgcgggggtgcccgacggtgacacacaacttcacgcggagcggcacgttccccctggcgctggtgctgtccagccgcgtgaacagggcgcattacttcaccagcatctgcgtggagccagaggtgggcaacgtcaccctgcagccagagaggcagtttgtgcagctcggggacgaggcctggctggtggcatgtgcctggcccccgttcccctaccgctacacctgggactttggcaccgaggaagccgcccccacccgtgccaggggccctgaggtgacgttcatctaccgagacccaggctcctatcttgtgacagtcaccgcgtccaacaacatctctgctgccaatgactcagccctggtggaggtgcaggagcccgtgctggtcaccagcatcaaggtcaatggctcccttgggctggagctgcagcagccgtacctgttctctgctgtgggccgtgggcgccccgccagctacctgtgggatctgggggacggtgggtggctcgagggtccggaggtcacccacgcttacaacagcacaggtgacttcaccgttagggtggccggctggaatgaggtgagccgcagcgaggcctggctcaatgtgacggtgaagcggcgcgtgcgggggctcgtcgtcaatgcaagccgcacggtggtgcccctgaatgggagcgtgagcttcagcacgtcgctggaggccggcagtgatgtgcgctattcctgggtgctctgtgaccgctgcacgcccatccctgggggtcctaccatctcttacaccttccgctccgtgggcaccttcaatatcatcgtcacggctgagaacgaggtgggctccgcccaggacagcatcttcgtctatgtcctgcagctcatagaggggctgcaggtggtgggcggtggccgctacttccccaccaaccacacggtacagctgcaggccgtggttagggatggcaccaacgtctcctacagctggactgcctggagggacaggggcccggccctggccggcagcggcaaaggcttctcgctcaccgtgctcgaggccggcacctaccatgtgcagctgcgggccaccaacatgctgggcagcgcctgggccgactgcaccatggacttcgtggagcctgtggggtggctgatggtgaccgcctccccgaacccagctgccgtcaacacaagcgtcaccctcagtgccgagctggctggtggcagtggtgtcgtatacacttggtccttggaggaggggctgagctgggagacctccgagccatttaccacccatagcttccccacacccggcctgcacttggtcaccatgacggcagggaacccgctgggctcagccaacgccaccgtggaagtggatgtgcaggtgcctgtgagtggcctcagcatcagggccagcgagcccggaggcagcttcgtggcggccgggtcctctgtgcccttttgggggcagctggccacgggcaccaatgtgagctggtgctgggctgtgcccggcggcagcagcaagcgtggccctcatgtcaccatggtcttcccggatgctggcaccttctccatccggctcaatgcctccaacgcagtcagctgggtctcagccacgtacaacctcacggcggaggagcccatcgtgggcctggtgctgtgggccagcagcaaggtggtggcgcccgggcagctggtccattttcagatcctgctggctgccggctcagctgtcaccttccgcctgcaggtcggcggggccaaccccgaggtgctccccgggccccgtttctcccacagcttcccccgcgtcggagaccacgtggtgagcgtgcggggcaaaaaccacgtgagctgggcccaggcgcaggtgcgcatcgtggtgctggaggccgtgagtgggctgcagatgcccaactgctgcgagcctggcatcgccacgggcactgagaggaacttcacagcccgcgtgcagcgcggctctcgggtcgcctacgcctggtacttctcgctgcagaaggtccagggcgactcgctggtcatcctgtcgggccgcgacgtcacctacacgcccgtggccgcggggctgttggagatccaggtgcgcgccttcaacgccctgggcagtgagaaccgcacgctggtgctggaggttcaggacgccgtccagtatgtggccctgcagagcggcccctgcttcaccaaccgctcggcgcagtttgaggccgccaccagccccagcccccggcgtgtggcctaccactgggactttggggatgggtcgccagggcaggacacagatgagcccagggccgagcactcctacctgaggcctggggactaccgcgtgcaggtgaacgcctccaacctggtgagcttcttcgtggcgcaggccacggtgaccgtccaggtgctggcctgccgggagccggaggtggacgtggtcctgcccctgcaggtgctgatgcggcgatcacagcgcaactacttggaggcccacgttgacctgcgcgactgcgtcacctaccagactgagtaccgctgggaggtgtatcgcaccgccagctgccagcggccggggcgcccagcgcgtgtggccctgcccggcgtggacgtgagccggcctcggctggtgctgccgcggctggcgctgcctgtggggcactactgctttgtgtttgtcgtgtcatttggggacacgccactgacacagagcatccaggccaatgtgacggtggcccccgagcgcctggtgcccatcattgagggtggctcataccgcgtgtggtcagacacacgggacctggtgctggatgggagcgagtcctacgaccccaacctggaggacggcgaccagacgccgctcagtttccactgggcctgtgtggcttcgacacagagggaggctggcgggtgtgcgctgaactttgggccccgcgggagcagcacggtcaccattccacgggagcggctggcggctggcgtggagtacaccttcagcctgaccgtgtggaaggccggccgcaaggaggaggccaccaaccagacggtgctgatccggagtggccgggtgcccattgtgtccttggagtgtgtgtcctgcaaggcacaggccgtgtacgaagtgagccgcagctcctacgtgtacttggagggccgctgcctcaattgcagcagcggctccaagcgagggcggtgggctgcacgtacgttcagcaacaagacgctggtgctggatgagaccaccacatccacgggcagtgcaggcatgcgactggtgctgcggcggggcgtgctgcgggacggcgagggatacaccttcacgctcacggtgctgggccgctctggcgaggaggagggctgcgcctccatccgcctgtcccccaaccgcccgccgctggggggctcttgccgcctcttcccactgggcgctgtgcacgccctcaccaccaaggtgcacttcgaatgcacggcgctggtgtacgccctgctgctgcggcgctgtcgccagggccactgcgaggagttctgtgtctacaagggcagcctctccagctacggagccgtgctgcccccgggtttcaggccacacttcgaggtgggcctggccgtggtggtgcaggaccagctgggagccgctgtggtcgccctcaacaggtctttggccatcaccctcccagagcccaacggcagcgcaacggggctcacagtctggctgcacgggctcaccgctagtgtgctcccagggctgctgcggcaggccgatccccagcacgtcatcgagtactcgttggccctggtcaccgtgctgaacgagtacgagcgggccctggacgtggcggcagagcccaagcacgagcggcagcaccgagcccagatacgcaagaacatcacggagactctggtgtccctgagggtccacactgtggatgacatccagcagatcgctgctgcgctggcccagtgcatggggcccagcagggagctcgtatgccgctcgtgcctgaagcagacgctgcacaagctggaggccatgatgctcatcctgcaggcagagaccaccgcgggcaccgtgacgcccaccgccatcggagacagcatcctcaacatcacaggagacctcatccacctggccagctcggacgtgcgggcaccacagccctcagagctgggagccgagtcaccatctcggatggtggcgtcccaggcctacaacctgacctctgccctcatgcgcatcctcatgcgctcccgcgtgctcaacgaggagcccctgacgctggcgggcgaggagatcgtggcccagggcaagcgctcggacccgcggagcctgctgtgctatggcggcgccccagggcctggctgccacttctccatccccgaggctttcagcggggccctggccaacctcagtgacgtggtgcagctcatctttctggtggactccaatccctttccctttggctatatcagcaactacaccgtctccaccaaggtggcctcgatggcattccagacacaggccggcgcccagatccccatcgagcggctggcctcagagcgcgccatcaccgtgaaggtgcccaacaactcggactgggctgcccggggccaccgcagctccgccaactccgccaactccgttgtggtccagccccaggcctccgtcggtgctgtggtcaccctggacagcagcaaccctgcggccgggctgcatctgcagctcaactatacgctgctggacggccactacctgtctgaggaacctgagccctacctggcagtctacctacactcggagccccggcccaatgagcacaactgctcggctagcaggaggatccgcccagagtcactccagggtgctgaccaccggccctacaccttcttcatttccccggggagcagagacccagcggggagttaccatctgaacctctccagccacttccgctggtcggcgctgcaggtgtccgtgggcctgtacacgtccctgtgccagtacttcagcgaggaggacatggtgtggcggacagaggggctgctgcccctggaggagacctcgccccgccaggccgtctgcctcacccgccacctcaccgccttcggcgccagcctcttcgtgcccccaagccatgtccgctttgtgtttcctgagccgacagcggatgtaaactacatcgtcatgctgacatgtgctgtgtgcctggtgacctacatggtcatggccgccatcctgcacaagctggaccagttggatgccagccggggccgcgccatccctttctgtgggcagcggggccgcttcaagtacgagatcctcgtcaagacaggctggggccggggctcaggtaccacggcccacgtgggcatcatgctgtatggggtggacagccggagcggccaccggcacctggacggcgacagagccttccaccgcaacagcctggacatcttccggatcgccaccccgcacagcctgggtagcgtgtggaagatccgagtgtggcacgacaacaaagggctcagccctgcctggttcctgcagcacgtcatcgtcagggacctgcagacggcacgcagcgccttcttcctggtcaatgactggctttcggtggagacggaggccaacgggggcctggtggagaaggaggtgctggccgcgagcgacgcagcccttttgcgcttccggcgcctgctggtggctgagctgcagcgtggcttctttgacaagcacatctggctctccatatgggaccggccgcctcgtagccgtttcactcgcatccagagggccacctgctgcgttctcctcatctgcctcttcctgggcgccaacgccgtgtggtacggggctgttggcgactctgcctacagcacggggcatgtgtccaggctgagcccgctgagcgtcgacacagtcgctgttggcctggtgtccagcgtggttgtctatcccgtctacctggccatcctttttctcttccggatgtcccggagcaaggtggctgggagcccgagccccacacctgccgggcagcaggtgctggacatcgacagctgcctggactcgtccgtgctggacagctccttcctcacgttctcaggcctccacgctgaggcctttgttggacagatgaagagtgacttgtttctggatgattctaagagtctggtgtgctggccctccggcgagggaacgctcagttggccggacctgctcagtgacccgtccattgtgggtagcaatctgcggcagctggcacggggccaggcgggccatgggctgggcccagaggaggacggcttctccctggccagcccctactcgcctgccaaatccttctcagcatcagatgaagacctgatccagcaggtccttgccgagggggtcagcagcccagcccctacccaagacacccacatggaaacggacctgctcagcagcctgtccagcactcctggggagaagacagagacgctggcgctgcagaggctgggggagctggggccacccagcccaggcctgaactgggaacagccccaggcagcgaggctgtccaggacaggactggtggagggtctgcggaagcgcctgctgccggcctggtgtgcctccctggcccacgggctcagcctgctcctggtggctgtggctgtggctgtctcagggtgggtgggtgcgagcttccccccgggcgtgagtgttgcgtggctcctgtccagcagcgccagcttcctggcctcattcctcggctgggagccactgaaggtcttgctggaagccctgtacttctcactggtggccaagcggctgcacccggatgaagatgacaccctggtagagagcccggctgtgacgcctgtgagcgcacgtgtgccccgcgtacggccaccccacggctttgcactcttcctggccaaggaagaagcccgcaaggtcaagaggctacatggcatgctgcggagcctcctggtgtacatgctttttctgctggtgaccctgctggccagctatggggatgcctcatgccatgggcacgcctaccgtctgcaaagcgccatcaagcaggagctgcacagccgggccttcctggccatcacgcggtctgaggagctctggccatggatggcccacgtgctgctgccctacgtccacgggaaccagtccagcccagagctggggcccccacggctgcggcaggtgcggctgcaggaagcactctacccagaccctcccggccccagggtccacacgtgctcggccgcaggaggcttcagcaccagcgattacgacgttggctgggagagtcctcacaatggctcggggacgtgggcctattcagcgccggatctgctgggggcatggtcctggggctcctgtgccgtgtatgacagcgggggctacgtgcaggagctgggcctgagcctggaggagagccgcgaccggctgcgcttcctgcagctgcacaactggctggacaacaggagccgcgctgtgttcctggagctcacgcgctacagcccggccgtggggctgcacgccgccgtcacgctgcgcctcgagttcccggcggccggccgcgccctggccgccctcagcgtccgcccctttgcgctgcgccgcctcagcgcgggcctctcgctgcctctgctcacctcggtgtgcctgctgctgttcgccgtgcacttcgccgtggccgaggcccgtacttggcacagggaagggcgctggcgcgtgctgcggctcggagcctgggcgcggtggctgctggtggcgctgacggcggccacggcactggtacgcctcgcccagctgggtgccgctgaccgccagtggacccgtttcgtgcgcggccgcccgcgccgcttcactagcttcgaccaggtggcgcagctgagctccgcagcccgtggcctggcggcctcgctgctcttcctgcttttggtcaaggctgcccagcagctacgcttcgtgcgccagtggtccgtctttggcaagacattatgccgagctctgccagagctcctgggggtcaccttgggcctggtggtgctcggggtagcctacgcccagctggccatcctgctcgtgtcttcctgtgtggactccctctggagcgtggcccaggccctgttggtgctgtgccctgggactgggctctctaccctgtgtcctgccgagtcctggcacctgtcacccctgctgtgtgtggggctctgggcactgcggctgtggggcgccctacggctgggggctgttattctccgctggcgctaccacgccttgcgtggagagctgtaccggccggcctgggagccccaggactacgagatggtggagttgttcctgcgcaggctgcgcctctggatgggcctcagcaaggtcaaggagttccgccacaaagtccgctttgaagggatggagccgctgccctctcgctcctccaggggctccaaggtatccccggatgtgcccccacccagcgctggctccgatgcctcgcacccctccacctcctccagccagctggatgggctgagcgtgagcctgggccggctggggacaaggtgtgagcctgagccctcccgcctccaagccgtgttcgaggccctgctcacccagtttgaccgactcaaccaggccacagaggacgtctaccagctggagcagcagctgcacagcctgcaaggccgcaggagcagccgggcgcccgccggatcttcccgtggcccatccccgggcctgcggccagcactgcccagccgccttgcccgggccagtcggggtgtggacctggccactggccccagcaggacaccccttcgggccaagaacaaggtccaccccagcagcacttag

SEQ ID NO: 17052 - DNA, 1302 bp, Homo sapiens
  SIMILAR (1230)..(925): 971254mologous to Homo sapiens PKD1,accession number AC005600,Smith-Waterman Score=535.
ctaacctcctttttccagtccggagtgagcgggggccccatcgccccacccccctttcctggctctggttacggccttgcgagttgaacaaacttgctgcaggcggattggcggctgggagctctcgggctggggcgttgtatttattaatttatattccgcggcgccccgcgcgggcggctcctttgtgtccagccgccgccaccggagctcccggggcctccgcggggagcgcgtcccccgcatccgcccgacccccggggctggcacgtgctgcgcccggtccgctgagggggcggaggccccgatctccccgaacccccttctgtgtgtgttgggggtgagcttattattgtcatcatcaacattattttgctgaaccatttgagagctttcaagtttgttgcagacattgtggtattttatgcttaaccattcgtgtgcatttcccctgcttgtctgcaaatccctttcatttttctcagcttcatcttggacccaggcctggtaaagcctgccactcagttggcctccaaatatacaactctcaagcccactcccatccaagccagcaggaaagacagctcttctgttaggggtgcccttgaagcaggcacttttaattcttacagttgtcagggctctatgggtgccaaagagctgaaacccgggctgggaaattcccttgctccgggacatccggaagagaaagaggatggccaggtagacgggatagacaaccacgctggacaccaggccaacagcgactgtgtcgacgctcagcgggttcagcctggacacacgccccgtgctgtaggcagagtctccaacagccccgtaccacacggcgttggcgcccaggaagagacagatgaggagaacgcagcaggtggccctctggatgcgagtgaaacagtcgcggcgcagcacctccttctccaccaggcccccgttggcctccgtctccaccgaaagccagtcattgaccaggaagaaggtgctgcgtgccgtctgcaggtccctgacgatgatgtgctgcaggaaccaggcagggctgagccctttgttgtcgtgccacactcggatcttccacacgctacccaggctgtgcggggtggcgatctggaagatgtccagactgttgcggtggaaggctctgtcgccgtccaggtgccggtggccgctccggctgtccaccccatacagcatgatgcccacgtgggccgtggtacatctcacccgggcaggcgcgaacaaggggccccgcaagaacacctcgccaaacaaaagggcactgtccat

SEQ ID NO: 17053 - DNA, 513 bp, Homo sapiens
  SIMILAR (270)..(73): 501254mologous to Homo sapiens Mouse novel secreted protein isolated from clone BD407_li,accession number W54454,Smith-Waterman Score=130.
tttttttttgttttatataatttattcttatttgtgattacaagtatacctctacagaaagttagtatactcacacaaaggcaacttgttgcagaagagaatgttaaatgttgtaccgtcctcagaaccccaataatgataattatcaaattatccaatttttgtggagatggggttttgccatgttggcccagggtggtctcgaactcctacaccaaagtcagtctcacgatgacgatagacagccagactattgataaccttcctcaggtactcgcatgggcatgtcactgactttacatgctgctgcagctccttggtgagctggctctggtcatgcgacaggaactgtggggtcaggacaatagagagcttcaccatttgcagaatgagaacagcggctcatcatgagtgccaacctcagttttcttctgtgtgaaacaggaacaatagtttcattcgtcattcagtttctctcaaggtttcacgagatcatacgttacagtcaggggg

SEQ ID NO: 17054 - DNA, 4066 bp, Homo sapiens
  SIMILAR (1796)..(3508): 941254mologous to Homo sapiens PKD1,accession number AC005600,Smith-Waterman Score=2798.
gagcagagacccagcggggagttaccatctgaacctctccagccacttccgctggtcggcgctgcaggtgtccgtgggcctgtacacgtccctgtgccagtacttcagcgaggaggacatggtgtggcggacagaggggctgctgcccctggaggagacctcgccccgccaggccgtctgcctcacccgccacctcaccgccttcggcgccagcctcttcgtgcccccaagccatgtccgctttgtgtttcctgagccgacagcggatgtaaactacatcgtcatgctgacatgtgctgtgtgcctggtgacctacatggtcatggccgccatcctgcacaagctggaccagttggatgccagccggggccgcgccatccctttctgtgggcagcggggccgcttcaagtacgagatcctcgtcaagacaggctggggccggggctcaggtaccacggcccacgtgggcatcatgctgtatggggtggacagccggagcggccaccggcacctggacggcgacagagccttccaccgcaacagcctggacatcttccggatcgccaccccgcacagcctgggtagcgtgtggaagatccgagtgtggcacgacaacaaagggctcagccctgcctggttcctgcagcacgtcatcgtcagggacctgcagacggcacgcagcgccttcttcctggtcaatgactggctttcggtggagacggaggccaacgggggcctggtggagaaggaggtgctggccgcgagcgacgcagcccttttgcgcttccggcgcctgctggtggctgagctgcagcgtggcttctttgacaagcacatctggctctccatatgggaccggccgcctcgtagccgtttcactcgcatccagagggccacctgctgcgttctcctcatctgcctcttcctgggcgccaacgccgtgtggtacggggctgttggcgactctgcctacagcacggggcatgtgtccaggctgagcccgctgagcgtcgacacagtcgctgttggcctggtgtccagcgtggttgtctatcccgtctacctggccatcctttttctcttccggatgtcccggagcaaggtggctgggagcccgagccccacacctgccgggcagcaggtgctggacatcgacagctgcctggactcgtccgtgctggacagctccttcctcacgttctcaggcctccacgctgaggtgaggactctactgggggtcctgggctgggctgggggtcctgccgccttggcgcagcttggactcaagacactgtgcacctctcagcaggcctttgttggacagatgaagagtgacttgtttctggatgattctaagagtctggtgtgctggccctccggcgagggaacgctcagttggccggacctgctcagtgacccgtccattgtgggtagcaatctgcggcagctggcacggggccaggcgggccatgggctgggcccagaggaggacggcttctccctggccagcccctactcgcctgccaaatccttctcagcatcagatgaagacctgatccagcaggtccttgccgagggggtcagcagcccagcccctacccaagacacccacatggaaacggacctgctcagcagcctgtccagcactcctggggagaagacagagacgctggcgctgcagaggctgggggagctggggccacccagcccaggcctgaactgggaacagccccaggcagcgaggctgtccaggacaggactggtggagggtctgcggaagcgcctgctgccggcctggtgtgcctccctggcccacgggctcagcctgctcctggtggctgtggctgtggctgtctcagggtgggtcttgctggaagccctgtacttctcactggtggccaagcggctgcacccggatgaagatgacaccctggtagagagcccggctgtgacgcctgtgagcgcacgtgtgccccgcgtacggccaccccacggctttgcactcttcctggccaaggaagaagcccgcaaggtcaagaggctacatggcatgctgcggagcctcctggtgtacatgctttttctgctggtgaccctgctggccagctatggggatgcctcatgccatgggcacgcctaccgtctgcaaagcgccatcaagcaggagctgcacagccgggccttcctggccatcacgcggtacgggcatccggtgcactggtctgaggagctctggccatggatggcccacgtgctgctgccctacgtccacgggaaccagtccagcccagagctggggcccccacggctgcggcaggtgcggctgcaggaagcactctacccagaccctcccggccccagggtccacacgtgctcggccgcaggaggcttcagcaccagcgattacgacgttggctgggagagtcctcacaatggctcggggacgtgggcctattcagcgccggatctgctgggggcatggtcctggggctcctgtgccgtgtatgacagcgggggctacgtgcaggagctgggcctgagcctggaggagagccgcgaccggctgcgcttcctgcagctgcacaactggctggacaacaggagccgcgctgtgttcctggagctcacgcgctacagcccggccgtggggctgcacgccgccgtcacgctgcgcctcgagttcccggcggccggccgcgccctggccgccctcagcgtccgcccctttgcgctgcgccgcctcagcgcgggcctctcgctgcctctgctcacctcggtgtgcctgctgctgttcgccgtgcacttcgccgtggccgaggcccgtacttggcacagggaagggcgctggcgcgtgctgcggctcggagcctgggcgcggtggctgctggtggcgctgacggcggccacggcactggtacgcctcgcccagctgggtgccgctgaccgccagtggacccgtttcgtgcgcggccgcccgcgccgcttcactagcttcgaccaggtggcgcagctgagctccgcagcccgtggcctggcggcctcgctgctcttcctgcttttggtcaaggctgcccagcagctacgcttcgtgcgccagtggtccgtctttggcaagacattatgccgagctctgccagagctcctgggggtcaccttgggcctggtggtgctcggggtagcctacgcccagctggccatcctgctcgtgtcttcctgtgtggactccctctggagcgtggcccaggccctgttggtgctgtgccctgggactgggctctctaccctgtgtcctgccgagtcctggcacctgtcacccctgctgtgtgtggggctctgggcactgcggctgtggggcgccctacggctgggggctgttattctccgctggcgctaccacgccttgcgtggagagctgtaccggccggcctgggagccccaggactacgagatggtggagttgttcctgcgcaggctgcgcctctggatgggcctcagcaaggtcaaggaggtgggtacggcccagtgggggggagagggacacgccctgggctctgcccagggtgcagccggactgactgagcccctgtgccgcccccagttccgccacaaagtccgctttgaagggatggagccgctgccctctcgctcctccaggggctccaaggtatccccggatgtgcccccacccagcgctggctccgatgcctcgcacccctccacctcctccagccagctggatgggctgagcgtgagcctgggccggctggggacaaggtgtgagcctgagccctcccgcctccaagccgtgttcgaggccctgctcacccagtttgaccgactcaaccaggccacagaggacgtctaccagctggagcagcagctgcacagcctgcaaggccgcaggagcagccgggcgcccgccggatcttcccgtggcccatccccgggcctgcggccagcactgcccagccgccttgcccgggccagtcggggtgtggacctggccactggccccagcaggacaccccttcgggccaagaacaaggtccaccccagcagcacttag

SEQ ID NO: 17055 - DNA, 771 bp, Homo sapiens
  SIMILAR (1)..(297): 941254mologous to Homo sapiens Human PKD1 protein fragment 13,accession number W39182,Smith-Waterman Score=481.
  misc_feature (1)...(771): n = a,t,c or g
actcacatccagagggccacctgctgcgttctcctcatctgtctcttcctgggcgccaacgccgtgtggtacggggctgttggagactctgcctacagcacggggcgtgtgtccaggctgaacccgctgagcgtcgacacagtcgctgttggcctggtgtccagcgtggttgtctatcccgtctacctggccatcctctttctcttccggatgtcccggagcaaggtggctgggagcccgagccccacacctgccgggcagcaggtgctggacgtcgacagctgcctggactcaacccgtgctggacagctccttcctcacgttctgaggcctccacgctgaggtgagggctctactgggggtcctgccgccttggcgcagcttggactcaagaccctgtgcacctctcagcaggcctttgctggacagatgaagagtgacttgtttctggatgattctaagagtgaccttgaggaaccctgggagctcaggaaggaaggagcgcccagaagcagggacagggagctggttggggaggaccagaaatcaggttatcaatactctggctgaccatcgtcatcgtgggactgactttggtggaagtccttggttacttatcattactgtgtttctgagaagttataaatttgccatctccctctgcacaagttacctttgtgtgagtatactaactttctgtagaggtatacttgtaatcacaaataagaataaattatatgnacaaaaaaaaaaaaaaaaaattccgccgaa

SEQ ID NO: 17056 - DNA, 14169 bp, Homo sapiens
  SIMILAR (212)..(9934): 991254mologous to Homo sapiens Polycystic kidney disease 1 (PKD1) polypeptide,accession number W00870,Smith-Waterman Score= 16983.
gcactgcagcgccagcgtccgagcgggcggccgagctcccggagcggcctggccccgagccccgagcgggcgtcgctcagcagcaggtcgcggccgcgcagccccatccagccccgcgcccgccatgccgtccgcgggccccgcctgagctgcggtctccgcgcgcgggcgggcctggggacggcggggccatgcgcgcgctgccctaacgatgccgcccgccgcgcccgcccgcctggcgctggccctgggcctgggcctgtggctcggggcgctggcggggggccccgggcgcggctgcgggccctgcgagcccccctgcctctgcggcccagcgcccggcgccgcctgccgcgtcaactgctcgggccgcgggctgcggacgctcggtcccgcgctgcgcatccccgcggacgccacagcgctagacgtctcccacaacctgctccgggcgctggacgttgggctcctggcgaacctctcggcgctggcagagctggatataagcaacaacaagatttctacgttagaagaaggaatatttgctaatttatttaatttaagtgaaataaacctgagtgggaacccgtttgagtgtgactgtggcctggcgtggctgccgcgatgggcggaggagcagcaggtgcgggtggtgcagcccgaggcagccacgtgtgctgggcctggctccctggctggccagcctctgcttggcatccccttgctggacagtggctgtggtgaggagtatgtcgcctgcctccctgacaacagctcaggcaccgtggcagcagtgtccttttcagctgcccacgaaggcctgcttcagccagaggcctgcagcgccttctgcttctccaccggccagggcctcgcagccctctcggagcagggctggtgcctgtgtggggcggcccagccctccagtgcctcctttgcctgcctgtccctctgctccggccccccgccacctcctgcccccacctgtaggggccccaccctcctccagcacgtcttccctgcctccccaggggccaccctggtggggccccacggacctctggcctctggccagctagcagccttccacatcgctgccccgctccctgtcactgccacacgctgggacttcggagacggctccgccgaggtggatgccgctgggccggctgcctcgcatcgctatgtgctgcctgggcgctatcacgtgacggccgtgctggccctgggggccggctcagccctgctggggacagacgtgcaggtggaagcggcacctgccgccctggagctcgtgtgcccgtcctcggtgcagagtgacgagagccttgacctcagcatccagaaccgcggtggttcaggcctggaggccgcctacagcatcgtggccctgggcgaggagccggcccgagcggtgcacccgctctgcccctcggacacggagatcttccctggcaacgggcactgctaccgcctggtggtggagaaggcggcctggctgcaggcgcaggagcagtgtcaggcctgggccggggccgccctggcaatggtggacagtcccgccgtgcagcgcttcctggtctcccgggtcaccaggagcctagacgtgtggatcggcttctcgactgtgcagggggtggaggtgggcccagcgccgcagggcgaggccttcagcctggagagctgccagaactggctgcccggggagccacacccagccacagccgagcactgcgtccggctcgggcccaccgggtggtgtaacaccgacctgtgctcagcgccgcacagctacgtctgcgagctgcagcccggaggcccagtgcaggatgccgagaacctcctcgtgggagcgcccagtggggacctgcagggacccctgacgcctctggcacagcaggacggcctctcagccccgcacgagcccgtggaggtcatggtattcccgggcctgcgtctgagccgtgaagccttcctcaccacggccgaatttgggacccaggagctccggcggcccgcccagctgcggctgcaggtgtaccggctcctcagcacagcagggaccccggagaacggcagcgagcctgagagcaggtccccggacaacaggacccagctggcccccgcgtgcatgccagggggacgctggtgccctggagccaacatctgcttgccgctggacgcctcttgccacccccaggcctgcgccaatggctgcacgtcagggccagggctacccggggccccctatgcgctatggagagagttcctcttctccgttgccgcggggccccccgcgcagtactcggtcaccctccacggccaggatgtcctcatgctccctggtgacctcgttggcttgcagcacgacgctggccctggcgccctcctgcactgctcgccggctcccggccaccctggtccccaggccccgtacctctccgccaacgcctcgtcatggctgccccacttgccagcccagctggagggcacttgggcctgccctgcctgtgccctgcggctgcttgcagccacggaacagctcaccgtgctgctgggcttgaggcccaaccctggactgcggatgcctgggcgctatgaggtccgggcagaggtgggcaatggcgtgtccaggcacaacctctcctgcagctttgacgtggtctccccagtggctgggctgcgggtcatctaccctgccccccgcgacggccgcctctacgtgcccaccaacggctcagccttggtgctccaggtggactctggtgccaacgccacggccacggctcgctggcctgggggcagtgtcagcgcccgctttgagaatgtctgccctgccctggtggccaccttcgtgcccggctgcccctgggagaccaacgataccctgttctcagtggtagcactgccgtggctcagtgagggggagcacgtggtggacgtggtggtggaaaacagcgccagccgggccaacctcagcctgcgggtgacggcggaggagcccatctgtggcctccgcgccacgcccagccccgaggcccgtgtactgcagggagtcctagtgaggtacagccccgtggtggaggccggctcggacatggtcttccggtggaccatcaacgacaagcagtccctgaccttccagaacgtggtcttcaatgtcatttatcagagcgcggcggtcttcaagctctcactgacggcctccaaccacgtgagcaacgtcaccgtgaactacaacgtaaccgtggagcggatgaacaggatgcagggtctgcaggtctccacagtgccggccgtgctgtcccccaatgccacgctagcactgacggcgggcgtgctggtggactcggccgtggaggtggccttcctgtggaactttggggatggggagcaggccctccaccagttccagcctccgtacaacgagtccttcccggttccagacccctcggtggcccaggtgctggtggagcacaatgtcatgcacacctacgctgccccaggtgagtacctcctgaccgtgctggcatctaatgccttcgagaacctgacgcagcaggtgcctgtgagcgtgcgcgcctccctgccctccgtggctgtgggtgtgagtgacggcgtcctggtggccggccggcccgtcaccttctacccgcacccgctgccctcgcctgggggtgttctttacacgtgggacttcggggacggctcccctgtcctgacccagagccagccggctgccaaccacacctatgcctcgaggggcacctaccacgtgcgcctggaggtcaacaacacggtgagcggtgcggcggcccaggcggatgtgcgcgtctttgaggagctccgcggactcagcgtggacatgagcctggccgtggagcagggcgcccccgtggtggtcagcgccgcggtgcagacgggcgacaacatcacgtggaccttcgacatgggggacggcaccgtgctgtcgggcccggaggcaacagtggagcatgtgtacctgcgggcacagaactgcacagtgaccgtgggtgcggccagccccgccggccacctggcccggagcctgcacgtgctggtcttcgtcctggaggtgctgcgcgttgaacccgccgcctgcatccccacgcagcctgacgcgcggctcacggcctacgtcaccgggaacccggcccactacctcttcgactggaccttcggggatggctcctccaacacgaccgtgcgggggtgcccgacggtgacacacaacttcacgcggagcggcacgttccccctggcgctggtgctgtccagccgcgtgaacagggcgcattacttcaccagcatctgcgtggagccagaggtgggcaacgtcaccctgcagccagagaggcagtttgtgcagctcggggacgaggcctggctggtggcatgtgcctggcccccgttcccctaccgctacacctgggactttggcaccgaggaagccgcccccacccgtgccaggggccctgaggtgacgttcatctaccgagacccaggctcctatcttgtgacagtcaccgcgtccaacaacatctctgctgccaatgactcagccctggtggaggtgcaggagcccgtgctggtcaccagcatcaaggtcaatggctcccttgggctggagctgcagcagccgtacctgttctctgctgtgggccgtgggcgccccgccagctacctgtgggatctgggggacggtgggtggctcgagggtccggaggtcacccacgcttacaacagcacaggtgacttcaccgttagggtggccggctggaatgaggtgagccgcagcgaggcctggctcaatgtgacggtgaagcggcgcgtgcgggggctcgtcgtcaatgcaagccgcacggtggtgcccctgaatgggagcgtgagcttcagcacgtcgctggaggccggcagtgatgtgcgctattcctgggtgctctgtgaccgctgcacgcccatccctgggggtcctaccatctcttacaccttccgctccgtgggcaccttcaatatcatcgtcacggctgagaacgaggtgggctccgcccaggacagcatcttcgtctatgtcctgcagctcatagaggggctgcaggtggtgggcggtggccgctacttccccaccaaccacacggtacagctgcaggccgtggttagggatggcaccaacgtctcctacagctggactgcctggagggacaggggcccggccctggccggcagcggcaaaggcttctcgctcaccgtgctcgaggccggcacctaccatgtgcagctgcgggccaccaacatgctgggcagcgcctgggccgactgcaccatggacttcgtggagcctgtggggtggctgatggtgaccgcctccccgaacccagctgccgtcaacacaagcgtcaccctcagtgccgagctggctggtggcagtggtgtcgtatacacttggtccttggaggaggggctgagctgggagacctccgagccatttaccacccatagcttccccacacccggcctgcacttggtcaccatgacggcagggaacccgctgggctcagccaacgccaccgtggaagtggatgtgcaggtgcctgtgagtggcctcagcatcagggccagcgagcccggaggcagcttcgtggcggccgggtcctctgtgcccttttgggggcagctggccacgggcaccaatgtgagctggtgctgggctgtgcccggcggcagcagcaagcgtggccctcatgtcaccatggtcttcccggatgctggcaccttctccatccggctcaatgcctccaacgcagtcagctgggtctcagccacgtacaacctcacggcggaggagcccatcgtgggcctggtgctgtgggccagcagcaaggtggtggcgcccgggcagctggtccattttcagatcctgctggctgccggctcagctgtcaccttccgcctgcaggtcggcggggccaaccccgaggtgctccccgggccccgtttctcccacagcttcccccgcgtcggagaccacgtggtgagcgtgcggggcaaaaaccacgtgagctgggcccaggcgcaggtgcgcatcgtggtgctggaggccgtgagtgggctgcagatgcccaactgctgcgagcctggcatcgccacgggcactgagaggaacttcacagcccgcgtgcagcgcggctctcgggtcgcctacgcctggtacttctcgctgcagaaggtccagggcgactcgctggtcatcctgtcgggccgcgacgtcacctacacgcccgtggccgcggggctgttggagatccaggtgcgcgccttcaacgccctgggcagtgagaaccgcacgctggtgctggaggttcaggacgccgtccagtatgtggccctgcagagcggcccctgcttcaccaaccgctcggcgcagtttgaggccgccaccagccccagcccccggcgtgtggcctaccactgggactttggggatgggtcgccagggcaggacacagatgagcccagggccgagcactcctacctgaggcctggggactaccgcgtgcaggtgaacgcctccaacctggtgagcttcttcgtggcgcaggccacggtgaccgtccaggtgctggcctgccgggagccggaggtggacgtggtcctgcccctgcaggtgctgatgcggcgatcacagcgcaactacttggaggcccacgttgacctgcgcgactgcgtcacctaccagactgagtaccgctgggaggtgtatcgcaccgccagctgccagcggccggggcgcccagcgcgtgtggccctgcccggcgtggacgtgagccggcctcggctggtgctgccgcggctggcgctgcctgtggggcactactgctttgtgtttgtcgtgtcatttggggacacgccactgacacagagcatccaggccaatgtgacggtggcccccgagcgcctggtgcccatcattgagggtggctcataccgcgtgtggtcagacacacgggacctggtgctggatgggagcgagtcctacgaccccaacctggaggacggcgaccagacgccgctcagtttccactgggcctgtgtggcttcgacacagagggaggctggcgggtgtgcgctgaactttgggccccgcgggagcagcacggtcaccattccacgggagcggctggcggctggcgtggagtacaccttcagcctgaccgtgtggaaggccggccgcaaggaggaggccaccaaccagacggtgctgatccggagtggccgggtgcccattgtgtccttggagtgtgtgtcctgcaaggcacaggccgtgtacgaagtgagccgcagctcctacgtgtacttggagggccgctgcctcaattgcagcagcggctccaagcgagggcggtgggctgcacgtacgttcagcaacaagacgctggtgctggatgagaccaccacatccacgggcagtgcaggcatgcgactggtgctgcggcggggcgtgctgcgggacggcgagggatacaccttcacgctcacggtgctgggccgctctggcgaggaggagggctgcgcctccatccgcctgtcccccaaccgcccgccgctggggggctcttgccgcctcttcccactgggcgctgtgcacgccctcaccaccaaggtgcacttcgaatgcacgggctggcatgacgcggaggatgctggcgccccgctggtgtacgccctgctgctgcggcgctgtcgccagggccactgcgaggagttctgtgtctacaagggcagcctctccagctacggagccgtgctgcccccgggtttcaggccacacttcgaggtgggcctggccgtggtggtgcaggaccagctgggagccgctgtggtcgccctcaacaggtctttggccatcaccctcccagagcccaacggcagcgcaacggggctcacagtctggctgcacgggctcaccgctagtgtgctcccagggctgctgcggcaggccgatccccagcacgtcatcgagtactcgttggccctggtcaccgtgctgaacgagtacgagcgggccctggacgtggcggcagagcccaagcacgagcggcagcaccgagcccagatacgcaagaacatcacggagactctggtgtccctgagggtccacactgtggatgacatccagcagatcgctgctgcgctggcccagtgcatggggcccagcagggagctcgtatgccgctcgtgcctgaagcagacgctgcacaagctggaggccatgatgctcatcctgcaggcagagaccaccgcgggcaccgtgacgcccaccgccatcggagacagcatcctcaacatcacaggagacctcatccacctggccagctcggacgtgcgggcaccacagccctcagagctgggagccgagtcaccatctcggatggtggcgtcccaggcctacaacctgacctctgccctcatgcgcatcctcatgcgctcccgcgtgctcaacgaggagcccctgacgctggcgggcgaggagatcgtggcccagggcaagcgctcggacccgcggagcctgctgtgctatggcggcgccccagggcctggctgccacttctccatccccgaggctttcagcggggccctggccaacctcagtgacgtggtgcagctcatctttctggtggactccaatccctttccctttggctatatcagcaactacaccgtctccaccaaggtggcctcgatggcattccagacacaggccggcgcccagatccccatcgagcggctggcctcagagcgcgccatcaccgtgaaggtgcccaacaactcggactgggctgcccggggccaccgcagctccgccaactccgccaactccgttgtggtccagccccaggcctccgtcggtgctgtggtcaccctggacagcagcaaccctgcggccgggctgcatctgcagctcaactatacgctgctggacggccactacctgtctgaggaacctgagccctacctggcagtctacctacactcggagccccggcccaatgagcacaactgctcggctagcaggaggatccgcccagagtcactccagggtgctgaccaccggccctacaccttcttcatttccccggggagcagagacccagcggggagttaccatctgaacctctccagccacttccgctggtcggcgctgcaggtgtccgtgggcctgtacacgtccctgtgccagtacttcagcgaggaggacatggtgtggcggacagaggggctgctgcccctggaggagacctcgccccgccaggccgtctgcctcacccgccacctcaccgccttcggcgccagcctcttcgtgcccccaagccatgtccgctttgtgtttcctgagccgacagcggatgtaaactacatcgtcatgctgacatgtgctgtgtgcctggtgacctacatggtcatggccgccatcctgcacaagctggaccagttggatgccagccggggccgcgccatccctttctgtgggcagcggggccgcttcaagtacgagatcctcgtcaagacaggctggggccggggctcaggtaccacggcccacgtgggcatcatgctgtatggggtggacagccggagcggccaccggcacctggacggcgacagagccttccaccgcaacagcctggacatcttccggatcgccaccccgcacagcctgggtagcgtgtggaagatccgagtgtggcacgacaacaaagggctcagccctgcctggttcctgcagcacgtcatcgtcagggacctgcagacggcacgcagcgccttcttcctggtcaatgactggctttcggtggagacggaggccaacgggggcctggtggagaaggaggtgctggccgcgagtaaggcctcgttccgtgttcccactccgtcacgcagccctgttgcgcttccggcgcctgctggtggctgagctgcagcgtggcttctttgacaagcacatctggctctccatatgggaccggccgcctcgtagccgtttcactacgcatccagagagccacctgctgcgttctcctcatctgtctcttcctgggcgccaacgccgtgtggtacggggctgttggagactctgcctacagcacggggcgtgtgtccaggctgaacccgctgagcgtcgacacagtcgctgttggcctggtgtccagcgtggttgtctatcccgtctacctggccatcctctttctcttccggatgtcccggagcaaggtgggctgggagcccgagccccacacctgccgggcagcaggtgctggacgttgacagctgcctggactcatccgtgctggacagctccttcctcacgttctcaggcctccacgctgagcaggcctttgttggacagatgaagagtgacttgtttctggatgattctaagagtctggtgtgctggccctccggcgagggaacgctcagttggccggacctgctcagtgacccgtccattgtgggtagcaatctgcggcagctggcacggggccaggcgggccatgggctgtgcccagaggaggacggcttcttcctggccagcccctactcgcctgccaaatccttctcagcatcagatgaagacctgatccagcaggtccttgccgagggggtcagcagcccagcccctacccaagacacccacatggaaacggacctgctcagcagcctgtccagcactcctggggagaagacagagacgctggcgctgcagaggctgggggagctggggccacccagcccaggcctgaactgggaacagccccaggcagcgaggctgtccaggacaggactggtggagggtctgcggaagcgcctgctgccggcctggtgtgcctccctggcccacgggctcagcctgctcctggtggctgtggctgtggctgtctcagggtgggtgggtgcgagcttccccccgggcgtgagtgttgcgtggctcctgtccagcagcgccagcttcctggcctcattcctcggctgggagccactgaaggtcttgctggaagccctgtacttctcactggtggccaagcggctgcacccggatgaagatgacaccctggtagagagcccggctgtgacgcctgtgagcgcacgtgtgccccgcgtacggccaccccacggctttgcactcttcctggccaaggaagaagcccgcaaggtcaagaggctacatggcatgctgcggagcctcctggtgtacatgctttttctgctggtgaccctgctggccagctatggggatgcctcatgccatgggcacgcctaccgtctgcaaagcgccatcaagcaggagctgcacagccgggccttcctggccatcacgcggtctgaggagctctggccatggatggcccacgtgctgctgccctacgtccacgggaaccagtccagcccagagctggggcccccacggctgcggcaggtgcggctgcaggaagcactctacccagaccctcccggccccagggtccacacgtgctcggccgcaggaggcttcagcaccagcgattacgacgttggctgggagagtcctcacaatggctcggggacgtgggcctattcagcgccggatctgctgggggcatggtcctggggctcctgtgccgtgtatgacagcgggggctacgtgcaggagctgggcctgagcctggaggagagccgcgaccggctgcgcttcctgcagctgcacaactggctggacaacaggagccgcgctgtgttcctggagctcacgcgctacagcccggccgtggggctgcacgccgccgtcacgctgcgcctcgagttcccggcggccggccgcgccctggccgccctcagcgtccgcccctttgcgctgcgccgcctcagcgcgggcctctcgctgcctctgctcacctcggtgtgcctgctgctgttcgccgtgcacttcgccgtggccgaggcccgtacttggcacagggaagggcgctggcgcgtgctgcggctcggagcctgggcgcggtggctgctggtggcgctgacggcggccacggcactggtacgcctcgcccagctgggtgccgctgaccgccagtggacccgtttcgtgcgcggccgcccgcgccgcttcactagcttcgaccaggtggcgcagctgagctccgcagcccgtggcctggcggcctcgctgctcttcctgcttttggtcaaggctgcccagcagctacgcttcgtgcgccagtggtccgtctttggcaagacattatgccgagctctgccagagctcctgggggtcaccttgggcctggtggtgctcggggtagcctacgcccagctggccatcctgctcgtgtcttcctgtgtggactccctctggagcgtggcccaggccctgttggtgctgtgccctgggactgggctctctaccctgtgtcctgccgagtcctggcacctgtcacccctgctgtgtgtggggctctgggcactgcggctgtggggcgccctacggctgggggctgttattctccgctggcgctaccacgccttgcgtggagagctgtaccggccggcctgggagccccaggactacgagatggtggagttgttcctgcgcaggctgcgcctctggatgggcctcagcaaggtcaaggagttccgccacaaagtccgctttgaagggatggagccgctgccctctcgctcctccaggggctccaaggtatccccggatgtgcccccacccagcgctggctccgatgcctcgcacccctccacctcctccagccagctggatgggctgagcgtgagcctgggccggctggggacaaggtgtgagcctgagccctcccgcctccaagccgtgttcgaggccctgctcacccagtttgaccgactcaaccaggccacagaggacgtctaccagctggagcagcagctgcacagcctgcaaggccgcaggagcagccgggcgcccgccggatcttcccgtggcccatccccgggcctgcggccagcactgcccagccgccttgcccgggccagtcggggtgtggacctggccactggccccagcaggacaccccttcgggccaagaacaaggtccaccccagcagcacttagtcctccttcctggcgggggtgggccgtggagtcggagtggacaccgctcagtattactttctgccgctgtcaaggccgagggccaggcagaatggctgcacgtaggttccccagagagcaggcaggggcatctgtctgtctgtgggcttcagcactttaaagaggctgtgtggccaaccaggacccagggtcccctccccagctcccttgggaaggacacagcagtattggacggtttctagcctctgagatgctaatttatttccccgagtcctcaggtacagcgggctgtgcccggccccaccccctgggcagatgtcccccactgctaaggctgctggcttcagggagggttagcctgcaccgccgccaccctgcccctaagttattacctctccagttcctaccgtactccctgcaccgtctcactgtgtgtctcgtgtcagtaatttatatggtgttaaaatgtgtatatttttgtatgtcactattttcactagggctgaggggcctgcgcccagagctggcctcccccaacacctgctgcgcttggtaggtgtggtggcgttatggcagcccggctgctgcttggatgcgagcttggccttgggccggtgctgggggcacagctgtctgccaggcactctcatcaccccagaggccttgtcatcctcccttgccccaggccaggtagcaagagagcagcgcccaggcctgctggcatcaggtctgggcaagtagcaggactaggcatgtcagaggaccccagggtggttagaggaaaagactcctcctgggggctggctcccagggtggaggaaggtgactgtgtgtgtgtgtgtgtgcgcgcgcgacgcgcgagtgtgctgtatggcccaggcagcctcaaggccctcggagctggctgtgcctgcttctgtgtaccacttctgtgggcatggccgcttctagagcctcgacacccccccaacccccgcaccaagcagacaaagtcaataaaagagctgtctgactgc

SEQ ID NO: 17057 - DNA, 1357 bp, Homo sapiens
  SIMILAR (1200)..(1355): 901254mologous to Homo sapiens Mouse novel secreted protein isolated from clone BD407_li,accession number W54454,Smith-Waterman Score=248.
gaaagaatccaaaatgaaacaagattgccatgttatgatcttatcattgagttgaaaggcaatcttgtttcattttggattctttcttatgtttatgtcttataagggcactttgaatttccaagcaaataataattttgaattagcttttaatcattgacttctagcacagttacatgatcagaaacatgctgtgtgatttgattgctctcaaatatattgagatttgctggaacaaaataagtcaggttaatttttgtaaatgtaccatgcatgcttaaaatgaatgtatcctacatttgttccccaagatacaggttgatggacggatggcctacatggatgtgatggagatggtttactatccgggaccttcccgcatcctgcctgatgttttgttgccttaggatatgaaatggctgagcggaggctgtaaaacctgggcactctgcttgggtatgaggttcttcctgccatcctgccatcatttgttttttatgttttgtcgccaaaagtgacccttgaaggaaccctggggagctcaggaaggaaggagcgcccagaagccagggacagggaagctggtttggggaggaccagaaatcaggtttgtgaaggttccaagagaagaccttgtctttgggaggaatttgggagacttagatgggggaggggtcattggaatgattcgggcgctacttggcattgtccattgtgaggcactgtccattgtgaggcaccaccggggtcatcagggattggtggagagggagtataaagccccagggttggtaagggagggcccagaccgaagaaggtttggtggatagcagaacctttttgtctccctctgattgctcctaagcctcacgctcccttgccccgcgtgtcctgttgcttccctgatcttctccgtgacctgtagctaaaccttccaccagcgcttgagaacttaatttgaaccggatcctttcccagacccctttcttcttctcctcctcctcctccacctcctccagggcgccctgaaaggaccaggacatgcggctgcgcttttggctcctcatttggctcctgctgggatttatcagccatcagcccacccctgttatcaatagtctggctgtctatcgtcatcgtgagactgactttggtgcaggagttcgagaccaccctggccaacatggcaaaaccccatctcccacgaaaaattggataatttgataattatcattattgggtttctgagacgttacacatttaacgttctcttctgcacaagttgcctttgtgtgagtatactaactttctgtagaggtatacttgtaatcacaaataagaataaattatataaaac

SEQ ID NO: 17058 - DNA, 2764 bp, Homo sapiens
  SIMILAR (854)..(1849): 981254mologous to Homo sapiens glutamate/aspartate transporter II,accession number U01824,Smith-Waterman Score=1637.
gaggcagtactcacagtcccagcagaaccccatccacagacacttacagcagccagtccacagccaccagcaggctgatgtcctctgttggcaggcccacggctgtcagaatgaggagcatggtgaccagcccggcactggggatactggccgcgccgacgcttgccagggtggctgtgaggctatgagaacagagaagttcagatgccatttgtacaaagctgtcatatcaaaatgtcatatcaaaatatccaagagtactttggaaatatggattcccaagttgtttttgtgggtgccaaaagttatctgcctcttcacccggaggatctacaaacagcacacagtgactaagtccctgggctttcaagtgcagagggatactacagactgcatggatgggcaaaatggcgcctttggttatcctcggtggagggctggtgttttcaaagctgtccttcctactgctgcagcttctttgactgttttatctggaagatctcatgttctgaaccccaagtccaggcaactcctagtagtacaacggaagaaacagctacccagaaggaacagtggtttggcaacagatggcatgagggatatcgccaaacacccaaagaagactcccattcgacaacagggacagctggtaatggatggtttaacaaataggaatgatgtcacaggtggaagaagagacccaaatcattctgaaggctcaactactttactggaaggttatacctctcattacccacacacgaaggaaagcaggaccttcatcccagtgacctcagctaagactgggtcctttggagttactgcagttactgttggagattccaactctaatgtcaatcgttccttatcagggttgtcaggcctggatgctaaggctagtggccgcttgggcacgagagccatggtgtattacatgtccacgaccatcattgctgcagtactgggggtcattctggtcttggctatccatccaggcaatcccaagctcaagaagcagctggggcctgggaagaagaatgatgaagtgtccagcctggatgccttcctggaccttattcgaaatctcttccctgaaaaccttgtccaagcctgctttcaacagattcaaacagtgacgaagaaagtcctggttgcaccaccgccggacgaggaggccaacgcaaccagcgctgttgtctctctgttgaacgagactgtgactgaggtgccggaggagactaagatggttatcaagaagggcctggagttcaaggatgggatgaacgtcttaggtctgatagggtttttcattgcttttggcatcgctatggggaagatgggagatcaggccaagctgatggtggatttcttcaacattttgaatgagattgtaatgaagttagtgatcatgatcatgtggtactctcccctgggtatcgcctgcctgatctgtggaaagatcattgcaatcaaggacttagaagtggttgctaggcaactggggatgtacatggtaacagtgatcataggcctcatcatccacgggggcatctttctccccttgatttactttgtagtgaccaggaaaaaccccttctccttttttgctggcattttccaagcttggatcactgccctgggcaccgcttccagtgctggaactttgcctgtcacctttcgttgcctggaagaaaatctggggattgataagcgtgtgactagattcgtccttcctgttggagcaaccattaacatggatggtacagccctttatgaagcggtagccgccatctttatagcccaaatgaatggtgttgtcctggatggaggacagattgtgactgtaagtgattcagaatgtggagagctgccctttatgcagctccacaaggaactcatggctacacatttcaaactttggttgagagatgttggttttccccttaggacactcacatgggagtcaagaaggtggagcaaacacaacctctggtcctataaggacacccaaattccaggtgtattccacgtggagaaaaatggtcgctacagcatctctcggacggaggccgctgacctctgcaaggctttcaatagcaccttgcccacaatggcccagatggagaaagctctgagcatcggatttgagacctgcaggtatgggttcatagaagggcacgtggtgattccccggatccaccccaactccatctgtgcagcaaacaacacaggggtgtacatcctcacatccaacacctcccagtatgacacatattgcttcaatgcttcagctccacctgaagaagattgtacatcagtcacagacctgcccaatgcctttgatggaccaattaccataactattgttaaccgtgatggcacccgctatgtccagaaaggagaatacagaacgaatcctgaagacatctaccccagcaaccctactgatgatgacgtgagcagcggctcctccagtgaaaggagcagcacttcaggaggttacatcttttacaccttttctactgtacaccccatcccagacgaagacagtccctggatcaccgacagcacagacagaatccctgctaccagtacgtcttcaaataccatctcagcaggctgggagccaaatgaagaaaatgaagatgaaagagacagacacctcagtttttctggatcaggcattgatgatgatgaagattttatctccagcaccagtaagaataatcaattacagtacagccatttatgcaaggcttattga

SEQ ID NO: 17059 - DNA, 232 bp, Homo sapiens
  SIMILAR (16)..(162): 311254mologous to Neisseria meningitidis Dca,accession number AF195058,Smith-Waterman Score=72.
  misc_feature (1)...(232): n = a,t,c or g
atggcatcctgggaaagagcatgngcggtgttgtccctaccctgggctgacagcacggtggtatatttggaaggcaactggatggggccttctcacccactcctatccaggttacnagcttcaaaaccaccagatgctgacagctgctgtggaaatctaagcaagtggagggatatccagattgagctggccaagtttggtacaagagctaagagtctgggaacaatgggag

SEQ ID NO: 17060 - DNA, 383 bp, Homo sapiens
  SIMILAR (166)..(234): 1001254mologous to Homo sapiens CD44SP,accession number S66400,Smith-Waterman Score=136.
acgagaaagtgcggccaacttccgaggtcagtctcattgcccagcggaccccagcctctgccaggttcggtccgccatcctcgtcccgtcctccgccggcccctgccccgcgcccagggatcctccagctcctttcgcccgcgccctccgttcgctccggacaccatggacaagttttggtggcacgcagcctggggactctgcctcgtgccgctgagcctggcgcagatcggtgagtgcccgccgcagcctgggcagcaagatgggtgcggggtgctcagcgcggacccggcggcagcccctccggctgagtcggccctgggggactggagtcaagtgagctgtctgcgaagtgcattgggctccggaaagcagggctggga

SEQ ID NO: 17061 - DNA, 798 bp, Homo sapiens; identical to SEQ ID NO: 2433
  SIMILAR (352)..(795): 871254mologous to Homo sapiens p40,accession number U93569,Smith-Waterman Score=659.

SEQ ID NO: 17062 - DNA, 2273 bp, Homo sapiens
  SIMILAR (218)..(280): 1001254mologous to Homo sapiens dJ68D18.2.4 (CD44 antigen (homing function and Indian blood group system)),accession number AL133330,Smith-Waterman Score=107.
cggcccagcggaccccagcctctgccaggttcggtccgccatcctcgtcccgtcctccgccggcccctgccccgcgcccagggatcctccagctcctttcgcccgcgccctccgttcgctccggacaccatggacaagttttggtggcacgcagcctggggactctgcctcgtgccgctgagcctggcgcagatcgatttgaatataacctgccggctttgcaggtgtattccacgtggagaaaaatggtcgctacagcatctctcggacggaggccgcttaacctctgcaaggctttcaatagcaccttgcccacaatggcccagatggagaaagctctgagcatcggatttgagacctgcaggtatgggttcatagaagggcacgtggtgattccccggatccaccccaactccatctgtgcagcaaacaacacaggggtgtacatcctcacatccaacacctcccagtatgacacatattgcttcaatgcttcagctccacctgaagaagattgtacatcagtcacagacctgcccaatgcctttgatggaccaattaccataactattgttaaccgtgatggcacccgctatgtccagaaaggagaatacagaacgaatcctgaagacatctaccccagcaaccctactgatgatgacgtgagcagcggctcctccagtgaaaggagcagcacttcaggaggttacatcttttacaccttttctactgtacaccccatcccagacgaagacagtccctggatcaccgacagcacagacagaatccctgctaccagtacgtcttcaaataccatctcagcaggctgggagccaaatgaagaaaatgaagatgaaagagacagacacctcagtttttctggatcaggcattgatgatgatgaagattttatctccagcaccatttcaaccacaccacgggcttttgaccacacaaaacagaaccagggactgggacccagtgggaacccaagccatttcaaatccggaagtgctactttcaggacaaccacaaggatgactgatgtagacagaaatggcaccactgcttatgaaggaaactggaacccagaagcacaccctcccctcattcaccatgagcatcatgaggaagaagagaccccacattctacaagcacaatccaggcaactcctagtagtacaacggaagaaacagctacccagaaggaacagtggtttggcaacagatggcatgagggatatcgccaaacacccagagaagactcccattcgacaacagggacagctgcagcctcagctcataccagccatccaatgcaaggaaggacaacaccaagcccagaggacagttcctggactgatttcttcaacccaatctcacaccccatgggacgaggtcatcaagcaggaagaaggatggatatggactccagtcatagtacaacgcttcagcctactgcaaatccaaacacaggtttggtggaagatttggacaggacaggacctctttcaatgacaacgcagcagagtaattctcagagcttctctacatcacatgaaggcttggaagaagataaagaccatccaacaacttctactctgacatcaagcaataggaatgatgtcacaggtggaagaagagacccaaatcattctgaaggctcaactactttactggaaggttatacctctcattacccacacacgaaggaaagcaggaccttcatcccagtgacctcagctaagactgggtcctttggagttactgcagttactgttggagattccaactctaatgtcaatcgttccttatcaggagaccaagacacattccaccccagtggggggtcccataccactcatggatctgaatcagatggacactcacatgggagtcaagaaggtggagcaaacacaacctctggtcctataaggacaccccaaattccagaatggctgatcatcttggcatccctcttggccttggctttgattcttgcagtttgcattgcagtcaacagtcgaagaaggtgtgggcagaagaaaaagctagtgatcaacagtggcaatggagctgtggaggacagaaagccaagtggactcaacggagaggccagcaagtctcaggaaatggtgcatttggtgaacaaggagtcgtcagaaactccagaccagtttatgacagctgatgagacaaggaacctgcagaatgtggacatgaagattggggtgtaacacctacaccattatcttggaaagaaacaaccgttg

SEQ ID NO: 17063 - DNA, 1983 bp, Homo sapiens
  SIMILAR (54)..(1241): 321254mologous to Herpesvirus papio NTR,accession number AF200364,Smith-Waterman Score=204.
atggacaagttttggtggcacgcagcctggggactctgcctcgtgccgctgagcctggcgcagatcgatgtggaatctgagtttgcacagagagactaccaggacttggaggagaatatgggcctgggagcagttgtggggagaggctctgctgggtatgcacaccatggcatcctgggaaagagcatggcggtgttgtccctaccctgggctgacagcacggtggtatatttggaaggcaactggatggggccttctcacccactcctatccaggttacagtcaggtccctcagctgcaggtctgttggagtttgctggaggtccactccagatcctgtttgcctgggtatcaccagtggaggctgcagaacagcaaatattgcagaacagaaaatattgctccctgatccttcctctggaagcttcgtctcagaggggcacccgcctgtatgaggtgtcagtcggcccctactgggagagctgtcagacagggatgcttaagtctgcagacgtttctgctgcctttgttcagcagaacaaaggtggagactatgccctgcccccagaggtggagactacagaggcagccggccttgctgagctgcgctctcagtccaacagtgataaggttttgcaaatctcctcactggactttagaaatacgattctactcaggaacctaacagtgctgacttttcctggcatgccattatgctacgttcaagtttccaccaggttgtttgccttgcttcttgtggctttctggctgacagatgtaaaaatagaggctacaatagagccagcattttgtatcagcaggatcactcacacatgcctcacactggcagcagcttcaaaaccaccagatgctgacagctgctgtggaaatctaagcaagtggagggatatccagattgagctggccaagtttggtacaagagctaagagtctgggaacaatgggaggtacgtcttcaaataccatctcagcaggctgggagccaaatgaagaaaatgaagatgaaagagacagacacctcagtttttctggatcaggcattgatgatgatgaagattttatctccagcaccagcagatgtgggcccagtaactcactggtggctgcggagctgacgtcagctggtttcctgcaagatgccggtggagagaagaccctggaaccaagggcctgtaagcccaactatctagtaaccctgtctttagccagatgtccccagcggtcacagcaggcagccaccaaagccgcaaacaaacagatgggtgagctcactgtttggggtagaccaaacatgaggcctgtggacagatgccatctggttcgcatactccatagattgatgcttttttacccctttccccataccaccactatgattcacagggtgcacaatgccagtcacactccaatgggcactaactgccttgtaatcctagtggcctcttccctgttactcaaagaagcttatccgaatgcaagcaaaagaaggctacatatctttctcacttacgctacaaacactcaaggaatccgtgtgactctctcctacctgcagagaaatggcatttcactctggtgtcaaggtggttatgtttcaaccacaccacgggcttttgaccacacaaaacagaaccaggactggacccagtggaacccaagccattcaaatccggaagtgctacttcagacaaccacaaggatgactgcagatgtagacagaaatggcaccactgcttatgaaggaaactggaacccagaagcacaccctcccctcattcaccatgagcatcatgaggaagaagagaccccacattctacaagcacaagtaagcaagatggcggtcggcagttctggaaacccttacaagtattaggtaaccacaggataaatgtgtatgtgtttaacccgttttacctcgtagctgaaattggacccaaaacacagaaagataaattaatctga

SEQ ID NO: 17064 - DNA, 2761 bp, Homo sapiens
  SIMILAR (3)..(509): 951254mologous to Homo sapiens JM5,accession number AJ005897,Smith-Waterman Score=824.
atgggggtatccggagcgcagccggggcgcagctgctggcacaggagctccacaggcagccaaggactcggtcctgtcccagagcctgcggactgtggaggggaggccgcaggaagagcccgggaggaggggactgtgtccctgacaatgggaacagccgacagtgatgagatggccccggaggccccacagcacacccacatcgatgtgcacatccaccaggagtctgccctggccaagctcctgctcacctgctgctctgcgctgcggccccgggccacccaggccaggggcagcagccggctgctggtggcctcgtgggtgatgcagatcgtgctggggatcttgagtgcagtcctaggaggatttttctacatccgcgactacaccctcctcgtcacctcgggagctgccatctggacaggggctgtggctgtgctggctggagctgctgccttcatttacgagaaacggggtggtacatactgggccctgctgaggactctgctaacgctggcagctttctccacagccatcgctgccctcaaactttggaatgaagatttccgatatggctactcttattacaacagtgcctgccgcatctccagctcgagtgactggaacactccagcccccactcagagtccagaagaagtcagaaggctacacctatgtacctccttcatggacatgctgaaggtaggtggccaaggggaaggggcagcagcaggccttgttcagaacccttcaggccatgctcttgggtgtctggattctgctgcttctggcatctctgacccctctgtggctgtactgctggagaatgttcccaaccaaaggggtgagtccctaaggtgtgtgcctgtgtatttggggcagtggaactgctcaaaggagacaggaatggacagtggacagtttggggaggagaaaggggcccatgacccaagtcccacctattatcatgcctgtctttctacccagtggtggcccagcccagaaagcccctatccccaaccaagtggcccccaagtcaaagagcccaggaatccagggaagtccatatccatgctatgcctttggatcaggtaccatgctgctgattctggtagctccagagctaagctgcccctggaggagagactccgccctttctctcccactcacgattgtcttgcctttcctcttccattagaaaagagaccagaaggaaatgttggaagcaggtgcccctctgggacaaagctaccggaggaaggatcaggcagcaatatttgctgttctgcaatatttcctgttctgcagcctccgctggtgatacctaggcaaacaaggtctggagtggacctccagcaaactccaacagacctgcagctgagggacctgactgatcgcagctccttgccagcaatggaacaaagctggatagagaatgactttgatgagctgaacagaagtaggcttcagaaggcaaataaactagaaaatctagaagaaacggataaattcctcgacacatacaccctcccaagactaaaccaggaagaaactgaatctctgaatagaccaataacaggctctgaaattgaggcaataattaataacgtaccaaccaaaaaaagtccaggaccagatggagtcacagccaaattctaccagaggtacaaggaggagctgagaaccgtcaacaaaaaccacatgattatctcaatagatgcagaaaaggccttcgacaacattcaacagcccttcatgctaaaaactctcaataaactaggtattgatgcaacatatctcaaaataataagagctatcgatgacaaacccacagccaatatcatactgaatgggcaaaaactggaagcattccctttgaaaactggcacaagacagggatgccctctctcaccactcctattcaacatagtgttggaagttctggccagggcaatcaggcaagagaaagaaataaagggtattcaattaggaaaagaggaagtcaaattgtccctgtttgcagatgacatgattgtatatctagaaaaccccattgtctcagcccaaaatctccttaagctgataaacaacttcagcaaagtctcaggatacaaaatcaatgtgcaaaaatcacaagaattcctatacaacaataacagacaaacagagaaccaaatcatgagtgaactcccattcacaattgcttcaaagagaataaaatacctaggaatccaacttacaagggatgtgaaggacctcttcaaggagaactacaacccactgctcaatgaaataaaaaaggacacaaacaaatggaagaacattccatgctcatggataggaagaatcaatatcatgaaaatggccatactgcccaagtcaggaccctcagctgcacgtctgttggagtttgctggaggtccactgcagaccctgtttgcctgggtatcaccagaggaggctgcagaacagcaaatattgccgaacagccaaagttgctacctgatccttcctctggaagcttcgtctcagaggggcagctggcctgtatgaggtgtcagttggcccctactgggagtttgtgaatagcacaatggaagaagctggactttgtgggttaagagagaaagcagatatgttgtgtaactctgaatcacatgatattcttcaacatcaagactcaaattgcagtgccacaagtaataaacatttattggaagatgaagaaggccgtgactttataacaaagaacaggagttgg

SEQ ID NO: 17065 - DNA, 486 bp, Homo sapiens
  SIMILAR (1)..(78): 801254mologous to Homo sapiens CC chemokine CCL28,accession number AF220210,Smith-Waterman Score=104.
atgcagcagagaggactcgccatcgtggccttggctgtctgtgcggccctacatgcctcagaagtcgtggctgccgtggaccaggagagactgaagtggaaaacagcgggcggtagccgaagcagagagcaaggaagagcgcgggaagtgcagagcgacagcaacaagaaaggggtggcgcgggacgtcgtttacctgggcgacgtccagccgcccttcccgcctctgcgcgtacgcaacctgcttggcgccactgacctggccgtggacggttcctacccgcgcgcggagaggaccgacgtgaagaagctgccaaagtataacaagtactacgcgaaggcctttttggatcaagtccagcttctgcgcagagcgctggactgtttgcagtgcctagaactgaacatggtctggctccctatgcacatgctgttctccgagaagctcttcctccaccacttaaatatctgggtagccgttacttaa

SEQ ID NO: 17066 - DNA, 474 bp, Homo sapiens
  SIMILAR (79)..(648): 921254mologous to Escherichia coli hydrogenase-1 small subunit (hyaA) precursor,accession number M34825,Smith-Waterman Score=956.
cctcatttcctgatcgaacagcctcacttgtgttgctgtcagtgccagtagggcaggcaggaatgcagcagagaggactcgccatcgtggccttggctgtctgtgcggccctacatgcctcagaagccatacttcccattgcctccagctgttgcacggaggtttcacatcatatttccagaaggctcctgggaaagagtgaatatgtgtcgcatccagagagctgatggggattgtgacttgggctgctgtcatccttcatgttcaagcgcaggaaggaatctgtgttcagcccgcacaaccatactgttaagcagtggatgaaagtgcaagctgccaagaaaaatggtaaaggaaatgtttgccacaggaagaaacaccatggcaagaggaacagtaacagggcacatcaggggaaacacgaaacatacggccataaaactccttattagagagtctacagataaatctacg

SEQ ID NO: 17067 - DNA, 393 bp, Homo sapiens
  SIMILAR (283)..(393): 561254mologous to Homo sapiens HTRM clone 438283 protein sequence,accession number Y73345,Smith-Waterman Score=107.
  misc_feature (1)...(393): n = a,t,c or g
tttcgtcgtctttcgggttcaagcctgcgcctcgcgttccacaggttcccacgctccgctgtcgggttttggggtcgccctgtaggttaaaaccccgaacctgctcattcctctcgcggcgtggccctaagacgttcccagtcccgtcgctccgagagggtctagagatctgcgtccatttcggattaaaatcgttctgaacccacacaatatgacctcggggaggatgcgaggaagatgaactgnnnnnnnnnnnnnnnnnnnnnnnnnngactgacttacctgagaaagaaactcagaggaagaggaaagaaagaagaggagggaatggctctttctcagggactgtttacattcaaggatgtggccatagaattctctcaagaggagtgg

SEQ ID NO: 17068 - DNA, 415 bp, Homo sapiens
  SIMILAR (248)..(835): 891254mologous to Escherichia coli K12 putative oxidoreductase,accession number AE000459,Smith-Waterman Score=928.
  misc_feature (1)...(415): n = a,t,c or g
tttcgtcgtctttcgggttcaagcctgcgcctcgttggcctcagggtcccacgctccgctgacgggctttggggtcgccctgcaggttaaaaccccgaacctgctcattcctctcgcggcgtggccctaagacgttcccaggcccgtcgctccgagagggtctagagatctgcgtccatttcggattaaaatcgatctgaagtgggtactggccccgacctttttgctttagcccacacaatatgacctccgggaggatgcgaggaatatgaactgnnnnnnnnnnnnnnnnnnnnnnnnnngggactgtttacattcaaggatgtggccatacaatactctcaagaggagagggagtgcctggaccctgcccagagggccttgtgcagggacgggacgctggagaactacaggg

SEQ ID NO: 17069 - DNA, 796 bp, Homo sapiens
  SIMILAR (250)..(113): 361254mologous to Kaposi's sarcoma-associated herpesvirus K1 glycoprotein,accession number AF282187,Smith-Waterman Score=61.
  misc_feature (1)...(796): n = a,t,c or g
gccctgtacggcacgagcggcacgagcctgcgcctcgcgggccacaggttcccacgctccgctgtcgggttttggggtcgccctgtaggttaaaaccccgaacctgctcattcctctcgcggcgtggccctaagacgttcccagtcccgtcgctccgagagggtctagagatctgcgtccatttcggattaaaatcgttctgaagtgggtactggccccgacctttttgctttagcccacacaatatgacctcggggaggatgcgaggaagatgaactgnnnnnnnnnnnnnnnnnnnnnnnnnngactgacttacctgagaaagaaactcagaggaagaggaaagaaagaagaggagggaatggctctttctcagggacttggttacattcagggatgtggccatagaattctcttcagaggagtgggagtgcctggaccctgcccagagggccttgtacagggacgtgatgttggagaactacaggaacctgctttctctcgatgaggataacatccctccagaagatgatatttctgttggatttacaagcaagggattatcaccaaaggaaaataataaagaggaattataccatctggtgatattagaaagaaaggaaagccatggcatcaacaattttgacctcaaggaagtctgggaaaatatgcctaagtttgacagcctgtgggactatgatgtaaaaaattacaaaggaatgcctttgacctgtaacaaaaatctcactcacagaaaagatcaacaacataataaatcctcaatacatttctcttt

SEQ ID NO: 17070 - DNA, 198 bp, Homo sapiens
  SIMILAR (16)..(174): 961254mologous to Homo sapiens U6 snRNA-associated Sm-like protein LSm7,accession number AF182293,Smith-Waterman Score=257.
cggccgcgtcgaccggataaggagaagaagaaaaaggagagcatcttggacttgtccaagtacatcgacaagacgatccgggtaaagttccagggaggccgcgaagccagtggaatcctgaagggcttcgacccactcctcaaccttgtgctggacggcaccattgagcacgtactcaatggtgcgtcgacgcggccg

SEQ ID NO: 17071 - DNA, 633 bp, Homo sapiens
  SIMILAR (1)..(180): 1001254mologous to Homo sapiens R30783_1,accession number AC005258,Smith-Waterman Score=313.
atgtcggccggtgcccgccgcaaccaacggcagatgtttcccagcaacgccccgagaccccgggccacgcatgcgccgcgcatgcgcgtgggggaggtcaaagggcgcggggcggtgcctgcgaagagccacacggcgcgacaagatggcgaaaaaggagagcatcttggacttgtccaaagtacatcgaccaagactatccgggtaaagttccagggaggccgcaaaagccagtggaatcttgaagggcttcgaacccaacctcctccaacttggtgctgaccgtcaccatttagtacatgcgagaccctgacgaccagtacaagctcacggaggacatcccggcagcttgggtctcgtggtgttccggggcaacgtccttggtgctaaatctgcccgcaggacggcatggaggccatcccccaaccccttcatccagcagcaggacgcctagcctggccgggggcgcggagggtgcaaggcaggcccgagcaagctcggtttcccgcggacttggctgctgctcccaccgcagtaccgcctcctggaacggacgcatttctcctttttgtaaaaggtttgaatttttgttttccttaataaaattgcaaacctcaaaaaaaaaaaaaaaaa

SEQ ID NO: 17072 - DNA, 1809 bp, Homo sapiens
  SIMILAR (292)..(819): 971254mologous to Escherichia coli O-SUCCINYLBENZOATE-COA SYNTHASE (OSB SYNTHASE) (4-(2'-CARBOXYPHENYL)- 4-OXYBUTYRIC ACID SYNTHASE),accession number D90857,Smith-Waterman Score=866.
atgcagtctcagtcaagggatgcctcttccaaggtgaattcttccctcaggatgcagccagctgtaatgggcacagccattggggacaaccaagcagccaacaacgtcccatttatcccaaaaaacacaaaaacaacaagcttcagcaaattcgacacgtttcccaacacgggcaaaagttggcttatgtgcggatttaacatagccagagtcgtccccttccacgtgggatacatttccaagtatgtcgttcccgtattatcatattcgagaagacaaatgttattaattcaaagggggccatgtgccagaaaagttaccccacagttatggaatgtgggatcccaagatcccgaagattacgaatggcccaagttccacattccacccgaagaccaaggcagtggacggcacacgagaaaggacttttggggaatggggcgtcccgaagagaaacctggagctgattaccattacacgaaaagttttactccaggaaagggaagaaacgggacccctcgttggagcacagttggtagatcctcctctgttttaggcaccatccagatgcacctgtccagtgcaaagctggccggagctggcttagatttggtcactgcagcagctgctggagcaagggaggcagcctccaagagggcagaggtcatgtctgtcttgctcattgatgtatctcaagtgtttagcacagttcctggtgaagatagcagatgtcctccgaatgctctggcttatggcttgcccaatagcctggtgattgattccagtggcctcacagaggctgattttggcagcagaggttttggaggtgcctgggtaccccttttgggtgctatagactgggcccatctggagctgggaagactgttgggtacagaattccaggtcatgttcttcttctctgcattggtgctcactttgtgttttactgttcatctgtgcagtatctctgaagccccacttacagaggttgcaaagggcattcccccacagcaaacccctcaggaccctccattgtcatcagatggaatgtacgagtatggttctatcaagaaagttaaaaatggttactcactatctgggaacagccaggaaaggggtaactttggcaggaacaggtacaggaacagagttccttggcaggaacaggaacagtggatccagagaggcagcattcagggctgtcgatcaactgtgttttctctggctgcctggaggagaatacttgtactctttgactctccttcaccaagaagccagaactctaagattactagttggactggagccctctgtgcatttatgcaggacagccaaagaatcacggaatatctatatgataacattcatgcggtcattaaaaatgatcatactggtaaggccatgtttcatctcctgttacaactttttgaagaaatgtttcaggatcttgatcctgcatgtttaaaattttcattgaaagctctgctcttgtctgcagttgatctgggcacaatacttttggtacccattgagtggaagcctcattctgggcctgaaactgccaagcagccactcgtgcttaacagaatacctcctactcgcagggcaatgacattaaagtcactgctgagagcactggtgaacatgcctcctcactaccgctacctttgcatcagccacctcattggatggacggccttcctgtccaacatgctgttcttcacagatttcatgggccagtgggttcctgatcaagtttctctggaaaatgaaagggaatctttacaagatgaagtgttggatggatga

SEQ ID NO: 17073 - DNA, 2066 bp, Homo sapiens
  SIMILAR (905)..(1126): 551254mologous to Homo sapiens Human secreted protein, SEQ ID NO: 5459,accession number G01378,Smith-Waterman Score=181.
atgccgggccgcaccgcggggctccaggccgcccgcgccccactccgcgagccgacagcgccctctggtggacgctggcgcgctcgccccagtggctcccgaggctctcaccgcctccgctgtctccgctccctgcggtgcccggctcagccccggaccagcctgggggaagcgacccttctacgtcctggccggtctagtttctctgtcgtcggctaccgggtccctcaggtcaccccaccccggccggagccggatggagaggcgaagagagccttgggtctaaaaagggcaacttggcttttcaaagtgaagaattctgttcttatcgctgcattagagccacaggccatctatttgacagttaaatccaagaagctagaatttgaaggtaaaggtattcgaagggccttcagacagaccacagagaccacccctgcattttcccaaacccgaggctgcaggtcagctcctgaagctgaggtgagggttgtgggaagtggccgtacaatcccactgcaggcatcgcctccaggatgggaggtgctgggcatgggagcaggctatgaggactctgtggtgcaagtgaaagagacacaggtgcaggtgtgggccaagataaggacgatgaggtgtgatgaagaggaggccatgcactgggctagtgaaggattgatccagatccccagacaaggcttccctcctatgaccaaccttgtccactttatgtgtgaaatgagccgcctggctccgccccgttcggtagcgccgcgccttggaggtctgtggctaacttggtccggaagaagcgaggcggaccttctggcgtttgaaaaacttccggcgggaaccggaagatcatctgcctctgaagaagatgacaaggaagatagtgcctgggagccccaaaagaaagttcccagaagccgtaaacagccccctcccaaggaatccaaaccaaagaggatgcctcgggtgaagaagaatgccccacagatcagtgatggctcagaagtccgttgttgttaaggaggagctgaatagctctgtggctattgctgatactgctttagaagacagaaaaaataaattggatactgtacagactctgaaaacagccaagacaaaacagaaatgtgcagcgcagccacatacagttcgaaggactaaaaagctgaaagttgaagaagaaaccagcaaagccagcaacttagagggtgagagtaatagttcagagacaccatccacaagcacatgtgtggggaggtacatgcaagaaggaagagaatgacgatgactttacatttggtcagtccgctttaaagaaaatcaagactgagacatatcctcaggggcagcctgtcaagtttccagcaaatgccaatagtactaaagaggaggtggaaatgaattgggacatggtacaggttttatctgagagaactaatattgaaccttgggtttgtgccaacatcattcgtctctttaatgatgataacacaattcccttcattatacgttatagaaaagagctcattaataaccttgatgctgattccttgagagaagttcagcaaaccctagaagagctacgggctgttgcaaagaaagttcatagtacaatccagaaaattaagaaggaagggaagatgtctgagtgcttgttaaaagccatgctgaattgtaaaacttttgaagaactagaacacgtgtctgctccatataaaactggaagcaaagggactaaagcccagagagcaagacagttgggcttagaaggagcagccagggcactgcttgagaaaccaggggagctcagtctgctatcgtacattaggcctgacgttaaagggctttcaacgcttcaggatattgaaataggagtgcagcatattttagcagatatgattgctaaagacaaagacacgcttgacttcattcggaacttcctttatgtagataaccccagcacagtatcacagaacacagaaatgaatgcaaatgatgaaagacagtgtggtgaaggaaaattactgtggaactctctccaagtactgtgggaatag

SEQ ID NO: 17074 - DNA, 441 bp, Homo sapiens
  SIMILAR (247)..(441): 1001254mologous to Homo sapiens dJ20N2.1 (novel protein similar to yeast and bacterial cytosine deaminase),accession number AL031320,Smith-Waterman Score=343.
  misc_feature (1)...(441): n = a,t,c or g
gctgagtggtggctgggtatggaggcgaaggcggcacccaagccagctgcaagtcgcgtgtgtcggcagaggagaccgaaaagtggatggaggaggcatgcacatgatactatgctatgcacagtgttttcatgtgggccatgttataatccccacagaagccctatcannnnnnnnnnnnnnnnnnnnnnnnncctcactggaagcagatgctgataccatacttcttgtacagtctggagaactgccaaagaagccctcgaaaatactgaagttcctgttggctgtcttatggtctacaacaatgaagttgtagggaaggggagaaatgaagttaaccaaaccaaaaatgctactcgacatgcagaaatggtggccatcgatcaggtcctcgattggtgtcgtcaaagtggcaagagtccctctgaagtatttgaacac

SEQ ID NO: 17075 - DNA, 462 bp, Homo sapiens
cttctgcacacatagacgttccctgtctccccgcttgcatactttctctgtcctcacaacaaccttttggtttagaaagaactcatttctggtcatacaagatgtagctttagtaagactggtcagatatccaaaaattgggataaagtcttagcttaagtaaagaaatatttcagctgtgaattgtgtccccccccgcgctccaccccgccaaattgttacatcgaagtgcttaactctcagtacctcagattgggagagaatgccaagggtgtggctggacagccatgtgctaacgaaattaggtacgtgactcacggatccaatcaacctccacagtagatgccagaaatacagaggtggttatctgaaaaagatccgcgaagaaccctcttgtctgactgcttggacccccatgacttgcatgggcctcgtgccaagcatggcgtaagatggtcaaac

SEQ ID NO: 17076 - DNA, 587 bp, Homo sapiens
  SIMILAR (85)..(705): 771254mologous to Homo sapiens Zinc-finger protein,accession number D70831,Smith-Waterman Score=934.
actgagaacggctccggaatttccgggtcgacgatttcgtggctgcgcggcggcagcggcagaaagcgtagctgctttgctgtagtccacgcccccttgccgctccggtgacagtctctgcggaaagtcacgtttgtgatttcgggagagcacagaacgggacgacggcgctcttgctgggtcatctgggccaggtgacgaagaaacagtttcctggtgaagcagtccctcacccctagtcagcccacacccctagggcctaaagatgctgaggtctgtatggaattttctgaaacgccacaaaaagaaatgcatcttcctgggcacggtccttggaggagtatatattctgtggaaatatggacagatgatcaccctagacttacaggaatgggaggttcgcctattacatcgcccaagcacgacgacaatatcattttgaaagtaaccagaggacttgcaatatgacagtgctgtccatgcttccaacacttgagagaggccttaatgcagcaactgaattccgagagcctcacagctctgctaaaaaacaggccttcaaacaagctagaaatatgggaggatct

SEQ ID NO: 17077 - DNA, 761 bp, Homo sapiens
  SIMILAR (618)..(749): 811254mologous to Homo sapiens dJ20N2.1 (novel protein similar to yeast and bacterial cytosine deaminase),accession number AL031320,Smith-Waterman Score=187.
atgagtaatgatgtaacgaacattaaagaagtggtattggcgaattgcaaagtccatgctgtcaatgtttctgctggtataaaattctcaaaaaccttattggcctcccatgcaagtcatgggggtccaagcagtcagacaagagggcactccgcggatctttttcagataaccacctctctatttctggcatctactgtggaggttgattggatccatgacccaagcaagagcgccgtccgtcccgttctgtgctctcccgaaatcacaaacgtgactttccgcagagactgtcacccggagcggcaaagggggcgtggactacagcaaaggcagctacgctttctgccgctgccgccgcgcagccgccgccgctcactggtccgacaagcccagctgagtggtggctgggtatggaggcgaaggcggcacccaagccagctgcaagcggcgcgtgctcggtgtcggcagaggagaccgaaaagtggatggaggaggcgatgcacatggtgaggagcccgggaggaacatactgtttaattgatgaaattaagtcaggcacagatgaaaaggttgtatggagtattacgtcttacattttccactttgtgtttcaggccaaagaagccctcgaaaatactgaagttcctgttggctgtcttatggtctacaacaatgaagttgtagggaaggggagaaatgaagttaaccaaaccaaaaatgtatgtgagttgagcagtataattgcaaacatacagtag

SEQ ID NO: 17078 - DNA, 425 bp, Homo sapiens
atgtttctgtgaaagtaggtaaatagctgctgagtgaaagcccctgaagccccctcacttaaagaaaacacaaatgagagtacacatatatgctgtcatcgattgttctgtttgttttcatttaattctgtaattcagaactcctaccatattcaaatattcaactcatttctcacccagttgaatcctgatacattcagccagtcttctaaggatggactcttgggtgttgtcaattcttctaagcaaagcatcagtgaacactttgatgaaaggagaatgccttccttagatacctatgtaactgtcttctctttgccaagtgggtctctgctcaaatgttaccttcttagagtggccctctctgaccactgaagttgaggcggcctccccttcactctccatttcatcccattctctgatca

SEQ ID NO: 17079 - DNA, 993 bp, Homo sapiens
  SIMILAR (543)..(292): 721254mologous to Homo sapiens putative transposase Ac- like,accession number Y16947,Smith-Waterman Score=292.
atgatcagagaatgggatgaaatggagagtgaaggggaggccgcctcaacttcagtggtcagagagggccactctaagaagcctccgcgtctgcgcagccgcagtcagtgcggcgccagctctgcagagcccagacagggtccggttggggagggtgaattccagcctcctcgtgaggaggggagcacagacctgtgtaccctcgtggggcggcacgggcacgtgcgctcgtctcgctggggcttggtgtcgatgttcgctccccctggggtgttcagcgcacctgcccgagtgtgcacctgtgcgtgttcgcgttgtgtgtccgcctgggcccctgtggaccaccctgcaacgcccctgctggccctctgtaatgattcactgaatgatgaaatgtccatcagtcctcaggttctgaatcttgtgcctggagaaccagagaggaccctggagcaggaggagaaagagaagcttgtctcagaagctccacctcctcctggggcaatgcagagtctcaggcctgagcagacacgggggctgctggagcctgagaggaccaagactctgctgcctcgggagagccgggcctgggagaagcctcctcatcccgcctgcaccaaagactgggaggctgtggaggttggggcctccagccatgacagtgatgagaaagacctgtcttctcaagagactgggctttcccaggagtggagctcggtggaggaagatgacgaatcagagggctcccaggcagtgggagccatcgaaggtgttcggggacttacagaatcactctgggagcccatgtggaaggaagccacactggcctccttgctgtttctcaaactcgcctatcatgcttacttcaggacttttgcactgttcctgctccgcggaatgctctttccccagaagctcccatggctccctcatctccttcaggtctcaaatgtcacttcctcacagaagccttccccgaccaccctcaagtag

SEQ ID NO: 17080 - DNA, 2199 bp, Homo sapiens
  SIMILAR (4)..(258): 641254mologous to Homo sapiens BC85722_1,accession number AC006486,Smith-Waterman Score=257.
atgttcaaatcaacaactgttactgtgagagaaaactgtaatgaaatttcccaacgagttgttgtggattcagttaataaccagcaagatttcaaatatactttgattcatagtgaagagaatactaaagatgctaccactgttgctgaagatccagaaagtgcaaataattatacagcaaaaaataaccaagttggggatcaagcccaggggattcacagacacaaaatcggcttttcttttgcatttccaaagaaagcgtccgtgaagctagagtcctcagctgcagccttctctgaatacagtgatgatgcctcagtgggaaaaggatttagcagaaaaagtagatttgtccccagtgcttgtcatcttcaacaatcttcaccaacagatgtgcttttgagttctgaggagaaaactaactcttttcatccaccagaggcaatgtgcagagacaaagaaactgttcaaactcaagagataaaagaagtctctagtgaaaaagatgcattattattaccttcattttgcaagtttcaacttcagttatcttctgatgcagataattgtcaaaattcagtcccattagcagatcaaataccactagagagtgttgttattaatgaagacatacctgttagtggtaacagttttgagttgttaggaaataaatccacagttcttgacatgtctaatgattgcatatctgtgcaagctaccacagaggaaaatgttaagcataacgaggcatccacaactgaggttgaaaataaaaatggtcccgagacattggccccttcaaatactgaagaggttaacataactatacataagaaaacaaatttctgcaaaagacaatgtgagccatttgtacctgtccttaacaaacacagatctacagttcttcagtggccatcagaaatgctggtttatacaactacgaaaccatcaatttcctatagctgtaatcctctatgttttgacttcaagtctactaaagtaaataataatctagataaaaataagccagacttaaaagatctttgttctcagcagaagcaggaagacatttgcatgggaccactttcagattacaaggatgtatctacagaaggactcactgattatgaaattggaagtagcaaaaataaatgcagccaagtcactcctcttttggctgatgatattctctccagtagttgtgattctggaaaaaatgagaacacaggtcagaggtataaaaacatttcctgtaagatcagagaaacagaaaagtataattttactaaaagtcaaataaaacaggacactctagatgaaaaatacaacaaaataaggttgaaagagacccatgaatactggttccataaaagtagaagaaagaaaaaaagaaaaaagttatgtcagcatcatcatatggagaaaaccaaagaatcagaaactcgctgcaaaatggaagcagagaatagttacactgaaaatgctgggaaatatctattggaaccaatttcagaaaagcagtatttagctgcagagcaattattagactcacatcagttacttgataaaaggcccaaatcagaatccatatccttaagtgacaatgaagaaatgtgtaaaacatggaatactgaatacaacacttatgatactatcagttctaaaaaccactgtaaaaagaacacaatacttttaaatggacaatcaaatgcaacaatgatacattctgggaaacataatttaacatattctagaacttactgttgttggaaaaccaaaatgtcaagctgtagtcaggatcacagaagcttagttcttcaaaatgatatgaaacacatgagtcagaatcaggctgttaaaagaggttacaattctgtcatgaatgaatcagaaagattctatcgaaaacgtagacaacattcacattcttattcttcagatgaaagtttaaatcgacagaatcatttaccagaagaatttttgaggccaccaagtacttcagttgctccctgcaagcctaaaaagaaacggaggcgaaaaagaggcagattccaccccggatttgaaactttagaactcaaagaaaatacagattatcccgtgaaacccaattcttccttaaatcctctggataggttaatccatcacacggcggccgggcgagcagctaaaaagggcagtacgagtaattttaaatag

SEQ ID NO: 17081 - DNA, 1388 bp, Homo sapiens
  SIMILAR (996)..(1265): 701254mologous to Rattus norvegicus Ca2+-dependent activator protein; calcium-dependent actin-binding protein,accession number U16802,Smith-Waterman Score=322.
ggtaaacatgttgcttggaagtatgcttttccagtttcacaaaatgacaccagtggccacagaagttagtaccctttggcctctgaaaatttcgctttatgaagagaaggctactaaaagacatgtaggacttagggttcaaggtggcagactagaggagctagtgtgtactgctctcgtggagaggaaatagtgacgagtaaacatggactctctaagtggatcatctaagaaaccacgtcaggattcaggatgcatcaagggagtaatgggacatggagaacagagaaaatcgaagctgggcagctgcctgcctgggaccagcatgaagacaggagaagctcctcaacacagggaaagaattagtgagtaagagtcctcaggggatccatacttcccacagtgacctgtgcaatcctgagaatgtgaaaaaccccatgactcccttgggcctctagactgatacagagagctacccagagtttttgcagaggcaacactcaagtccgtggggacccccccaggccctggactctggaacagcctggttgaggtgccatggccctgacagaagctgcagtcatggtgctggagatggacagattgctctactccctcttgacagaaaacctgctaaacccctgtggtttaggagagctttgtgttcccccaggaagcacttcgatggtgaattgggtgactccactcatcctgctcctaactgggcaggattcaacttcaccctgctcctaacttgggcagagccccaagcagggggtggggaggacgccctccctctcagaatactgaaaaggctggataacgcagatgaacaagcagcccagatcagaagggaacttgatggccggctgcaattggcagataaaatggcaaagaaatatgtgaatgttatattggaggagaagaaaagcaggtggcctgagactctgggactgatctgtgaagtggtgccagatgttccttccaatcccatgaatgaactggtgcaagaaagaaaattccccaaatttatagcaaaagatatggagaatatgtatatagaagagttgcggtcttcagtgaatttgctaatggccaatttggaaagtcttccagtttcgaaaggtggtccggaatttaaattacaaaaattaaaacgttcacagaactctgcatttttggacataggagatgagaatgagattcagctgtcaaagtccgacgtggtactgtcattcaccttagagtattttaagcaggagttatgtgtccagcaacaaagtaaaatcgtgttaagtgacgatggtgcagtgcatgtttataggacaccagagagaatagatatgcctctagtcacaggacctgtgacatcagccaagctaaactga

SEQ ID NO: 17082 - DNA, 454 bp, Homo sapiens
  SIMILAR (2)..(304): 961254mologous to Homo sapiens protein kinase,accession number X85545,Smith-Waterman Score=500.
ggagagcgactcccgcaaggtggcggaggagacccccttcggggcgcccgcgctctgccccagccctgaggcgctgtcgccggagccgcctgcgtacagtctgcaggactttgacacgctggccaccgtgggcactgggacgttcgggcgggtgcacctggtgaaggagaagacagccaatcatttttttgccctcaaggtgatgagcattcctgacgtcatccgcctaaagcaggagcaacacgtacacaatgagaagtctgtcctgaaggaagtcagccacccgttcctcatcaggctgtggccccgttgcaatgctgacttgacttgcaccaaggcagtacagaatggatgggatttgctaaaggtgcccacctgcctccaccttttgctggcagttccaggtgttggactttttattgatgaaggtgtaaagcaaggattttcagtggag

SEQ ID NO: 17083 - DNA, 960 bp, Homo sapiens
  SIMILAR (345)..(1364): 441254mologous to Lycopersicon esculentum extensin-like protein,accession number AF159296,Smith-Waterman Score=594.
atgcttggggcccccgccttcctcgcagccatccagcactcggtgcacgccccgcgaggccagcggctgctccctcccggggctattgctgctagtgccgcggccgcggcggagagcaactcccgagaggtgacggaggatgccgccgactggacgcccgcgctctgccccagccccgaggcgcggtcgccggaggcgcctgcctaccgcctgcaggactgcgacgcgctggtcaccatgggttgcctccctgtggtcgtttactgtggtgggtccagactcaaaaccaggtttggggccaccatcatcatatttgtgtcccccaccccaagattcttatgtcgacaccctagtccccaagatgatgatattagcagaattccagaagcaaatctcgtatcctgctggaggagcaagacggaaacgcaggtgctagagggcagattgtttgcacagaaacctgggcatgtggatgaatttggtaatactcacgtgtgtgcggaaggacactcgttgttggatttgggtcccaccctaaatccaggatggcctcatctggagattgtttacttaatagaaactacaatgaccctattttcgaataaggctctattcacaggcactgggacgttcgggcgggtgcacctggtgaaggagaagacagccaagcatttcttcgccctcaaggtgatgagcattcccgacgtcatccgccggaagcaggagcagcacgtgcacaatgagaagtctgtcctgaaggaagtcagccacccgttcctcatcaggctccatacagaatgtgcctccttcctcttcgccttctgccaggattgtgtcaatgtgggggaattatgggataaaagaggtcagggagaatcatctatttggagtgacaactacagaaagagcacaggtcaagtggctacagtgaaaccagagaacgtgatgtttaagatttga

SEQ ID NO: 17084 - DNA, 553 bp, Homo sapiens
  SIMILAR (225)..(82): 951254mologous to Homo sapiens Human secreted protein sequence encoded by gene 33 SEQ ID NO:154,accession number Y91433,Smith-Waterman Score=221.
ttagtaaacagaagctgctattgtcgatgatgtgatggtctccatttgtggatgtgctgtctttgtagctctgcagttgtctctgaggctgaacagccctgcgggtcgccccaccaagctcaggaggatggccagctgcttctggcccaggcagcactgggtcagcgtgagctccgtcagctgcagggactcgctcaagccggtggccagcctggacacgaactcatggccggaagctgcactcacttagcctgagtgtcttcccagcctggtcctctctggagaagtgaatccggaagctctgctcagagcccaggtcaagcaaaccggagatgggcacctgcggcagacattccagaaggcatctgagtccgctgtcgcccagcaggtttgctgagagacaggagcctgcatccactgtcactgctactggaccccatgtcagggtcaccagcgccaccaccatcaccaccatcaccagtatcaccaccatcaccaccaccaccaatgtcaccaccaccagtattaccaccatcaccaccaccactttcat

SEQ ID NO: 17085 - DNA, 328 bp, Homo sapiens; identical to SEQ ID NO: 12619
  SIMILAR (23)..(289): 961254mologous to Homo sapiens nucleophosmin,accession number M23613,Smith-Waterman Score=446.

SEQ ID NO: 17086 - DNA, 247 bp, Homo sapiens
  SIMILAR (69)..(245): 861254mologous to Homo sapiens nucleophosmin,accession number M23613,Smith-Waterman Score=281.
  misc_feature (1)...(247): n = a,t,c or g
gttctctggagcagcgttcttttatctccgtccgccttctctcctacctaagtgcgtgccgccacccgatggaagattcgatggacatggacatgagccccctgaggccccagaactatcttttcgattatcactttaaggtggataatgatgaaaatgagcaccagttatctttaagaacggtcagtttaggggctggtgcaaaggatgagttgcacattgttgaagcagaggcaatganttacga

SEQ ID NO: 17087 - DNA, 1115 bp, Homo sapiens
  SIMILAR (690)..(1112): 891254mologous to Homo sapiens nucleophosmin,accession number M23613,Smith-Waterman Score=643.
aatggggcacagtaacagcctcctttgcaatgtggatgacacagaatgccccggaagcacatccccctttcgccagctggcgtaatagcgaagaggcccgcaccgtacgcacttcccaaaagagagagatgaccagtaggctaatggatcgggattcaaccttaactgtgtcgattttatgcaaattaagacagcaggactattttccatatatcaaatttatcagcaaaggcgtgttttcaatgtcatcatccaccattgatgtgcaagtctcaaaatgtggcactgtcatccacctagatgttcaagccaaaaacccaaaagccatcactgagtccctcctctgtcacttgacacagaagccctgtgggctccacctcctgatttctgcatcgcccagtgaccaccataggctctcacctacgctactccctgcgaaaatagattgctacagtcaattctgcactcagcaaccaggaaaatccatcccgaattcaaaatctgtatctcatcacatgattcccctttcaaaaccaccagtggcttttcatcgaaatcaaatgtacagttcctactctagtcttctacgggcaatcttcccctctccgtgcctgaggaagccagttgacttgcactacatcaaaggcttccttgcattctgctttctggttagtacgtgccaccaccccatgaaagatgtgatggacacggacatgagccctgtgaggccccagaactatctttttggttgtgaactaaaggccatcaaagatgatcactttaaggtggataatgatgaagatgagcaccagttatctttaagaacggtcagctcaggggctggtgcaaaggatgaattgcacattgttgaagcagaggcaatgaattacgaaggcagtccaattaaagtaacactggcaactttgaaaatgtctgtacagccaatgatttcccttaggggctttgaaataataccaccggtggtcttacagttgaagtgtggctcagggccagtgcatattagtggacagcacttagtagctgtagaggaagatgcagagtcagaagatgaagaggaagaagatgtgaaattcttaagtatatctggaaggtga

SEQ ID NO: 17088 - DNA, 1345 bp, Homo sapiens
  SIMILAR (622)..(1023): 571254mologous to Mus musculus nucleolar protein,accession number M33212,Smith-Waterman Score=329.
  misc_feature (1)...(1345): n = a,t,c or g
agtgtggtggaattcattccgtcctgcgcggttgttctctggagcagcgttcttttatctccggtccgccttctctcctacctaagtggcgtgccccccggtcacccgatggaagattcgatggacatggacatgagccccctgaggccccataactatcttttcggttgcgaactaaaggccggccaagattatcactttaaggtggataatgatgaaaatgagcaccagttatctttaagaacggtcagtttagggggctggtgcaaaggatgagttgcacaattgttgaagcagaggcaatgtattacgagggcagtcccattaaagtaaacacttggcaactttgaaaatgtctgtacagccaaccggtttcccttgggggcatttgaaataacaccaccagtggtcgttaaggttgaagtgtggttcagggccagtgcatattagtggacagcacttagtagctgtcggaggaagatgcagagtcagaagatgaagaggaggaggatgtgaaacctctttaagtatatctggaaagcggtctgccccatggaggtggtagcaaggttccacagaaagaaagaaaaacttgcatgctgatgaaagatgatgacgatcgatgatgaagaggatggatatgatgaagatgattgatgatgatgatgatgattttggatgatgaggaagctgaagaaaaagcgcccagtgaaagaaatctataccgagatactcccagccaaaaatgcacaaaagtcaaatcagaatggaaaagactcaaaaccatcatcaacaccaagatcaaaaggacaagaatccttccaagaaacaggaaaaaactcctaaaacaccaaaaggacctagttctgtagaagacattaaagcaaaaatgcaagcaagtatagnagaaaaggtggttctcttcccaaagtggaagccaaattcatcaattatgtgaagaattgcttcccgatgactgaccaagatgctattcaagatctctggcagtggaggaagtctctttaagaaaatagtttaaacaatttggtaagagaatttaccgtcttatttcatttctgtaacagttgatatctggctttcctttttataatgcagagtgagaactttccctaccgtgtttgataaatgttgtccaggttctattgccaagaatgtgttgtccaaaatgcctgtttagtctttaaagatggaactccaccctttgcttggttttaagtatgtatggaatgttatgataggacatagtagtagcggtggtcagacatggaaatggtggggagacaaaaatatacatgtgaaataaaactcagtattttaataaagt

SEQ ID NO: 17089 - DNA, 291 bp, Homo sapiens
  SIMILAR (26)..(136): 941254mologous to Homo sapiens high-mobility-group protein isoform I,accession number M23619,Smith-Waterman Score=181.
tcacctgctccttagagaagggaagatgagcgagtcgagctcgaagtccagccagcccttggcctccaagcaggaaaaggagggcactgagaagcggggccggggcaggccgcgcaagcagcctccgatgagtcctctgaacagttgtgttgttttttgttcaatgttccattcttccacatccgtcattgctgctgctaccagcgccaaatattcatcctcactgcctcctgttctgcccacgatcccctcccgcaagatactctttgtagggaagaggggctggggcat

SEQ ID NO: 17090 - DNA, 885 bp, Homo sapiens
  SIMILAR (774)..(1619): 671254mologous to Homo sapiens hnRNP H,accession number L22009,Smith-Waterman Score=866.
ttttttttttccagaaaaggatattttttttattcaagtaactgcaaataggaaaccagagagggagccccaggctgggacaaatcatggctacccctccccaacagaacagggggaggaggtggcccctacaccctttatggtcgattcgggcccccttgctcactctgctgcagcatcctaggggcagggccccaccttccctgggactggggtagtcggtcacccagcctgccatgccccagcccctcttccccacaaagagtatcttgggggaggggatcgtgggcagaacaggaggcaatgaggatgaacatttggcgctggtagcagcagcaatgacggatgtcgaagaatggaacattgaacaaaaaacaacacaactgtccagaggtagtttgtgaacagaggaaaaatggaagcaaagtagggttaggggagcagccccagcccacctcaggtggcggccacagggctcttgggcctcacctggacaataagtgactgcatctccatcaccacaatatgtactcagatcccaggcggagggcaagggggctgtggccacagtgaagagggagtaagggactcacccctcctgccttcctgtagccgaagggggctgtccaacctagtacggggactagggaagttggggaaggatgaaaagtgagccccacgtggtgacaaagacagtttggctgggggaatcctgggggccagcacccccctccattggccacacctgctgctgccagggcagtggagtagggcgtgccaggatgagatggggcttgggccccttttaaggccaggggaaccctcccaggccccactatgggaagccagagggaacagttaaggagcagagagggcccttgttcc

SEQ ID NO: 17091 - DNA, 672 bp, Homo sapiens
gcgtccgcggcggacaggcgttccgtcagcgcccagcaccgccgctcccggtaacccggagcgcgcaccgaggccggcgcccgactcgcgcatcccagccatcactcttccacctgctccttagagaagggaagatgagtgagtcgagctcgaagtccagccagcccttggcgtccaagcaggaaaaggacggcactgagaagcggggccggggcaggccgcgcaagcagcctcgcggtgagtcccgggacagcgctggtagggagtcagaaggagcccagcgaagtgccaacacctaagagacctcggggccgaccaaagggaagcaaaaaaaactggagaaggaggaagaggagggcatctcgcaggagtcctcggaggaggagcagtgacccatgcgtgccgcctgctcctcactggaggagcagcttccttctgggactggacagctttgctccgctcccaccgcccccgccccttccccaggcccaccatcaccaccgcctctggccgccacccccatcttccacctgtgccctcaccaccacactacacagcacaccagccgctgcagggctcccatgggctgagtggggagcagttttcccctggcctcagttcccagctccccccgcccacccacgcatacacacatgccctcctggacaaggc

SEQ ID NO: 17092 - DNA, 626 bp, Homo sapiens
  SIMILAR (735)..(1163): 971254mologous to Homo sapiens HSPC264,accession number AF161382,Smith-Waterman Score=773.
ccagaaaaggattttttttaattcaagtaactgcaaataggaaaccagagggggagcccaggctgggtataaatcatggctacccctccccaacagaacagggggaggaggtggcccctacacccattatggtcgattcgggcccccttgctcactctgctgcagatcctagaggcagggccccaccttccctgggactggggtagtcggtcacccagcctgcattgccccagcccctcttccccacaaagagtatcttgggggaggggatcgtgggcagaacaggaggcaatgaggatgaacattgctcaaactcctttcaaagggcacctgaccgcacagggaggtggcagaaggcaaggatgggatgccgtgtaagaggcggaggcagcagttgtggggtggagagggaggtagtggcacgggccggggcatggcagtggggtgcagggtggctggatgcatcccagaagacttttggcctaaaaaatgggcaggattcggtcataggttggagagttgagagaggggaggagaagaagaggacagtgctggaggatggtaatgtcatttacttaaggaaagggggacatggaaaaagagaaggtaaatgtggtggataaaat

SEQ ID NO: 17093 - DNA, 2012 bp, Homo sapiens
  SIMILAR (818)..(1174): 961254mologous to Homo sapiens HSPC264,accession number AF161382,Smith-Waterman Score=599.
  misc_feature (1)...(2012): n = a,t,c or g
tttttttttttttttttttccagaaaaaggatatttttttttattcaagtaactgcaaataggaataccagagatgggagccccaggctggggacaaaatcatgcttaccccttccccaaacagaacagggggaggaagttgccccctacaccccttttatggttcgattcgggccccctttgcttcacttctgctgcaagcattcccttaggcaggggccccaccttccctgggactggggtagtcggttaaccccaccttcccatgccccaaccccttcttccccacaaagagtatcttgggggagggaatcgtggccagaacaggaggcaaatgaggattgaacattttggcgcttggtagcagcagcaattgacggattgtcgaaagaatgggaacattgaaccaaaaaaccaacacaactgtccagaaggtaattttttgaacagaggaaaaaatggaacccagaaccttgggggggcagggaggagacaggagggggggttgtggagcgggcaggggtgacctccttcttattgggtgccccatcttgaggagggcggaatggctgagatggcggaagcaaagtatgggtatggggagcagcccccaccccacctcaagtggcggccacagggctcttgggcctcacctggacaataagtgactgcatctccatcaccacaatatgtactcagatcccaggcggacgtgcaagggggctggggcccacgtgaaagagggagtagggggctcacccctcctgccttccttggaccaaagggggctggcccaccttatacgggggactaaggaggttgggaaagaagaaaaagtgagccccacgtggtgacaaagacagtttggctgggggaatcctgggggccagcacccccctccattggccacacctgctgctgccagggcagtggagtagggcgtgccaggatgagatggggcttgggccccttttaaggccagggggaaccctcccaggccccactatgggaagccagagggaacagtgaaggaggcagagagggcgcccccaaaccaaaagcccagagagcaatgtccccaccaccaagggagtggggacgcagcaggtgcagggtgcggctaagtgggatgttagccttgtccaggagggcatgtgtgtatgcgtgggtgggcggggggagctgggaactgaggccaggggaaaactgctccccactcaggcccatgggagcccctgcagcggcctggtgtgctgtgtagtgtggtggtgagggcacaggtggaagatgggggtgtcggccagagccggtggtaatggtgggcctgggaaaggggcggggccggtgggagccggagcaaagcctgtccagtcccagaaagaaagctgctcctccagtgaggaagcaggcggcacgcatggcgtcactgctcctcgtcctgacgattcctgcgnagatgctcttgtcttcctccttctccagttttttttgggtcttgccccttggttttcctttcctggagttgtggtggtttttccagggtcttggcagcaacccttgtttttgattccctttggtcggccccgaggtctcttaggtgttggcactttcgctgggctccttctgactccctaccagcgctgtcccggggactcaccggacggctcgttgcgcggcctgccccggccccgcttctcagtgccgtccttttcctgcttggaggccaagggctgggctggacttcgagctcgactcactcatcttcccttctctaaggagcaggtggaagagtgatggctgggatgcgcgagcaacgccgccggcctgccggtgcgcgctccgggttgccgggagcggcggtgctgggcgctgaggaccggcctggctccgccgcggccgccgctggtagcaaatgcggatgccttcttggagcccggccagcgccagaaatagccccggctcggagtcccaattagaggagcgcagcaccggctcaggggagcttaaaaagc

SEQ ID NO: 17094 - DNA, 416 bp, Homo sapiens
  SIMILAR (124)..(687): 791254mologous to Homo sapiens bA110H4.2 (similar to membrane protein),accession number AL157879,Smith-Waterman Score=736.
aataaggaggtgactgctgtgcaggaatgttacctagaagtgtgcagagagaaggataatctagaattgactctcaggaagaccactgaaaaggagcaacagactcaggagaagatcaaagaaaaactcattcaacagcttgaaaaggagtggcagtctaagctggatcaaactataaaggcaatgaaaaagaagaccttagattgtggcagccaaactgaccaagtaaccaccagtgatgttatttccaagaaagagatggcaattatgatagaagagcagaagtgcacaatccagcaaaacttagaacaagagaaggacatagccatcaagggggctatgaagaaactcgaaattgaattggaactcaaacattgtgaaaatattaccaaacaggtagaaatagctgtgcaaat

SEQ ID NO: 17095 - DNA, 407 bp, Homo sapiens
  SIMILAR (286)..(32): 381254mologous to Schizosaccharomyces pombe putative glucoamylase,accession number AL031262,Smith-Waterman Score=103.
tttcgtctagtggactagagccagggtaaggggatctgctagaagttggtcttccgccaggactagagtttcctcgcggtatatgcctccgtggcctccggaggaccatgtcattagactttggcagtgtggcactaccagtgcaaaatgaagatgaagagtatgacgaagaggactatgaaagagagaaagagttgcagcagttactcacagaccttccccatgacatgctggatgacgacctctcctctccagagctccagtattcggactgcagcgaggatggcacagacggacaaccacatcatcctgagcaattggagatgagctggaatgagcaaatgctgcccaaatctcaaagtgtaaatggctataatgaaattcagagtttatatgctggagaaaaa

SEQ ID NO: 17096 - DNA, 996 bp, Homo sapiens
  SIMILAR (1)..(561): 1001254mologous to Homo sapiens PTD014,accession number AF092135,Smith-Waterman Score=967.
atgtcggaaatggctgagttgtccgagctgtatgaagagagcagtgacctgcagatggatgtgatgcctggcgagggtgaccttccgcagatggaggtaggcagcgggagccgggagctatccctgcgtccctcccgcagcggggcccaacagctcgaggaggaaggcccaatggaggaggaggaggcccagccaatggcggcgccagaggggaaacggagccttgctaacgggcccaacgctggggagcagccaggccaggtggcgggcgcagacttcgagagcgaggacgagggcgaggaatttgatgactgggaggacgactacgactatcccgaagaggagcagctcagtggtgccggctacagagtatcagccgctcttgaagaagccgacaagatgtttctgagaacaagagaaccagccctggatggcgggtttcagatgcattatgagaagaccccgtttgatcagttagcttttatcgaagagcttttttcactgatggttgtcaatcgtctgaccgaagaactcggctgtgatgagattattgatagagagaacattatttatataaacatttttaataccgtagatgaaaaggatggtttgactctcagccttcgagaatcacagaaactctttcagaatggaaaagaaagagagatacagcttgaagctcaaataaaagcactggagactcagatacaagcattaaaagtcaatgaagaacagatgatcaagaagtccagaacaactgaaatggctctggaaagcttgaagcagcagctggtggaccttcatcattctgaatcacttcaacgagctagagaacagcatgagagcattgttatgggcctcacaaagaagtacgaagagcaagtattgtccttacaaaagaatttggatgccacagtcaccgcacttaaagaacaggttgggatgatttcaaatgagcaactgttatcaacaagtaaagctggttatgttttgtaa

SEQ ID NO: 17097 - DNA, 1290 bp, Homo sapiens
  SIMILAR (952)..(1044): 611254mologous to Homo sapiens Human FC99 SH2 domain,accession number W15255,Smith-Waterman Score=117.
atggtacaagattttgaccatgacaaacaagaagctgtggataggtgtgaaaggacttatcagcagcaccatgaagccatgaaaactcaaatacgtgaaagcctattagcaaagcatgctttggagaagcagcagctctttgaggcttatgagagaactcatttgcaactgagggtcagtacaagaggtggctcagctacagttccagctgcagcaagcacagaaggcacatgctatgagtgcaaacatgaacaaggctttgcaagtgagtgttgccacttggaagaggctctatgggtatctgaattaggcagtagttacatcacctttttgaatcttgggtttctctgtataatagaggtggttggaccaccttcaaaccagcccatgggagttgttcaccatctccttcacacagttggcaagtcaaactcagtaagccagaaagcgccgccatcagcatttaagcccaaggaacacaccactttccatggaggacaaaatctaagagacagagatgaagaattaacagaactaaaagatgaaatttctctctatgaatctgctgcaaaactaggaatacatccaagtgactcagaaggagaattaaatatagaactcactgaatcgtatgtggatttgggtattaaaaaggtcaactggaaaaaatccaaagttaccagatcagtggcgacattagattctcataggagaatgaaccctattgtgaactacacatacgagggatctaggttgcatgctccttatgagaatctaatgcttgatgacctgagcaccacagatgcagaactagacaagtctagaaaccataacagaacaggaaagtccaagcagtcattttgcatcggtatatgcatgggtggagcaactgccctgactggatgggattttggggttcactactcaaggcaaagaggtcgcttttggaatgtgaggaccaaggatcatgtatttgataatgtcggccaccttatcagataccatatggataacagtttgccaatcatctcctctggaagcgaagaccaaaccgcaaaacagcccgaaaaaaacccgaagcccccaagaaaggcactttctccaaccatctactttaagtatgcacatgaagaacaatgccacactaactggaaagatgtctttggcagttctggagaaagatcccgaaacaccaaaacgaggttattaaacacaagctctcaatcaggggaccaaaccaaatcggacaccaaaacaaaccccgaacaaaacaacttcaatattttatga

SEQ ID NO: 17098 - DNA, 2007 bp, Homo sapiens
  SIMILAR (348)..(2930): 901254mologous to Homo sapiens bA110H4.2 (similar to membrane protein),accession number AL157879,Smith-Waterman Score=3891.
atgctcctgaatgaccagtggatcaatgacaagattaagaagaaaattgaaaaatattttgaaacaaatgataatggaaacacaacataccaaaacctatgggatacagcaaaagcagtaccagaagggaagtttattgctatatcatttgctgtttctgaagctaaagagaaatggaagagtgagcttgaaaatatgaggaaaaatatacttcctggaaaggaattggaagagaagattcattctcttcagaaggaacttgagttaaagaacgaagaagtccctgtggtcatcagggctgagttagctaaggctcggagtgaatggaacaaagaaaagcaagaagaaatccacagaatccaagaacaaaatgagcaagattaccggcaatttttagatgatcaccgaaataaaattaatgaggtgcttgcggcagctaaagaagactttatgaaacaaaaaactgaactacttcttcagaaggagacagaattacaaacttgtctagaccagagtcgtagagaatggactatgcaggaagccaagcggatccaactggaaatctatcagtatgaggaagacatcctgactgtacttggggttcttttaagtgatacccaaaaggagcacatcagtgattctgaggacaagcagcttttggaaatcatgtcgacttgttcttcaaaatggatgtctgtgcaatattttgaaaaactaaagggctgcatacagaaagcatttcaagatacacttcctctgcttgtagaaaacgctgacccagaatggaaaaagggggcccagcactttaccgactttggggtcgcgggttttgccttcgttatcactaatagtgacctgcggggtcggctacactttaccgagctagatgcggccaatgccgataacgccaacatagctgttgtaatcgagctgagaaatctgcatctggaacggaccgtcaaggtcaacgtccggcgcaggaacgtggtcaacaatcgcctggtacagcggggtcatgtcttccgccatatctacgaggtccagacccgcgataccgttcagggcaaaagcgtaaacgatcgggaagtccacttgctcgtcggccgtaagcaaacgcttttttggtttctaaacgcgtttgcgggattcggccggcaaatgcgtcaaccaccagcagacatgagtcctccatgggacagttacacgttacaacttcaccaccgaaagtcgcttccccctggggtatcaacgatgttgatacggatgttcagaatgaaactcatggaaacacttaaccagtttatttacgctggtcatgaaatgacgaaggctatcgccattgcacagtttaatgatgacagcccggaagcgaggaaaataacccggcgctggagaataggtgaagcagcggatttagttggggtttcttctcaggctatcagagatgccgagaaagcagggcgactaccgcacccggatatggaaattcgaggacgggttgagcaacgtgttggttatacaattgaacaaattaatcatatgcgtgatgtgtttggtacgcgattgcgacgtgctgaagacgtatttccaccggtgatcggggttgctgcccataaaggtggcgtttacaaaacctcagtttctgttcatcttgctcaggatctggctctgaaggggctacgtgttttgctcgtggaaggtaacgacccccagggaacagcctcaatgtatcacggatgggtaccagatcttcatattcatgcagaagacactctcctgcctttctatcttggggaaaaggacgatgtcacttatgcaataaagcccacttgctggccggggcttgacattattccttcctgtctggctctgcaccgtattgaaactgaattaatggccaaatttgatgaaggtaaactgcccaccgaaccacacctgatgcttcgactggccatggaaactgttgctcatgactatgaggtcatagttattggacggcgcgcctaa

SEQ ID NO: 17099 - DNA, 1371 bp, Homo sapiens
  SIMILAR (1)..(936): 671254mologous to Mus musculus Pro-Pol-dUTPase polyprotein,accession number Y12713,Smith-Waterman Score=1181.
atgcccagcattgtacaagaagaagacccaaatgaagagctttcaaaagatgagttcattctgaagttaaaggcagaagtacagcgtttgctgggtagcaactcaatgaagcgtcatctggtgtctcagttacaaaatgacctcaaagactgtcataagaaaattgaagatctccaccaagtgaagaaggatgaaaaaagcattgaggttgagatatcatttgctgtttctgaagctaaagagaaatggaagagtgagcttgaaaatatgaggaaaaatatacttcctggaaaggaattggaagagaagattcattctcttcagaaggaacttgagttaaagaacgaagaagtccctgtggtcatcagggctgagttagctaaggctcggagtgaatggaacaaagaaaagcaagaagaaatccacagaatccaagaacaaaatgagcaagattaccggcaatttttagatgatcaccgaaataaaattaatgaggagcacatcagtgattctgaggacaagcagcttttggaaatcatgtcgacttgttcttcaaaatggatgtctgtgcaatattttgaaaaactaaagggctgcatacagaaagcatttcaagatacacttcctctgcttgtagaaaacgctgacccagaatggaaaaagctgtgggacccctacttccactttttcctttctctgcaaccccgcctttacacgcacattcgcacaacctgcaaacacttggctctttggcttggtgtcttgtgtttaagttggtatgatattgatgcagactttttgattcagttgcagcagttactcacagaccttccccatgacatgctggatgacgacctctcctctccagagctccagtattcggactgcagcgaggatggcacagacggacagccatataccaatggtcagaagcaggaatttaatgaccaagcaaccaatgtaattaaattttcagatcctcaatggaaccattttcagggtcccagttgtcaaggtttggaaccgtataataaagtgacatataaaccttatcagtcttctgcccagaataatggctcaccagcccaggagataacaggaagtgacacattcgaaggcctgcaacaacaatttttaggagctaatgagagtaggtttttgctccgagggaagttcatagccataaatgtctacatcaaaaagactgaaagagcacaaacagacaatctaaagtcacacctcaaggaactagagaaacaagaacaaaccaaacccaaacccagcagaagaaaggaaataaccaagatcagagcagaactaaatggaattgaggccaaagaagccaaaagaacgaatccaaaggataaatga

SEQ ID NO: 17100 - DNA, 3063 bp, Homo sapiens
  SIMILAR (4)..(339): 751254mologous to Mus musculus Pro-Pol-dUTPase polyprotein,accession number Y12713,Smith-Waterman Score=465.
atggcaaacaaggatgttgtaggagatatagccagtgctttgtccagaccccctggagtccctcaaagcacttctgtctaccccatccttggcttctgtgtgttttgcttctgtgtcactgttcattctgagaacagatgcaggctagtgaagctgctttgggtcaccaagaaccagaacggcctgaggaccatgtcattagactttggcagtgtggcactaccagtgcaaaatgaagatgaagagtatgacgaagaggactatgaaagagagaaagagctggccacagtccccacttctcacacagacatgggcttatgcactcagacctgcctgcttcactctggtaaattctctgccagggccctgagggcatttgagtttatgaccctgctttggcttggtgtcttgtgtttaagttggtatgatattgatgcagaccttttgactcagttgcagcagttactcacagaccttccccatgacatgctggatgacgacctctcctctccagagctccagtattcggactgcagcgaggatggcacagacggacagccatataccaatggtcagaagcaggaatttaataaccaagcaaccaatgtaattaaattttcagatcctcaatggaaccattttcagggtcccagttgtcaaggtttggaaccgtataataaagtgacatataaaccttatcagtcttctgcccagaataatggctcaccagcccaggagataacaggaagtgacacattcgaaggcctgcaacaacaatttttaggagctaatgagaactctgcagaaaatatgcagattattcaacttcaggttcttaacaaagcaaaagagagacaactggagaacttaattgaaaagttaaatgaaagtgaacgtcaaattcgatatctgaatcaccagcttgtaataataaaagatgaaaaggatggtttgactctcagccttcgagaatcacagaaactctttcagaatggaaaagaaagagagatacagcttgaagctcaaataaaagcactggagactcagatacaagcattaaaagtcaatgaagaacagatgatcaaaaagtccagaacaactgaaatggctctggaaagcttgaagcagcagctggtggactttcatcattctgaatcacttcaacgagctagagaacagcatgagagcattgttatgggcctcacaaagaagtacgaagagcaagtattgtccttacaaaagaatttggatgccacagtcaccgcacttaaagaacaggttgggatgatttcaaatgagcaactgttatcaacaaggtcagtacaagaggtggctcagctacagttccagctgcagcaagcacagaaggcacatgctatgagtgcaaacatgaacaaggctttgcaagaagaattaacagaactaaaagatgaaatttctctctatgaatctgctgcaaaactaggaatacatccaagtgactcagaaggagaattaaatatagaactcactgaatcgtatgtggatttgggtattaaaaaggtcaactggaaaaaatccaaagttaccagcattgtacaagaagaagacccaaatgaagagctttcaaaagatgagttcattctgaagttaaaggcagaagtacagcgtttgctgggtagcaactcaatgaagcgtcatctggtgtctcagttacaaaatgacctcaaagactgtcataagaaaattgaagatctccaccaagtgaagaaggatgaaaaaagcattgaggttgagactaaaacagatacctcagaaaaaccaaagaatcaattatggcctgagtcttctacttctgatgttgtcagagatgatattctgctgcttaaaaatgaaattcaagttttacaacaacaaaatcaggaacttaaagaaactgaaggaaaactgagaaatacaaatcaagacttatgtaatcaaatgagacaaatggtacaagattttgaccatgacaaacaagaagctgtggataggtgtgaaaggacttatcagcagcaccatgaagccatgaaaactcaaatacgtgaaagcctattagcaaagcatgctttggagaagcagcagctctttgaggcttatgagagaactcatttgcaactgaggtctgagttggataagttgaataaggaggtgactgctgtgcaggaatgttacctagaagtgtgcagagagaaggataatctagaattgactctcaggaagaccactgaaaaggagcaacagactcaggagaagagacagctattggaggaaagagaagaatatgtaagcaaactgcaggtggaacttgaaaaaaagtaccaagatacacttatgatggaaaagagcaagtggctgaaagatcaagaaactgatattaaacagcaagttgaaagtgaagtgatcttagccaaagcacattgggataaggaagagcaagagatcaaagaaaaactcattcaacagcttgaaaaggagtggcagtctaagctggatcaaactataaaggcaatgaaaaagaagaccttagattgtggcagccaaactgaccaagtaaccaccagtgatgttatttccaagaaagagatggcaattatgatagaagagcagaagtgcacaatccagcaaaacttagaacaagagaaggacatagccatcaagggggctatgaagaaactcgaaattgaattggaactcaaacattgtgaaaatattaccaaacaggtagaaatagctgtgcaaaatgctcatcagcgatggctgggagaactaccagagctggcagagtatcaagcacttgtgaaggcagaacagaaaaagtgggaagaacagcatgaggtctctgtgaacaaaaggatatcatttgctgtttctgaagctaaagagaaatggaagagtgagcttgaaaatatgaggaaaaatatacttcctggaaaggaattggaagagaagattcattctcttcagaaggaacttgagttaaagaacgaagaagtccctgtggtcatcagggctgagttagctaaggctcggagtgaatggaac

SEQ ID NO: 17101 - DNA, 981 bp, Homo sapiens
  SIMILAR (727)..(885): 981254mologous to Mus musculus rabphilin-3A,accession number D29965,Smith-Waterman Score=264.
atggctgacagtacctatgatgtgcacagaagattctggtctgtggtgttcttcctggccggtcgtgagaacgcgtctaataacaattggtgccgaattccgggacgagaaaaaactcgggactggcgcaaggaagatccctcattccagaaccagaactgcgggtcgcgagtgaagaggcccgtggtttgtcaatgcctttttcttctcggtggtaaggagaagctgaggggcccgctgcttccccagtacgccctggagtggctcccagtctacgtcggggaatacgggatccacgaaaaccctggactccatacagcccagtgcttccgcactgtcttagaacttgtcaccaagtacaaacggcttcgaatctactggacatggtgttatgactttcaacacgagatctctgactacctgcagggacagatcaaaaaagccagctctgaagcagatgaagaattctcctctgaagaaacagactgggaggaagaagcagctcattatgagaaaaaagggtaccagccagggcatctctgctccaagcggccccccaaacacccgccacctgccatcagcggctggcacagaaaagccacttatgtaagtccattcagccccctttacgactttaacgagtgtgcaggcatactgctgccatctcccatagtaaccatccagatcccctggctctctgagccccacactgccttttgccacatgcagcaggtagagcggatcggcgatatagaggaacggggcaagatcctggtgtccctcatgtacagcacgcagcagggcggcctcattgtgggaatcatccgctgtgtgcacctggccgccatggatgccaacggctactcagacccctttgtcaagctgatgggcggcaccttggaagcatctctccttcaggaaagcacttatggagtcgatgtctgctatgagctcaagatggagtgcgatgcaggaacatga

SEQ ID NO: 17102 - DNA, 2182 bp, Homo sapiens
  SIMILAR (1249)..(2712): 961254mologous to Mus musculus E-cadherin binding protein E7,accession number AF167441,Smith-Waterman Score=2740.
atggaacgcagggccctcactggccctggggactgggtgacgtcaggggctgggttgaggtggggcggacctggctccctagaacgtcagctccgggtccaagggatcccggttcagacagggaaactgggtcaaggactgccgcaagcgggaaaaggaaacaggaacaggttccagaggcgaatagtcaaaggccaaggaggaacagcgcacaaccaccgcagaaccgaaccaaaaaagccggaagaacacaccagggaaaaagcacagcaaaatagggaaaacaagaaaaacccggcggacctagaaattcaagacagtctatcagaagtaaagtggaaaatagctttacaaggtatgtttggccttgaactttctctagtgttagaagcccttttgttccttttcacatgttatcaagtggttaaggcagggcggattctagatgaaattcaggacaatctatcagaagtaaagcggggagagagagtaggagcaaagagaaaatatggtacacaaaataagtatacaggcctttccaagggtcttgaacccgaggaaaagttaaggttaggtaggaatacctggagagagattagaagaaaaagaggaaaaagggaaaagaagaaagatcaattagcggaggtctctaggaaaaggagcctgtgctcatcgctggatgggctcggggagccagctcttagtagctctgaagcagatgaagaattctcctctgaggaaacagactgggaggaagaagcagctcattatgagaaaaaagggtaccagccaggtaaagtgctagctaatcagttaaggaagccaaaagcggctggcgaaggccagtttgctgattggcctcagggcagtcggcttcaaggtccgccctatgcggagtccccgccctgcgtagtgcgtcagccctgcgcagagaggcagtgcgcagagaggcagtgcgcagactcattcattcccagagaggaacaaaggaaaatacaacaggaatttccggtctttgaaggagccgagggtgggcgtgtccacgctccggtagaatacttacaaattacagaaattgccgagtcggtccgtaaatacggaaccaatgctaattttaccttggtgcagttagacaggcttgccggcatggcactaactcctgccgactggcaaacggttgtaaaagccgctctccctagcatcacgacggttgtgacccgcatcattcgctacggtacttcatcaaccggacagatctccactatcgtagcacaggcaacccttgtggggcagagcacagaggctgtaattcaaaatccattcagcaatggtggcagcccggcggccgaagctgtcagcggggaggcacgatttgcttattttccagcatccagtgtgggcgataccacagctgtgtctgttcaaactacagaccagagcctacaggccggaggccagttctatgtcatgatgacaccccaggatgtgcttcagacaggcacacagaggacaattgcaccccggacacacccctattctccgaaaattgatggaaccagaactcctcgagatgagagaagaagagctcagcacaatgaagtcgtgtcagatttttgtggaacctcccccaatcatgaaagtttttttttggagcgccctaaaaaccggtccgagaaaccagcacaccaacgggggtcacagccacatctcacgcacttcatattccaggctctttttctggctccagatagtgaccaggatgtgatgagagtggctttcactgagtacaagagagaattttcccaggtcactttgggtttctacgtaggcagaaccggccatgaactgtggctcagggagctggaaatgagtcatggaactgcctcagggaccacagtaaaggtcaaggtctgcaggcctgccagcatggctctaaatgggtgtatttctccaggcctctggaaaggcaggacccccccagactgtgactgggaagagtttgggatgtttacagagtaagtttaaaattctcaggggaaccaagttaggtggaacaatttcttgtctttagccaaaaacagtagttctgtagtttgccacctgaatgaggacctgccttctgaaaagggttaccttcagtcttgggctttagcagagtttcacaactcctttcctggatctc

SEQ ID NO: 17103 - DNA, 1144 bp, Homo sapiens
  SIMILAR (52)..(435): 721254mologous to Mus musculus Pro-Pol-dUTPase polyprotein,accession number Y12713,Smith-Waterman Score=499.
atggaggtaaccacatttgccatgtgcctgattatagttcttgttcctcttcttcttattcttgtgtcatatggtttcattgctgtggctgtactcaagatcaagtctgcagcaggaagacaaaaagcatttgggacctgttcctcccatctcgttgtggtatccatcttctgtgggacagttacatacatgtatatacagccaggaaacagtccaaatcagaatgagggcaaacttctcagtatattttactccattgttactcccagcttgaacccattaatttatacgtgtttgatgtggtttggctgtgtccccacccaaatctcatcttcagttgtagctcccataattcctgcatgggagcatgggagggacccagtgagagctgatattcagaaaatagcaaaaatgatcaatgatagttactttggttggcttatgctccttgggttccctgggaagcctcagctggagatgatcatctctggggttgtctttttcttctatgcaatttctttgatgggaaatatggtccttatcctgctgccattactggataaacatctccaaacccccatatatttctttcttagaaatctggctatcttggatctttgttacaccacaaatatagtcccacagatgttggtcaatgcctggggtaaagacaagaaaatcacttttggtggctgtgcttttcaacttttcactaatgtgacgctatgcacggttgaatgtatgcttctggctgtgatgtcatatgacccattcaatgctgtctgcaagcctctggactatatgaccataatgaacccccaactctgtcaaggcctggtggccatgacctggttaattggtgtcactaattgcatgatactttccccctgtcctgtgagtcttcctcgatgcggagaccaccacctggatcactatttttgtgaaatatctgcaatggtcaaaattgcatgtggggctaccacagtcatggaggaaactgtaagagttaaagaaagaagaaagaaacacgaaacgtggctttgtagtcaaagacaggttttctttacttaaaacctgagaggcttcccggctaatttcggttaggagcactttctcttacagaccctgcacttgatggatcacc

SEQ ID NO: 17104 - DNA, 2466 bp, Homo sapiens; identical to SEQ ID NO: 3568
  SIMILAR (46)..(735): 911254mologous to Homo sapiens H-Haspin,accession number AB039834,Smith-Waterman Score=1102.

SEQ ID NO: 17105 - DNA, 327 bp, Homo sapiens
  SIMILAR (97)..(210): 1001254mologous to Gallus gallus histone deacetylase 1,accession number AF043328,Smith-Waterman Score=217.
gggaacatcacacatagcagcttgctccatcagagcatgcaggctaagaaggcaatagaaagagttggccagcaagatggaaactgggtgttgacaggggatgttggaaattactattatggacaaggccacccaatgaagcctcaccgaatccgcatgactcataatttgctgctcaactatggtctctaccgaaaaatggaaatctatctcactcaggcagtgacgcatgtgcactttcctcctggtggggtcaaggccgagttcttggacctgatgaggccacctggagttcctcatatcactggtgacctggccctcagctaa

SEQ ID NO: 17106 - DNA, 1582 bp, Homo sapiens
  SIMILAR (170)..(307): 971254mologous to Homo sapiens histone deacetylase HD1,accession number U50079,Smith-Waterman Score=242.
gcgcccacgcgtccggcgggcgggagggcggacggaccgtctgacggtagggacgggaggcgagcaagatggcgcagacgcagggcacccggaggaaagtctgttactactacgacggggatgttggaaattactattagggacgagggccacccaatgaagcctcgaccgaatccgcatgactcataatttgctgctcaactatggtctctaccgaaaaatggaaatctatcgccctcacaaagccaatgctgatgagatgaccaagtaccacagcgatgactacattaaattcttgcgctccatcccgtcccagataacattgtcgggagtaccagcaagcagatgcagagattcaacgttggtgaggactttcccagtattccgatggcctgttttgagttctgtcagttgtctactggtggttctgtggcaaagtgcctgtgaaactttaataagcagcagacggacatcgctgtgaattgggctgggggcctgcaccatgcaaagaagtccgaggcatctggcttctgttacgtcaatgatatcgtcttggccatcctggaactgctaaagtatcaccagagggtgctgtacattgacattgatattcaccatggtgacggcgtggaagaggccttctacaccacggaccgggtcatgactgtgtcctttcataagtatggagagtacttcccaggaactggggacctacgggatatcggggctggcaaaggcaagtattatgctgttaactacccgctccgagacgggattgatgacgagtcctatgaggccattttcaagccggtcatgtccaaagtaatggagatgttccagcctagtgcggtggtcttacagtgtggctcagactccctatctggggatcggttaggttgcttcaatctaactatcaaaggacacgccaagtgtgtggaatttgtcaagagctttaacctgcctatgctgatgctgggaggcggtggttacaccattcgtaacgttgcccggtgctggacatatgagacagctgtggccctggatacggagatccctaatgagcttccatacaatgactactttgaatactttggaccagatttcaagctccacatcagtccttccaatatgactaaccagaacacgaatgagtacctggagaagatcaaacagcgactgtttgagaaccttagaatgctgccgcacgcacctggggtccaaatgcaggcgattcctgaggacgccatccctgaggagagtggcgatgaggacgaagacgaccctgacaagcgcatctcgatctgctcctctgacaaacgaattgcctgtgaggaagagttctccgattctgaagaggagggagaggggggccgcaagaactcttccaacttcaaaaaagccaagagagtcaaaacagaggatgaaaaagagaaagacccagaggagaagaaagaagtcaccgaagaggagaaaaccaaggaggagaagccagaagccaaaggggtcaaggaggaggtcaagttggcctgaatggacctctccagctctggcttcctgctgagtccctcacgtttctttcccc

SEQ ID NO: 17107 - DNA, 495 bp, Homo sapiens
  SIMILAR (148)..(483): 471254mologous to Homo sapiens p40,accession number U93567,Smith-Waterman Score=245.
atgaacaataccccagatcaagtaatggagctggtccaatgtgaaaacactgtcttattgcccagcactgaaaggaatagcatcgacatcaacaaaaaggatgtccacaccaaaaccccattggaaggccaccagcatcaaagacgaaaggatcacaactcctggacagcaagggaacaaaactggatggagaatgagtttgacgaattgacagaagtaggcttcagaaggtgggtaataacaaactcctctgagctaaaggagcatgttctaacccaatgcaaggaagctaagaaccttgaaaaaaggttagacgaactgctaactataataaccagtttagagaagaacacaaatgacctgatggagctgaaaaacatagcagaagaactttatgaagcatacacaagtttcaatagtcgaattgatcaagcagaagaaaggatatccaaaaaaggaaggatatcagagattgaagagcaacttatgcaataa

SEQ ID NO: 17108 - DNA, 1854 bp, Homo sapiens
  SIMILAR (256)..(591): 871254mologous to Homo sapiens phosphatidylinositol 3-kinase p110 beta isoform, PI 3-kinase p110 beta=110 kda catalytic subunit,accession number S67334,Smith-Waterman Score=488.
atggggagaaaccagcacaaaaaggttgaaaattccaaaaaccagaacgcctcttctctgaaggatcacaactcctcaccaccaaggaaacaaaactggatggagaatgagtctgacgaactgacagaagtaggcttcagaaggtgggtaataacaaattcctctgagctaaaggagcatgttctaacccaatgcaaggaagctaagaaccttgaaaaaagtcaaatgaatttttggtgtggggaacttatttttcaggttgaagcactcaataagttaaaaactttaaatagtttaatcaaactgaatgccgtgaagttaaacagagccaaagggaaggaggccatgcatacctgtttaaaacagagtgcttaccgggaagccctctatgacatgcagtcacccctgaacccatgtgttatcctctcagaactctatgttgaaaagtgcaaatacatgtattccaaaatgacgcctttgtggctggtatacaataacaaggtatttggtgaggattcagttggagtgatttttaaaaatggtgatgtttccaggaagatcccacttacaatactatgtttatttgacctgactcagacctcacctagcatgaactgcctttttcctggggagtttctcaaaaatactcagaggcatctgtttaacattgtagctgtcttgggggatgacctggaccgagccattgaggaatttacattgtcctgtgctggctactgtgtagcttcttatgtccttgggattggtgacagacatagtgacaacatcatggtcaaaaaaactggccagtgttgtgaggatgcatatctgattttacgacggcatgggaatctcttcatcactctctttgcgctgatgttgactgcagggcttcctgaactcacatcagtcaaagatatacagtatcttaaggactctcttgcattagggaagagtgaagaagaagcactcaaacagtttaagcaaaaatttgatgaggcgctcagggaaagctggactactaaagaaggactgtataaagcgcggatttttgaagtgacggacagaactgtcaggacctgtattggggaggcggttgccgccgctgctgctgacggtgtgacgttctctgttccggtcacaccacatacgttccgccattcctatgcgatgcacatgctgtatgccggtataccgctgaaagttctgcaaagcctgatgggacataagtccatcagttcaacggaagtctacacgaaggtttttgcgctggatgtggctgcccggcaccggtgtgacaatctaaaaacttgtcacacttcacatggatctgtcatggcggaaacagcggttatcaatcacaagaaacgtaaaaatagcccgcgaatcgtccagtcaaacgacctcactgaggcggcatatagtctctcccgggatcaaaaacgtatgctgtatctgttcgttgaccagatcagaaaatctgatggcaccctacaggaacatgacggtatctgcgagatccatgttgctaaatatgctgaaatattcggattgacctctgcggaagccagtaaggatatacggcaggcattgaagagtttcgcggggaaggaagtggttttttatcgccctgaagaggatgccggcgatgaaaaaggctatgaatcttttccttggtttatcaaacgtgcgcacagtccatccagagggctttacagtgtacatatcaacccatatctcattcccttctttatcgggttacagaaccggtttacgcagtttcggcttagtgaaaccaaaagaaatcaccaatccgtatgccatgcgtatatacgaatccctgtgtcagtatcgtaa

SEQ ID NO: 17109 - DNA, 756 bp, Homo sapiens
  SIMILAR (403)..(624): 561254mologous to Homo sapiens PRO2221,accession number AF116695,Smith-Waterman Score=187.
atgcccactacccgccccacccaacaacaccaagtttgtttccaggcagcagctcagcacagagagactccatttgtttcagagaaagcaagggaagacaagagtctctgcctggtaatccaaagaattattccagatcttgtccaagaccagcaaggtggcaactctggcacctctgaaaaaaaggcagcagccccagtcaggggcttagagataaaacccccatctccctgggacagagcacctgggggaaggggcagatgtgggcacagcgtcagcagacttaaacgtcctggcctgacggctctgaagagagcagcagatctcctagcacgttcgagcagcagatctcagagcgttcgagctctgctaaagagacaaaaggtagataaatctacgaagatggggagaaaccagcacaaaaaggttgaaaattccaaaaaccagaacgcctcttctctgaaggatcacaactcctcaccaccaaggaaacaaaactggatggagaatgagtctgacgaactgacagaagtaggcttcagaaggtgggtaataacaaattcctctgagctaaaggagcatgttctaacccaatgcaaggaagctaagaaccttgaaaaaaggtaccccagaaactatgcccagagaggagacagtggcacagaacaagccaatggaggaatcgtggactgctttccctattctgggcagagttgggtgtacctcatgggcaggccagactctgctgtactctga

SEQ ID NO: 17110 - DNA, 735 bp, Homo sapiens
  SIMILAR (78)..(125): 681254mologous to Homo sapiens Human secreted protein sequence SEQ ID NO:103,accession number Y87064,Smith-Waterman Score =49.
  misc_feature (1)...(735): n = a,t,c or g
gccccccggtgcaggtctgnnnnnnnnnnnnnnnnnnnnnnnnnnnnnnnnnnnnnnnnnnnnnnnnnnncaacaacaaaagattgctgtctgtaccttcctctggaagcttcgtcccagacgggcacccatcagatgccagccggagctctcctgttgcataaggtgtctgtcgccccttgctgggaggtatctcccagtcaggaggcaaagtnnnnnnnnnnnnnnnnnnnnnnnnnnnnnnnnnnnnnnnnnnnnnnnnnnnnnnnnnnnnnnnnnnnnnnnnnnnnnnnnnnnnnnnnnnnnnnnnnnnnnnnnnnnnnntgaagctgtgcccacagctgccccttctcccaggtgctctgtccctgggagatgggagttttgtttataagcccctgactggggctgctgcctttctttcagagatgccctacacagagaggaggaatctagagaggcagtctggctacagcggctttgctgagctgtggagggctgtgcccagttggatctttcccggcatctttgtttacactgtgaggggaaaacggcccactcaagcctcagtaatgggagatgccccttccccccaccaagctcgagtgtcccaggtcagcttcaggttgctgtgccggcagcgataatttcaagttagtggatcttagcttgctgggctccatgggagtgggatccactgagctacaccacttggctccctggcttcagacgaaa

SEQ ID NO: 17111 - DNA, 1069 bp, Homo sapiens
  SIMILAR (462)..(830): 861254mologous to Homo sapiens ribosomal protein L12,accession number L06505,Smith-Waterman Score=531.
atgtcaaccgatgttattaggttggtgcaaagcctcactaagcagtcttttgatcacacctttcccatctccaagctcctctacatcttcttccagcagttcaccaccccgctggcttcgaagtcagacaacaagtttggaaaatggcatcatcccaagaagttgagttgcaagtttcctcttgctgagaaaacctccgctggtgatacccaggcaaacagggtctgtagtgtacctccaacaaaccacagcagacctgcagcagacaggcctgttagaaggaaaattaacaagcagaaaacagccacatcaacatcaacaaaaaggacgtccactcagagaccccatccgaaggtcaccaacgtaaaagaccaaaggatcacagctcctcaccagcaagggaacaaaactggatggagaattgagtttgatgaattgacagaagtaggcttcagaaggtgggtaataacaaactcctctgagctaaagaagcatgttctaacccaatgcaaggaagctaagaaccttgaaaaaaggttaggtgaattgctaactagaataactagcttagagaagaacataaatgacctgatggagctgaaaaacacagcacgagaacttcatgaagcatacacaagtatcaatagctgaatcgatcaaggcaggaaggaaagggtattcagagattgaagatcaacttaatgaaataaagcgtgaagacaagattagagaaaaaagaatgaaaaggaatgaacagagcctccaagaaatatgggactatgtgaaaagaccaaacctacatttgattggtatacatgaaagtgacagagagaatggaaccaagctggaaaacacatttcagaatattgtccaggagaacttcaacctagcaagacaagccaacgttcaaattcaggaaatacggagaacaccacaaagatactcctcaagaagagcaatcctaacacatataatcatcagattcacgaaggttgaaatgaaggaaaaaatgttaagggcagccagagagaaggtcgtgttacccacaaagggaagcccatcagactaa

SEQ ID NO: 17112 - DNA, 1173 bp, Homo sapiens
  SIMILAR (88)..(381): 881254mologous to Homo sapiens ribosomal protein L12,accession number L06505,Smith-Waterman Score=432.
ggcttactgcgacctctggttcctgggctcaggcagttctcctgcctcagcctcccgagtagctgggattgcgggcgcccgccaccgcgcctggctaatttttgtatttttagtagagacggtgtttcagcatgttggccaggctggtctcgaactcctggccataggtgatctgcctgcctcgtcctcccaaagtactgggattacaggcgtgagccactgcacccacccacgcctggctgatgtttttattttactcatcctgactgaggtctgacaatcctagaagctgaagttcccgggcatccttttgtttcttctgactccccttagtgatagattttcttgagatttgggattggatgctcatggccagctgggggctctgtgggaatccggggtggcctactttgcaggcagtcctttcagaatggttcagccttggctttcgctagctacccaggagcgccagccccagcccattttgtgtgtggttctcagcttgcaggtggccaccaaagccaaccccccccactgtcccgattgtgggtccctatgtttgaggatcccggagatgttacggggggcttctcccttcttacaagctcggtcatgcatatatttgatctggcgctgccaggcattctgtaagggagggcttttccatgtcctggaaatggaactggaaaatgtggctggaaacattaatatggctggaaatggaatttgtctgcagccactacttttgaacccatcttccgggcaatcccttctgtcttgccggagggtggaaacttgcaggccttttgggcagcagggaggcagctctggagggagccgctgcctcagcagtttgccccagccacccccactgcctgggccttcatctgggacagggctggggccccgatgcccgtggggttcccgtggccgatggagagttctcgtctgaacaggtggcaaaggctggagggacctggctgggcacccaccgcccccttgcccgcctgcgccgagccctgtctggtccatgccagctgtggagcctgaccctgtccgtggcagagctaggcctgggctacgcctcagaggagaaggtcatcttccgctactgcgccggcagctgcccccgtggtgcccgcacccagcatggcctggcgctggcccggctga

SEQ ID NO: 17113 - DNA, 1227 bp, Homo sapiens
  SIMILAR (535)..(1683): 801254mologous to Homo sapiens OSBP-related protein 6; ORP6,accession number AF323728,Smith-Waterman Score=1535.
atgcatggtatcacccttcactctccttttaatggcatcacacggatgaaagagggaaagaaatgcatgctgattggtctatgggctgctatgggtgggcctgaaaaaggcatcacaagttcccactccagtctgtgggactgggtgccaagcccccagccttcaggccctccctggcttgaagtaaaaactggaggaacagacaagaacaaagctggcgagaggccatgcagctcaggtggcaaaggcaaacttgaaggctgctgtgggtgtaatgaaggcatcacttcctccaggaaactctctcctactactctaaatgctctcctctttgctctcatgacattctggcacttagcacagtacgctgcaattagactatggcttaagtgttaccagctctgtgccatcttgtctggtgtccaggaagaatcaattcacatagacaaattgaagaatggtaaatgtgggggattttattgctggatggaggtggccctcagcagtatggatgtggagctggaaaggggatggagtgggaagatgatcttcccccggagttcagttgtcccacagccaatctcctctctgaccgtccccagccgaactcttcttgacattcagacactccttttcttctctccttctctgtgtgatcttgagcctgaatggctggacagtgtgcagaaaaatggagagctgttttatttggaattgagtgaggatgaagaagaaagcctccttcctgagacaccaactgtgaaccatgtcaggttcagtgaaaatgagattatcattgaagatgactacaaagaaagaaaaaagtatgaacccaaactcaagcagtttaccaaaattttaagaaggaaaagacttttacccaagcgctgcaataaaaaaaatagcaatgacaatggaccagtatccattctaaagcatcagtccaatcagaagacaggagtcattgtccaacagcgatacaaagatgtgaatgtttatgtaaaccccaaaaagctaactgttatcaaagccaaagagcagctcaagcttctggaagtgctggttggaattattcatcagaccaagtggagctggagaagaaccggaaagcagggtgatggagagaggcttgtggttcatggcctgctgccagggggatctgctatgaagagcggtcaggtactcattgagatcttgattaatgatgacaccttgcgggaaatgtga

SEQ ID NO: 17114 - DNA, 1743 bp, Homo sapiens
  SIMILAR (3)..(293): 761254mologous to Homo sapiens SP100-B,accession number U36501,Smith-Waterman Score=382.
ttttttttttttttttttatactacaaacctattttatttatataacttcttatgaagtagattttgtacacatggtaggctaaaaattaaaactgcttttccacaaaactgataaattactagattcttggttctttcatgatatcataacattaaatcattaaaaatataaggcaatttaatgtaaactactagcatttacaaaacagtaaagttataaaaaactgtattacaaggcaaatgcaccaaataccagtgaacatgaaacaggagtgaagtttgctgggagaacattaaaaatcaccttttcagtggggttcacttcacattcatggctgcactggggcctggacacgttcagcaccatgaagcagacacttcgggcaactagggaatgttacttctgtttgactttttttctaaaatgaaaaagcagtctgtgaaatgcgtgttaagaacgatctatctagagtcgcacagtgtccagggccgctgcaagttggactcaagttgtaccccaccctcgttttatttggacaaagtacttcaatttggccactctggaagaatttaattttcttgatatcaactgggctcagaatcagtgttcccatttttgaattttccaacctgtccaatccgtccatttgacaaaatactgggagcggacttctttttggatttcctgtcctcctgtcctttcctcttctttttcttgaaaatatctgtttcttgggccagtctcttttcttcttcctttgctgcctttttttctttaatttgctcctgtaaaaccttgtaattcacataactctttttaggaggcttagcgcccagcataatggcacgttcctgttccaggattctctcctttccttttccataacccgtgataccaaaccggtgcacttctaaacgagctttttctaggttaaattcgtgtgtatccacatctctctccaaaacactaggattagcctgctttgtgttcttgttatgatctggcgtcaattttctttttttattgctgtgaaattctaccacttctacttgttccctattgttctttagggaagagggaggaactgcagcagcaaggatctctggtcctgtgggggtcccagaaggagcacaatgccgctcttctctaagttccttgaagaagctcgaagcgctcttcctctggcctcttatgagagaaccaggtaggggaagatggctctgctgccaaggccgctgaagccatcacatctctcttcttgttttcccttttctttatgatcttcttctgttctgtttcacctttctgtacctccaaagtcgtaaaggttctggagcagagcgtcaagaagtgtcggagaacttttccgcaaatcattttggaggacagccagcgccacccagcttctctcccgcttgtctttttttcctccaaccccctcttcctctcttggttttaacgggtctttttggaatggcagaatgttggtcacccaccttacgctctcaggtgacgatggcgctgaaaaaatatcgcccacaggccgacgatacccgactgctcgccgagttgtcagcgatagccagcaccatacaaattctgaacaggtatcagcaggtagaactgcactgcccagctcatccccagtgcccactcctacactgtccagccgtgtcttcatccacagtacccacgcttgcaatgtccacatccgccctacccagcggtagcctttcctcat

SEQ ID NO: 17115 - DNA, 1739 bp, Homo sapiens
  SIMILAR (775)..(1404): 621254mologous to Homo sapiens SP100-B,accession number U36501,Smith-Waterman Score=611.
ccgtaaattcacgggtcgtcgatttcgtccaagctccatttcatgagtaagcgtgagagccgttcagtttcctccagctctgctgaagccagcacagaagtagcccaaactcttccctctgctgacagcaaattttaggcaaagtcttgagaaagaagaaattgggtccagaaagggaagtgaggagaatcagatcccagacctttggggagaaggagcaaccgcctctggcacagcccatcagggagaaagagcaggttgagaagagtcctaagctaacagccccaaacaggtgggtgttgctcaactccctgaggcatgtggttgtaaggcagaacccacagaccttgcaggaagaaggctctcggggccatggccagggttcagcatcaacaattgacttacagcgagtgggactttgagcacggatgccggggagccggctcggcttgctgcagagtccctgtgtggacacagcccccaagagtgagtgggaagcctctcctgggggtctggacagaggcaccagttccacacttggggccatcttcatcgtcgtcaacgcgtgcctgggtgcagggttactcaacttcccagcagccttcagcactgcggggggcgtggcagcaggcatcgcactgcagatgggtatgctggttttcatcatcagtggccttgtcatcctggcctactgctcccaggccagcaatgagaggacctaccaggaggtggtatgggctgtgtgtggcaagctgacaggtgtgctatgtgaggtggccatcgctgtctacacctttggcacctgcattgccttcctaatcatcattggcgaccagcaggacaagattatagctgtgatggcgaaagagccggagggggccagcggcccttggtacacagaccgcaagttcaccatcagcctcactgccttcctcttcatcctgcccctctccatccccagggagattggtttccagaaatatgccagcttcctgagcgtcgtgggtacctggtacgtcacagccatcgttatcatcaagtacatctggccagataaagagatgaccccagggaacatcctgaccagtattgaagaatgtcgcaatataatcgtgcagtttggtgttcgggaggtcacagctgcccaggttgcaagggttttgggaatgatggctcgaactcattcaggattaacagatggcattccattacagagtatttctgctccgggcagtgggatctggagtgatgggaaagataaaagtgatggagcacaggcacacacatggaatgtagaagtcttgattgacgttcttaaagaactgaatccaagtttgaatttcaaggaagtaacttatgaactggaccatcctggatttcaaattcgtgacagtaaaggacttcataatgtggtttatggcattcagaggggtttgggtatggaagtgttcccagtagacctcatatatagaccttggaaacatgctgaaggccagggacagtctccctcaattcgccaacttatcatgcatgcaatggcagaatggtacatgagaggggagcagtatgatcaggccaaattgtctcgaatacttgatgtggcccaggacttgaaggccttgtcaatgctgctaaatggtactccatttgcctttgttattgaccttgctgcacttgcttcacgtcgtgaatacctcaaacttgataagtggctcacagataaaattcgagagcatggg

SEQ ID NO: 17116 - DNA, 1184 bp, Homo sapiens
  SIMILAR (348)..(1511): 881254mologous to Macaca fascicularis hypohtetical protein,accession number AB052152,Smith-Waterman Score=1781.
tttcgtcacgtgggccggcggtccagggccggaatggcagcaagctcagagataatcattcaggtcttcgtgagctaaggccaaacaaacaaaaaacacttgctttgatggactgaatactgttattagaagtaaatatggaaaatgaaccagaccatgaaaatgtggaacagagcctctgtgccaagacgagcgaagaagagctgaataagtctttcaatctagaagcttcactttcaaaattctcttacatagatatggacaaggaactggagttcaaaaatgatctgattgatgacaaggagtttgatattcctcaagttgatactcctccaacactggaaagcatactaaatgagactgatgatgaagatgagtcttttgttcttgaggatcctacattgttaaacattgatactattgattctcactcctatgatacttcatctgtggcaagctcagatagtggtgacaggaccaacttaaaaaggaagaagaaattacctgattctttttcacttcatggatcagttatgcgccattcacttttgaagggaatttctgcccagatagtgtctgcagctatcagaatcaagctttgcgactctgtctgggtagcactagtgttggaggtcagtatggcgctatctctgccctcagtatcaacaatgattgctcaagacttctttgtggctttgctaaaggacaggagagtgatgggagtgagaacctgtgaatctagatgtctgttcagtggttccaagggtgaagtctgctgtattgagcctctgcattctaagcctgagttgaaagatcatcccatcacacagttttcattattggccatggcatccttgacaaaaatactggtcattggattgaaaccatttttgattttatggatgacttttccctatggccggatggatccttccagtgtgccactgctggcctggcactttgtagcagtacaaaattatgtgaatcccatgcttgccttctgcagaggagatgttgttcattttctattggatcacactgataaaaccatgttttatctcctgttacagtttttcaaagaaatgtttcaggatgttgattccacatgtttaaaattcccattaaaagctttgctcttgtctgcagctgacctggacacaactgttttggcagccatcaagtag

SEQ ID NO: 17117 - DNA, 412 bp, Homo sapiens
  SIMILAR (6)..(263): 951254mologous to Homo sapiens mitochondrial seryl-tRNA synthetase,accession number AB029948,Smith-Waterman Score=428.
tttcgtcgcggcgcttggggcctttgctgactcgttgggggttccggccccggggaggctgcatctccaacgatagtccaaggagaagtttcactacagagaaacgaaaccggaacctcctgtacgagtatgcgcgcgagggctacagcgcactccctcagctggacatagagcggttctgcgcatgcccagaagaggccgcacacgccctggagctccgcaagggggagctgcgctcggcggacctgcccgcgatcgtgagtgcgcctgcgccggccggggggcgcaaacgtttgctttacggaagaattgtgtttgcaagatgccctccggcagggggcgaacctgtagtaagaattttagttattttccaagttagccaacgtcttgtgcatggcacccacttatgtgg

SEQ ID NO: 17118 - DNA, 1134 bp, Homo sapiens
  SIMILAR (376)..(1134): 991254mologous to Homo sapiens mitochondrial seryl-tRNA synthetase,accession number AB029948,Smith-Waterman Score=1293.
acccttcgagcgtgtatattatatcgggccttccagaactaaaggaaaaataaagacactgcttgaggccttggtcaatgactaaccaccaccccatgtcgccgggcaacactgattgctggatctaagggtgccggcccttacacgctgaaaccaggtggtcccctcttaccatcacactgcgtgcagagggtgagagagaatggctcacgtgatgaagaggcgggacacagacgacgattgggcgacgaaggactctatcgcggtcaactttcctcaggatctgattggctcgtcacggtcaggttcgctgccttgcaattggtctaaacgcggagtgggcgggacgaagtgccgccttgtccccggtccaagatggctgcgtccatggcgcggcgcttgtggcctttgctgactcgtcggaggttccggccccggggaggctgcatctccaacgatagtccaaggagaagtttcactacagagaaacgaaaccggaacctcctgtacgagtatgcgcgcgagggctacagcgcactccctcagctggacatagagcggttctgcgcatgcccagaagaggccgcacacgccctggagctccgcaagggggagctgcgctcggcggacctgcccgcgatcatctcgacatggcaggagctgaggcagctgcaggagcagatccggagcctggaggaagagaaggcagctgtgactgaggcagtgcgggccctgctggcaaaccaggacagtggtgaagtgcaccaggaccccaagtaccagggtctgcgggcacgtggccgggagatccggaaggagcttgttcacctgtaccccagggaggcccagcttgaggagcagttctacctgcaggcgctgaagctgcccaaccagacccacccagacgtgcccgtcggggatgagagccaggctcgagtgctccacatggtcggagacaagccagttttctccttccaacctcggggccacctggaaattggcgagaaactcgacatcatccgtcagaagcgcctgtcccacgtgtctggccaccggtcctattacctgcgcggggctggagccctcctgcagcacggcctggtcaacttcacattcaacaagcttctccgccgg

SEQ ID NO: 17119 - DNA, 1203 bp, Homo sapiens
  SIMILAR (321)..(1): 1001254mologous to Homo sapiens eIF4E-transporter,accession number AF240775,Smith-Waterman Score=571.
ttctttcacacgctctcgtggatctactatcctgcgcaccagggaaggccggtctgtatccaactctttcttcagactttccactggtgagctccgccctgaagctgggtagagagaggcatgccacttctcagggtcccagacaccatcactgtcatatttttcagaaaggcatgaaggcctctgtttggaatgggggagttcttttatatccaagagttcttcttttgtatagcgatgggggcatttggaggcaggaggcttcttcaggtcaaggaaagcatctccactttctgtttcacccatacttctcctatccatggctccttggtctacaatgctctgcacctggaagataaatcggcacaaaattgtcaccgagaacaggaggagggaggccgaatctcccggcccgggcgcttcaagctggagctagcgcaggcccgcagccgtcctccccggcccggcggctcggtccccgccagccagcccgccggctacccgccggccgccttgcgggcctcgcgcccctgcccaccccctgcgggcgccccggcgcccgcgctcacgcacgcgaccccgggagcaatgcgcccgcgccccttctacacccgggagcaccgggcgcgcggtgccccggacccagccgccaccgccgccgacccttactcggtgcctccgccgctcggcggccctttgcctcggccgccgctcccctccccgctgcccgcaccggtacgaggcccggccctaacgtccccaccctcttctgggctcggcctttccggcagtgagcccggcaaggacctcagtcgggttcctccgagcccggtgaaatctgtccgagcctccgcttcctcccctgaaagtgcaggtgatgttgtctacctgcgggtctgtgcgtgcgcggatccaaatcaggggtttcctcctcccggctccgtggcccaggagcggaagggctggtatatgggcgaccttactcccactgagcccgcagggagtaacgcagtaaacaaacctggaagccttccccgcgtgggagtgtggtttactgaatattttaagcctactatcgagacctactgttcagaaaaaaggattcctttcaagatattactggtcattaacaaggcacctggtcaccaaggaactctgatgaagatgtacaaagagattaatgttactttacatgtctgctaa

SEQ ID NO: 17120 - DNA, 394 bp, Homo sapiens; identical to SEQ ID NO: 15209
  SIMILAR (79)..(183): 1001254mologous to Homo sapiens Human secreted protein, SEQ ID NO: 5728,accession number G01647,Smith-Waterman Score=180.

SEQ ID NO: 17121 - DNA, 3363 bp, Homo sapiens
  SIMILAR (771)..(211): 981254mologous to Escherichia coli seryl-tRNA synthetase,accession number X05017,Smith-Waterman Score=934.
gtaagggccgctcctcctttgaagaggttttgcgtctctttccgccggtggcgtcggcgctcacgcaggggcgggtcccggtagcgccaggcggtgcagggcgggaaggggattcgtggcgacggcggcggcagggacagcaggagcagtggtgctgtcagcgcggccgtcggagacatgggagacccggggtcggagataatagaatctgtccctccagctggccctgaggcatttgagtcaacaacggatgaaaatgaagacgacattcagtttgtcagtgaaggaccattacgacctgttcttgaatacattgatctggtcagcagtgatgatgaagagcctagcacctcttatactgatgagaatattaaacgtaaagaccatattgattatcagaaggataaagttgctttaactctggctcgtctagcccgccatgttgaagtggagaaacagcagaaagaagagaagaatagagcattcagagaaaaaattgattttcagcatgctcatgggttacaagaattggaatttattcgaggacattctgatacagaagcagcaagactgtgtgtggaccagtggctaaaaatgccaggactcaaaacaggcacaattaattgtggaacaaaaagttcattccgaagaggaggccacacgtgggtgtctgggaaaccaattttatgtcctataatgcactgtaacaaggagtttgacaatgggcaccttctcttaggacatttgaaaaggttcgatcactctccatgtgatccaacaattacactacatggacctttcttcagctcctttgcttgtgtagtatgttataaaaaatttgttactcaacaacaatatagagatcacctttttgataaggaagccacagatgatggacataacaacaaccttcttcctcagattattcagtgttttgcatgtccaaattgcttccttctttttagcagaaaggaggagtgttcaaagcatatgtctggaaagaatcatttccatcagagtttcaaactgggtgataacaaaggaattgcacatccaatatctttcccatcttttgcaaagaaacttttgatctctctgtgcaaagatgttccctttcaagttaagtgtgtggcctgccacaagacactgcgttcccacatggagctcactgcccatttcagagttcattgtcgaaatgctggacctgtagctgtagctgagaagagcattacccaggttgcagagaaattcatattaagaggttattgtccagattgcaatcaagtctttgtggatgaaaccagcacccaaaatcataagcagaattcaggacacaaagtccgagtcattaactcagtggaagaatcagtcttactctattgccacagcagcgaagggaacaaggatccttcttctgacttgcatttattgttggatcaatcaaaattttcatcacttaaaagaaccatgtctattaaagaatctagctcactggagtgcattgccattccaaaaaagaagatgaatttaaaagataaaagccatgaaggtgttgcttgtgtccagaaagaaaaatcagtagttaaaacctggttctgtgaatgcaatcagcgattcccaagtgaagatgcagtagaaaagcatgttttctcagcaaacacaatgggttataaatgtgtggtctgtggaaaggtatgtgatgattcaggggtcattcgtttacacatgagccggattcacggaggggcacatttaaataactttcttttctggtgtcggacatgcaaaaaggagttaacaaggaaagatactatcatggcacatgtgactgaatttcataatggacacagatatttttatgagatggatgaggtagaaggtgaaactttgccatcatcctctacaacattggataatttgactgctaacaagccttcatcagctattactgttattgatcattccccggcaaatagttctccgaggggtaaatggcaatgccggatttgtgaagatatgtttgattcccaggaatatgtaaaacagcactgcatgtctttggcaagccacaagtttcatagatacagctgtgctcactgcagaaagccttttcataagatagaaacattgtaccgacattgccaagatgagcatgacaatgagataaagattaaatacttctgtgggctttgtgatcttatctttaatgtggaagaagcatttctgagtcattatgaggagcaccacagcatagattatgtatttgtgtcagaaaaaactgaaacttcaattaaaaccgaagatgattttccagtaatagagaccagtaaccagttaacttgtggttgccgtgagagttacatctgtaaagtcaacagaaaagaagattatagcagatgtctccaaatcatgctggataaaggaaaactgtggtttcgctgcagtttatgttcggcaacagcacagaatttaaccgacatgaacactcatatccatcaagtgcacaaagaaaagagtgatgaggaggagcagcagtatgtaatcaagtgtggcacctgcaccaaagcatttcatgatcctgagagtgcacagcagcatttccatagaaaacattgcttcttacagaaacccagtgtggctcattttggatctgaaaaatcaaacctgtacaagtttactgctagtgcctcacatacagagagaaaactgaaacaggcaataaactattcaaaaagtttagacatggagaaaggagttgagaatgacctaagctatcagaatatagaggaagaaattgttgagcttccagatttggattacctgcgaaccatgactcatatagtctttgtagattttgataactggtcaaacttttttggtcatctaccagggcatctaaaccaaggaacatttatttggggctttcaaggaggaaacaccaattggaagcctccgctcaactgtaagatttataactacctgaacaggattggatgcttcttccttcatcctcgctgtagtaaaagaaaagatgctgctgattttgccatatgtatgcatgctggccgtctagatgaacaactacccaagcaaattcctttcaccatcctctcaggagatcaaggttttctggagctagagaatcaatttaagaagactcagaggccagctcatatactaaaccctcaccacttagagggagatatgatgtgtgccttgttaaatagcatatctgataccaccaaagaatgtgacagtgatgataacatgggtgccaaaaatacttcaataggagaagaatttatatccacagaagatgtggaattagaagaagctattagaagaagtcttgaggaaatgtaa

SEQ ID NO: 17122 - DNA, 2039 bp, Homo sapiens
  SIMILAR (121)..(561): 981254mologous to Escherichia coli similar to,accession number D90875,Smith-Waterman Score=762.
  misc_feature (1)...(2039): n = a,t,c or g
gagnggnggcggctgcggcagtagggacagcaggagcagtggtgctgtcagcgcggccgtcggagacatgggagacccggggtcggaaataatagaatctgtccctccagctggccctgaggcatctgagtcaacaacggatgaaaatgaagacgacattcagtttgtcagtacccactggagctcaggggaacttgccaccctgaagggaaggaaacaagactggctggcttcactacttgttgattgcagagccctggagacttcagcaaatataggtggcagccagatagtggttacagcaggccgtagatatggctgcagcgaccaaaaacttagattatatcacccaagtcccttcaaatacctggaaagccttttcaaggtggaggtgtacaaacaagcccaaactgtgaagacaacaataaatacccaactctttgatgccaagacagtgatgaacgaaggaccattacgacctgttcttgaatacattgatctggtcagcagtgatgatgaagagcctagcacctcttatactgatagaatgcctgaatctaaggtgccatcctctgagaatcatcgcccagaaatgtgctctagctgcaatgttcctcttcccattggagatagcagctccttctctgggagttgttccagcagtccagaaaggatagtttctcaaacttcctctgttgagaacccattggagaaccagaaaaatgatcaaaataattcagatactaagatctctgagacagagacccttaaatcatcacagaattttcagactctgccttcatctccacttctggtcccccaagaatctttggcctcttctgaggtcaaagagaatttacgtataagattcttcttcagcttcacagcatggacgggatgccatcctctatctccagacacaagtagctgaaatgtcccgagtgatacgtgatctgcagtccaggagctgttttagatttcatcattctaggccaagtgagaactcctcagttccttgggacatctccacctctaaagaggaaaatttatccacagttgaagaagaaactgattacaaatcaccatcagctgatgacaaagggcagccatctgaccccagccaatctagtttcacaggtcttttgaagagaatggaacaaagaggtgttataaaaagggtgacattacaatctgaagcggagtcatgtgaagggaaacctgattgtgtgacttctaaaaaacgtttggttcctccattgcatcctcttctgagaattgccaccactgaggtttttaaagaccctgctgattgccatccttcttccttcatgggacacagggtatatcctgtggccaaggacacctctcctttccaaccaaacccaccagctgaaggccccattgtagaagcattagaacacagcaaaagaggaaacacaacatcccctctagattctacctcaaaagaaatggaggtcatgggttgtaggttttaccacgctgcctccattgcagcccgagctgctagctacatggcctatatgactcaatatcagcgtaaactctgggaagacatggaagatctggttcatgacccagaatttgatcgtggaaaagcaagatgcataatatctgatggtatggatgcaggcctttggcaactttgtactactagggacataatggactctgtagtcagagttatggccatggccatagactatagacggcaggcctggcttcgacttacatctctcactaagaaaacccaggagaagatctcccacttgccctttgatggtacttccctttttggacaagatgtgaaagctgttgttgcagaagacaacaatataaaagaaaatgactataaagatcacaaatactataatcagcatcgatacttttatagtcatgatcagaaagcacattatcacaatagaggatactccaaaggggattggtacaaacctcgaaaccacccctatagatatagaaagaagggagactctccagaacgccatgggtacaagaattaa

SEQ ID NO: 17123 - DNA, 768 bp, Homo sapiens
  SIMILAR (163)..(828): 1001254mologous to Escherichia coli 3-deoxy-D- arabinoheptulosonate 7-phosphate synthase,accession number M38266,Smith-Waterman Score=1156.
atgaggattcatctggagattccgaatggggctgcagcatttgaaaagcagaacaatgataacttccttaaagcatcattgggaaaaaaaccccccggctccctgcccacgcacaacaccgacctagctcctcgcgcctcgccgccccggcagccgccggcgtcgccgccgcttccatctctcgcgggtctccaggacgccgccgcccgagtgctcactctcccgccgctgcgtggccggcgtcaggcccaggcctacctcccctgcccggagggacccgcgcctggtgcccgcctccctgccccggcgctccccaaccgcgcggcgaggagcatgcgcagtgggacagcccggctcggcgggcaccgccggcgaggggcgggaggggccgaagacccgaggactgctgcgaggccgggttgggtaacccgagaggagggttggatatttgacgttgaccgtggtgctgaaagaaaattaagaaagcactggagaaatgctccaccaaaattaaggaataaacttagaaagaaggagacatgggattcaggaaaccaggaattcagcaaaggagagaggaactcccaagaggatgccaaaaggaagttccagtatcacagttttgcactgggcctagagagctaccagtccaaattgggtcaagaagatagaaggcaccaggaacagctatccccaaggacaaaagaaacagtgaaactgattgataatctgaaaaggatgcagaattggacaaagagacattattga

SEQ ID NO: 17124 - DNA, 581 bp, Homo sapiens
ctgctgtgttccacctgtcagtcccacagcagctccccagccacactcaggtcccagtgttctgttacatgagtccagtcactggcattaaccagttacctgtctatcctttccaacaggaaatgaaatttaaaagagacaaggccaccctggaagagccgctgaaagctactattgatgggtcaaggggaaaattgaggacagaaattgacaaagtgccaagcacctatacttgtattaatcacttgttagaatatcatgaagagtcaaactacaaggcagccctctccatactgcttttcctggtcaacctctctttgaatgggagacacatgagggccttgcttgaaatgacgaagatcttcaataaaatttcttgcatgaggaaagaagaagaatggggagaagaagaggaagaacatacatgcaaacaagcatcacctggcatggggaggaacaagccaagcagaccttttaagtccgaaagtcccagcaagtctttagataaggttaaccaaagctgtgggcccagggctaggaaagacttccatgatccctgtgagcaggaccctagtccatag

SEQ ID NO: 17125 - DNA, 3358 bp, Homo sapiens
  SIMILAR (376)..(3186): 1001254mologous to Homo sapiens transmembrane receptor,accession number M97675,Smith-Waterman Score=5023.
gagctggagcagccgccaccgccgccgccgagggagccccgggacggcagcccctgggcgcagggtgcgctgttctcggagtccgacccagggcgactcacgcccactggtgcgacccggacagcctgggactgacccgccggcccaggcgaggctgcagccagagggctgggaagggatcgcgctcgcggcatccagaggcggccaggcggaggcgagggagcaggttagagggacaaagagctttgcagacgtccccggcgtcctgcgagcgccagcggccgggacgaggcggccgggagcccgggaagagcccgtggatgttctgcgcgcggcctgggagccgccgccgccgccgcctcagcgagaggaggaatgcaccggccgcgccgccgcgggacgcgcccgccgctcctggcgctgctggccgcgctgctgctggccgcacgcggggctgctgcccaagaaacagagctgtcagtcagtgctgaattagtgcctacctcatcatggaacatctcaagtgaactcaacaaagattcttacctgacccttgatgaaccaatgaataacatcaccacgtctctgggccagacagcagaactgcactgcaaagtctctgggaatccacctcccaccatccgctggttcaaaaatgatgctcctgtggtccaggagccccggaggctctcctttcggtccaccatctatggctctcggctgcggattagaaacctcgacaccacagacacaggctacttccagtgcgtggcaacaaacggcaaggaggtggtttcttccactggagtcttgtttgtcaagtttggcccccctcccactgcaagtccaggatactcagatgagtatgaagaagatggattctgtcagccatacagagggattgcatgtgcaagatttattggcaaccgcaccgtctatatggagtctttgcacatgcaaggggaaatagaaaatcagatcacagctgccttcactatgattggcacttccagtcacttatctgataagtgttctcagttcgccattccttccctgtgccactatgccttcccgtactgcgatgaaacttcatccgtcccaaagccccgtgacttgtgtcgcgatgaatgtgaaatcctggagaatgtcctgtgtcaaacagagtacatttttgcaagatcaaatcccatgattctgatgaggctgaaactgccaaactgtgaagatctcccccagccagagagcccagaagctgcgaactgtatccggattggaattcccatggcagatcctataaataaaaatcacaagtgttataacagcacaggtgtggactaccgggggaccgtcagtgtgaccaaatcagggcgccagtgccagccatggaattcccagtatccccacacacacactttcaccgcccttcgtttcccagagctgaatggaggccattcctactgccgcaacccagggaatcaaaaggaagctccctggtgcttcaccttggatgaaaactttaagtctgatctgtgtgacatcccagcttgcgattcaaaggattccaaggagaagaataaaatggaaatcctgtacatactagtgccaagtgtggccattcccctggccattgctttactcttcttcttcatttgcgtctgtcggaataaccagaagtcatcgtcggcaccagtccagaggcaaccaaaacacgtcagaggtcaaaatgtggagatgtcaatgctgaatgcatataaacccaagagcaaggctaaagagctacctctttctgctgtacgctttatggaagaattgggtgagtgtgcctttggaaaaatctataaaggccatctctatctcccaggcatggaccatgctcagctggttgctatcaagaccttgaaagactataacaacccccagcaatggatggaatttcaacaagaagcctccctaatggcagaactgcaccaccccaatattgtctgccttctaggtgccgtcactcaggaacaacctgtgtgcatgctttttgagtatattaatcagggggatctccatgagttcctcatcatgagatccccacactctgatgttggctgcagcagtgatgaagatgggactgtgaaatccagcctggaccacggagattttctgcacattgcaattcagattgcagctggcatggaatacctgtctagtcacttctttgtccacaaggaccttgcagctcgcaatattttaatcggagagcaacttcatgtaaagatttcagacttggggctttccagagaaatttactccgctgattactacagggtccagagtaagtccttgctgcccattcgctggatgccccctgaagccatcatgtatggcaaattctcttctgattcagatatctggtcctttggggttgtcttgtgggagattttcagttttggactccagccatattatggattcagtaaccaggaagtgattgagatggtgagaaaacggcagctcttaccatgctctgaagactgcccacccagaatgtacagcctcatgacagagtgctggaatgagattccttctaggagaccaagatttaaagatattcacgtccggcttcggtcctgggagggactctcaagtcacacaagctctactactccttcagggggaaatgccaccacacagacaacctccctcagtgccagcccagtgagtaatctcagtaaccccagatatcctaattacatgttcccgagccagggtattacaccacagggccagattgctggtttcattggcccgccaatacctcagaaccagcgattcattcccatcaatggatacccaatacctcctggatatgcagcgtttccagctgcccactaccagccaacaggtcctcccagagtgattcagcactgcccacctcccaagagtcggtccccaagcagtgccagtgggtcgactagcactggccatgtgactagcttgccctcatcaggatccaatcaggaagcaaatattcctttactaccacacatgtcaattccaaatcatcctggtggaatgggtatcaccgtttttggcaacaaatctcaaaaaccctacaaaattgactcaaagcaagcatctttactaggagacgccaatattcatggacacaccgaatctatgatttctgcagaactgtaaaatgcacaacttttgtaaatgtggtatacaggacaaactagacggccgtagaaaagatttatattcaaatgtttttattaaagtaaggttctcatttagcagacatcgcaacaagtaccttctgtgaagtttcactgtgtcttaccaagcaggacagacactcggccag

SEQ ID NO: 17126 - DNA, 1002 bp, Homo sapiens
  SIMILAR (616)..(921): 971254mologous to Homo sapiens dJ537F10.1 (receptor tyrosine kinase-like orphan receptor 1),accession number AL137859,Smith- Waterman Score=513.
atggatcttgaagttgagaacaaaactccccagaatcagcacaatcacttaatgagcttgcgaattgaaattatctttgctacagcccaagaactgagtgaaacagagctgtcagtcagtgctgaattagtgcctacctcatcatggaacatctcaagtgaactcaacaaagctgctgtgttccacctgtcagtcccacagcagctccccagccacactcaggtcccagtgttctgttacatgagtccagtcactggcattaaccagttacctgtctatcctttccaacaggaaatgaaatttaaaagagacaaggccaccctggaagagccgctgaaagctactattgatgggtcaaggggaaattttattgaagatcttcgtcatttcaagcaaggccctcatgtgtctcccattcaaagagaggttgaccaggaaaagcagtatggagagggctttgagagagaaaagaacagcgtgtcaagctgtgaacttcttgagatcagaacaggttcattcacccagaaaatgtttatcttcattgtgccacctcggtacttaacctggggcagaggtttggatactggggagtgcaagaggaagggttgggttggagattcttacctgaccctcgatgaaccaatgaataacatcaccacgtctctgggccagacagcagaactgcactgcaaagtctctgggaatccacctcccaccatccgctggttcaaaaatgatgctcctgtggtccaggagccccggaggctctcctttcggtccaccatctatggctctcggctgcggattagaaacctcgacaccacagacacaggctacttccagtgcgtggcaacaaacggcaaggaggtggtttcttccactggagtcttgtttgtcaagtttggtaagcagacccctactggggatggactttggccctcagcccaatgtggtaggatggctagagtccacagggacaggaaggaaggaatgcacacttag

SEQ ID NO: 17127 - DNA, 325 bp, Homo sapiens
  SIMILAR (148)..(324): 531254mologous to Homo sapiens bA393J16.1 (zinc finger protein 33a (KOX 31)),accession number AL117337,Smith-Waterman Score=168.
atgtgcatgtccgtaaaggctgtagcaaataaaacattacaaagtggccagcagcacccagtagccttgtctgaaagttttgtagcaaatgcttctggtaagacaacccagtctgccacacaggatggattcctggcaaattctagagcacagatttccagcaagttccacagcaggaacaggacatggctaaggcaagaaacagtgacatttaaggatgtggctgttgaccttacccaggaggagtgggagcaaatgaaacctgctcaaagaaacttgtatcgagatgtgatgctggagaactacagcaacctagtcacagtgg

SEQ ID NO: 17128 - DNA, 543 bp, Homo sapiens; identical to SEQ ID NO: 14312
  SIMILAR (397)..(441): 661254mologous to Mus musculus Zfp64p,accession number U29498,Smith-Waterman Score=57.

SEQ ID NO: 17129 - DNA, 634 bp, Homo sapiens
  SIMILAR (370)..(609): 631254mologous to Mus musculus NK10,accession number X79828,Smith-Waterman Score=278.
tttcgtaaacgtcgctggcgcggagggatggttcggcgctttaggcgtctgtcacagacctatctgcgggtcgccttcacccagcatctcagaaactgcgcgcgggatgaacattcgggtgtttccggcaggtgacgctgccgagtccccgcagcagggggcgagcaagggactcgcggttgacgggacacggatcctctaaggcccagagtgtcccgagtagcggcagtggggagtgctcagggtacgctaatgatctgtgtcttgtaaagagcatattgctgggcttacatccgtttatcttgtttgactgttattttaatagcttggtgttctcaagagtctgccctttccgaggaagaagaggatacaaccaggcctcttgaaacagtgacatttaaggatgtggctggtgaccttacccaggaggagtgggagcaaatgaaacctgctcaaagaaacttgtatcgagatgtgatgctggagaactacagcaacctagtcacagtgggctgtcaagtcaccaaaccggatgtgatattcaagttggagcaagaagaggagccctgggtgatggaggaagaaatgtttgggaggcactgtccagaacccagaagaggagagaactgctgtg

SEQ ID NO: 17130 - DNA, 531 bp, Homo sapiens; identical to SEQ ID NO: 14311
  SIMILAR (298)..(522): 681254mologous to Mus musculus NK10,accession number X79828,Smith-Waterman Score=276.

SEQ ID NO: 17131 - DNA, 1188 bp, Homo sapiens
  SIMILAR (883)..(1185): 861254mologous to Homo sapiens uncharacterized hematopoietic stem/progenitor cells protein MDS029,accession number AF220049,Smith-Waterman Score=484.
atgcttcctgccccttccctggtagtgggtgtggagggggtgactgcccagcttctgcagcgccagcgacttcctccaccttgttcccgccctgcagggtctgagcacctccctcatgcagacagagccccggctcccatgttcaccatgctgagaaagacctgcgggggacagcaggaggacagccggggaatgggcccgcacttgcccaggaggctggctgctggctggttcctcttccagaagtccgtgcagatcctgtcctctggctttgccttgcctaagacccagtctgcaccaaggctgagtccctggacttctggagagagagggctgtccctttgtgccctacaagtacagtgtgtgggcgcctcccctgggccctgcacaggttctgtggcaccggcagcatgcgggaagaggcagagctcgtgcatgcccgacctcgctcctcacggctccctgggcagcagcgccctggcagttggaactggaaggcttatcagagtccacgcagccccaccgccctccccactctcggggtcagttgtgtccaacaatttagctgctacaacccaggtagcaaaagtcaagctaaaattccaggctgccttccccaacccagaaattgaaaacaaacttgcaaaatgtgagcccagcagagcaagatctacagcactgacccagatgactgatgacccgacatcctcaagcccagcttcagggcccactacaaggccctactactgcttcactgccccaagcccacctgtggaattgaacatagagtttatcctaaacggagtcacctggatcagcgcctgggcttttattggtgttttgtctgcaatgggctttggccacgtaaatgtgaacaaaatgagcatacgagttgaatggatcacagcatttactattgctgctgggagagctgcaactggttatctagcttacaaaagattttatgacaaagatcatcagaataaagctatgatgaaccttcacatccagaaagacaaccccaagatagtacatgcttttgacatggaggatttggaagataaagctgtgtactgccattgctggaggtataaaaagttcccattctgtgatgggtctcacacaaaacacaacgaacagactggagacaacgtgggacctctgatcatcgagaaaaaagaaacttaa

SEQ ID NO: 17132 - DNA, 851 bp, Homo sapiens
  SIMILAR (168)..(470): 491254mologous to Homo sapiens uncharacterized hematopoietic stem/progenitor cells protein MDS029,accession number AF220049,Smith-Waterman Score=210.
  misc_feature (1)...(851): n = a,t,c or g
atcgagaccatagagcactgtggnggaattccccgccgcggcgcctgcgcggtagcatcgcggagtcggtgctttagttcgccgctggcatcctttacttttaccgggcgtgcgagtcccgattgagctcggtatcctagtgcacacgccttgcaagcgacggcgccatgagtctgacttccagttccagcgtacgagttgaatggatcgcagcagttaccattgctgctgggagcagctgcaattggttatctagcttacaaaagattttatgttaaagatcatcgaaataaagctatgataaaccttcacatccagaaagacaaccccaagataagacatgcttttgacatggagggatttgggagataaagctgtgtaactgccgttgttggaggtccaaaaagttcccattctgtgatggggctcacacaaaacataacaaagaagactggagacaatgtgggccctctgatcatcaagaaaaaagaaacttaaatggacacttttgatgctgcaaatcagcttgtcgtgaagttacctgattgtttaattagaatgactaccacctctgtttgattcacctttcgctggattctaaatgtggtatattgcaaactgcagctttcacatttatggcatttgtcttgttgaaacatcgtggtgcacatttgtttaaacaaaaaaaaaaaaaaaaaaggaaaaaccaacctcatggcctgtgggttattttggtcttgtaaggatccatttctttaaaatactgacatatagagttgtaccttatatagaatatagttgtatcttgaagtcaacatattaaattattctcaaaattaaaaaaaaaaaaa

SEQ ID NO: 17133 - DNA, 454 bp, Homo sapiens
  SIMILAR (45)..(134): 931254mologous to Homo sapiens uncharacterized hematopoietic stem/progenitor cells protein MDS032,accession number AF220052,Smith-Waterman Score=145.
  misc_feature (1)...(454): n = a,t,c or g
tgcgctggggcacccgnccggnntnnacgctcgacgatttcgtgctaaacctggtgcggctgctatcccgctgcgaggcgatggcagcggagaaacgggacccggacgagtggcgcctggagaagcaaaccggcctctgaggtgatcaatgaatattcctggaaggtggattttctgaaggggatgctgcaagccgagaagctgacctcctcctcagagaaagcactggccaaccagttcctggcccctggccgtgtgccaaccacagccagagagcgagtgcccgccacaaagacggtgcatctgcagtcacgggcgcggtacaccagcgagatgcggagtgagccactaggcacggactctgcagagcctgagatggacgtaaggaagagaacgtgagtgtctgcggccctggggcagtagtggcaattgggcggtgcggcagggacggagg

SEQ ID NO: 17134 - DNA, 303 bp, Homo sapiens
  SIMILAR (12)..(125): 941254mologous to Homo sapiens uncharacterized hematopoietic stem/progenitor cells protein MDS032,accession number AF220052,Smith-Waterman Score=170.
ccagcttggcacgagggccaaccacagccagagagcgagtgcccgccacaaagacagtgcatctgcagtcacgggcgcgggacaccagcgagatgcggagtgagctactaggcacggactctgcaggtgagtcaccatgaacacaacaggacttgagggccagctgactaggacaagacatgtatccttgctgccccggggcctccatgccgagactccatgccctgactccaacaggagcatcaccaaactacacctggaggaagagccaggacagaggaaatggccccgagaggaaacaaa

SEQ ID NO: 17135 - DNA, 813 bp, Homo sapiens
  SIMILAR (23)..(175): 1001254mologous to Homo sapiens uncharacterized hematopoietic stem/progenitor cells protein MDS032,accession number AF220052,Smith-Waterman Score=250.
ttatcttcccacatttctgcagacctcctcctcagagaaagcactggccaaccagttcctggcccctggccgtgtgccaaccacagccagagagcgagtgcccgccacaaagacggtgcatctgcagtcacgggcgcggtacaccagcgagatgcggagtgagctactaggcacggtagggctccttccctggtccctgggaatcccttggacaggaataggggttctatgcttgtaggcagccagaaccacaatactgtcagatacaggaaccctaagggggtccagcaatctcttccctgggtcatcacacaaggtgagatgctgggctggggcgagaacggcgctgtgccggcgtgcgtagcggggtttccgccgcgtgggggccaaagcgccgggcgtgtctctcaggggatcacggcatctcaagatactgacgttgatgacatcggccaagacgccgtttccagataaagccacagtcacaggttccagaacacgctcctctccctttgcccacagcctcagatccaccaggcactcgcctcggtgcccttctgagagcaggctgagtccagggggccaaaggctggggttcccttcatctgtcctgaactgtagcaagtgcagctggcagctggcagcgtgcatggggttttcattctgatcgtctgacgcgtcaaatgggaaacctgttatgaacccaagtacaactgggacagcccgtatcccgctcttagaatttaggccggaaatggcttgaaccccggactcaaattttccagtgaccaagatcattccacggcactccat

SEQ ID NO: 17136 - DNA, 890 bp, Homo sapiens
  SIMILAR (677)..(33): 361254mologous to Homo sapiens uncharacterized hematopoietic stem/progenitor cells protein MDS032,accession number AF220052,Smith-Waterman Score=277.
tttttttttttttttttgggcgggggtctttatttgagtttaggcatgattcgaatgaagaggatcaagctaatgaagatgaagcagacgataatgagcatggcccagagcagccagttgactgacttctgcgtgtgctgctccagccgttctgattccgttcttcagtttctccaggttctggtccgccattttcagtgagtgtgacagggtctggttgtccttcttgatgacactctgggcggccaggggtattggtcttgaagctcccgggccagtcctaagcatctcttccgccagcttttcctggaggttctgatgtcgctgcaggacgaggtcttagctcagctgccgactgcttctcactcactgggctggggaccctggccactccagttctcttccttacgtccaatctcaagcttctgcaagagtccgtgcctaagtagctcaattccgcatcttcgctggtgtaccgcgcccgtgactgcagatgcaccgtctttgtggcgggcactcgctctctggctgtggttggcacacggccaggggccaggaactggttggccagtgctttctctgaggaggaggtcagcttctcggcttgcagcatccccttcagaaaatcccaccttccaggaatattcattgatcacctcagaggccggtttgctggaaggcaggaagaagaaaaacaaaacctcgcgtggaccttcagggcctgcaacatgtcctctagggctcccacgtacttctccaggcgccactcgtccgggtcccgtttctccgctgccatcgcctcgcagcgggatagcagccgcaccaggtttagctccagcctcgacgccgccattatcgcccggccctacaccaccccttccgccacgaaa

SEQ ID NO: 17137 - DNA, 1377 bp, Homo sapiens
  SIMILAR (103)..(534): 1001254mologous to Homo sapiens dJ1049G11.1 (novel protein),accession number AL078634,Smith-Waterman Score=751.
atggtaaggagggatgagggagcagaagtggaggagtgtcaacagtcagaaaatgcacctgcagccggatctggccatctcacagtgggacagcagcagcaggtccttcggagcagcagcacctccgacatccccgagccgctgtgctcagattcttctcagggtcaaaaggcagaaaacacacagaattcgagttcttcagagcctcagcctattcaagagaataaaggacatgtgaagagagaacatgaaggaataacaatcttagttcgaagaagcagcagccctgctgaattggatttgaaagatgatttgcagcagacacaaggaaaatgtagggaaagacagaagagtgaaagtaccaacagtgacacaactctgggctgtaccaatgaggcagagctgtccatgggcccatggcagacctgtgaggaagacccagaactgaatactcccacagatgttgtggctgatgctgatgcccgtcattggttacaactgagtcccaccgatgcttcaaatttaacagatagcagcgagtgcctcacagatgactgtagtataatcgccggggggagcctcactggttggcacccagactctgctgctgtgttatggcgaagggtcttggggatcctcggagatgtgaataacatccagtcacccaagatccatgccagagttttctgctatctctatgaactctggtacaaactagcaaaggcggcgacactgccaaatgaatataaggaaggcaaactacaagcctacaggctgatctgtgccatgatgaccagacgccaggacgttctgccaaactcagatttcctggtgcatttttaccttgtgatgcacctgggattaaccagcgaggatcaggcaaaacaggaagtgtgcacaccttgccttgccagtgctgctgaatgtgtatgggtagactctgcagtcagcgtgcatcccagagcccacgtgcagtcattagggaagccctgctccctagctacatccctagggtgcagagaagcagctggagaaacagcgcaactccagttagcaccacagcctccagcagaggcagttatactatctctggaacattaccctgaaaaccaccccctgaccctcaaaggagccatggctggccccactcaaggagagtcagagcacagacctgctcaaccctatccccacctgttgacacaactggaacttctcccatgcgaattcagcatgaatgtacctacagatagccctcctggaacaattcacggtggctgcatcctcacagaagcactctccaagtttaggcttgcacaagaggcagagtcacaattcctttctatatggaacatcaacatccctcatccctacagatga

SEQ ID NO: 17138 - DNA, 6192 bp, Homo sapiens
  SIMILAR (1)..(6189): 1001254mologous to Homo sapiens cancer-amplified transcriptional coactivator ASC-2,accession number AF177388,Smith- Waterman Score=10754.
atggttttggatgaccttccaaacttagaagacatctatacttccttgtgttcatcaacaatggaagactcagagatggattttgactctggactagaagatgatgacacaaaaagtgatagtatcttagaggattccacaatttttgtggccttcaaaggaaatatagatgataaagacttcaaatggaaattagatgcaatattgaaaaacgtgcccaatttgttacacatggagtccagcaagctaaaagtacagaaggtggagccctggaacagcgtgcgtgtgacattcaacatcccccgggaagcagcggagcggctacggatccttgctcagagcaacaaccagcagcttcgggatttagggattctctccgttcagattgaaggggaaggtgctattaacctggctttggctcagaaccgaagccaagatgtgagaatgaatggacccatgggagctggaaattcagttaggatggaggcgggatttcctatggcaagtggtccaggaataataaggatgaacaaccctgccactgttatgatacccccgggtggaaatgtgtcatcttccatgatggcaccaggccccaatccagagctgcagcccaggactcctcgccctgcttctcagtcagatgcaatggatccactcctctctgggctccatatacagcagcaaagtcatccctcaggatctttagctcccccacatcacccaatgcagcctgtctctgtgaacagacaaatgaacccagctaattttccccagctgcagcagcagcagcaacaacaacaacagcagcagcagcagcagcagcagcaacaacagcaacagcagcaacaacagttgcaggcaagacccccacagcaacatcagcagcaacagccacagggaattcgaccccagtttactgccccaactcaggtgcctgttcctccaggctggaaccagctgccttctggagcccttcaacctcctccagcccagggttctctgggcacaatgactgcaaaccaagggtggaagaaggctcccttgcccggcccaatgcaacagcaactccaggcaagaccatccttagccacggtacagacgccttcccaccctccccctccatatccctttggcagccagcaagcctcacaagcccacacaaactttcctcagatgagcaacccaggccagttcacagctcctcagatgaagagtttgcagggagggccctctagggtcccaactcccttgcagcagccccacctcaccaacaagtctcctgcctcctcaccctcctccttccagcagggatcccctgcatcctccccaacggttaaccaaactcagcagcagatgggaccaaggccacctcaaaataacccacttccccagggatttcagcagcctgtcagctctccgggtcggaatcctatggttcaacagggaaatgtgccacctaacttcatggtgatgcagcagcaaccaccaaaccaggggccacagagtttacatccaggcctaggaggaatgcctaaacgcctcccacctggcttctcagcaggacaggccaatccgaactttatgcaaggtcaggtgccttcgaccacagcaaccacccctgggaattcaggagcccctcagctgcaagcaaatcaaaatgtccagcatgcaggtggtcaaggagctggtcctcctcaaaaccagatgcaggtgtcccacgggccgccaaatatgatgcagcccagcctcatgggaattcatggcaacatgaacaatcagcaggctggtacttctggggttcctcaagtgaacctcagcaacatgcaaggccagccccagcagggcccaccatctcagctgatgggcatgcaccagcaaatcgtgccctcccagggccagatggtccagcaacaaggaaccttgaaccctcagaaccctatgatcctttcaagggcccagcttatgccacagggccagatgatggtgaaccccccgagccaaaatcttgggccctcgccccaaaggatgaccccacccaagcagatgctttcccagcagggcccacaaatgatggcgccacataaccagatgatggggcctcaggggcaggttttgctccaacagaacccaatgatagagcagattatgaccaatcaaatgcaggggaataagcagcagtttaacactcagaaccagtccaatgtcatgccgggaccagcccagataatgaggggaccaactccgaacatgcaaggaaatatggtgcagtttacgggacagatgtcaggacagatgctgccccagcaagggcctgtgaacaacagtccatctcaggttatgggcattcagggacaggtcctgcggccaccagggcccagcccacacatggcccagcagcatggtgatcctgctactacagcaaataacgatgtcagtttatctcagatgatgcctgatgttagcattcaacaaaccaacatggtcccccctcatgtgcaggccatgcagggaaacagtgcctcgggaaaccacttctcaggccatgggatgtctttcaatgcacctttcagtggagctcccaatggaaatcagatgtcctgtggtcaaaatccaggcttcccagtcaataaggatgtcacgctaacgagcccattgttggtcaacttattgcagagtgacatatctgcaggccattttggggtaaacaataagcaaaataataccaacgcaaataaaccgaagaagaagaaaccccctcggaagaagaaaaatagtcagcaagatctaaacaccccagatactcgcccagctggtctggaagaggctgatcagccaccgttgcctggagaacaaggaattagcttggataactcaggccctaaactgccagaattttcaaaccggccaccaggttatccttctcaaccagttgaacagaggccacttcagcagatgcctcctcaactcatgcagcatgtggcacccccaccacagccaccacagcagcagccacagccacaactgcctcagcagcagcagccaccacctcccagtcagccacagtctcagcagcagcagcagcagcagcaacaaatgatgatgatgctcatgatgcagcaggatcccaaatcagttaggcttccagtctctcaaaatgtccatcctccaaggggccccctgaaccccgactcccagagaatgcccatgcaacagagtggcagtgtgcctgtcatggtcagtctgcaaggacctgcctccgtgccaccatcacctgataaacaaagaatgccaatgcctgtgaatactcccttgggaagcaattcaaggaaaatggtctatcaggagagcccgcagaatccttccagctcgccactggcggagatggcctcactccctgaagcaagtggcagtgaagcaccatctgtcccaggaggcccaaacaacatgccttcacatgtagtacttccccagaatcagttaatgatgacagggccaaaacctggaccatcgcccctttcagcaactcaaggtgcaactccccagcaaccccctgtaaattccctgcccagctctcacggccaccacttcccaaatgtggctgcgccaacccagacatctaggcccaaaacaccaaacagagccagccccagaccctattatcctcagacacccaacaaccgccctcccagcacagaaccttcagaaatcagtctgtcaccagaaagactcaatgcctccatagcaggactcttccctccacagattaatattcctttacctcctaggccaaatttaaacaggggctttgatcaacaaggcctaaatccaacaactttgaaggccatcgggcaagcaccttcaaatcttaccatgaatccttccaattttgctaccccacaaactcacaaattagattctgtggtagtgaattctggaaagcagtctaattctggagcaacaaaacgggcaagtccaagcaacagtcgcaggtctagtcctgggtccagtaggaaaaccactccaagccctgggaggcaaaattcaaaagcccctaaacttactctggcctctcagacaaatgcagccctattgcagaatgtggagttgccgagaaatgtattggtcagtcccactcctctggccaatccccctgtacctgggagctttcctaacaacagtgggctgaatcctcagaattctactgtgtctgtggctgcagttgggggtgttgttgaggataacaaggagagcttgaatgtgcctcaggacagtgattgccagaattcccagagtaggaaggaacaggtaaacattgaactaaaagcagtccctgcccaagaagttaaaatggttgtccctgaagatcagtccaaaaaggatgggcagccttcggatcctaacaaacttcccagtgtcgaagagaacaaaaatttggtgtctcctgctatgagggaagcaccaacatcgttaagtcaacttcttgacaactctggagctcccaatgtgacaattaaaccccctgggcttacagatctggaagtaacacctccagtagtttctggggaggacctcaaaaaagcatctgtcattcccacactgcaggatctgtcttcttctaaagaaccttctaattccctaaacttacctcacagtaatgagctgtgttcatcccttgtgcatcccgaattgagtgaggtcagttctaacgttgcaccaagcatccctccagtaatgtcaagacctgttagctcttcctccatttccactcccttgcccccaaatcaaataactgtatttgtcacttccaatcccatcacaacttcagctaacacatcagcagctttgccaactcacttgcagtctgcattgatgtcaacagttgtcacaatgcccaatgcgggtagcaaggttatggtttctgagggacagtcagctgctcagtctaatgcccggcctcagttcattacacctgtctttatcaattcatcctcaataattcaggttatgaaaggatcacagccaagcacaattcctgcagccccactgacaaccaactctggcctgatgcctccctctgttgcagttgttggccctttacacatacctcagaacataaaattttcttctgctcctgtaccgcctaatgccctctccagtagtcctgctccaaacatccagacaggtcgacctttggtccttagctcacgagccacccctgttcagcttccttcccctccttgtacgtcttctccagttgtcccttctcatccccctgtgcagcaagtgaaagaattgaatccagatgaggctagccctcaggtgaacacctcagcagatcagaacactcttccctcttcacagtcaaccacaatggtttctccccttttgaccaatagtccagggtcctctggcaaccggcgaagcccagtctcgtctagtaagggcaaaggaaaagtggacaaaattggccaaattttgttgaccaaggcatgtaagaaagttacaggctctcttgagaaaggggaagaacaatatggtgcagatggagagactgaaggccaagggctagacaccacagctccggggctcatgggaacagagcagttatccacagagctggacagtaaaaccccaacgcccccagcacccactctgctaaaaatgacctctagccctgtgggcccgggcactgcctcagcaggacccagcttacctggcggtgctctccccaccagtgtacgctcgatagtaaccactctggtaccctccgagctcatctccgccgtaccgaccacaaaaagcaatcatggtggcatagcatctgagtcacttgcgggtggcctagtggaggagaaggtgggatcccatccagaacttctacccagcatagccccgtcgcagaatttagtctcaaaggaaacttcaaccacagcactgcaggcctctgttgccagaccagagctggaggtaaatgctgccatagtctctggacaaagcagtgagcccaaagagatagttgaaaagtccaaaatcccaggccgaagaaactcccgaactgaagagccaactgtggcctctgaaagtgtggaaaatggacatcgtaaacgatcttctcgacctgcttcagcctccagctctactaaagacataaccagtgcggtgcaatccaagcgaagaaaatccaagtaa

SEQ ID NO: 17139 - DNA, 8280 bp, Homo sapiens
  SIMILAR (186)..(281): 581254mologous to Homo sapiens transcriptional coactivator AIB3,accession number AF208227,Smith-Waterman Score=94.
atggttttggatgaccttccaaacttagaagacatctatacttccttgtgttcatcaacaatggaagactcagagatggattttgactctggactagaagatgatgacacaaaaagtgatagtattttggaggattccacaatttttgtggccttcaaaggaaatatagatgataaagacttcaaatggaaattagatgcaatattgaaaaacgtgcccaatttgttacacatggattcggagacagcagcaaaagggaaaaataccgaagtgcgtcaattcgatcaatcggcgattaaaaatattgagtctgcaaaaggacgtgatgtgtgggacagctggccgctgcaaaacgctgacggaacagtagctgaatacacgggctatcacgttgtgtttgctcttgcgggaagccggaaagacgctgatgacacatcaatctacatgttttatcaaaaggtcggcgacaactcaatcgacagctggaaaaacgcgggccgtgtctttaaagacagcgataagttcgacgccaacgatccgatcctgaaagatcagacgcaagaatggtccggttctgcaacctttacatctgacggaaaaatccgtttattctacactgactattccggtaaacattacggcaaacaaagcctgacaacagcgcaggtaaatgtgtcaaaatctgatgacacactcaaaatcaacggagtggaagatcacaaaacgatttttgacggagacggaaaaacatatcagaacgttcagcagtttatcgatgaaggcaattatacatccggcgacaaccatacgctgagagaccctcactacgttgaagacaaaggccataaataccttgtattcgaagcccaacacggggaacagaaaacggattcccaaggcgaagaatctttatttaacaaagcgtactacggcggcggcacgaacttcttccagtccagcaagctaaaagtacagaaggtggagccctggaacagcgtgcgtgtgacattcaacatcccccgggaagcagcggagcggctacggatccttgctcagagcaacaaccagcagcttcgggatttagggattctctccgttcagattgaaggggaaggtgctattaacctggctttggctcagaaccgaagccaagatgtgagaatgaatggacccatgggagctggaaattcagttaggatggaggcgggatttcctatggcaagtggtccaggaataataaggatgaacaaccctgccactgttatgatacccccgggtggaaatgtgtcatcttccatgatggcaccaggccccaatccagagctgcagcccaggactcctcgccctgcttctcagtcagatgcaatggatccactcctctctgggctccatatacagcagcaaagtcatccctcaggatctttagctcccccacatcacccaatgcagcctgtctctgtgaacagacaaatgaacccagctaattttccccagctgcagcagcagcagcaacaacaacaacagcagcagcagcagcagcagcagcaacaacagcaacagcagcaacaacagttgcaggcaagacccccacagcaacatcagcagcaacagccacagggaattcgaccccagtttactgccccaactcaggtgcctgttcctccaggctggaaccagctgccttctggagcccttcaacctcctccagcccagggttctctgggcacaatgactgcaaaccaagggtggaagaaggctcccttgcccggcccaatgcaacagcaactccaggcaagaccatccttagccacggtacagacgccttcccaccctccccctccatatccctttggcagccagcaagcctcacaagcccacacaaactttcctcagatgagcaacccaggccagttcacagctcctcagatgaagagtttgcagggagggccctctagggtcccaactcccttgcagcagccccacctcaccaacaagtctcctgcctcctcaccctcctccttccagcagggatcccctgcatcctccccaacggttaaccaaactcagcagcagatgggaccaaggccacctcaaaataacccacttccccagggatttcagcagcctgtcagctctccgggtcggaatcctatggttcaacagggaaatgtgccacctaacttcatggtgatgcagcagcaaccaccaaaccaggggccacagagtttacatccaggcctaggaggaatgcctaaacgcctcccacctggcttctcagcaggacaggccaatccgaactttatgcaaggtcaggtgccttcgaccacagcaaccacccctgggaattcaggagcccctcagctgcaagcaaatcaaaatgtccagcatgcaggtggtcaaggagctggtcctcctcaaaaccagatgcaggtgtcccacgggccgccaaatatgatgcagcccagcctcatgggaattcatggcaacatgaacaatcagcaggctggtacttctggggttcctcaagtgaacctcagcaacatgcaaggccagccccagcagggcccaccatctcagctgatgggcatgcaccagcaaatcgtgccctcccagggccagatggtccagcaacaaggaaccttgaaccctcagaaccctatgatcctttcaagggcccagcttatgccacagggccagatgatggtgaaccccccgagccaaaatcttgggccctcgccccaaaggatgaccccacccaagcagatgctttcccagcagggcccacaaatgatggcgccacataaccagatgatggggcctcaggggcaggttttgctccaacagaacccaatgatagagcagattatgaccaatcaaatgcaggggaataagcagcagtttaacactcagaaccagtccaatgtcatgccgggaccagcccagataatgaggggaccaactccaaacatgcaaggaaatatggtgcagtttacgggacagatgtcaggacagatgctgccccagcaagggcctgtgaacaacagtccatctcaggttatgggcattcagggacaggtcctgcggccaccagggcccagcccacacatggcccagcagcatggtgatcctgctactacagcaaataacgatgtcagtttatctcagatgatgcctgatgttagcattcaacaaaccaacatggtcccccctcatgtgcaggccatgcagggaaacagtgcctcgggaaaccacttctcaggccatgggatgtctttcaatgcacctttcagtggagctcccaatggaaatcagatgtcctgtggtcaaaatccaggcttcccagtcaataaggatgtcacgctaacgagcccattgttggtcaacttattgcagagtgacatatctgcaggccattttggggtaaacaataagcaaaataataccaacgcaaataaaccgaagaagaagaaaccccctcggaagaagaaaaatagtcagcaagatctaaacaccccagatactcgcccagctggtctggaagaggctgatcagccaccgttgcctggagaacaaggaattaacttggataactcaggccctaaactgccagaattttcaaaccggccaccaggttatccttctcaaccagttgaacagaggccacttcagcagatgcctcctcaactcatgcagcatgtggcacccccaccacagccaccacagcagcagccacagccacaactgcctcagcagcagcagccaccacctcccagtcagccacagtctcagcagcagcagcagcagcagcaacaaatgatgatgatgctcatgatgcagcaggatcccaaatcagttaggcttccagtctctcaaaatgtccatcctccaaggggccccctgaaccccgactcccagagaatgcccatgcaacagagtggcagtgtgcctgtcatggtcagtctgcaaggacctgcctccgtgccaccatcacctgataaacaaagaatgccaatgcctgtgaatactcccttgggaagcaattcaaggaaaatggtctatcaggagagcccgcagaatccttccagctcgccactggcggagatggcctcactccctgaagcaagtggcagtgaagcaccatctgtcccaggaggcccaaacaacatgccttcacatgtagtacttccccagaatcagttaatgatgacagggccaaaacctggaccatcgcccctttcagcaactcaaggtgcaactccccagcaaccccctgtaaattccctgcccagctctcacggccaccacttcccaaatgtggctgcgccaacccagacatctaggcccaaaacaccaaacagagccagccccagaccctattatcctcagacacccaacaaccgccctcccagcacagaaccttcagaaatcagtctgtcaccagaaagactcaatgcctccatagcaggactcttccctccacagattaatattcctttacctcctaggccaaatttaaacaggggctttgatcaacaaggcctaaatccaacaactttgaaggccatcgggcaagcaccttcaaatcttaccatgaatccttccaattttgctaccccacaaactcacaaattagattctgtggtagtgaattctggaaagcagtctaattctggagcaacaaaacgggcaagtccaagcaacagtcgcaggtctagtcctgggtccagtaggaaaaccactccaagccctgggaggcaaaattcaaaagcccctaaacttactctggcctctcagacaaatgcagccctattgcagaatgtggagttgccgagaaatgtattggtcagtcccactcctctggccaatccccctgtacctgggagctttcctaacaacagtgggctgaatcctcagaattctactgtgtctgtggctgcagttgggggtgttgttgaggataacaaggagagcttgaatgtgcctcaggacagtgattgccagaattcccagagtaggaaggaacaggtaaacattgaactaaaagcagtccctgcccaagaagttaaaatggttgtccctgaagatcagtccaaaaaggatgggcagccttcggatcctaacaaacttcccagtgtcgaagagaacaaaaatttggtgtctcctgctatgagggaagcaccaacatcgttaagtcaacttcttgacaactctggagctcccaatgtgacaattaaaccccctgggcttacagatctggaagtaacacctccagtagtttctggggaggacctcaaaaaagcatctgtcattcccacactgcaggatctgtcttcttctaaagaaccttctaattccctaaacttacctcacagtaatgagctgtgttcatcccttgtgcatcccgaattgagtgaggtcagttctaacgttgcaccaagcatccctccagtaatgtcaagacctgttagctcttcctccatttccactcccttgcccccaaatcaaataactgtatttgtcacttccaatcccatcacaacttcagctaacacatcagcagctttgccaactcacttgcagtctgcattgatgtcaacagttgtcacaatgcccaatgcgggtagcaaggttatggtttctgagggacagtcagctgctcagtctaatgcccggcctcagttcattacacctgtctttatcaattcatcctcaataattcaggttatgaaaggatcacagccaagcacaattcctgcagccccactgacaaccaactctggcctgatgcctccctctgttgcagttgttggccctttacacatacctcagaacataaaattttcttctgctcctgtaccgcctaatgccctctccagtagtcctgctccaaacatccagacaggtcgacctttggtccttagctcacgagccacccctgttcagcttccttcccctccttgtacgtcttctccagttgtcccttctcatccccctgtgcagcaagtgaaagaattgaatccagatgaggctagccctcaggtgaacacctcagcagatcagaacactcttccctcttcacagtcaaccacaatggtttctccccttttgaccaatagtccagggtcctctggcaaccggcgaagcccagtctcgtctagtaagggcaaaggaaaagtggacaaaattggccaaattttgttgaccaaggcatgtaagaaagttacaggctctcttgagaaaggggaagaacaatatggtgcagatggagagactgaaggccaagggctagacaccacagctccggggctcatgggaacagagcagttatccacagagctggacagtaaaaccccaacgcccccagcacccactctgctaaaaatgacctctagccctgtgggcccgggcactgcctcagcaggacccagcttacctggcggtgctctccccaccagtgtacgctcgatagtaaccactctggtaccctccgagctcatctccgccgtaccgaccacaaaaagcaatcatggtggcatagcatctgagtcacttgcgggtggcctagtggaggagaaggtgggatcccatccagaacttctacccagcatagagctggaggtaaatgctgccatagtctctggacaaagtgagcccaaagagatagttgaaaagtccaaaatcccaggccgaagaaactcccgaactgaagagccaactgtggcctctgaaagtgtggaaaatggacatcgtaaacgatcttctcgacctgcttcagcctccagctctactaaagggattcaggttccctcttccaggtatttactggaggagaaggggagggggatcatagggtacccatttctccccagcaacctagaaagaaagagaggcctgtgggagaaaatgaaaagaggccccctgaaggccctgaacctggataggaacaatttgcagattgagacagtgggagtcctggactcctactcaggactgctggctagccatactgagcagggtgtgaaatacaaggccagaggcaaggtgaagactgagctgtcagccttgggatggcttcaccccatggctgcctcgttccctagattccctccatcttctccctctaactcacgtctcacagtcctcttctacatactgtacctttccaggcctaagcagctccacagagtaccgcccccaaggcagaaggaaggggagactaaaagcaaaaccctgagcccttactggagggcaatgacagcagcccaggctgcacaggctctacctggagtgagggtgaagggtgaatgggttcagaggcagattagaggatcagagatggggaaattgagggtgtcggggaaggaacggctatcacccaacctcacacgctttaagaagggaggtttcggtgtccagcccgaggagtcggaggagcccgacagggatcgggatcggcaaggggttcgtggcgcggccggtggacgctcagtagttgaactggcgctggcacggctggtagatgaagctgctctggttcttggaccggcgcggacggctctcgcgggctcggttctgccgctgcaccgccttggcgctcagcgcgtggcgctctgcccgctgccgggcccgctgcagccgccgcacctggcccgccttctccagcagcgccgcccgcgctgggagaggagcggcgtggcgcgcggcccgcggctcgcggcgggcgggcgtcaattccctgtgaggacagagccaggctcggtcaagccggattggggtgcccgacgcccttcttgtgggtaccaacccggaggtgcctcctcggttctagcccttaacaggccatctgcccttagaatgacttcacaggcccaggagacagacccaggcctcacccggcaggtcaatgatgagccagccgtccacttcatcctcctccgacacgaaggcgcgggggcagtcggggtcttcggggggcgagggggtgctgaagaagaggctggagaggcgctggaacatggttgcaaagagaaagtaggggatcagaggcctgaccccagcccctggataagcctaggaaatcgccgatccccctgcagccccctttggattgcagcgtctcacccagggcccagccccgacacagcggctaccgggtcacgggaggacaagcgacccgagcctgtgggggcgctcggcgggcttgagaaaagagggacatccccaacccccggttcccggggagcatctgggaatgtagagaagttagtgaagctgacgtga

SEQ ID NO: 17140 - DNA, 1177 bp, Homo sapiens
  SIMILAR (493)..(1176): 931254mologous to Cloning vector pSacBII SacB,accession number U09128,Smith-Waterman Score=1138.
tcccgtgtcgacgatttcgaggcgctccaaggcccgcccgggagggccggggccgcgctcagaattttgatttggctgctgggctgctaccttgaaatccaagccctaaaaatgccagcttctttggacttagaagatgacctggataaatgataaaaattaagaaagagattttgaagttttcttattgtcctcttggcatatgcttctggaataatattcaccatggttttggatgaccttccaaacttagaagacatctatacttccttgtgttcatcaacaatggaagactcagagatggattttgactctggactagaagatgatgacacaaaaagtgatagtattttggaggattccacaatttttgtggccttcaaaggaaatatagatgataaagacttcaaatggaaattagatgcaatattgaaaaacgtgcccaatttgttacacatggattcggagacagcagcaaaagggaaaaataccgaagtgcgtcaattcgatcaatcggcgattaaaaatattgagtctgcaaaaggacgtgatgtgtgggacagctggccgctgcaaaacgctgacggaacagtagctgaatacacgggctatcacgttgtgtttgctcttgcgggaagccggaaagacgctgatgacacatcaatctacatgttttatcaaaaggtcggcgacaactcaatcgacagctggaaaaacgcgggccgtgtctttaaagacagcgataagttcgacgccaacgatccgatcctgaaagatcagacgcaagaatggtccggttctgcaacctttacatctgacggaaaaatccgtttattctacactgactattccggtaaacattacggcaaacaaagcctgacaacagcgcaggtaaatgtgtcaaaatctgatgacacactcaaaatcaacggagtggaagatcacaaaacgatttttgacggagacggaaaaacatatcagaacgttcagcagtttatcgatgaaggcaattatacatccggcgacaaccatacgctgagagaccctcactacgttgaagacaaaggccataaataccttgtattcgaagcccaacacggggaacagaaaacggattcccaaggcgaagaatctttatttaacaaagcgtactacggcggcggcacgaacttcttcc

SEQ ID NO: 17141 - DNA, 450 bp, Homo sapiens
  SIMILAR (91)..(201): 911254mologous to Homo sapiens dJ1181N3.2 (KIAA0181 protein),accession number AL109824,Smith-Waterman Score=180.
atgacctggatacatgataaaaatttagaaagagattctggttttcttattggccccttggcgtacgcttctggaataatattcaccagggttttggatgaccttccaaacttagacgacatctatatttccttgtgttcatcaacagtggaagactcagagatggattttgactctggactagaagatgatgacacaaaaagacagaaaaatgaagcccagaggaacaccagggcctgtgtggagtctgtggtattgatggcagttttaaagcatggccacagcttctttggcactcctattgaaaggcaaagcccatgtcccctgtccttgtatctggaactacacaatagtgacttgtctgccgtgtcgccttcagggaatggggaaaaggaaatgaccactcttattttgaggaaggttcagcatgagggcaaggtcattgaataa

SEQ ID NO: 17142 - DNA, 468 bp, Homo sapiens
  SIMILAR (64)..(198): 931254mologous to Homo sapiens Human cytoskeletal protein (HCYT) (clone 1274060),accession number Y77569,Smith-Waterman Score =212.
atgggtataacatcggcaggtatgcaaagcagagatgcagagtgcggggaacgaatcttcaccagaacggtggaggaggagctgacgcacctccagaagaaattaaaagggacagaggacgagctggataaatattccgaggacatgaaggacgcgcaggagaagctggagctcacggagaagaaggcctccgacgcggggagagccgcagggggaggaggaagaggaggaggagaaggcggcgcctcccagcgctttctccaaataagtcccgaaaaggggcactttccagcagctgtggccagcggtgccgacgtcaggccatcccccagcggtgctgacgtcggcgaattgtctgccttgcgctccacggctcatgcaccaggcttaatagaccatgaggtaattatccccgattgtgggaaattcgcctcatccaatgcaacaacgcggaggaagcatgagtaa

SEQ ID NO: 17143 - DNA, 3911 bp, Homo sapiens
  SIMILAR (1404)..(3908): 951254mologous to Mus musculus astrotactin,accession number U48797,Smith-Waterman Score=4316.
cccacgcgtccgggccggggctcaagatggctttagccgggctctgcgccctgctcgcctgctgctgggggccggcggcggtgctggccacggccgccggcgacgtggatccatccaaggagctggagtgcaagctcaaaagcatcacggtgtcggcactgcccttcctgcgcgagaacgacctgagcatcatgcacagcccctcggcctcggagcccaagctcctcttctcggtgcgcaacgacttcccgggagaaatggtcgtggtggacgacctggagaacacggagctgccctacttcgtgctggagatctcagggaacacagaggatatccctttggtgcgctggaggcagcagtggctggagaatggcactttgctttttcacattcatcaccaagatggtgccccaagccttcctggacaagaccccactgaagaaccccaacatgagtcggcagaagaggagctgaggatcctccacatctcagtcatgggtggcatgatcgctctgctgctgtccatcttgtgcctggtgatgatcctgtatactcgccggcgctggtgcaaacgccgccgggtcccgcagccccagaagagtgccagtgctgaggcagccaatgagattcactacattccttctgtgctgatcggcgggcacggacgggagagcctgcgcaatgcccgcgtgcagggccacaactccagtggcaccctgagcatccgggagacacctatcctggacggctatgagtatgacatcactgatctgcgccaccatctgcagagggagtgcatgaacggaggggaggactttgccagccaggtcacgcgcaccctcgactccctgcagggctgcaatgaaaagtcggggatggacctcacaccaggaagtgacaatgccaagctgtcactgatgaacaagtataaagataatattatagccactagccctgtggactccaaccaccagcaagccacccttctctctcacacctccagcagccagagaaagcggatcaacaacaaagcaagagctggttccgccttcttgaaccctgaaggggattctggcacagaggcagaaaacgacccccagctgaccttttacacggatccttcaaggagcaggaggcgtagtagagtgggttctccccgaagtcctgtgaataagaccaccttgaccctgatcagcatcaccagctgtgtgattggcctcgtgtgctcctctcacgtcaactgccctctcgttgtcaagatcaccctgcatgtccctgagcacctgattgctgatgggagccgcttcatcttgctggaggggagccagctggatgccagtgactggctgaaccctgcccaagtggttctcttctctcagcagaactccagcggaccctgggccatggacctctgtgcccggcggctcctggacccctgtgaacaccaatgtgaccccgaaactggggaatgcctctgctatgaaggctacatgaaggatccagtacataagcacctttgcattcggaacgaatgggggacaaaccaggggccatggccttacacaatatttcagcgaggctttgacctggttttgggagagcagccctctgataaaatatttagattcacctacactcttggggagggcatgtggttgcccctcagcaagagctttgtgattccaccagccgaactggccatcaatccatcagcaaagtgcaagacggacatgactgtgatggaggatgctgtggaggtcagagaggagctgatgacttcatcctccttcgacagcctggaggttctcttagattcctttgggccggtgcgcgactgcagcaaagataacgggggctgcagtaagaatttccgctgtatttcagatcgcaagctggactccactggttgcgtgtgcccatctggactcagtcccatgaaggacagctctggctgctatgaccgccacatcggggtggactgttccgacggcttcaacggcggctgtgagcagctgtgcctccagcagatggcgcccttcccggacgaccccaccttgtataacatcctcatgttctgtgggtgcatcgaggactacaagcttggtgtggatggacgctcttgccaactcatcacggagacctgtccagagggaagtgactgtggggaaagcagggagcttcccatgaaccagaccctctttggggagatgttctttggttacaacaaccattccaaggaagtggctgccggacaggtgctgaaaggaacattcaggcaaaacaactttgctcgtggtttagaccagcaactgccagatggtcttgtggtggccactgtgcccctggagaatcaatgcctagaggagatctcggagcccacccctgaccctgacttcctgactgggatggtgaacttcagtgaagtgtctgggtaccctgtgctgcagcactggaaggtccggtctgtgatgtaccacatcaaactcaaccaagtggccatctctcaggccctcagcaatgctctccactcgctggatggggctacatctcgtgcagattttgtggcgctgttggaccagttcggcaaccattacatccaggaagctatctacggctttgaggagtcctgttctatctggtacccaaacaagcaggtccagcggcgactctggctggagtatgaagacatcagtaaaggcaactccccatcagatgagtctgaggagcgggaaagagaccctaaggtgctgacattcccagaatacatcaccagcttgtcagactccggcaccaagcgcatggcggctggagtccgcatggagtgccagagcaagggacgatgcccctcgtcctgccccctgtgtcatgtgacatccagccctgacacccctgctgagccggttctgctggaggtgaccaaagcagcccccatctatgaactagtgaccaacaaccagacccagaggctcttgcaggaggctaccatgagctctctctggtgctcagggactggagatgtcatcgaggactggtgtcgatgtgactccactgcttttggagctgatggactccccacctgtgcgcctctcccacagcctgtgctgagactctccacggttcacgagcccagcagcactcttgtggtcctggagtgggaacactcagagccaccaatcggggtgcagattgtagattacctcctccgtcaagagaaagtcactgacaggatggaccactccaaagtggagacagaaacagtgctgagctttgtggacgacatcatctctggagcaaagtctccttgtgcaatgccatctcaggtgccggacaagcagctcaccaccatctctctgatcatacgatgcctggaacctgacaccatttacatgttcacgctgtggggagtggacaacacaggacggcgctccaggccaagcgacgtgatcgtgaagaccccatgccccgtggtggatgatgtcaaggctcaagaaatagcagacaagatctacaatctcttcaatggctacactagtgggaaggagcagcagaccgcctacaacaccctcctggatctgggttcccccaccttacaccgggtcctctaccactataaccagcactatgagagttttggggaattcacctggcgatgtgaggatgagttaggtcccaggaaagctggtctcatcctttcccagcttggggacctcagcagttggtgcaatggactccttcaggaacccaagataagcttgcggcgcagctcactcaagtacctggggtgccgctacagcgagatcaaaccctacggacttgactgggcggagctcagccgggacctcaggaagacgtgtgaggagcagaccctgagtatcccctacaacgactatggggacagcaaagagatctag

SEQ ID NO: 17144 - DNA, 1873 bp, Homo sapiens
  SIMILAR (428)..(613): 1001254mologous to Homo sapiens bA247D3.1 (KIAA0289),accession number AL136983,Smith-Waterman Score=337.
gcttaccctttttacacaaagggcaaaagtgacacctcagagtactaagtctctagatagtggcccttttgttccttttgaccgatcaaatgaagagaaaatggcttataaagaagagccaagagaaatgactggccctccagcttgggctccctggctgtttgtatgtgcaagaaggcagtgctcagggtcagcaaggtggttatatgagtcacacccttgtggacttagaatcatagaatgtcaaagttacaacaaaattttcaagttcatcgacacagatcctccttgttcagacgagaaaactcaaatcaaggcaactcattcaagacgaaactggctaattggtacaagtggcgaggaagaagatgaaaaacttggtcccatcctaattctcacctgtgcctttggtgttcatcttctagagatctcagggaacacagaggatatccctttggtgcgctggaggcagcagtggctggagaatggcactttgctttttcacattcatcaccaagatggtgccccaagccttcctggacaagaccccactgaagaaccccaacatgagtcggcagaagaggagctgaggatcctccacatctcagtcatgtttgttcattggaaggaaggagtaaagaaggaaaaaaagaaaggagaggaggctggaggaaggaaagatttccaagtagtggaacaggaaagtttcaaagaaaaggaagggctgcagagacaaattgaaatttatcctttccacaaacactcacaccctaacttagataactcagctcttcatcctccagtgcatatggttcaaaagcaagagagcatgagaccattaggagaagcactgttagccagaagaggaagagcgcagagagcagaagcaggaggaagaggaggagaaatgagaggatactacacgcagctcagactcctgctcacaagactagggcgacagtcccgtcctggcaacctggctgctcttgtcaccacccgcggttttcgcatctggccactccacactgcttctcacttcacagtggtcagcgctctgtccagacattacctaactcatcagacacacggccttcctgcaagagagcagaaaccagcagaaggagagctatcggtgagagaggaagccagggtgatgatggggaagcacgaggctctttttaacaatcagcttctgtgggaactaataagattcactccctggaggcagcaggaaaagagccacaagcaacgtgaccatgggcatccaaatgacagaggcatggaggaaacgacagccccagctacagcagaattcacagggactacagccccctcatttttaaaaacagaaagccaaggcccagcaacaggaagtggcttgccaaaaattgtgcagcaaagtgaaaagctgggggggacaatgtttctgctagaatcaggtttcagcagggcacctctagagagaagaaacagaactttaggtttaattccaagagcccctttggtctgttggacacagaaaaacgtaagagaaaaggtagtggcattttcattgactcctaggggaagaggagaagataaaagtaagagagagagaaagagaggaagagagagaggagaggaagggggggtggagaggaagacagagaggaagagggagagggagaggaagagagagagagagggagaggaagagagagagggagacaggaagagagagcgggagataggaagagggagaggaagagagagagggagaggaagagcaagagagggaggaagagagagaaagaagaaggaggaggaagagaagaagaaggaggaggaagagaagaagaaggaggaggaggaagaggagaaggaggatgaataa

SEQ ID NO: 17145 - DNA, 669 bp, Homo sapiens
  SIMILAR (160)..(666): 821254mologous to Homo sapiens Icln protein,accession number X91788,Smith-Waterman Score=701.
atgctggcttcaggtatgacccagcacagtcccagctgtgacagctacagagaaagttcccttctgcttgagaaaagcagagagaagaataaaggagactttgttctgcagcagagcgtttctgggactaccttgggccagagagacgcctgctatcctgaaaatttcctgctacctgagccagcagaggggcacctgcagcagcagccagacaccaaggctgtgctgaacaggaaggtcctccgcactggtaccctttatatcgctgagagccacctgtcttggttagatagctctggattaggattctcactggaataccccaccattagtttacttgcattatccagggaccaaagtgactgtctaggagaacatttgtatgctacggtgaatgacaaatttgaagaatccaaagaatctgttgctgatgaagaagaggaagacagtgatgatgttgaacttattactgaatttatatttgtacctagtgataaatcagcactgggggcaatgttcactgcaatgtgtgaatgccaggccttgcatccagatcctgaggatgaggatgaggatgactacgatggagaagaatatgatgtggaagcacatgaacgaggaaaaggggacatccctaaatcttacacctatgaaggattatcccattaa

SEQ ID NO: 17146 - DNA, 635 bp, Homo sapiens
  SIMILAR (91)..(633): 961254mologous to Homo sapiens Icln protein,accession number X91788,Smith-Waterman Score=909.
ttcccgggtcgacgatttcgtcgggcggtgtggtgcacgcattgctgtgctccaactccctcagggcctgtgttgccgcactctgctgctatgagcttcctcaaaagtttcccgccgcctgggccagcggaggggctcctgcggcagcagccagacactgaggctgtgctgaacgggaagggcctcggcactggtaccctttacatcgctgagagccgcctgtcttggttagatggctctggattaggattctcactggaataccccaccattagtttacatgcattatccagggaccgaagtgactgtctaggagagcatttgtatgttatggtgaatgccaaatttgaagaagaatcaaaagaacctgttgctgatgaagaagaggaagacagtgatgatgatgttgaacctattactgaatttagatttgtgcctagtgataaatcagcgttttaatttccttgttcagtggaggcaatgttcactgcaatgtgcgaatgccaggccttgcatccagatcctgaggatgaggattcagatgactacgatggagaagaatatgatgtggaagcacatgaacaaggacagggggacatccctacattttacacctatgaagaaggattatccca

SEQ ID NO: 17147 - DNA, 2799 bp, Homo sapiens
  SIMILAR (1)..(2796): 1001254mologous to Homo sapiens protocadherin gamma A7,accession number AF152327,Smith-Waterman Score=4793.
atggcggctcagccgaggggcggggactacagaggattcttcctgctctccatcctcctggggaccccctgggaagcctgggcaggacgtattctctactccgtgtcggaggagacggacaaagggtcctttgtgggagacatcgccaaggacctggggctggagccccgggagctggcggagcgcggagtccgcatcatctccagaggtaggacgcagcttttcgccctgaaccagcgcagcggcagcttggtcactgcgggcaggatagaccgggaagagatctgcgctcagagtgcgcggtgtctggtaaactttaacatcctgatggaagataaaatgaatctttaccctatagacgtggaaataatagatattaatgacaacgttccaagattcttgacggaagaaataaatgtaaaaataatggagaatacagctcctggggttcggtttccgttaagcgaggctggggatccagatgtgggcacgaactccctccagagttaccagctcagccccaatcgccacttctccctggctgtgcaaagtggagacgatgaaactaagtacccggaactggtgctggagcgggtgctggaccgggaggaagagcgggttcaccacctggtcctcacagcctctgatggcggcgacccgccccgatccagcaccgcccacatccaggtgacagtggtggatgtgaatgaccacacgcctgtcttctctctgcctcagtaccaagtaactgtccccgagaatgtgccagtgggtacaagactgctcacggtacatgctatcgacctggacgagggagtcaatggggaagtgacatattcttttcggaaaataactcctaaacttccaaagatgtttcatctgaactcgcttacaggagaaatatcaactttagaaggattagattatgaagaaactgccttctatgaaatggaggttcaggctcaagatggtcctggtagtctgacaaaggcaaaagtactgatcacagttttagatgtaaatgataatgctccagaagtgactatgacgtctttaagtagctcaatccctgaagacacacctcttgggacagtcattgctcttttctacctacaagacagagattctggaaagaatggtgaggtgacctgcaccattccagaaaacctaccttttaaattagaaaaatcaatagataattattatagattggtcacaaccaaaaacttggaccgggaaacactctctttgtataacatcacactgaaagccacagatggtggaactcctcccttgtccagggaaactcacatattcatgcaggtggcagacaccaacgataacccacccaccttcccccactcatcctactcagtctacatcgctgagaacaaccccagaggggcctccattttcttagtgactgcacaggaccacgacagtgaggataatgcccagatcacttattccttggccgaagacaccatccagggggctccagtgtcctcctatgtctccataaactctgacactggagtcctgtacgcgctgcaatcctttgattatgagcagttgagagaactacaactaagagtgactgcacatgacagcggggacccgcctctcagcagcaacatgtcactgagcctgttcgtgctggaccagaatgacaacccgcccgagatcctgtacccggccctccccacagatggttctactggcatggagctggcaccccgctccgcagagcccggctacctggtgaccaaggtggtggcggtggacaaagattcaggccagaacgcctggctgtcatacctcctgcttaaggccagcgagccaggactctttgcggttgggctgtacacgggcgaggtgcgcacggctcgggccctgctggacagagatgccctcaagcagagcctcgtggtggccgtccaggaccacggtcagcctcctctgtcagccaccgtcacactcaccgtggctgtggctgacagcatccccgaagtcttggccgacctgggcagccttgagccctccgacggtccttacaactatgacctcacgttgtacctggtggtggcggtggccacagtctcctgcgtcttcctagccttcgtcctcgtactgctggcgctcaggctgcggcgctggcacaagtcacgcctgctgcaggcttcagaaggtggcttggcgaacgtgcccacctcgcactttgtgggcatggacggggtgcaggctttcctgcagacctattcccatgaggtctccctcaccgcggactctcggaagagtcacctgatcttcccccagcccaactatgtagacatgctcatcagccaggagagctgtgagaaaaatgattctttgctaacatccgtagattttcaggaatgtaaagaaaacctgccaagtattcagcaagccccgcccaacacggactggcgtttctctcaggcccagagacccggcaccagcggctcccaaaatggcgatgacaccggcacctggcccaacaaccagtttgacacagagatgctgcaagccatgatcttggcgtccgccagtgaagctgctgatgggagctccaccctgggagggggtgccggcaccatgggattgagcgcccgctacggaccccagttcaccctgcagcacgtgcccgactaccgccagaatgtctacatcccaggcagcaatgccacactgaccaacgcagctggcaagcgggatggcaaggccccagcaggtggcaatggcaacaagaagaagtcgggcaagaaggagaagaagtaa

SEQ ID NO: 17148 - DNA, 2395 bp, Homo sapiens
  SIMILAR (1)..(1737): 961254mologous to Homo sapiens protocadherin beta 14,accession number AF152493,Smith-Waterman Score=2828.
atggagatcagaggggcactcgatctgcgaaaaaggcaagttctaatattccttgttttgctgggattgtctcgggcaggtactgaatctgcacactattctgtggcagaggaaacagaaattggctcttttgtggctaatctagcgagggacctagggctgggggtggaggagctgtcttcacgtgaagcccgggtagtgtctgatgataataaaaagtatttgcaccttgatttgctgactgggaatttgctcctaaatgagaaactagaccgagacgagctgtgtggctccaccgagccctgtgtgctgcattttcaggtggttttggaaaaccctttacagttttttcggtttgagctgtgtgtcaaagacataaatgatcactcccctacatttctagacaaggaaatacttattaaaatatcagaaggtaccactgttggagctacctttctaatggagagtgctcaagatttggatgtcggaagcaacagtctccaaaactacacaattagccccaattctcacttctacattaaaattcccgacagtagtgacagaaagatatacccagagctggtcctagatagagctttagattatgaacaggaagctgaactcagattaacactcacagcagtggatggtggatccccgcccaagtctgggacaactttggttctcatcaaggtgttggacatcaatgataatgcccctgagtttcctcagagtctctatgaggtgcaagtccccgaggacagaccccttggctcctggattgccaccatctcagctaaggatctggatgcaggaaactatggaaaaatatcttacacatttttccatgcatcagaagatattcgtaaaacatttgaaattaatccaatatctggggaagttaatttgagatcacccctggattttgaagtaatacagtcctacactataaatattcaggcaacagatggtgggggtctttcaggaaaatgcacccttctagttaaagttatggatataaacgacaacccaccagaagtgaccatatcgtcgattacaaagagaattccagagaatgcctcagagaccctagtagctctttttagtatcctagaccaagactctggagacaatgggaggatgatttgctctattcaagataacctcccttttttcctgaaaccgaccttcaagaactttttcactctagtttctgaaaaagcactggacagagagagccaagccgagtacaacatcacgatcaccgtcacagacttggggacacccaggctgaaaaccgagtacaacataaccgtgctgctctctgacgtcaatgacaacgcccccaccttcacccaaacctcctacaccctgttcgtccgcgagaacaacagccccgccctgcacatcggcagcgtcagcgccacagacagagactcaggcaccaacgcccaggtcaactactcgctgctgccgccccaggaccggcacctgcccctcgcctccttggtctccatcaacgcggacaatggccacctgtttgccctcaggtcgctggactacgaggccctacaggagttcgagtttcgcgtgggcgccacagaccgcgggtccccggcgttgagcagcgaggcgctggtgcgcgtgctggtgctggacgccaacgacaacttggcccttcgtgctgtacccgctgcagaacggctccgcgccctgcaccgagctggtgccccgggcggccgagccgggctacctggtgaccaaggtggtggcggtggacggcgactcgggccagaacgcctggctgtcgtaccagctgctcaaggccacggagcccgggctgttcggtgtgtgggcgcacaatggggaggtgcgcaccgccaggctgctgagcgagcgcgacgcggccaagcacaggctggtggtgcttgtcaaggacaatggcgagcctcctcgctcggccaccgccacgctgcacgtgctcctggtggacggcttctcccagccctacctgcctctcccggaggcggccccggcccaggcccaggccgacttgctcaccgtctacctggtggtggcgttggcctcggtgtcttcgctcttcctcctctcggtgctcctgttcgtggcggtgcggctgtgcaggaggagcagggcggcctcggtgggtcgctgctcggtgcccgagggtccttttccagggcatctggtggacgtgagcggcaccgggaccctgttccagagctaccagtacgaggtgtgtctgactggaggttcagagaccggcgagttcaagttcttgaagccgattaccccccacctcccgccccataggggtgggaaagaaatagaggaaaattctactctccccaatagctttggatttaattattga

SEQ ID NO: 17149 - DNA, 1285 bp, Homo sapiens
  SIMILAR (596)..(1180): 921254mologous to Homo sapiens protocadherin beta 14,accession number AF152493,Smith-Waterman Score=900.
tttcgttaaactcaagcctctatcctgctggattctgagctccccttcctaagacagaggggtccacccggatacacccgcattctgaagcacttcccgagatcggcgcctaagcaagagaagcaggacgactatggcggctcagccgaggggcggggactacagaggatccttcctgctctccatcctcctggggaccccctgggaagcctgggcaggacgtattctctactccgtgtcggaggagacggacaaagggtcctttgtgggagacatcgccaaggacctggggctggagccccgggagctggcggagcgcggagtccgcatcatctccagaggtaggacgcagcttttcgccctgaaccagcgcagcggcagcttggtcactgcgggcaggatagaccgggaagagatctgcgctcagagtgcgcggtgtctggtaaactttaacatcctgatggaagataaaatgaatctttaccctatagacgtggaaataatagatattaatgacacgttccagattcttgacggaagaaataaatgtaaaaataatgtgatgaataccccaggcctcctgggggttcgtttccagatatacccagagctggtcctagatagagctttagattatgaacaggaagctgaactcagattaacactcacagcagtggatggtggatccccgcccaagtctgggacaactttggttctcatcaaggtgttggacatcaatgataatgcccctgagtttcctcagagtctctatgaggtgcaagtccccgaggacagaccccttggctcctggattgccaccatctcagctaaggatctggatgcaggaaactatggaaaaatatcttacacatttttccatgcatcagaagatattcgtaaaacatttgaaattaatccaatatctggggaagttaatttgagatcacccctggattttgaagtaatacagtcctacactataaatattcaggcaacagatggtgggggtctttcaggaaaatgcacccttctagttaaagttatggatataaacgacaacccaccagaagtgaccatatcgtcgattacaaagagaattccagagaatgcctcagagaccctagaccggcacctgcccctcgcctccttggtctccatcaacgcggacaatggccacctgtttgccctcaggtcgctggactacgaggccctacaggagttcgagtttcgcgtgggcgccacagaccgcgggtccccggcgttgagcatactaacaaataactaa

SEQ ID NO: 17150 - DNA, 276 bp, Homo sapiens
  SIMILAR (202)..(56): 381254mologous to Drosophila melanogaster spliceosomal protein,accession number X97197,Smith-Waterman Score=70.
atgcagaagagcctgggaggtatctatgaagatggagggaagccacctgtcccttgcctgcgtgtctccaaagccctggaccccaagagcactgggcgcaagtacttcctgccccaggtagtggtgactgtgaacccccagtccagcagcacacagtgggaggtggccccggagaagggagaggaactggagctgtcagtggagagtccctgtgagctgcgggaacctgagccctcgcccttctcctctaagaggaccatgtatgagacagaggag

SEQ ID NO: 17151 - DNA, 607 bp, Homo sapiens
  SIMILAR (65)..(310): 1001254mologous to Homo sapiens myotonic dystrophy protein kinase like protein,accession number Y12337,Smith-Waterman Score= 434.
ctggcaagggggcatcctgggctctgatcccaccccaccccttacttccccaaacctgctgcagacagcctgtttccgggaggagcgggatgtgctcgtgaaaggggacagccgttgggtgaccactctgcactatgccttccaagacgaggagtacctgtaccttgtgatggactactatgctggtggggacctcctgacgctgctgagccgcttcgaggaccgtctcccgcccgagctggcccagttctacctggctgagatggtgctggccatccactcgctgcaccagctgggttatgtccacaggtggagccccaaccccgctgccctgcccaaccccgctgccctgcccaacccctgccagctgtgctggggacagctgatgtcagctgagcactcatcatgtgccaggcacttctctgggtgcctcatccgtgtgcttccttggaatcataccaaagagccctctgtggcaggggctgctgctgtgtccggcctgcagctgaggggggatgtcaagccagacaacgtcctgctggatgtgaacgggcacattcgcctggctgacttcggctcctgcctgcgtctcaacaccaacggcatg

SEQ ID NO: 17152 - DNA, 4055 bp, Homo sapiens
  SIMILAR (3441)..(3980): 1001254mologous to Homo sapiens myotonic dystrophy protein kinase like protein,accession number Y12337,Smith-Waterman Score= 969.
  misc_feature (1)...(4055): n = a,t,c or g
tcacagtcctgagagcagctctgaggcttgggctgccctggagcggaagctccagtgtctggagcaggagaaggtggagctgagcaggaagcaccaagaggccctgcacgcccccacagaccatcgggagctggagcagctacggaaggaagtgcagactctgcgggacaggctgccagagatgctgagggacaaggcctcattgtcccagacggatgggcccccagctggtagcccaggtcaggacagtgacctacggcaggagcttgaccgacttcaccgggagctggccgagggtcgggcagggctgcaggctcaggagcaggagctctgcagggcccaggggcagcaggaggagctgcttcagaggctacaggaggcccaggagagagaggcggccacagctagccagacccgggccctgagctcccagctggaggaagcccgggctgcccagagggagctggaggcccaggtgtcctccctgagccggcaggtgacgcagctgcagggacagtgggagcaacgccttgaggagtcgtcccaggccaagaccatccacacggcctctgagaccaacgggatgggaccccctgagggtgggcctcaggaggcccaactgaggaaggaggtggccgccctgcgagagcagctggagcaggccccacagccacaggcggagtggtaaggaggaggctctgtgccagctgcaggaggaaaaccggaggctgagccgggagcaggagcggctagaagcagagctggcccaggagcaggagagcaagcagcggctggagggtgagcggcgggagacggagagcaactgggaggcccagctcgccgacatcctcagctggtgggaccaccagtggaaggcgcggcgactgcagaagatggaggcctcggccaggctggagctgcagtcagcgctggaggccgagatccgcgccaagcagggcctgcaggagcggctgacacaggtgcaggaggcccagctgcaggctgagcgccgtctgcaggaggccgagaagcagagccaggccctgcaacaggagctcgccatgctgcgggaggagctgcgggcccgagggccagtggacaccaagccctcaaactccctgattcccttcctgtccttccggagctcagagaaggattctgccaaggaccctggcatctcaggagaggccacaaggcatggaggagagccagatctgaggccggagggccgacgcagcctgcgcatgggggctgtgttccccagagcacccactgccaacacagcctctacagaaggtcttcctgctaagggatggggcatggggccctgggaggccttgggtaatggctgtccccctccccagcccggctcacacacgctgcgcccccggagcttcccatccccgaccaagtgtctccgctgcacctcgctgatgctgggcctgggccgccagggcctgggttgtgatggtcctagatctgaggtgacaacctcccagctggcagtgccgcccaccacgtgcactgtgctgctgctggcagagagcgagggggagcgggaacgctggctgcaggtgctgggtgagctgcagcggctgctgctggacgcgcggccaagaccccggcccgtgtacacactcaaggaggcttacgacaacgggctgccgctgctgcctcacacgctctgcgctgccatcctcgaccaggatcgacttgcgcttggcaccgaggaggggctctttgtcatccatctgcgcagcaacgacatcttccaggtgggggagtgccggcgcgtgcagcagctgaccttgagccccagtgcaggcctgctggtcgtgctgtgtggccgcggccccagctctgtgaacgaggtgctggagtcaatggagtcaccgctggagctggtggaaggcttcgtgggctccatcgaggtggccgtgccctgggctgctctgctcaccgaccactgcacagtgcgcgtgtccggcctccagctcaccttgcagccccgccggggtccagcgccaggggctgccgactcacagagctgggcctcatgcatgaccacaagcctgcagctggcccaggagtgtctgcgggatgggctaccggagccctctgagccaccacagcccctggaggggctggagatgtttgcccagaccattgagactgtgcttcggaggatcaaagtgaccttcctggacactgtcgtgagggtggagcactctccgggtgatggggaacgtggtgtggccgtcgaggtccgtgtgcagagactggagtactgtgatgaggcagtgcgggacccaagccaggcgccgccggtggacgtgcatcagccgcctgccttcctgcacaagctgctgcagctggcaggggtccgcctgcactacgaggagctcccggcacaggaagagcctccagagccccccttgcagatcggcagctgctcagggtacatggagctgatgttggaggtggcgggacagctgggctccctgcacctgctcctgaccccgaggcagctccagcaacttcaggaactgctcagcgccgtgagccttacagaccacgagggcctggctgacaagctgaacaagagccgcccgctaggtgccgaagacctgtggctgattgagcaggacctgaaccagcagctgcaggcaggggcagtggctgagcccctcagcccagacccccttaccaacccccttctcaacctggataacactgacctcttcttctccatggctggcctcacaagcagtgtggcctcagccctctctgagctctccctctccgatgtagacctggcctcctctgtgcgcagcgacatggcctcccgccggctctctgcccaggcccacccagctggaagagaagggctaacgggcacagccgtgcagctgtcctgggagctgcggacgggcagtcggggccggcnnacaaccagcatggaagtgcacttcgggcagctggaggtgctggagtgtctgtggccccggggcacctctgagcctgagtacacggagagccgaccccggcgctcagttgcctgccattgccactcagaactggccctggacctggccaacttccaggcggacgtggagctgggggccctggaccggctggccgccctactgcgcctggccaccgtacctgctgagcctccagccggcctgctgcactgcctgtccccggcctcctcaccgacaagtagggtggaccctttgtctctggctttctctgcccaccaaggtatctatgaagatggagggaagccacctgtcccttgcctgcgtgtctccaaagccctggaccccaagagcactgggcgcaagtacttcctgccccaacccaattccttcccaaaacctggggctaatccaggcctggaaagtgcctgggagtggctggagttgcccttcctggagacagcctgtttccgggaggagcgggatgtgctcgtgaaaggggacagccgttgggtgaccactctgcactatgccttccaagacgaggagtacctgtaccttgtgatggactactatgctggtggggacctcctgacgctgctgagccgcttcgaggaccgtctcccgcccgagctggcccagttctacctggctgagatggtgctggccatccactcgctgcaccagctgggttatgtccacagggatgtcaagccagacaacgtcctgctggatgtgaacgggcacattcgcctggctgacttcggctcctgcctgcgtctcaacaccaacggcatggtggattcatcagtggcagtagggacgccggactatatctcccctgagatcctgcaggccatggaggagggcaagggccactacggcccacagtgtgactggtggtcgcttggagtctgcgcctatgagctgctctttggggagacgcccttctatgctgagtccttggtggaaacctacggcaagatcatgaaccacgaggtctggacaccaggctctgggcttccagagggggcagtgggacccctgagtctgtgtggttggaagtaccggcag

SEQ ID NO: 17153 - DNA, 1784 bp, Homo sapiens
  SIMILAR (861)..(1742): 991254mologous to Homo sapiens ELG protein,accession number AJ277841,Smith-Waterman Score=1519.
cctctcctcctacaccggcctacccatctgggcccaagagctgcactcacactcctacaacgaaggacaaactgtccaggtcggagggatcacgagacacagaacctggaggggtgtgcacgctggcaggtggcctctgcggcaattgcctcaccctgaggacatcagcagtcagcctgctcagagcgggggtgctggagcgcgtgcagacacagctcttccggagcagccttcaccttctctctgggatcagtgtccggctggccgacgtggcatttgctgaccgaatgctcatagaggttgacccccacagggtcacgcaggactcggacactgccctggaaacatggatggacaagggcttttggccacaggtgtgggtgtcctgttggaggagggcttgtttggagaagggaggctggctgggggagaaacccggatcccgctgcatctccgcgcctgtgggtgcatgtcgcgtgctcatctgttgcacacagctcactcgtatgtcctgcactggtaatgtagtttggctggatgaaatgacagccacacgagcacttatcaatatgagctccctgcctgcacaggataagatcagaagcagggatgccagtgaggacaagtcagctgagaaaaggaaaaaagacaagcaggaagacagttcagatgatgatgaagctgaagaaggagaggttgaagatgagaactcaagtgatgtagaggtagaagaggagtctttgttaagaaacgatcttcgtccagctaacaaacttgctaaaggaaataggttattcatgagatttgctacaaaagatgacaaaaaggaacttggagcagccagaagaagtcagtattacatgaaatatgggaatccaaattatggaggcatgaaaggaattcttagcaattcatggaagcgaagatatcattcccgtcgtattcagcgggacgtgatcaagaagagagccctgattggggatgacgttggcttgacgtcgtataaacatcgacattctgggctagtgaatgttcccgaggaacccattgaagaggaggaagaggaggaggaggaggaagaggaagaggaagaagaagaccaggacatggatgcagatgacagagtggtggtagagtaccacgaggagctcccggctctcaagcagccccgggagcggagcgcgtctagacgatccagtgccagcagctcagactcagatgaaatggactatgatctagaactgaaaatgatttccacgccttcaccaaagaaaagcatgaaaatgactatgtatgctgacgaagtggaatctcagttgaaaaatattaggaactccatgagggcagatagtgtatcttcaagcaatatcaaaaaccgaattggtaacaaattaccacctgagaaatttgcagatgtccgacatctattagatgagaaacgtcagcactcccgtccacggccaccagtcagcagtactaaatcagatatacgccagcggttaggaaaaagaccacattctccggaaaaggcttttagtagtaaccccgtcgttcggagagagccctcttctgatgtgcatagtaggctaggtgttcccaggcaggatagtaaaggcctctacgccgatactcgggagaagaaatcaggtaatttatggactcgcctaggatctgcacccaagaccaaagaaaagaatacgaagaaagtggatcacagggcgcctggcgctgaggaagacgaactgtatgcggccgctgtagaggatccaagaatcggtactggg

SEQ ID NO: 17154 - DNA, 1275 bp, Homo sapiens
  SIMILAR (673)..(1104): 991254mologous to Homo sapiens ELG protein,accession number AJ277841,Smith-Waterman Score=741.
atggtcagatatgtacccaactgtgacagcgagggagaaagcaatgaattctttaaatggtacagatcctatcgtgtggacatttggaggaggacagcaattgaggaggccttcatgaaggagagagacacctgtaagctgaccctcgaagccatgaagaacagaggagagatccacctgggcaaagacagaaaagctctccaagtcttcactcgacccaggaagtccagctggcttgatctctcaccagcactttgggaggcccaggaagcaattgaaaagaaagagcagcgagccaagcgcttccattttcgatcggaagtaaatcttgcccaaagaaatgtagccttggaccgagacatgatgaagaaagcaatccccaaggtgagactggagacaatctatatttgcggagtagatgagatgagcacccaagatgtcttttcctattttaaagaatatcctccagctcacatcgaatggttggatgatacctcctgtaatgtagtttggctggatgaaatgacagccacacgagcacttatcaatatgagctccctgcctgcacaggataagatcagaagcagggatgccagtgaggacaagtcagctgagaaaaggaaaaaagatgacaaaaaggaacttggagcagccagaagaagtcagtattacatgaaatatgggaatccaaattatggaggcatgaaaggaattcttagcaattcatggaagcgaagatatcattcccgtcgtattcagcgggacgtgatcaagaagagagccctgattggggatgacgttggcttgacgtcgtataaacatcgacattctgggctagtgaatgttcccgaggaacccattgaagaggaggaagaggaggaggaggaggaagaggaagaggaagaagaagaccaggacatggatgcagatgacagagtggtggtagagtaccacgaggagctcccggctctcaagcagccccgggagcggagcgcgtctagacgatccagtgccagcagctcagactcagatgaaatggactatgatctagaactgaaaatgatttccacgccttcaccaaagaaaagcatgaaaatgactatcaatatcaaaaaccgaattggtaacaaattaccacctgagaaatttgcagatgtccgacatctattagatgagaaacgtcagcactcccgtccacggccaccagtcagcagtactaaatcagttatcgtcagcatcagcatcagcatcatcccaacagttaggaacgcttag

SEQ ID NO: 17155 - DNA, 576 bp, Homo sapiens
  SIMILAR (135)..(461): 961254mologous to Rattus norvegicus F-box protein FBL2,accession number AF182443,Smith-Waterman Score=544.
ttcccgtcccacggtcccggcgtcacccctccggcgcccagtccccgtcccggaactcccgggcctgtcctgggcccccggtctgtgcactccgctcgccgcagcgcccggcccgggcgtcacccgccggccccatgaggagggacgtgaacggagtgcccaagagcaggtttgagatgttctcaaatagtgatgaagctgtaatcaataaaaaacttcccaaagaactcctgttacggatattttcttttctagatgttgttaccctgtgccgctgtgctcaggtctccagggcctggaatgttctggctctggatggcagtaactggcagcgaattgacctatttgatttccagagggatattgagggcacagtagtggagaatatttcaaaacgatgtgggggctttttacgaaagttaagttctcgtggatgtcttggaattggagacaatgcattaagcctgggcaacaagcgaaaaactctcaaaaaaaagaaaagaaaagaaatagacccagaagtgactgaaatagaactgaacaataaggagtttaaaaatagcagttacaagccag

SEQ ID NO: 17156 - DNA, 1020 bp, Homo sapiens
  SIMILAR (1)..(924): 961254mologous to Homo sapiens MHC class I chain-related protein A,accession number X92841,Smith-Waterman Score=1582.
atggggctgggcccggtcttcctgcttctggctggcatcttcccttttgcacctccgggagctgctgctgagccccacagtcttcgttataacctcacggtgctgtcctgggatggatctgtgcagtcagggtttcttgctgaggtacatctggatggtcagcccttcctgcgctatgacaggcagaaatgcagggcaaagccccagggacagtgggcagaagatgtcctgggaaataagacatgggacagagagaccagggacttgacagggaacggaaaggacctcaggatgaccctggctcatatcaaggaccagaaagaaggcttgcattccctccaggagattagggtctgtgagatccatgaagacaacagcaccaggagctcccagcatttctactacgatggggagctcttcctctcccaaaacctggagactgaggaatggacagtgccccagtcctccagagctcagaccttggccatgaacgtcaggaatttcttgaaggaagatgccatgaagaccaagacacactatcacgctatgcatgcagactgcctgcaggaactacggcgatatctagaatccggcgtagtcctgaggagaacagtgccccccatggtgaatgtcacccgcagcgaggcctcagagggcaacatcaccgtgacatgcagggcttccagcttctatccccggaatatcatactgacctggcgtcaggatggggtatctttgagccacgacacccagcagtggggggatgtcctgcctgatgggaatggaacctaccagacctgggtggccaccaggatttgccgaggagaggagcagaggttcacctgctacatggaacacagcgggaatcacagcactcaccctgtgccctctgagctcgtgagcctgcaggtcctggatcaacacccagttgggacgagtgaccacagggatgccacacagctcggatttcagcctctgatgtcagctcttgggtccactggctccactgagggcacctag

SEQ ID NO: 17157 - DNA, 1110 bp, Homo sapiens
  SIMILAR (130)..(846): 971254mologous to Homo sapiens MHC class I chain-related protein A,accession number X92841,Smith-Waterman Score=1228.
atggggctgggcccggtcttcctgcttctggctggcatcttcccttttgcacctccgggagctgctgctggtgagtggcgttcctggcggtcctcggcggagcgggagcagcgggacgtttccgggggtcgggagattagggtctgtgagatccatgaagacaacagcaccaggagctcccagcatttctactacgatggggagctcttcctctcccaaaacgtggagactgaggaatggacagtgccccagtcctccagagctcagaccttggccatgaacgtcaggaatttcttgaaggaagatgccatgaagaccaagacacactatcacgctatgcatgcagactgcctgcaggaactacggcgatatctagaatccagcgtagtcctgaggagaagagtgccccccatggtgaatgtcacccgcagcgaggcctcagagggcaacatcaccgtgacatgcagggcttccagcttctatccccggaatatcacactgacctggcgtcaggatggggtatctttgagccacgacacccagcagtggggggatgtcctgcctgatgggaatggaacctaccagacctgggtggccaccaggatttgccaaggagaggagcagaggttcacctgctacatggaacacagcgggaatcacagcactcaccctgtgccctctgggaaagtgctggtgcttcagagtcattggcagacattccatgtttctgctgttgctgctgctgctgctgctatttttgttattattattttctatgtccgttgttgtaagaagaaaacatcagctgcagagggtccaggtgagaaaagcgggcagtttctggagatgctcctgatgactgacagattcacagcagaacagaaaggactgggaagggatggaggtgggacatctggcactgaccttcaggggctgaccctgtgggggaacatctgccctgaagagttggagccttcatgtgatgacacagagctgaagtgtgatattcgggaggggatagagagtgcttggaggttttctgattttgaagaatcccagtcagtcaggttctggcgtaaagtgactgctggggaggtgtggactgaatga

SEQ ID NO: 17158 - DNA, 1378 bp, Homo sapiens
  SIMILAR (277)..(420): 661254mologous to Homo sapiens MHC class I-related protein,accession number L14848,Smith-Waterman Score=130.
ctactcgaagctggtccctgctttaggctgcgctcccgcgtgctccccattttctgggccccaggtcccgccttctaaatctccccaggtctccagcccactggaattttctcttccaagcgtggccccgccctctccgctcgtgattggccctaagttccgggccccagtttcattggatgagcggtcgggggaccgggccaggtgactaagtttccgcggcgccttctccccggccactgcttgagccgctgagagggtggcgacgtcggggccatggggctgggcccggtctttctgcttctggctggcatcttcccttttgcacctccgggagctgctgctggtgagtggcgttcctggcggtcctcggcggagcgggagcagtgggacgtttccgggggtcgggtgggtagcggcgagcgctgtgcggtcagggcggggctcctgtgccctgtcggtggcgcagggagctggacgcggcccgttaccgccacacttcagccctgcttccccgtcacttttcagtcctcctcgggatcgcgcatcacctgcactttctggtctcctcctgctctttctctcctcgcgtctcctccgcttcctctcacttttcggacaaaccagtccttctgaggcccatgggttcccgggctgcctccggggctgctcctgtgaatggcattcgagtgcccttccaacgcgggcattgaagcagccacaacccccggtgctccggggcggtctcagtccctggagttctgtcctctcccggaccgtctccactacacctgttgggatctctctagcatgaaatgctccagaggcagtcatgccataagcttggatcctccagccattgggtgtgagggtcttagcccggtctaaatgagcactgaattctagagagaccaagggaccgtctaagttctgaattctgagtcctgaatcctggaagttggcttctggccagggagcaggtgttactgcctctgatccacaaaagcagccccacagctcaagttgctcttctggatttctcccctctcctggttcctggccaggcaaatcttcactgctttgttagcccatccatttgctcaaccagatttttcaaatatgtatgttttcctccttttcccattgtactcagtggaaggaatggtctaaattacctaatcagcaattcctggaaaccaagccaccatgtacatacaatcttatacgttaatgtcacatacaagaaagaaaatgcagaggtaccagtagtggctacctaagcagtgtaatgtagaggtaataaaaacgaattgttggatagtatctatctatgccatgagtaaaatacatatcaataaattacaacttctaagaaaat

SEQ ID NO: 17159 - DNA, 1411 bp, Homo sapiens
  SIMILAR (347)..(1234): 951254mologous to Homo sapiens MHC class I chain-related protein A,accession number X92841,Smith-Waterman Score=1487.
ttcctgggtcgacccacgcgtccgcttctccccggccactgcttgagccgctgagaggttgtctacgtcggggccatggggctgggcccggtcttcctgcttctggctggcatcttcccttttgcacctccgggagctgctgctgagccccacagtcttcgttataacctcacggtgctgtcctgggatggatctgtgcagtcagggtttcttgctgaggtacatctggatggtcagcccttcctgcgctatgacaggcagaaatgcagggcaaagccccagggacagtgggcagaagatgtcctgggaaataagacatgggacacagagaccagggacttgacagggaacggaaaggacctcagggatgaccctggctcatatcaaggaccagaaagaaggcttgcatttccctccaggaagatttagggtctgtgagatccatgaagacaacagcaccaggagctcccagcatttctactacgatggggagctcttcctctcccaaaacgtggagactgaggaatggacagtgccccagtcctccagagctcagaccttggccatgaacgtcaggaatttcttgaaggaagatgccatgaagaccaagacacactatcacgctatgcatgcagactgcctgcaggaactacggcgatatctagaatccagcgtagtcctgaggagaagagtgccccccatggtgaatgtcacccgcagcgaggcctcagagggcaacatcaccgtgacatgcagggcttccagcttctatccccggaatatcacactgacctggcgtcaggatggggtatctttgagccacgacacccagcagtggggggatgtcctgcctgatgggaatggaacctaccagacctgggtggccaccaggatttgccaaggagaggagcagaggttcacctgctacatggaacacagcgggaatcacagcactcaccctgtgccctctgggaaagtgctggtgcttcagagtcattggcagacattccatgtttctgctgttgctgctgctgctgctgctatttttgttattattattttctatgtccgttgttgtaagaagaaaacatcagctgcagagggtccagagctcgtgagcctgcaggtcctggatcaacacccagttgggacgagtgaccacagggatgccacacagctcggatttcagcctctgatgtcagctcttgggtccactggctccactgagggcgcctagactctacagccaggcggctggaattgaattccctgcctggatctcacaagcactttccctcttggtgcctcagtttcctgacctatgaaacagagaaaataaaagcacttatttattgttgttggaggctgcaaaatgttagtagatatgaggcatttgcagctgtgccatatt

SEQ ID NO: 17160 - DNA, 2335 bp, Homo sapiens; identical to SEQ ID NO: 12800
  SIMILAR (2123)..(2236): 581254mologous to Homo sapiens Human secreted protein encoded by gene 75,accession number Y76198,Smith-Waterman Score=115.

SEQ ID NO: 17161 - DNA, 1448 bp, Homo sapiens
  SIMILAR (870)..(100): 731254mologous to Homo sapiens p40,accession number U93566,Smith-Waterman Score=901.
ctagctggttgttttgcccattagttgatgcagtttcttcatagtttcgatgttctttataatttggtatgtttttgccatggttggtaccagttgtttcttttcatgtttagtgttttccctcaggagctcttgtaaggcaggcctggtggtgacaaagtctctcagcatttgcttgtctgtaaaggattttgtttctcctttgcttatgaagcttagtttggctggatatgaaattctgggttgaaaattcttttctttaagaatgttgaatattaacccccactgtcttctggcttgtagggtttctgcagagagatctgctgttagtctgatgggattccctttgtgcatatcccgacctttctctttggctgcccttaacattttttccttcatttcaaccttggtgaatctgatgattatttctcttggggttgctcttctcgaggagtatctttgtggtattctctgtatttcctgaattggaatgttggcctgtcttgctaggttggggaagttttcctggataatacgctgaagagtgttttccaacttggttccattctccccgtcactttcaggtacaccaatcaaatgtagatttggtcttttcacatagtcccatatttcttggcggctgtgttcgttcctttttattcttttttctctaatcttgtcttctctctttatttcattaaattgatcttcaatcactgatatcctttcttccacttgatcgatttgccttttttcacagttcttagcttccttgcattgggttacaacatgctcttttagcttggaggagtttattattacccaccttctgaagcctacttctgtcagttcgtcaaactcattctccatcaagttgcatttccttgctggcaaggagttgtgatccttaagtttatatgagtccttatgtgttaggtaagtttctcgaaggcagcagatagttggttggtgaattcttatccattctgcaattctgtattttttaagtggagcatttaggcagagctggttttctggttccttctcatttgggtaggctctgtcagagggaaggtcttgggctgaaggctgttgttcagattcttttgtcccacatggtgtttccttgatgtagtactctcccccttttcctatggatgtggcttcctcaaaatcctcaaacatttgacttctctcaggctcttctttttcagatctgtcatcagtcaagggtttgagggctttggggaggtatacaacttggtcttcacagtattcaatttgagcattggaatactgatgatagggcctagtagacacagctgtcatcagggccccaggaatccctgacacatccttcgtcagtgggtggagctttccctcaggatcttcaataactccagccagaggctcagggacaaaattcagatctccctgggcctgagccc

SEQ ID NO: 17162 - DNA, 5121 bp, Homo sapiens
  SIMILAR (4686)..(2578): 981254mologous to Homo sapiens beige protein homolog,accession number U67615,Smith-Waterman Score=3609.
tcagtaagtctggggcatggcctgagattctgcatttctctcaagctcccaggtaatgctgatgctgctggttggaggaggagcctgggcttggaacacccttgctgtccatcccagctcagctgtcagttgtttctgttgcatgagcagaaaaacattcttttctttctgcctaataattttcaaaaaactctcaaatacatgggcaagcacatcaagtttggctttactagcagaaagcaaatttaattccagcatacaaatctcaggataaattatttccccttgagtgaggttttcgagtaagtcatttggactgcttgatgcactgaaaccttctgtttcagactttaagtctaccccttttcttcgaattttaggaactctgtactccaattctctatattccggctttgttccatattcctcttcctgcttattagtctgccagctccaggaccaccctgttagcagtttggtgtctacttgtgggttccagccaccaatcacagcatcgtccttcactgatggctgcttcccacatctctgcctaaatctatgtcccactccgaggcactcagcactgatgctgatcattcctaaatgcagattttggtgaaatgggggcaacaggaatgttcttcctttctcttgagggggagaacagcaatcttgggttcgtgtgggaggagaagctccacagaagaggtgttgctgggtctgagccttgaaggtaggtgagaagccctcatctgagtgggaaggaccttgtgtcatgcagagctcatcatcctgggtttcgccatcttcaggattgctttcactatctgcttcgtaaccttcttcttcaactaaaagtttaaaactacaacactgagaatcctcagcttcttctgaaaaatcaccaggctgggatgacaattcttctgcagattgatgactcttctcagtcatagcatcattatgttcaaaatctgctgaataattcccgagggcaactcgaagcagggcatcaaataaaggctttgctagttgtgtttcaatcacctttgactgggaaagatggtccctcatttcaaataatatactttccacagacaagttctgattaggtaactccaattccatcttctgttgactagttctggcaccatgaagacaaatggccagaagggcttccaaaagtcgtatactttgaagtgaggtctcactttcttgacttgtaaatagctttgcttcctcgggagcggcttcagtagctgaaacttcttccacatttatggaagaaatatgctgtaactctaatttacctaaactgtcagcactcttttttagactacctagttctgatggtatggggtcactttttatagccaaagataataaatcttccttcatagttctcttaggttgagaaattctgtttaaatcctggttttcatttacacttgtatctccctccttttttccttgctcctctttgtgacttctgaacagtttctgtattatcataaatattaacttatggcatactcggaaaccaccaagcctataaaactgtttctggaacactgaactcaacatgtagatccaacgacacatagaccaaatgtctgctgcttggtgcatatgttcaggagaaggcaagacaaggctctcgagagatatacatggcagcatatgacttaaaggctcgctggctgtgctgtcatagccagaagtatcttctgagtcattggccgactccctgtcagactctgcttctttacttacgcataaaaaagccacacagaggaataggtttattgtgttgatatgaacatcttggttaacagtcttccgtctctttggataagcttctttgaggccagcataaaattggctgagactatgtccagaggacaactccttctgttcaatgtctatcccatcaatatctggaactgaggcatctttctgttgctcccctaggctgattatcagagtttcaaatgcttttagagaatgacttcgaataccatttaagcaatttaattcgattatttgacttactccattacaactcaaaaacaaatctcttattaccctccgaatgtagcattcactgcgctgagagcttttccccaggaagttgggctttgctctcacctggtcacctttcaggaatcccaaaaatacagggtctgttttcccctgttgggatggagtctcggccggctgagaggctgcctgcaagcctggctcagaagcagaagagtctcccagcacagagtttagaggagtctcaacagaggcaggggcagctgcagagggagaagggagaacactaggcttggatgagggagttgaggcaataggggtgcttggaggaggagaagcttgagatccacagtgtgagagtgatgcgagggaaggcagtggaggcggcggcggaggagctgctggccctgaggtaggcggtggagacactggatatgttacagagtcaaccagcccattgggtgctagagtgcttacaatagtgcctgatgtgtagtaattaatcactgtaggtgttagccagattatcatcatcatcatcatgctggatttaagcaggataggcagagtttttacataaatctgaagcacgtcctgaggcaagcactggttatgatggctacatacatgactttgagctgaagtaacgcttaggtgttgacaatgatgtgctaattcaactcctctttggagcacaggattaaatatgtaattatataatttccactgaacaactatattgcctttctggattaaattgcaaatgtgatttgcaatctgtatactatgtaatctgtcttcttcaaaaacaaagttctgataagcctttaaagcatcccatttccacaacaaatcttcagatccactgctgggcaggatcccttgaaatctgtaagaaggactggataaacttgaggagagttcagcatcacataagtttccctgcagtgtctcttctaattgggctagttggtcagagtcaacagtacaaatattacaagctgcttttttaatttttggtgatatctctgctcctcctaactgatccaaaataagtttgttaaggatattcaatatatgctgctgaaaatttttcagtgctggcaatttaaaagcatggagcaaaggaatgattacagatttgggatccatacaacagcatattccaatgttatgaacacccgataggatctggacacaagtgctgctcaaggaagcctgctgtagtaagcgcaagcactgatgggcacacactgcaatgcaacagcaccgctcaggataataaacatctccatctgcagtctcttcaaatgggtttttggaaacctggtttttaaaagccgaaaccagaagacctgagagatctcggtgatgatgcataaaatgagaatattcacatcgtctgtgcctttttcttgtacacatcgaatgatgaagttgctctgatttcacttttttgacagtgctcattattttcatcacactatttattagggctttcaaatgctctgaggcctcgggaggaactccatctcttaaaaccagccattccatttgaagaactgctgtttcaaataaattaaatccatgatgctgaatgaattcttgaaccaaatccatggcttgactgaagtagaagggatttgaagctgcactttgaagacaacagatcagaatctgaagaactccttccaaaagctcaggtaaaagaagggctctatgacgatactttgaaaacacaaaatcttcctgaacctcctgcagtgttttcttttgtcttggtgcaaaagggtcaggctgcttttctaggcatattctaatttttaaagctgctctaagcaattcagttaaatttttcctaagattttctggcatcatctctgcagtactaacatctactgacagaagatgcaacactgttcgaaagagcatcctttgaatcaaagccaccggttcttcggtccaacctgcagaaactactcgactctccaagttgtcgctcagactgcagcagtccccaaagcctgctaggaattcagttagtgtgggcactacactggctgctaaaggagaattatgattcaaggtaacgtcaaacttacaaactttttctaataaagataacaaaacatgacataagtcaaatggagaattgttcatgttactgataacagacaaggcagctggctcacttaaaatgtcagtgtttgacccctgtcttggaataatctctctggaattttccaaagccatagcatctggaggagtctgttctttggttgctaagcggtcaagtttagctttggggtggtcttgtttaggaaacgatgttaaaaaatgatgcagcagatggggccttctatgcttattcattgctatgcctttttcatctgaattggcttctgaatctgaggtggagagctgtgtctttcttgcatctcttacagaatagcgatgggtaattttacgctgtcgtctgctttttcgaaaaacatttacttttgcagaaacctgactagacagggcacttccttctaaatgtaatttttcctgagtggatctttgtgaacttgagttcttttctttggtcaggattatatctgctgagagcggtaggttaaaatctttctctggtccctccctgattagcttaatatctaacctcctgaattctttgtcaggtaaatcagggatttcttcttggtttggatctattgctggtgaacagggttggttttctggttccttctcatttgggtaggctctgtcagagggaaggtctagggctgaagactgttgttcagattcttttgtcccacggggtgttcccttgatgtagtatactcctccttttcctatggatgtggcttcagattgcaaatggctgttgttgtcgtcgtcgtcgtcttcgtcgtcgtcgtcgtcgtcgtcgtcgtcgtcgtcgtcgtcttcttcttcttcttcttcttcttcttcttcttcttcttcttcttcttcttcttcttctctcttcttcttcttcttctctcttcttcttcctcttcttcttcctcttcttcttctattattatactttaagtt

SEQ ID NO: 17163 - DNA, 1524 bp, Homo sapiens
  SIMILAR (939)..(406): 711254mologous to Homo sapiens putative p150,accession number U93570,Smith-Waterman Score=672.
ttaccagggttggttttctggttccttctcatttgggtagcctctgtcagagggaaggtctagggctgatggctgttgttcagattcttttgtcccacggggtgttcccttgatgtagtactctcccccttttcctatgggtgtgtcttcctgtgagcctagctgtagtgattgttgtctctcttctgggtctagccactcagtgagtctacttggctcttggcttctactgggggggtgtgtgcacagagtcctgtgatgtgagccatctatgggtctctcagccgtggataccagcgcctgttcttcagcttctccagtgggggtgtgtgtttgggagaggcggggttctccctttcccacttccgcagttggggcacccacggtatttggcaagggggtcttccaggtccatgctgttttggttactgtagccttgtagtatagtttgaagtcaggtagtgtgatgcctccagctttgttcttttggcttaggattgacttggtgatgcgggctctttttttattccacatgaactttaaagtagttttttccaattctgtgaagaatgatggtggtattttgatggggattgcactaaatttgtagattgcttttggcagtatggtcattttcacaatattgatttcacccatccatgagcatgggatgtgtttccatttgtttgtgtcgtctatgatttctttcagcagtgttttgtaggtttccttgtagaggtctttcgactccttggttaggtatattcctaagtattttatttttttgtttgcagctattgtaaaaggggttgagttcttgacttgattatctgcatggtcactgttggtgtatagaagagctactgatttgtgtacattaatctcgtatctggaaaatttgctgaattcttttatcagttctaagagctttctggaggagtcctggtccttctgtctcatggctcttaagattctttccttcaccttaacattggataacctgatgacgaagtgcctaggcaaagatctttttgtgatgaatttcctgggtgttctttgtgcttcatgtgtttggatgtctaggtctctagcaaggccagagaagttttccttgattattcccccaaatatgttttccgagcttttagaattctcctcttcctcaggaacacagggttggttttctggtgccttctcatttgggtaggctctgtcagagggaaggtctagggccgaaggctgttgttcagattcttttttcccacagggtgttcccttgatgtagtactctcccccttttcctgtggatgtggcttcatgtgagccaaactgcagtgattgctctctcttctgggtctggccacccagagagtctgcctggctctgggctggtattggcacttgtctgcacagagtcctgtgataccaaccatctgtgggtctctcagccatggttaccagtgcctgttccggtggaggtggcggggtggggggtgcaatggactctgtgaggcttcttagcat

SEQ ID NO: 17164 - DNA, 479 bp, Homo sapiens
  SIMILAR (322)..(2): 1001254mologous to Mus musculus TFG protein,accession number U94662,Smith-Waterman Score=537.
ctcgacggagatatttcacctgacttgattcaaggggtcttggctggccattaacaaataatgtcagtttcagtatcctactgcactgaattgcaaaggaaaggtcagaactatcaaaaattgttataagatctccatcttcatctttatactttattgttacttcatcattactcagaagttttcctctgaaaactcgttgcatcattagcactaattcatcataagtaatatcttcattatgaataggaattcgccgaatatcctccccaagttgagctttgatgattagcttcccacttagatccaactgtccgttcatggtggactccaggatgttctatatatacaactctagagaaagaccaggacgcatgcgcgacggcgcgaggcgcagggctggctgggtcccggctgcctaggccgaagagtccctgctttctcactggatgacgggatttaggaagcgtgagacgaaa

SEQ ID NO: 17165 - DNA, 600 bp, Homo sapiens
  SIMILAR (462)..(55): 281254mologous to Human papillomavirus E4,accession number U85660,Smith-Waterman Score=95.
tcagcctcgcagcacctttcctccagccaagaagataagctctccaaaaatgttttctggatggccaactggtgttgggggctggccctttgctttaggcatggcaaataatcgacctctcttactaaacgttttctctaaagtatgaaagacagagctgatgacatagggttttttttctggttccttctcatttgggtaggctccgtcagagggaaggtctagggctgaaggctgttgttcagattcttttgtcccactgggtgttcccttgatgtagtactctccccgttttcctatggatgtggcttcctggccctgggctggtactggaggttgtctgcacagagtcctgtgatgtgaactgtctatgggtctcttagctgtggatactagtgcctgttctggtggaggtggcggggtggggggtacaatggagtccgtgagggttcttagctttggtggtttaatgctctctttttgtgctggttgacctccttccttaccaccaccctccttgagctgcacgaatgccttccagtctggagagactagacccgaagacatctgacaggatggagcaagggtagttgcacaaat

SEQ ID NO: 17166 - DNA, 4152 bp, Homo sapiens; identical to SEQ ID NO: 12254
  SIMILAR (4152)..(2752): 1001254mologous to Homo sapiens IDN3,accession number AB019494,Smith-Waterman Score=2401.

SEQ ID NO: 17167 - DNA, 2175 bp, Homo sapiens
  SIMILAR (1720)..(1968): 421254mologous to Homo sapiens dJ287G14.2 (PUTATIVE novel seven transmembrane domain protein),accession number AL033377,Smith -Waterman Score=181.
atggtcaacaataacgacaaaaaccacttaaagttggacagacgtctactgcaaccaactctcaaaaagtttagaacagcgcactacgccccgcccattggcgagaaacggaaatacccgctttcgaaaaaaccggaagtgcgtggtcacgccccgcgcatgcgtgcatcggggcagctcacgcttcctaaatcccgtcatccagtgagaaagcagggactcttcggcctaggcagccgggacccagccagccctgcgcctcgcgccgtcgcgcatgcgtcctgggaagccgcatccataggaaaagggggagagtactacaacaagggaacatcatgtgggacaaaagaatctgaagaacagccttcatccctagaccttccctctgacagagcctacccaaatgagaaggaaccagaaaaccgtggtaatatgacaaaacaagactccttaatatcccccaaaaatcacactagctcaccagcaatgggtccaaaccaagaagaaatccctgatttatctgagaaagaattcaagaggcaggggggtcttcctggacccctgagagtgcaaagatgcctcggtcagcagctgcgacaaggcaactgcaactgcacccagggagctcccacccgggccactgagaagagggtggggctcccgcttgccccccggtcccgctggctcagtggagtgtgtagccctgggccgtgcctcctcacagcctggagtgggagcttcagatcgtgggccctgggcctggccattggaaacgtcaggctcggcggtcaccttgatgtggagcagatcctgaggacgcagcctcaggtgactcggagcagagactgttccccaggcgcaggaacttggcgccgtcggcgggttgggcgcggtggccacgttgctggctgggtcctcgaagcgggcactgctcccacttcccaccccggtcccctgaagcgtgaccccagctctacatctcgggcctggctcccacgttccatgtgcaagtgtggcaccgctccagacccagttcctcctggggaccctctctgcttgctcttccttgcccgactgcactgctctccctccgattacaccaagacatgcggctttgtagtttatcaaaatgacaagcttttccaatcaaaaacttttacagctaaatcggattttagtcaaaaaattatctcaagcaaaactgatgaaaatgagcaagatcagagtgcttctgttgacatggtctttagtccaaagtacaaccaaaaagaatttcaactctattcctatgcctgtgtctattggaatttgtcagcgaaggactgggacacatatggctgtcaaaaagacaagggcactgatggattcctgcgctgccgctgcaaccatactactaattttgctgtattaatgactttcaaaaaggattatcaatatcccaaatcacttgacatattatccaacgttggatgtgcactgtctgttactggtctggctctcacagttatatttcagattgtcaccaggaaagtcagaaaaacctcagtaacctgggttttggtcaatctgtgcatatcaatgttgattttcaacctcctctttgtgtttggaattgaaaactccaataagaacttgcagacaagtgatggtgacatcaataatattgactttgacaataatgacatacccaggacagacaccattaacatcccgaatcccatgtgcactgcgattgccgccttactgcactattttctgttagtgacatttacctggaacgcactcagcgctgcacagctctattaccttctaataaggaccatgaagcctcttcctcggcatttcattcttttcatctcattaattggatggggagtcccagctatagtagtggctataacagtgggagttatttattctcagaatggaaataatccacagtgggaattagactaccggcaagagaaaatctttctcaccaaaaacgttcattcctcccgtctagcaagaatctgcaaacacaaagctttcatctctgaagggagcccactctggctcttggcctctctgttcactgaacatagactctggaccccatggccacttccttctcatatgtcaagaaaaatgagagacatccacattctccatgagaagggcccagactcctattga

SEQ ID NO: 17168 - DNA, 1030 bp, Homo sapiens; identical to SEQ ID NO: 6900
  SIMILAR (4)..(39): 911254mologous to Homo sapiens putative p150,accession number U93563,Smith-Waterman Score=64.

SEQ ID NO: 17169 - DNA, 2604 bp, Homo sapiens
  SIMILAR (1)..(1089): 821254mologous to Homo sapiens putative p150,accession number U93563,Smith-Waterman Score=1554.
atgggagattttaacaccccactgtcaacattagacagatcaacgagacagaaagttaacaaggatatccaggacttgaactcagctctacaccaagcggacctaatagacatctacagaactctccaccccaaatcaacagaatatacattcttttcagcaccacaccacacctattccaaaattgaccacatagttggcagtaaagcactcctcagcaaatgtaaaagaacagaaattataacaaactatctctcagaccacagtgcaatcaaactagatctcaggattaagaaactcactgaaaaccgcgcaactacatggaaactgaacaacctgctcctgaatgactactgggtacataacgaaatgaaggcagaaataaagatgttctttgaaaccaatgagaacaaagacacaacataccagaatctctggaacacattcaaagcagtgtgtagagggaaatttatagcactaaatgcccacaagagaaagcaggaaagatctaaaattgacagcctaacatcacaattaaaagaacttgagaagcaagagcaaacacattcaaaagctagcagaaggcaagaaataactaaaatcagagcagaactgaaggtcatagagacacaaaaagcccctcaaaaaatcagtgaatccaggagctggttttttgaaaagatcaacaaaattgatagactgctagcaagacgaataaagaagaaaagagagaagaatcaaatagatgcaataaaaaatgataaagcggatatcaccaccgataccacagaaatacaaaaaaatctagaagaaatggataaattcctcgatacatacaccctcccaagactaaaccaggaagaagttgaatctctgaatagaccaataacaggctctcaaattgaggcaataattaatagcttaccaaccaaaaaaagtccaggaccagatggattcactgctgaattctaccagaggtacaaggaggaactgcattatcctgataaccaacgcctggtggagacaacaaaaaaagagaattttagaccaatatccctgatgaacattgatgcaaaaatcctcaataaaatactggcaaaccgaatccagcagcacatcaacaagcttatacaccacgatcaagcaggcttcatccctgggatgcaaggctggttcagcatacacaaatcaataaacgtaatccagcatataaacagaagcaatgacaaaaaccacatgatcatctcaatagatgcagaaaaggcctttgacaaaattcaacagcccttcgtgctaaaaactctcaataaattaggtattgatggcacgtatctcaaaataataagagctatctatgacaaacccacagccaatatcatactgaatggccaaaaactggaagcattccctttgaaaactggcacaagacagggatgccctctctcaccactcctattcaacatagtattggaagttctggccagggcaatcaggcaggagaagaaaataaatgttattcagttaggaaaagaggaagtcaaattgtccctgtttgcagatgacatgattgtatatctagaaaaccccatcatctcagcccaaaatcttcttaagctgataaggaacttcagcaaagtctcaggatacaaaatcaatgtgcaaaaatcacaagcattcttatacaccaataacagacaaacagagagccaaatcatgagtgaactcccattcacaattgcttcaaagagaataaaatacctaggaatccaacttacaagggacatgaaagacctcttcaaggagaagtacaaaccactgcccaacaaacaaatggaagaacattctatgctcatgagtaggaagaatcaatattgtggaaatggcaatacagcccaagaattggaaaaaactactttaaagttcatatggaaccaaaaaagagcccgcattgccaagtcaatcctaagccaaaagaacaaagctggaggcatcacggtacctgacttccaactatactacaaggctacagtaaccaaaacagcatggtactggtaccaaaacagagatatagaccaatggaacagaaaagagccctcagaaataatgccacatatctatgactctctcatctttggcaaacctgacaaaaacaagcaatggggaaaggattccctatttaataaatggtgctgggaagactggctagccatatgtagaaagctgaaactggatcccttccttacaccttgtacaaaaatcaactcaagatgggttaaagacttaaatattagacctaaaaccataaaaaccctagaagaaaacctaggcaataccattcaggacataggcatggccaaggacttcatgtctaaaacaccaaaagcaatggcaacaaaagccaaaattgacaaatgggatctaattaaactaaagagcttctgcacaagaatagcaaaggaacctaccatcagcgtgaacaggcaacctacagaatgggagaaaatgtttgcaatctgctcatctgacaaaggggtaatatccagaatctacagtgacctcaaacaaatttacaagaaaaaaataaccccattaacaagtgggtga

SEQ ID NO: 17170 - DNA, 3042 bp, Homo sapiens
  SIMILAR (3002)..(3040): 921254mologous to Homo sapiens putative p150,accession number U93572,Smith-Waterman Score=62.
atgggagactttaacaccccactgtcaacattagacagatcaacgagacagaaagtcaacaaggatacccaggaattgaactcagctctgcaccaagcagacctaatagacatctacagaactctccaccccaaatcaacagaatatacatttttttcagcaccacaccacacctattcgaaaattgaccacatacttggaagtaaagctctcctcagcaaatgtaaaagaacagaaattataacaaactatctctcagaccacagtgcaatcaaactagaactcaggattaagaatctcactcaaagcctctcaactacatggaaactgaacaacctgctcctgaatgaatactgggtacataacgaaatgaaggcagaaataaagatgttctttgaaaccaacgagaacaaagacacaacataccagaatctctgggacgcattcaaagcagtgtgtagagggaaatttatagcactaaatgcccacaagagaaagcaggaaagatccaaaattgacaccctaacatcacaattaaaagaactagaaaagcaagagcaaacacattcaaaagctagcagaaggcaagaaataactaaaatcagagcagaactgaaggaaatagagacacaaaaaacccttcaaaaaatcaatgaatccaggagctggttttttgaaaggatcaacaaaattgatagaccgctagcaagactaataaagaaaaaaagagagaagaatcaaatagacacaataaaaaatgataaaggggatatcaccactgatcccacagaaatacaaactaccatcagagaatactacaaacacctctacgcaaataaactagaaaatctagcagaaatggataaattccttgacacatacactctcccaagactaaaccaggaaggagttgaatctctgaatagaccaataacaggagctgaaattgtggcaataatcaatagtttaccaaccaaaaagagtccaggaccagatggattcacagccgaattctaccagaggtacaaggaggaactggtaccattccttctgaaactattccaatcaatagaaaaagagggaatcctccctaactcattttatgaggccagcatcattctgataccaaagccgggcagagacacaaccaaaaaagagaattttagaccaatatccttgatgaacattgatgcaaaaatcctcaataaaatactggcaaaccgaatccagcagcacatcaaaaagcttatccaccatgatcaagtgagcttcatccctgggatgcaaggctggttcaatatatgcaaatcaataaatgtaatccagcatataaacagagccaaagacaaaaaccacatgattatctcaatagatgcagaaaaagcctttgacaaaattcaacaacgcttcatgctaaaaactctcaataaattaggtattgatgggacatatttcaaaataataagagctatctatgacaaacccatagccaatatcatactgaatgggcaaaaactggaagcattccctttgaaaactggcacaagacagggatgctctctctcaccgctcctattcaacatagtgttggaagttctggccagggcaattaggcaggagaaggaaataaagggtattgaattaggaaaagaggaagtcaaattgtccctgtttgcagacgacatgattgtatatctagaaaaccccattgtctcagcccaaaatctccttaagctgataagcaacttcagcaaagtctcaggatacaaaatcaacgtacaaaaatcacaagcattcttatacaccaacaacagacaaacagagagccaaatcatgagtgaacttccattcacaattgcttcaaagagaataaaatacctaggaatccaacttacaagggatgggaaggacctcttcaaggagaactacaaaccactgctcaaggaaataaaagaggatacaaacaaatggaagaacattccatgctcatgggtaggaagaatcaatatcgtgaaaatggccatactgcccaaggtaatttacagattcaatgccatccccatcaagctaccaatgcctttcttcacagaattggaaaaaactactttaaagttcatatggaaccaaaaaagagcccgcatcgccaagtcaatcctaagccaaaagaacaaagctggaggcatcacactacctgacttcaaactatacgacaaggctacagtaaccaaaacagcatggtactggtaccaaaacagagatatagatcaatggaacagaacagagccctcagaaataacgctgcatacctacaactatctgatctttgacaaacctgacaaaaacaagcaatggggaaaggattccctatttaataaatggtgctgggaaaactggctagccatatgtagaaagctgaaactggatcccttccttataccttatacaaaaatcaattcaagatggattaaagatttaaacgttagacctaaaaccataaaaaccctagaagaaaacctaggcattaccattcaggacataggcatgggcaaggacttcatgtccaaaacaccaaaagcaatggcaacaaaagccaaaattgacaaatgggatctaattaaactcaagagcttctgcacagcaaaagaaactaccatcagagtgaacaggcaacctacaacatgggagaaaatttttgcaacctactcatctgacaaagggctaatatccagaatctacaatgaactcaaacaaatttacaagaaaaaaacaaacaaccccatcaaaaagtgggcgaaggacatgaacagacacttctcaaaagaagacatttatgcagccaaaaaacacatgaaaaaatgctcaccatcactggccatcagagaaatgcaaatcaaaaccactatgagatatcatctcataccagttagaatggcaatcattaaaaagtcaggaaacaacaagtgctggagaggatgtggagaaataggaacacttttacactgttgggacatggatgaaattggaaagcatcattctcagtaa

SEQ ID NO: 17171 - DNA, 1383 bp, Homo sapiens
  SIMILAR (670)..(1371): 931254mologous to Homo sapiens putative p150,accession number U93569,Smith-Waterman Score=1130.
atgggagactttaacaccccactgtcaacattagatagatcaaagagacagaaagttaaaaaggatatccaggaactaaactcagctctgcaccaagtggacctaatagacatctacagaactccgtaccccaaatcaacagaatatacattcttttcagcacaacaccacacctattccaaaactgaccacatagttggaagtaaagaactcctcagcaaatgtaaaagaacagaaattataacaaactgtctctcagaccacagtgcaatcaaactagaactcaggattaagaaactcactcaaaaccgctcaactacatggaaactgaacaacctgctcctgaatgactactgggtacataacgaaatgaaggcagaaataaagatgttctttgaaaccaacgagaacaaagatacaacatatcagaatctcagggacacattaaaagcagtgtgtagagggaaatttgtagcactaaatgcccaccagagaaagcagaaaatatctaaaattgacaccctaacatcacaattaaaagaactagaaaagcaagagcaaacacattcaaaagctagcagaaggcaagaaataactaagatcagagcagaactgaaggaaatagagacacaaaaaacccttcaaaaaatcaatgattccaggagctgggcaatcaggcaggagaaggaaataaaaggtattcaattaggaaaagaggaagtccaattgtccctgtttgcagatgacatgattgtacatctagaaaaccccattgtctcagcccaaaatctccttaagctaataggcaacttcagcaaagtctcaggatacaaaatcaatgtgaaaaaatcacaagcattcttatacaccaataacagacaaacagagagccaaatcatgagtgaattcccattcacaattgcttcaaagagaataaaatacctaggaatacaacttacaagggatgtgaaggacctcttcaaggagaactacaaaacactgctcaatgaaatcaaagaggatacaaacaaatggaagaacattccatgctcatgggtaggaagaatcaatattgtaaaaatggccatactgcccaaggtaatttatagattcaatgccatctccatcaagctaccaatgactttcttcacagaattgggaaaacctactttaaagttagtatggaaccaaaaaagagtccgcattgccaagtcaatcctaagccaaaagaacaaagctggaggcatcatgctacctgacttcaaactatactacaaggctacagtaaccaaaacagcatggtactggtaccaaaacagagatatagaccaatggaacagaacagagccctcagaaataatgccgcatattacaaccatctga

SEQ ID NO: 17172 - DNA, 993 bp, Homo sapiens
  SIMILAR (1)..(993): 871254mologous to Homo sapiens putative p150,accession number U93572,Smith-Waterman Score=1541.
atgggagattttaacaccccactgtcaacattagacagatcaacgagacagaaagttaacaaggatatccaggacttgaactcagctctacaccaagcggacctaatagacatctacagaactctccaccccaaatcaacagaatatacattcttttcagcaccacaccacacctattccaaaattgaccacatagttggcagtaaagcactcctcagcaaatgtaaaagaacagaaattataacaaactatctctcagaccacagtgcaatcaaactagatctcaggattaagaaactcactgaaaaccgcgcaactacatggaaactgaacaacctgctcctgaatgactactgggtacataacgaaatgaaggcagaaataaagatgttctttgaaaccaatgagaacaaagacacaacataccagaatctctggaacacattcaaagcagtgtgtagagggaaatttatagcactaaatgcccacaagagaaagcaggaaagatctaaaattgacagcctaacatcacaattaaaagaacttgagaagcaagagcaaacacattcaaaagctagcagaaggcaagaaataactaaaatcagagcagaactgaaggtcatagagacacaaaaagcccctcaaaaaatcagtgaatccaggagctggttttttgaaaagatcaacaaaattgatagactgctagcaagacgaataaagaagaaaagagagaagaatcaaatagatgcaataaaaaatgataaagcggatatcaccaccgataccacagaaatacaaaaaaatctagaagaaatggataaattcctcgatacatacaccctcccaagactaaaccaggaagaagttgaatctctgaatagaccaataacaggctctcaaattgaggcaataattaatagcttaccaaccaaaaaaagtccaggaccagatggattcactgctgaattctaccagaggtacaaggaggaactg

SEQ ID NO: 17173 - DNA, 2494 bp, Homo sapiens
  SIMILAR (3)..(1400): 981254mologous to Homo sapiens putative p150,accession number U93563,Smith-Waterman Score=2374.
acagatcaacgagacagaaagtcaacaaggatacccaggaattgaactcagctctgcaccaagcggacctaatagacatctacagaactctccaccccaaatcaacagaatatacatttttttcagcaccacaccacacctattccaaaattgaccacatagttggaagtaaaactctcctcagcaaatgtaaaagaacagaaattataacaaactatctctcagaccacagtgcaatcaaactagaactcaggattaagaatctcactcaaagccgctcaactacatggaaactgaacaacctgctcctgaatgactactgggtacataacgaaatgaaggcagaaataaagatgttctttgaaaccaacgagaacaaagacaccacataccagaatctctgggacgcattcaaagcagtgtgtagagggaaatttatagcactaaatgcctacaagagaaagcaggaaagatccaaaattgacaccctaacatctcaattaaaagaactagaaaagcaagagcaaacacattcaaaagctagcagaaggcaagaaataactaaaatcagagcagaactgaaggaaatagagacacaaaaaacccttcaaaaaatcaatgaatccaggagctggttttttgaaaggatcaacaaaattgatagaccgctagcaagactaataaagaataaaagagagaagaatcaaatagacacaataaaaaatgataaaggggatatcaccaccaatcccacagaaatacaaactaccatcagagaatactacaaacacctctatgcaaataaactagaaaatctagaagaaatggatacattcctcgacacatacactctcccaagactaaaccaggaagaagttgaatctctgaatagaccaataacaggctctgaaattgtggcaataatcaatagtttaccaaccaaaaagagtccaggaccagatggattcacagccgaattctaccagaggtacaaggaggaactggtaccattccttctgaaactattccaatcaatagaaaaagagggaatcctccctaactcattttatgaggccagcatcattctgataccaaagccgggcagagacacaaccaaaaaagagaattttagaccaatatccttgatgaacattgatgcaaaaatcctcaataaaatactggcaaaccgaatccagcagcacatcaaaaagcttatccaccatgatcaagtgggcttcatccctgggatgcaaggctggttcaatatacacaaatcaataaatgtaatccagcatataaacagagccaaagacaaaaaccacatgattatctcaatagatgaagaaaaagcctttgacaaaattcaacaacccttcatgctaaaaactctcaataaattagagaataaaatacctaggaatccaacttacaagggatgtgaaggacctcttcaaggagaactacaaaccactgctcaaggaaataaaagaggacacaaacaaatggaagaacattccatgctcatgggtaggaagaatcaatatcatgaaaatggccatactgcccaaggtaattatagattcaatgccatccccatcaagctaccaatgactttcttcacagaattggaaaaaactactttaaagttcatatggaaccaaaaaagagcccgcatcgccaagtcaatcctaagccaaaagaacaaagctggaggcatcacactacctgacttcaaactatactacaaggctacagtaaccaaaacagcatggtactggtaccaaaacagagatatagatcaatggaacagaacagagccctcagaaataatgccgcatatctacaactatctgatctttgacaaccctgagaaaaacaagcaatggggaaaggattccctatttaataaatggtgctgggaaaactggctagccatatgtagaaagctgaaactggatcccttccttacaccttatacaaaaatcaattcaagatggattaaagatttaaacgttagacctaaaaccataaaaaccctagaagaaaacctaggcattaccattcaggacataggcatgggcaaggacttcatgtccaaaacaccaaaagcaatggcaacaaaagccaaaattgacaaatgggatctaattaaactaaagagcttctgcacagcaaaagaaactaccatcagagtgaacaggcaacctacaacatgggagaaaattttcacaacctactcatctgacaaagggctaatatccagaatctacaatgaactcaaacaaatttacaagaaaaaaacaaagaaccccatcaaaaagtgggcgaaggacatgaacagacacttctcaaaagaagacatttatgcagccaaaaaacacatgaaaaaatgctcatcatcactggccatcagagaaatgcaaatcaaaaccactatgagatatcatctcacaccagttagaatggcaatcattaaaaagtcaggaaacaacag

SEQ ID NO: 17174 - DNA, 502 bp, Homo sapiens; identical to SEQ ID NO: 4259
  SIMILAR (348)..(497): 901254mologous to Homo sapiens lamin-like protein,accession number M24732,Smith-Waterman Score=216.

SEQ ID NO: 17175 - DNA, 3192 bp, Homo sapiens; identical to SEQ ID NO: 3969
  SIMILAR (1087)..(2478): 961254mologous to Homo sapiens unknown,accession number AF148856,Smith-Waterman Score=2341.

SEQ ID NO: 17176 - DNA, 1257 bp, Homo sapiens
  SIMILAR (1)..(1059): 921254mologous to Homo sapiens putative p150,accession number U93563,Smith-Waterman Score=1697.
atgggagactttaacaccccactgtcaacattagacagatcaacgagacagaaagttaacaaggatacccaggaattgaactcagctctgcaccaagcggacctaatagacatctacagaactctccaccccaaatcaacagaatatacatttttttcagcaccacaccacacctattccaaaattgaccacatagttggaagtaaagcgctcctcagcaaatgtaaaagaacaaaaattataacaaactgtctctcagaccacagtgcaatcaaactagaactcaggattaagaaactcactcaaaactgctccactacatggaaactgaacaacctgctcctgaatgactactgggtatgtaacgaaatgaaggcagaaataaagatgttctttgaaaccaacgagaacaaagacaaaacataccagaatctctgggacacattcaaagcagtgtgtagagggaaatttatagcactaaatgcccacaagagaaagcaggaaagatccaaaattgacaccctaacatcacaattaaaagaactagaaaagcaagagcaaacacattcaaaagctagcagaaggcaagaaataactaaaatcagagcagaactgaaggaaatggagacacaaaaaacccttcaaaaaattaatgaatccaggagctggttttttgaaaagatcaacaaaattgatagaccgctagcaagactaataaagaagaaaagagagaagaatcaaatagatgcaataaaaaataataaaggggatattaccactgatcccacagaaatagaaactaccatcagagaatactacaagcacctctacacaaataaactagaaaatctagaagaaatggataaattccttgacacatacaccctcccaagactaaaccaggaagaagttgaatctctgaatagaccaataacaggctctgaagttgtggcaataatcaatagcttaccaaccaaaaaaagtccaggaccagatggattcacagccgaattccatcagaggtacaaggagaagctgataagcgaacttttgccaatgccaaatcatacagcattaaagaagcagactcaagacctctcagactgtaaagctatgtttttatactatcagtctgtatcagttcagactgctataataaattaccacagactgagaggcttaaacaacagaaatttatttctcacagttttggagtattcaagcctgagatcagggtgtgaacatagtcgggttctg

SEQ ID NO: 17177 - DNA, 3139 bp, Homo sapiens
  SIMILAR (1)..(2961): 981254mologous to Homo sapiens unknown,accession number AF149422,Smith-Waterman Score=5090.
atgggagactttaacaccccactgtcaacattagacagatcaacgagacagaaagtcaacaaggatacccaggaattgaactcagctctgcaccaagcagacttaatagacatctacagaactctccaccccaaatcaacagaatatacatttttttcagcaccacaccacacctattccaaaattgaccacatagttggaagtaaagctctcctcagcaaatgtaaaagaacagaaattataacaaactatctctcagaccacagtgcaatcaaactagaactcaggattaagaatctcactcaaagccgctcaactacatggaaactgaacaacctgctcctgaatgactactgggtacataacgaaatgaagacagaaataaagatgttctttgaaaccaacgagaacaaagacaccacataccaaaatctctgggacgcattcaaagcagtgtgtagagggaaatttatagcactaaatgcctacaagagaaagcaggaaagatccaaaattgacaccctaacatcacaattaaaagaactagaaaagcaagagcaaacacattcaaaagctagcagaaggcaagaaataactaaaatcagagcagaactgaaggaaatagagacacaaaaagcccttcaaaaaatcaatgaatccaggagctggttttttgaaaggatcaacaaaattgatagaccgctagcaagactaataaagaaaaaaagagagaagaatcaaatagacacaataaaaaatgataaaggggatatcaccaccgatcccacagaaatacaaactaccatcagagaatactacaaacacctctacgcaaataaactagaaaatctagaagaaatggatacattcctcgacacatacactctcccaagactaaaccaggaagaagttgaatctctgaatagaccaataacaggctctgaaattgtggcaataatcaatagtttaccaaccaaaaagagtccaggaccagatggattcacagccgaattctaccagaggtacaaggaggaactggtaccattccttctgaaactattccaatcaatagaaaaagagggaatcctccctaactcattttatgaggccagcatcattctgataccaaagccgggcagagacacaaccaaaaaagagaattttagaccaatatccttgatgaacattgatgcaaaaatcctcaataaaatactggcaaaccgaatccagcagcacatcaaaaagcttatccaccatgatcaagtgggcttcatccctgggatgcaaggctggttcaatatacgcaaatcaataaatgtaatccagcatataaacagagccaaagacaaaaaccacatgattatctcaatagatgcagaaaaagcctttgacaaaattcaacaacccttcatgctaaaaactctcaataaattaggtattgatgggacgtatttcaaaataataagagctatctatgacaaacccacagccaatatcatactgaatgggcaaaaactggaagcattccctttgaaaactggcacaagacagggatgccctctctcaccgctcctattcaacatagtgttggaagttctggccagggcaatcaggcaggagaaggaaataaagggtattcaattaggaaaagaggaagtcaaattgtccctgtttgcagacgacatgattgtttatctagaaaaccccattgtctcagcccaaaatctccttaagctgataagcaacttcagcaaagtctcaggatacaaaatcaatgtacaaaaatcacaagcattcttatacaccaacaacagacaaacagagagccaaatcatgagtgaactcccattcacaattgcttcaaagagaataaaatacctaggaatccaacttacaagggatgtgaaggacctcttcaaggagaactacaaaccactgctcaaggaaataaaagaggacacaaacaaatggaagaacattccatgctcatgggtaggaagaatcaatattgtgaaaatggccatactgcccaaggtaatttacagattcaatgccatccccatcaagctaccaatgactttcttcacagaattggaaaaaactactttaaagttcatatggaaccaaaaaagagcccgcatcgccaagtcaatcctaagccaaaagaacaaagctggaggcatcacactacctgacttcaaactatactacaaggctacagtaaccaaaacagcatggtactggtaccaaaacagagatatagatcaatggaacagaacagagccctcagaaataatgctgcgtatctacaactatctgatctttgacaaacctgagaaaaacaagcaatggggaaaggattccctatttaataaatggtgctgggaaaactggctagccatatgtagaaagctgaaactggatcccttccctacaccttatacaaaaatcaattcaagatggattaaagatttaaacgttagacctaaaaccataaaaaccctagaagaaaacctaggcattaccattcaggacataggcgtgggcaaggacttcatgtccaaaacaccaaaagcaatggcaacaaaagccaaaattgacaaatgggatctaattaaactaaagagcttctgcacagcaaaagaaactaccatcagagtgaacaggcaacctacaaaatgggagaaacttttcgcaacctactcatctgacaaagggctaatatccagaatctacaatgaactcaaacaaatttacaagaaaaaaacaaacaaccccatcaaaaagtgggcgaaggacatgaacagacacttctcaaaagaagacatttatgcagccaaaaaacacatgaagaaatgctcatcatcactggccatcagagaaatgcaaatcaaaaccactatgagatatcatctcacaccagttagaatggcaatcattaaaaagtcaggaaacaacaggaaggaggaaaaaggtgctagagatataaacaaacaattcacagaagaagcaacactgatggctaatcaacctatgaaaaggtgtttaaccttcccagcaatcacagagaggcaaacacctgctctttcaccccagccacatggaatctttttggtcaacctgataaaagcatttattg

SEQ ID NO: 17178 - DNA, 1779 bp, Homo sapiens; identical to SEQ ID NO: 8652
  SIMILAR (916)..(1692): 941254mologous to Homo sapiens unknown,accession number AF149422,Smith-Waterman Score=1247.

SEQ ID NO: 17179 - DNA, 3156 bp, Homo sapiens; identical to SEQ ID NO: 10078
  SIMILAR (1)..(3036): 941254mologous to Homo sapiens putative p150,accession number U93563,Smith-Waterman Score=4979.

SEQ ID NO: 17180 - DNA, 3325 bp, Homo sapiens; identical to SEQ ID NO: 10079
  SIMILAR (1)..(3156): 951254mologous to Homo sapiens putative p150,accession number U93565,Smith-Waterman Score=5296.

SEQ ID NO: 17181 - DNA, 3145 bp, Homo sapiens
  SIMILAR (1)..(2958): 971254mologous to Homo sapiens unknown,accession number AF148856,Smith-Waterman Score=5040.
atgggagactttaacaccccactgtcaacattagacagatcaacgagacagaaagtcaacaaggatacccaggaattgaactcagctctgcaccaagcagacctaatagacatctacagaactctccaccccaaatcaacagaatatacatttttttcagcaccacaacacacctattccaaaattgaccacatacttggaagtaaagctctcctcagcaaatgtaaaagaacagaaattataacaaactatctctcagaccacagtgcaataaaattagaactcaggattaagaatctcactcaaaaccgctcaactacatggaaactgaacaacttgctcctgaatgactactgggtacataacgaaatgaaggcagaaataaagatgttctttgaaaccaatgagaacaaagacacaacataccagaatctctgggacacattcaaagcagtgtgcagagggaaatttatagcactaaatgcccacaagagaaagcaggaaagatctaaaattgacaccctaacatcacaattaaaagaactagaaaagcaagagcaaacacattcaaaagctagcagaaggcaagaaataactaaaatcagagcagaactgaaggaaatagagacacaaaaaacccttcaaaaaattaatgaatccaggagctggttctttgaaaggatcaacaaaattgatagaccactagcaagactaatgaagaaaaaaagagagaagaatcaaatagatgcaataaaaaatgataaaggggatatcaccaccaatcccacagaaatacaaactaccatcagagaatactataaacacctctacgcaaataaactagaacatctagaagaaatggataaattcctcaacacatacactctcccaagacaaaaccaggaagaagttgaatctctgaatagaccaataacaggatctgaaattgtggcaataatcaatagcttactgaccaaaaagagtccaggaccagatggattcacagccgaattctaccagaggtacaaggaggaactggtaccattccttctgaaactattccaatcaatagaaaaagagggaatcctccctaactcattttatgaggccagcatcatcctgataccaaagccaggcacagacacaaccaaaaaagagaattttagacaaatatccttgatgaacattgatgtaaaaatcctcaataaaatactggcaaacagaatccagcagcacatcaaaaagcttatccaccatgatcaagtgggcttcatccctgggatgcaaggctggttcaatatacgcaaatcaataaatgtaatccagcatataaacagagccaaagacaaaaaccacatgattatctcaatagatgcagaaaaagcctttgacaaaattcaacaacccttcatgctaaaaactctcaataaattaggtattgatggtacgtatttcaaaataataagagctatctatgacaaacccacagccaatatcatactgaatgggcaaaaactggaagcattccctttgaaaactggcacaagacagggatgccctctctcaccgctcctattcaacatagtgttggaagttctggccagggcaatcaggcaggagaaggaaataaagggtattcaattaggaaaagaggaagtcaaattgtccctgtttgcagacgacatgattgtttatctagaaaaccccattgtctcagcccaaaatctccttaagctgataagcaacttcagcaaagtctcaggatacaaaatcaatgtacaaaaatcacaagcattcttatacaccaacaacagacaaacagagagccaaatcatgggtgaactcccattcacaattgcttcaaagagaataaaatacctaggaatccaacttacaagggatgtgaaggacctcttcaaggagaactacaaaccactgctcaaggaaataaaagaggacacaaacaaatggaagaacattccatgctcatgggtaggaagaatcaatatcgtgaaaatggccatactgcccaaggtaatttacagattcaatgccatccccatcaagctaccaatgactttcttcacagaattggaaaaaactactttaaagttcatatggaaccaaaaaagagcccgcatcaccaagtcaatcctaagccaaaagaacaaagctggaggcatcacactacctgacttcaaactatactacaaggctacagtaaccaaaacagcatggtactggtaccaaaacagagatatagatcaatggaacagaacagagccctcagaaataatgccgcatatctacaactatctgatctttgacaaacctgagaaaaacaagcaatggggaaaggattccctatttaataaatggtgctgggaaaactggctagccatatgtagaaagctgaaactggatcccttccttacaccttatacaaaaatcaattcaagatggattaaagatttaaacgttagacctaaaaccataaaaaccctagaagaaaacctaggcattaccattcaggacataggcgtgggcaaggacttcatgtccaaaacaccaaaagcaatggcaacaaaagacaaaattgacaaatgggatctaattaagctaaagagcttctgcacagcaaaagaaactaccatcagagtgaacaggcaacctacaacatgggagaaaattttcgcaacctactcatctgacaaagggctaatatccagaatctacaatgaactcaaacaaatttacaagaaaaaaacaaacaaccccatcagaaagtgggcgaaggacatgaacagacacttctcaaaagaagacatttatgcagccaaaaaacacatgaagaaatgctcatcatcactggccatcagagaaatgcaaatcaaaaccactatgagatatcatctcacaccagttagaatggcaatcattaaaaagtcaggaaacaacagtcaggtggaacattcaggaggccctgagctaaacattgccagcagcaaggtcacaactgccagaacagccaaggccactcctgctcagcacagagaaggcagccaagcagatttcttggagcagctgccaagagagtctgcccagtgtgatggagaaagagccccacgtgtggagcacctgccag

SEQ ID NO: 17182 - DNA, 1098 bp, Homo sapiens
  SIMILAR (1)..(654): 921254mologous to Homo sapiens putative p150,accession number U93563,Smith-Waterman Score=1032.
atgataatgggagactttaacaccccactgtcaacattagacagatcaacgagacagaaagttaacaaggatatccaggaattgaactcagctctgcaccaagcggacctaatagacatctacagaactctccaccccaaatcaacagaatataccttcttctcagcatcacacctcacttattccaaaattgaccacatagttggaagtaaagcactcctcagcaattgtaaaagaacagaaattataacaaactatctctcagaccacagtgcaatcaaactagaactcaagattaagaaactgactccaaaccgctcaactacatggaaactgaacaacctgctcctgaatgactactgggtacataacgaaatgaaggcagaaataaagatgttctttgaaaccaacgagaacaaagacacaacataccagaatctctgggacacattcaaagcagagtgtagagggaaatttatagcactaaatgcccacaaaagaaagcaggaaagatctaaaattgacaccctaacatcacaattaaaagaactagagaagcaagagcaaacacattcaaaagctagcagaaggcaagaaataactaagatcagagcagaactgaaggaaatggagacacaaaaaaacccttcaaaaaaatcaatgaatccaggggctgaaaaaattcttggaaaagctttgttttatagaactctcttgagcaagagcaaatttgttttctccgcaaaattaaaggtattgagaaagggtcaaactccagtgccttcaggcataaggctagcaaaacaattgtcatataataagaaacacttgtgttgcagctcagaaaatgataccctcaaatatgccgctttaaaactcaaactgagagcacctggaaagcagcaaatgcagctccggcttgggcccctccggcggtgcccggccggtaccgtgaagccgccgctcgggcttcggtgtagttgccccggacacggcgggacgccctccccgggtattcggtacccacgtgcattttgctgccgccgatctccgttcgatgcgaagcttcgcaactccgagttcgcgaggcgcatctga

SEQ ID NO: 17183 - DNA, 3229 bp, Homo sapiens; identical to SEQ ID NO: 14519
  SIMILAR (1)..(3003): 971254mologous to Homo sapiens unknown,accession number AF149422,Smith-Waterman Score=5062.

SEQ ID NO: 17184 - DNA, 1205 bp, Homo sapiens; identical to SEQ ID NO: 6920
  SIMILAR (1)..(1038): 971254mologous to Homo sapiens putative p150,accession number U93563,Smith-Waterman Score=1746.

SEQ ID NO: 17185 - DNA, 986 bp, Homo sapiens
  SIMILAR (1)..(669): 961254mologous to Homo sapiens putative p150,accession number U93570,Smith-Waterman Score=1120.
atgggagactttaacaccccactgtcaacattagacagatcaacgagacagaaagtcaacaaggatacccaggaattgaactcagctctgcaccaagcagacctaatagacatctacagaactctccaccccaaatcaacagaatatacatttttttcagcaccacaccacacctattccaaaattgaccacatacttggaagtaaagctctcctcagcaaatgtaaaagaacagaaattataacaaactatctctcagaccacagtgcaatcaaactagaactcaggattaagaatctcactcaaagctgctcaactacatggaaactgaacaacctgctcctgaatgactactgggtacataacgaaatgaaggcagaaataaagatgttctttgaaaccaacgagaacaaagacatgacataccagaatctctgggacacattcaaagcagtgtgtagagggaaatttatagcactaaatgcccacaagagaaagcaggaaagatccaaaattgacaccctaacatcacaattaaaagaactagaaaagcaagagcaaacacattcaaaagctagcagaaggcaagaaataactaaaatcagagcagaactgaaggaaatagagacacaaaaagccattcaaaaaatcaatgaatccaggagctggggtcctccaggcaactgccagcagaattaccgtaatagtgagagtggcgaaaagagtgctcccgaaggccaggcccaacacgcagggcctacggaaggaaaagttcccaccttcctatatgtgggcaaggaaaagttcccaccttcctacctcctgacaaggaaaagttcccaccttcctacatgcggagaccctatatgcggggagaagtgctggagggtacccacaaccagtgggcaagggaacaaggcagaccagtggggcggagtaggtatcggggatacagaccatgattctgcagggaccctctgccaaag

SEQ ID NO: 17186 - DNA, 3172 bp, Homo sapiens
  SIMILAR (1136)..(2536): 941254mologous to Homo sapiens ORF2 contains a reverse transcriptase domain.; ORF2,accession number M80341,Smith-Waterman Score=2318.
atgggagactttaacaccccactgtcaacattagacagatcaatgagacagaaagtcaaaaaggatacccaggaattgaactcagctctgcaccaagcagacctaatagacatctacagaactctccaccccaaatcaacagaatatacatttttttcagcaccacaccacacctattccaaaattgaccacatacttggaagtaaagctctcctcagcaaatgtaaaagaacagaaattataacaaactatctctcagacggcagtgcaatcaaactagaactcaggattaagaatctcactcaaaaccgctcaactacatggaaactgaacaacctgctcctgaatgactactgggtacctaacgaaatgaaggcagaaataaagatgttctttgaaacccaacgagaacaaagacacaacataccagaatctctgggacacattcaaagcagtgtgtagagggaaatttatagcactaaatgcccacaagagaaagcaggaaagacccaaaattgacaccctaacatcacaattaaaagaactagaaaagcaagagcaaacacattcaaaagctagcagaaggcaagaaataactaaaatcagagcagaactgaaggaaatagagacacaaaaaacccttcaaaaaattaattaatcccagagctggttttttgaaagggtcaagaaaatagatagaccactagcaagactaataaagaaaaaaagagagaagaatcaaatagatacaataaaaaatgataaaggggatatcaccaccaatcccacagaaatacaaactaccatcagagaatactacaaacacctctacgccaataaactagaaaatctagaagaaatggataaattccttgacacatacactctcccaagactaaaccaggaagaagttgaatctctgaatagaccaataacaggatctgaaattgtggcaataatcaatagcttaccaaccaaaaagagtccaggaccagatggattcacagccaaattctaccagaggtacaaggaggaactgcatataaacagagccaaagacaaaaaccacatgattatctcaatagatgcagaaaaggcctttgacaaaattcaacaacgcttcatgctaaaaactctcaataaattagtgttggaagttctggccagggcaattaggcaggagaaggaaataaagggtattcaattaggaaaagaggaagtcaaattttccctgtttgcagacgacatgattgtatatctagaaaaccccattgtctcagcccaaaatctccttaagctgataagcaacttcagcaaagtctcaggatacaaaatcaatgtacaaaaatcacaagcattcttatacaccaacaacagacaaacagagagccaaatcatgagtgaactcccattcataattgcttcaaagagaataaaatacctaggaatccaacttacaagggatgtgaaggacctcttcaaggagaactacaaaccactgctcaaggaaataaaagaggatacaaacaaatgcaagaacattccatgctcatgggtaggaagaatcaatatcgtgaaaatggccatactgcccaaggtaatttacagattcaatgccatccccatcaagctaccaatgcctttcttcacagaattggaaaaaactactttaaagttcatatggaaccaaaaaagagcccgcatcgccaagtcaatcctaagccaaaagaacaaagctggaggcatcatgctacctgacttcaaaccatactacaaggctacagtaaccaaaacagcatggtactggtaccaaaagagagatatagatcagtggaacagaacagagccctcagaaataacgccgcatatctacaactatctgatctttgacaaacctgagaaaaacaagcaatggggaaaggattccctatttaataaatggtgctgggaaaactggctggccatatgtagaaagctgaaactggatcccttccttacaccttatacaaaaatcaattcaagatggattaaagacttaaacgttagacctaaaaccataaaaaccctagaagaaaacctaggcaataccattcaggacataggcatgggcaaggacttcatgtctaaaacaccaaaagcaatggcaacaaaagacaaaattgacaaatgggatctaattaaacttaagagcttctgtacagcaaaagaaactaccatcagagtgaacaggcaacctacaaaatgggagaaaattttcacaacatactcatctgacaaagggctaatatccagaatctacaatgaactcaaacaaatttacaagaaaaaaacaaacaaccccatcaaaaagtgggcaaaggatatgaacagacacttctcaaaagaagacatttatacagccaaaagacacatgaaaaaatgctcatcatcactagccatcagagaaattcaaatcaaacccacaatgagatactatctcacaccagttagaatggcgatcattaaaaagtcaggaaacaacagggctgaatgtggttggagtattgttgaagggcctccaaaagtaaatattgtgaccccactccaggatgcaattgaacaagatgaagaaaacaacgacaaacatgtagctgtaacagaagccgaaagtgttccagattctcaggcaggggtgatgtgcaagctccaggaaagagatgaaatcggacgaattgaactagtccagaagctggcaaaagaaaactatcagtttttgcagacggacaaaaaagaacaggagaagtctgaacacggcgaatggatgtacctccgagtctctgcagaaggaaataaccaccatatctggaacaaggagcagcagaaagcagtggcattccagctggctcacttcagtttttggtctctagaggtgtacacttcttggcgagtgagatttgcggggagcgagtcctcaccacacactgtggaatgcatcaccctggatttattgtcctcctgctctgaatgggatgcagccagtgggaagcatcggcaagagatcagagggtggaaggagagaaagaatgaaagcccttgtatggctttcccaaaccagacaggccatccagaactaaaaaccggctatgctagaacttttgactctcactttggcctagacctccctgttgcctga

SEQ ID NO: 17187 - DNA, 2148 bp, Homo sapiens
  SIMILAR (526)..(1503): 881254mologous to Homo sapiens putative p150,accession number U93569,Smith-Waterman Score=1455.
atggaagatcaagtgaatgaaatgaagcaagaagagaagtttagagaaaaaagaataaaaagaaatgagcaaagcctccaagaaatatgggactatgtgaaaagaccaaatctatgtctgattggtgtacctgaaagtgatggggagaatggaaccaagttggaaaacactctgcaggatattatccaagagaactttcccaaactagcaaggcaggccaacattcaaattcgggaaatacagagaatgccacaaagatactcctccagaagagcaactccaagactcataattgtcagattcatcaaagttgcaattaaggaaaaaatgttaagggcagccagagagaaaggtcgggttacccacaaagggaagcccatcagactaacagctgatctctcggcagaaactctacaagccagaagacagtggggaccaatattcaacattcttaaagaaaagaattttcaacccagaatttcatatccagccaaattaagcttcataagtgaaggagaaataaaatcctttacagacaagcaaacgacagatcaacgaagacagaaagttaacaaggatatccaggaattgaactcagctctgcaccaagtggacctaatacacatctacagaactctccaccccaaatcaacagaacatacattcttctcagcaccatgccgtacttattccaaaattgaccacatagttggaagtaaaggactcctcagcaaatgtaaaagaacagaaattataacaaactgtctctcagaccacagtgcaatcaaactagaactcaggattaagaaactcactcaaaactgctcaactacatggaaactgaacaacctgctcctgaatgcctactgggtacataacgaaatgaaggcagaagtaaagatgctctttgaaaccaacgagaacaaagacacaacataccagaatctctgggacacattcaaagcagtgtggagagggaaatttatagcactaaatgcccacaagagaaagcaggaaagatccaaaattgacaccctaacatcacaattaaaagaactagagaagcaagagcaaacacattcaaaagctagcagaaggcaagaaataactaagatcagagcagaactgaaggaaatagagacacaaaaaacccttgaaaaaatcaatgaatccaggagctggttttttgaaaagatcaaaaaaattgataaaccgctagcaagactaataaagaagaaaagagagaagaatcaaatagatgcaataaaaaatgataaaggggatatcaccaccaatcccacagaaatacaaattaccatcagagaatactataaacacctctatgcaaataaactagaaaatctagaagaaatggataaattcctcgacacatacaccctcccaagactaaatcagcaaaaagttgaatctctgaatagaccaacaactggctctgaaattgaggcaataattaatagcttaccaaccaaaaaaggcccggatcagatggattcacagctgaattctaccagagatgcagaaaaggcctttgacaaaattcaacaaagcttcatgctaaaaactctcaataaattaggtattgatgggatgtatctcaaaataataagagctgtctatgataaacccacagccagtatcatactgaatgggcaaaaactggaagcattccctttgaaaactgacacaagacagggatgccctctctcaccactcctattagtgttggaagttctggccagggcaatcaggcaggagaaggaaataaagggtattcaattaggaaaagaggaagtcaaattgtccctgtttgcatatgacgtgattgtatatctagaaaaccccactgtctcagcccaaaatctccttaagccgataggcaacttcagcaaagtctcaggatacaaaatcaatgtgcaaaaatcacaagcattcttatacaccaataacagacaaacagagagccgaatcatgagtgaactcccattcacaattgcttcaaaaagagtaaaatacctaggaatccaacttacaagggacatgaaggacctcttcaaggagaactacaaaccactgctcaatgaaataaaagaggatacaaacaaacggaagaacattccatgctcatag

SEQ ID NO: 17188 - DNA, 1419 bp, Homo sapiens
  SIMILAR (442)..(1389): 841254mologous to Homo sapiens unknown,accession number AF149422,Smith-Waterman Score=1320.
atggagttgaaaaccacagcacgagaactacgtcatgaatgcacaaggctcagtagtcgatgtgatcaactggaagaaagggtatcagcgatggaagacgaaatgaaagaaatgaagcaagaagagaagtttagagaaaaaagaataaaaagaaatgaacaaagcctccaagaaatatgggactatgtgaaaagaccaaatctacatctgattggtgtatctgaaagtgacagggagaatggaaccaagttggaaaacactctgcaggatattatccaggagaacttccccaatctagcaaggcaggccaacattcaaattcaggaaatacagaaaacgccacaaagatactcctcgagaagagcaactccaagacacataattatcagattcaccaaagttgaaatgaaggaaaaaatgttaagggcagccagagagaaagacagatcaaagagacagaaagtcaacaaggatatccaggaatcaaactcacctctgcaccaagcggacctaatagacatctacagaactctccgccccaaatcaacagaatatacattcttttcagcaccacaccacacctattccaaaattgaccacatagttggaagtaaagcactcctcagcaaatgtaaaagaacagaaattataacaaactgtctctcagaccacagtgcaatcaaactagaattcaggattaagaaactcattcaaaaccactcaactacatggaaactgaacaacctgctcctgaatgactactgggtacataacgaaatgaaggcagaaataaagatgttctttgaaaccaacgagaacaaagacacaacataccagaatctctgggacacagtcaaagcagtgtgtagagggaaatttatagcactaaatgcccacaagagaaagcaggaaagatccaaaattgacaccctaacatcacaattaaaagaactagagaagcaagagcaaacacattcaaaagctagcagaaggcaagaaataactaagatcagagcagaactcaaggaaatagagacacaaaaaacccttcaaaaaattaatgaatccaggagctggttttttgaaaagatcaacaaaattgatagaccaccagcaagactaataaagaagaaaagagagaaggatcaaatagacgcaataaaaaatgataaaggggatatcaccaccgatcccacagaaatacaaactaccatcagagaatactataaacacctctacgcaaataaaccagaaaatctagaagaaggggatgttgagcaagagttagttccttgtggttacaggactgaggctggaagtttcctagagacttcccacaattctttagagcacagggcgataatcaagtggataatcacggataagtctgttcagcgtggcatgatgtctactttctaa

SEQ ID NO: 17189 - DNA, 3099 bp, Homo sapiens; identical to SEQ ID NO: 13948
  SIMILAR (1)..(2922): 961254mologous to Homo sapiens unknown,accession number AF148856,Smith-Waterman Score=4909.

SEQ ID NO: 17190 - DNA, 3348 bp, Homo sapiens; identical to SEQ ID NO: 6075
  SIMILAR (1)..(2973): 951254mologous to Homo sapiens putative p150,accession number U93563,Smith-Waterman Score=4940.

SEQ ID NO: 17191 - DNA, 3192 bp, Homo sapiens; identical to SEQ ID NO: 14909
  SIMILAR (1)..(2961): 961254mologous to Homo sapiens putative p150,accession number U93567,Smith-Waterman Score=4958.

SEQ ID NO: 17192 - DNA, 2121 bp, Homo sapiens
  SIMILAR (205)..(1530): 671254mologous to Homo sapiens putative p150,accession number U93572,Smith-Waterman Score=1391.
atgggagactttaacaccacactgtcaacattagagagatcagcgagacagaaagttaacaaggatatccaggaattgaactcaggtctgcaccaagcagacttaatagacatctacaaaactgtcaaacccaaatcaacagaatatacattcttctcaggaccacaccgcacttattccaaaattgaccacatagttggaagtaaagcactcctcagcaaacgtaaaagaacagaaattataacaaactgtctctcagaccacagtgcaatcaaactagaactcaggattaagaaactcactcaaaaccgctcaactacatggaaactgaacaacctgttcctgaatgactactgggtacataacaaaatgaaggcagaaataaaaatgttctttgaaaccaacgagaacaaagacacaacataccagactctctgggacacatttaaagcagtgtgtagagggaaatttatagcgctaaatgcccacaagagaaagcaggaaagatccaaaattgacaccctaacatcacaattaaaagaactagagaagcaagagcaaacacattcaaaagttagcagaaggcaagaaataactaagatcagagcagaactgaaggagatagagacacaaaaaaacccttcaaaaaaatcaatgaatccaggggctgaaatacaagctaccatcagagaatactataaacacctctatgcaaataaactagaaaatctagaagaaatagataaattccttgacacatataccctcccaagactaaaccaggaagaagctgaatctctgaacagacaaataacaggctctgaaattgaggcaataattaacagcttaccaaccaaaaaaagtccaggacctgatggattcacagctgaattctaccagagggacaaggaggagctggtaccattccttctgaaactattccaatcaatagaaaaagagggaatcctccctaactcattttatgaggccagtatcatcctgataccaaagcctggcagagagacaacaaaaaaagagaattttagaccaatatccctgatgaacatcgatgcaaaaatcctcaataaaatactggcaaaccgaatccagcagcatatcaaaaagcttatccaccatgatcaagtggacttcatccctgggatgcaaggctggttcaacatatgcaaaacaataaacataatccagcatataaacagaaccaaagacaaaaaccatacgattatctcactagatgcagaaaaggcctttgacaaaattcaacaacccttcatgctaaaaactctcaataaattaggtattgatgggacgtatctcaaaataataagaactatctatgacaaacccacagccaatatcataccgaatgggcaaaaactggaagcattccctttgaaaacgggcacaagacagggatgccctctctcaacactcctattcaacatagtgttggaagttctggccagggcaatcaggcaggagaaggaaataaaggcccaaaatctccttaagctgataggcaacttcagcaaagtctcaggatacaaaatcaatgtgcaaaaatcacaagcattcttatacaccaataacagacaaacagagagccaaatcatgagtgaactcccattcacaattgcttcaaagagaataaaatacctaggaatccaacttacaagggatgtgaaggacctcttcaaggagaactacaaaccactgctcaaggaaataaaagaggatacaaataaatggaagaacattccatgctcatgggtaggaagaatcaatatcgtgaaaatggccacactgtccaaggtaatttatagattcaatgccatccccatcaagctaccaatgactttcttcgcagaattggaaaaaactactttaaagttcatatggaaccaaaaaagagcccgcatcgccaagtcaatcctaagccaaaagaacaaagctggaggcatcgagctacctgacttcaaactatactacaaggctatggccccggagtgtgatattacccttcctgtgtccatgtggaaatcatcattctcagcaaactatcgcaaggacaaaaaaccaaacactgcatgttcttactcatag

SEQ ID NO: 17193 - DNA, 4093 bp, Homo sapiens
  SIMILAR (1016)..(3937): 961254mologous to Homo sapiens putative p150,accession number U93563,Smith-Waterman Score=4906.
atggggaaaaaacagaacagaaaaactggaaactctaaaacgcagagtgcctctcctcctccaaaggaacgcagttcctcaccagcaacggaaaaaagctggatggagaatgactttgacgagctgagagaagaaggtttcagacgatcaaattactctgagctacgggaggacattcaaaccaaaggcaaagaagttgaaaactttgaaaaaaatttagaagaatgtataactagaataaccaatacagagaagtgcttaaaggagctgatggagctgaaaaccaaggctcgagaactacgtgaagaatgcagaagcctcaggagccgatgtgatcaactggaagaaagggtatcagcaatggaagatgaaatgaatgaaatgaagcgagaagggaagtttagagaaaaaagaataaaaagaaatgagcaaagcctccaagaaatatgggactatgtgaaaagaccaaatctacgtctgactggtgtacctgaaagtgacggggagaatggaaccaagttggaaaacactctgcaggatattatccaggagaacttccccaatctagcaaggcaggtcaatgttcagattcaggaaatacagagaacgccacaaagatactcctcgagaagagcaactccaagacacataattgtcagattcaccaaagttgaagtgaaggaaaaaatgttaagggcagccagagagaaaggtcgggttaccctcaaagggaagcccatcagactaacagcggatctctcggcagaaaccctacaagccagaagagagtgggggccaatattcaacattcttaaagaaaagaattttcaacccagaatttcatatccagccaaactaagcttcataagtgaaggagaaataaaacactttacagacaagcaaatgctgagagattttgtcaccaccaggcctgccctaaaagagctcctgaaggaagtgctaaacatggaaaggaacaaccagtaccagccgctgcaaaatcatgccaaaatacagatcaacgagacagaaagtcaacaaggatacccaggaattgaactcagctctgcaccaagcggacctaatagacatctacagaactctccacaccaaatcaacagaatatacatttttttcagcaccacaccacacctattccaaaattgaccacatagttggaagtaaagctctcctcagcaaatgtaaaagaacagaaattataacaaactatctctcagaccacagtgcaatcaaactagaactcaggattaagaatctcactcaaagccgctcaactacatggaaactgaacaacctgctcctgaatgactactgggtacataacgaaatgaaggcagaaatacagatgttctttgaaaccaacgagaacaaagacacaacataccagaatctctgggatgcattcaaagcagtgtgtagagggaaatttatagcactaaatgcccacaagagaaagcaggaaagatccaaaattgacaccctaacatcacaattaaaagaactagaaaagcaagagcaaacacattcaaaagctagcagaaggcaagaaataactaaaatcagagcagaagtgaaggaaatagagacacaaaaaacccttcaaaaaattaatgaatccaggagctggttttttgaaaggatcaacaaaattgatagaccgctagcaagactaataaagaaaaaaagagagaagaatcaaatagacgcaataaaaaatgttaaaggggatatcaccaccgatcccacagaaatacaaactaccatcagagaatactacaaacacctctatgcaaataaactagaaaatctagaagaaatggataaattccttgacacatacactctcccaagactaaaccaggaagaagttgaatctctgaatagaccaataacaggagctgaaattgtggcaataatcaatggtttaccaaccaaaaagagtccaggaccagatggattcacagccggattctaccagaggtacaaggaggaactggtaccattccttctgaaagtattccaatcaatagaaaaagagggaatcctccctaactcattttatgaggccagcatcattctgataccaaagccgggcagagacacaaccaaaaaagagaattttagaccaatatccttgatgaacattgatgcaaaaatcctcaataaaatactggcaaaccaaacccagcagcacatcaaaaagcttatccaccatgatcaaatgggcttcatccctgggatgcaaggctggttcaatatacgcaaatcaataaatgtaatccagcatataaacagagccaaagacaaaaaccacatgattatctcaatagatgcagaaaaagcctttgacaaacttcaacaacccttcatgctaaaaactctcagtaaattaggtattgatgggacgtatttcaaaataataagaggtatctacgacaaacccacagccaatatcatactgaatgggcaaaaactggaagcattccctttgaaaactggcacaagacagggatgccctctctcaccactcctattcaacatagtgttggaagttctggccagggcaattaggcaggagaaggaaataaagggtattcaattaggaaaagaggaagtcaaattgtccctgtttgcagacgacatgattgtatatctagaaaaccccattgtctcagcccaaaatctccttaagctgataagtaacttcagcaaagtctcaggatacaaaatcaatgtacaaaaatcacaagcattcttatacaccaacaacagacaaacagagagccaaatcatgagtgaactcccattcacaattgcttcaaagagaataaaatacctaggaacccaacttacaagggatgtgaaggacctcttcaaggagaactacaaagcactgctcaaggaaataaaagaggatacaaaaaaatggaagaacattccatgctcatgggtaggaagaatcaatatcgtgaaaatggccatactgcccaaggtaatttacagattcaatgccatccccatcaagctaccaatgactttcttcacagaattggaaaaaactactttaaagttcatatggaaccaaaaaagagcccgcatcgccaagtcaatcctaagccaaaagaacaaagctggaggcatcacactacctgacttcaaactatactacaaggctacagtaaccaaaacagcatggtactggtaccaaaacagagatatagatcaatggaacagaatagagccctcagaaataacgccgcatacctacaactatctgatctttgacaaacctgagaaaaacaagcaatggggaaaggattccctatttaataaatggtgctgggaaaactggctagccatatgtagaaaactgaaactggatcccttccttacaccttatacaaaaatcaattcaagatggattaaagatttaaacgttagacctaaaaccataaaaaccctagaagaaaacctaggcattaccattcaggacataggcgtgggcaaggacttcatgtccaaaacaccaaaagcaatggcaacaaaagccaaaattggcaaatggtacctaattaaactaaagagcttctgcacagcaaaagaaactaccatcagagtgaacaggcaacctacaacatgggagaaaattttcgcaacgtactcatctgacaaagggctaatatccagaatctacaatgaactcaaacaaatttacaagaaaaaaacaaacaaccccatcaaaaagtgggcgaaggacatgaacagacacttctcaaaagaagacatttatgcagccaaaaaatacgtgaaaaaatgctcatcatcactggccatcagagaaatgcaaatcaaaaccactatgagataccatctcacaccagttagaatggcaatcattaaaaagtcaggaaacaacagtgatctctaccttatgtctgcaggaaccagttgtttaatgggcagacactgggacagtggacaagaaacgtgtgtccaaaatgtcgtgctggacacgtgcagcccctctgaacaactcttaagagctattgctgatcttgtcccgcaaccctga

SEQ ID NO: 17194 - DNA, 2762 bp, Homo sapiens
  SIMILAR (1449)..(2759): 961254mologous to Homo sapiens putative p150,accession number U93563,Smith-Waterman Score=2318.
ccaacacaataataatgggagactttaacaccccactgtcaacattagacagatcaacgagacagaaagttaacaagaatatccaggacttgaactcagctctgcaccaagcggacctaatagacatctacagaactctccaccccaaatcaacagaatatacattctcctcagcaccacaccgcacctattccaaaattgaccacatagttggaagtacaacactcctcagcaaatgtaaaagaacagaaattacaacaaactatctctcagaccacagtgcaatcaaacaagaactcaggattaagaaactcactcaaaaccgctcaactacatggaaactgaacaacctgctcctgaatgactactgggtaaataacgaaatgaaggcagaaataaagatgttctttgaaaccaacgagaacaaagacacaacataccagaatctctgggacacatttaaagcagtgtgtggagggaaatttatagcactaaatgcccacaagacaaagcaggaaagatctaaaatggacaccctaacatcacaattaaaagaactagagaagcaagagcaaacacattcaaaagctcgcagaaggcaagaaataactaagatcagagcagaactgaaggagatagagacacaaaaaaaccttcaaaaaatcaatgaatctaggagctggttttctgaaaagatcaacaaaattgatagactgctagcaagactaataaagaagaaaagagagaagaatcaaatagacacaataaaaaatgataaaggggatatcaccaccgatcccacagaaatacaaactaccatgagagaatactacaaacacctctacacaaataaactagaaaatccagaagaaatggataaattcctcgatacatacaccctcccaagactaaaccaggaagaagctgaatctctgaatagaccaataacaggctctgaaattgaggcaataattaatagcttaccaaccaaaaaaggtccaggaccagatgaattcacagccaaattctaccagaggtacaaggaggagctggtaacattccttctgaaactattccaatcaatagaaaaagagggaatcctccctaactcattttatgaggccagcattatcctgacaccaaagcctggcagagacacaacaaaaaaagagaattttagaccaatatccttgatgaacattgatgcaaaaatcctcaataaaatactggcaaaacgaatccagcagcacatcaaaaagcttatccaccatgatcaagtgggcttcatccctgggatgcaaggctggttcaatatacgcaaatcaataaatgtaatccagcatataaacagagccaaagacaaaaaccacatgattatctcaatagatgcagaaaaagcctttgacaaaattcaacaacccttcatgctaaaaactctcaataaattagaattggaagaaactactgtaaagttcatatggaaccaaaaaagagcccacatcgccaagtcaatcctaagccaaaagaacaaagctggaggcatcacactacgtgacttcaaactatactacaaggctacagtaaccaaaacagcatggtactggtaccaaaacagagatatagatcaatggaacagaacagagccctcagaaataacgctgcatatctacaactatctgatctttgacaaacctgagaaaaacaagcaatggggaacggattccctatttaataaatggtgctgggaaaactggctagccatatgtagaaagctgaaactggatcccttccttacaccttatacaaaaatcaattcaagatggattaaagacttaaacgttagacctaaaaccataaaaaccctagaagaaaacctaggcattaccattcaggacataggcatgggcaaggacttcatgtctaaaacaccaaaagcaatggcaacaaaagccaaaattgacaaatgggatctaattaaactaaagagcttctgcacagcaaaagaaactaccatcagagtgaacaggcaacctacaaaatgggagaaaattttcacaacctactcatctgacaaagggctaatatccagaatctacaatgaactcaaacaaatttacaagaaaaaaacaaacaaccccatcaaaaagtgggcaaaggacatgaacagacacttctcagaagaagacatttatgcagccaaaaaacacatgaaaaaatgctcatcatcactggccatcagagaaatgcaaatcaaaaccacaatgagataccatctcacaccagttagaatggcaatcattaaaaagtcaggaaacaacaggtgctggagaggatgtggagaaatacgaacacttttacattgttggtgggactgtaaactagttcaaccattgtggaagtcagtgtggcgattcctcagggatctagaactagaaataccatttgacccagccatcccattactgggtatatacccaaatgactataaatcatgctgctataaagacacatgcacacgtatgtttattgcggcattattcacaatagcaaagacttggaaccaacccaaatgtccaacaatgatagactggattaagaaaatgtggcacatatacaccatggaatactatgcagccataaaaaatgatgagttcatgtcctttgtagggacatggatgaaattggaaatcatcattctcagtaaactatcacaagaacaaaaaaccaaacaccgcatattctcactcataggtgggaattga

SEQ ID NO: 17195 - DNA, 3049 bp, Homo sapiens
  SIMILAR (1609)..(3048): 971254mologous to Homo sapiens putative p150,accession number U93563,Smith-Waterman Score=2534.
atgactgtaaaagttaggataacggttacctctgggaagaagcctccgtggctgatacccaggcaaacagggtatggagtggacctctggcaaactccaacagacctgcagctgagggtcctgactgttagaaggaaaactaacaaacagaaaggacatccacaccaaaaccccatctgtacatcaccatcatcaaagaccaaagacagatcaacgagacagaaagttaacaaggatatccaggaattgaactcagctctgcaccaagaagacctaatagacatctacagaactctccaccccaaatcaacagaatatacatttttttcagcaccacaccacacctattccaaaattgaccacatagttggaagtaaagcactcctcagcaaatggaaaagaacagaaattacagcaaactgtctctcagaccacagtgcaatcaaactagaactcagaattaagaaactcactcaaaactggtcagctacatggaaactgaacaacctgctcctgaatgactgctgggtacataaggaaatgaaagcagaaataaagatgttctttgaaaccaaaagagaacaaaggacacaacataccagaatctctgggacgcattcaaagccagtgtgtagagggaaatttatagcactaaatgcgcacaagagaaagcaggaaagatctaaaattgacaccctaacatcacaattaaaagaactagaaaagcaagagcaaacacattcaaaagctagcagaaggcaagaaataactaaaatcagagcagaactgaaggaaatagagacacaaaaaacccttcaaaaaatcaatgaatccaggagctggttttttgaaaggatcaacaaaattgatagaccgctagcaagactaataaagaaaaaaagagagaagaatcaaatagacacaataaaaaatgataaaggggatatcaccactgatcccacagaaatacaaactaccatcagagaatactacaaacacctctacgcaaataaactagaaaatctagaacaaatggatgcattcctcgacacatacactctcccaagactaaaccaggaagaagttgagtctctgaatagaccaataacaggagctgaaattgtggcaataatcaatagtttaccaaccaaaaagagtccaggaccagatggattcacagccgaattctcccagaggtacaaggaggaactggtaccattccttctgaaactattccaatcaatagaaaaagagggaatcctccctaactcattttatgaggccagcatcattctgataccaaagccaggcagagacacaaccaaaaaagagaattttagaccaatatccttgatgaacatcgatgcaaaaatcctcaataaaatactggcaaaccgaatccagcagcacatcaaaaagcttatccaccatgatcaagtgggcgtcatccctgggatgcaaggctggttcagtatacgcaaatcaataaatgtaatccagcatataaacagagccaaagacaaaaaccatatgattatctcaatagatgcagaaaaagcctttgacaaaattcaacaacccttcatgctaaaaactctcaataaattagcccaaaatctccttaagctgataagcaacttcagcaaagtctcaggatacaaaatcaatgtacaaaaatcacaagcattcctatacaccaacaacagacaaacagagagccaaatcatgagtgaactcccattcacaattgcttcaaagagaataaaatacctaggaatccaacttacaagggatgtgaaggacctcttcaaggagaactacaaaccactgctcaaggaaataaaagaggatacaaacaaatggaagaacattccatgctcatgggtaggaagaatcaatatcgtgaaaatggccatactgccccaggtaatttacagattcaatgccatccccatcaagctaccaatgactttcttcacagaattggaaaaaactactttcaagttcatatggaaccaaaaaagagcccgcatcgccaagtcaatcctaagccaaaagaacaaagctggaggcatcacactacctgacttcaaactatactacaaggctacagtaaccaaaacagcatggtactggtaccaaaacagagatatagatcaatggaacagaacagagccctcagaaataacgccgcttacctacaactatctgatctttgacaaacctgacaaaaacaagcaatggggaaaggattccctatttaataaatggtgctgggaaaactggctagccatatgtagaaagctgaaactggatcccttccttatgccttatacaaaaattaattcaagatggattaaagatttaaacattagacctaaaaccataaaaaccctagaagaaaacctaggcattaccattcaggacataggcatgggcaaggacttcatgtccaaaacaccaaaagcaatggcaacaaaagccaaaattgacaaatgggatctaattaaactaaagagcttctgcacagcaaaagaaactaccatcagagtgaacaggcaacctacaacatgggagaaaattttcgcaacctactcatctgacaaagggctaatagccagaatctacaatgaactcaaacaaatttacaagaaaaaaacaaacaaccccatcaaaaagtgggcgaaggacatgaacagacacttctcaaaagaagacatttatgcagccaaaaaacacatgaagaaatgctcatcatcactggccatcagagaaatgcaaatcaaaaccactatgagatatcatctcacaccagttagaatggcaatcatgaaaaagtcaggaaacaacaggtgctggagaggatgtggagaaataggaacacttttacactgttggtgggactgtaaactagttcaaccattgtggaagtcagtgtggcgattcctcagggatctagaactagaaataccatttgacccagccatcccattactgggtatatacccaaaggactataaatcatgctgctataaagatacatgcacac

SEQ ID NO: 17196 - DNA, 4101 bp, Homo sapiens
  SIMILAR (2114)..(3232): 871254mologous to Homo sapiens putative p150,accession number U93568,Smith-Waterman Score=1633.
ccccactgtcaacattagacagatcaacgagacagaaagttaacaaggatatccaggaattgaactcagctctgcaccaagtggacctaatagatatctacagaactctccaccccaaatcaacagaatatacattcttttcagtaccacaccacaactattccaaaattgaccacatagttggaagtaaagcactcctcagcaaatgtaaaagaacagaaattataacaaactgtctctcagactacaatgcaatcaaactagaactcaggactgagaaactcactcaaaaccgctcaactacatggaaactgaacaacccgctcctgaatgactactgggtacataaggaaatgaaggcagaaataaagatgttctttgaaaccaacgagaacaaagacacaacataccagaatctctgggacgcattcaaagcagtgtgtagagggaaatttatagcactaaatgcccacaagagaaagcaggaaagatctaaaattgacaccctaacatcacaattaaaagaactagagaagcaagagcaaacacattcaaaagctactagaaggcaagaaataactaagaccagagcagaactgaagaagatagagacacaaaaaacccttcaaaaaatcaatgaatccaggagctggttttttgaaaagaccaacaaaattgatagactactggcaacactaataaagaagaaaagagagaagaatcaaataggtgcaagaaaaaatgatgaaggggctatcaccaccaatcccacagaaatacaaactactatcagagaatactataaacacctctacacaaataaactagaaaatctagaagaaatggataaattccttgacacatacaccctcccaagaccaaaccaggaagaagttgaattgctgactagtccaataagaggctctgaaattgaggcaataattaatagcttaccaaccaaaaaaaagtccaggaccagatggttacacagccgaattctaccagaggtacaaggaggaactggtaccattccttctgacagggcaatcaggcaggagaaggaaataaaaggcattcaattaggaaaagaggaagtcaaattgtccccgtttgcagatgacatgattgtatatctagaaaaccccatcgtctcagcccaaaatctccttaagctgataagcaacttcagcaaagtctcaggatacaaaatcaatgtgcaaaaatcacaagcattcttatacagcaataaaagacaaacagagaaccaaatcatgagtgaactcccattcacaattgcttcaaagagaataaaatacctaggaatccaacttacaagggatgtgaaggacctcttcaaggagaactacaaaccactgctcaatgaaataaaagaggataaaaacaaatggaagaacattccatgctcacgggtaggaagaatcaatatcgtgaaaatggccatactgcccaaggtaatttatagattcaagtttccattgacaacagatcaagaaaatgtggtcagattaacgagacagaaagttaacaagggtatccaggaattgaactcagctctgccccgagtggacctaatagacatctacagaactctccagcccaaatcaacagaatatacattcttttcagtaccacaccacaactattccaaaattgaccacatagttggaagtaaagcactcctcagcaaatgtaaaagaacagaaattataacaaactgtctctcagaccacagtgcaatcaaactagaactcaggattaagaagcacactcaaaaccgctcaactacatggaaactgaacaacctgctcctgaatgactactgggtacataacaaaatgaaggcagaaataaagatgttctttgaaaccaatgagaacaaagacacaacataccaaaatctctgggacacattcaaagcagtatgtagagggaaatttatagcactaaatgcccacaagagaaagcaggaaagatctaaaattgacaccctaacatcacaattaaaagaactagaaaagcaagagcaaacacattcaaaagctagcagaaggcaacaaataactaagatcagagcagaactgaaggaaatagagacacaaaaaaacccttcaaaaaaatcaatgaatccaggagctggttttttgaaaggatcaacaaaattgatagaccactagcaagactaataaagaaaaaaagagagaagaatcaaatagatgcaataaaaaatgataaaggggatatcaccactgatcccacagaaatacaaactaccatcagagaatactacaaacacctctacgcaaataaactagaaaatctagaagaaatggataaattcctgcacacatacactctcccaagactaaaccaggaagaagttgaatctctgaatagaccaataacaggatctgaaattgtggcaataatcaatagcttaccaaccaaaaagagtccaggaccagatggattcacagccgaattcgaccagaggtacaaggaggaactggtaccattccttctgaaactattccaatcaatagaaaaagagggaatcctccctaactcattttatgaggccagcatcatcctgatacgaaagcctggcagagacacaaccaaaaaagagaattttagaccaatatccttgatgaacactgatgcaaaaatcctcaataaaatactggcaaaacgaatccagcagcacatcaaaaagcttatccaccatgatcaagtgggcttcatccctgggatgcaaggctggttcaatatacacaaatcaataaatgtaatccagcatataaacagagccaaagacaaaaaccacatgattatctccatagatgcagaaaaggcctttgacaaaattcaacaacccttcatgctaaaaactctcagtaaattaggtattgacgggacatatttcaaaataataagagctatctatgacaaacccacagccaatatcatactgaatgggcaaaaactggaagcattccctttgaaaactggcacaagacagggatgccctctctcaccactcctattcaacatagtgttggaagttctggccagggcaattaggcaggagaaggaaataaagctgataagcaacttcagcaaagtctcaggatacaaaatcaatgtacaaaaatcacaagcattcttatacaccaacaacagacaaacagagagccaaatcatgagtcaactcccattcacaattgcttcaaagagaataaaatacctaggaatccaacttacaagggatgtgaaggacctcttcaaggagaactacaaaccactgctcaaggaaataaaagaggatacaaacaaatggaagaacattccatgctcatgggtaggaagaatcaatatcatgaaaatggccatactgcccaaggtaatttacagattcaatgccatccccatcaagctaccaatgactttcttcacagaattggaaaaaactactttcaagttcatatggaaccaaaaaagagcccgcatcaccaagtcaatcctaagccaaaagaacaaagctggaggcatcacgctacctgacttcaaactatactacaaggctacagtaaccaaaacagcatggtactggtaccaaaacagagatatagatcaatggaacagaacagagccctcagaaataatgctgcatatctacaactatctgatctttgacaaacctgagaaaaacaagcaatggggaaaggattccctatttaataaatgggtgctgggaaaactgggctagccatatgtagaaagctgaaactggatcccttccttacaccttatacaaaaatcaattcaagatggattaaagatttaaacgttagacctaaaaccataaaaaccctagaagaaaacctaggcattaccattcaggacataggcataggcaaggacttcatgtccaaaacaccaaaagcaatggcaacaaaagccaaaattgacaaatgggatctaattaaactaaagagcttctgcacagcaaaagaaactaccatcagagtgaacagaaaacctacagagaggggagaaaattttcgcaacctactcatctga

SEQ ID NO: 17197 - DNA, 3237 bp, Homo sapiens
  SIMILAR (2335)..(3225): 941254mologous to Homo sapiens putative p150,accession number U93564,Smith-Waterman Score=1504.
atggctaacaagaataaccaatgcagggaagtccttaaaggacctgatgagctgaaaaccatggcacgagaaccacatgacaaatgcacaagcttcagtagccaatttgatcaactggaagaaagggtatcagcgatggaagatcaaatgaatgaaatgaagcgagaagagaagtttagagaaaaaagaataaaaagaaatgaacaaaggctccaagaaatatgggactatgtgaaaagaccaaatctatgtctgattggtgtacctgaaagtgatggggagaatggaaccaagttggaaaacactctgcaggatattatccaggagaacttccccaacctagcaaggcaggccaacattcaaattcaggaaatacagagaatgccacaaagatactccttgagaagaacaactccaagacacataattgtcagattcaccaaagttgaaatgaaggaaaaaatgttaagggcagccagagagaaaggtcgggttacccacaaagggaagcccatcagactaacagctgatctctcggcagaaactctacaagccagaagagaatcaacaagacagaaagttaacaaagatatccaggaattgaactcagctcagcatcaagcagacctaacagacaactacagaactctccaccccaaatcaacagaatatacactcttctcagcaccacatcacacttattccaaaattgaccacatagttggaagtaaagcactcctcagcaaatgtaaaagaacagaaattataacaaactgtctctcagaccacagtgcaatcaaactagaactgaggattaagaaactcactcaaaacctctcaactacatggaaactgaacaacctgctcctgaatgactactgggtacataacgaaatgaaggcagaaataaagatgctctttgaaaccaatgagaacaaagacacaacataccagaatctctgggacacatttaaagcagtgtgtagagggaaatatatagcactaaatgcacacaagagaaagcaggaaagatctaaaattgacaccctaacgtcacaattaaaagaactagaaaagcaagagcaatcgcattcaaaagctagcagaaggcaagaaataactaagatcagagcagaactgaaggagatagagacacaaaaaactcttcaaaaaaaatcaatgaatccaggagctggatttttgaaaagatcaacaaaattgatagaccactagcaaaactaataaagaagaaaagagagaagaatcaaatagatgcaataaaaaatgacaaaggagatatcatcactgatcccacagaaatccagactactatcagagaatactataaacatctctacacaaataaactagaaaatctagaagaaatggataaattcctcaacacatacaccctcccaagactaaaccaggaagaaattgaatctctgaatagaccaataacaggctctgaaattgaagcaataattaatagcttaccaaccaaaaaaagtccaggaccagatggattcacagccgaattctaccagaggtacaagaaggagctgcatataaacagaaccaaagacaaaaaccacattattatctcaatagatgcagaaaaggcctttgacaaaattcaacaacccttcatgctaaaaactctcaataatttaggtattgatgggacatatctcaaaataataagagctatctatgacaaacccacagccaatatcatactgaatggacaaaaactggaagcattccctttgaaaactggcacaagacagggatgccctctctcaccactcctattcaacatagtgttggaagttctggccagggcaatcaggcaggagaaggaaataaagggcattcaattaggaaaagaggaagtcaaattgtccttgtttgcagatgacatgattgtatatctagaaaaccccatcgtctcagcccaaaatctccttaagctgataagcaacttcagcaaagtctcaggatacaaaatcaatgtgcaaaaatcacaagcattcttatacatcaacaacagacaaacagagagccaaatcatgagtgaactcccattcacaattgcttcaaagagaataaaatacctaggaatccaacttacaagggatgtgaaggacctcttcaaggagaactacaaaccactgctcaaggaaataaaagaggatacaaacaaatggaagaacattccacgctcatgggtaggaagaatcaatatcgtgaaaatggccatactgcccaaggtaatttacagattcaatgccatccccatcaagctaccaatgcctttcttcacagaaatggaaaaaaactactttaaagttcatatggaaccaaaaaagagcccgcatcgccaagtcaatcctaagccaaaaggacaaagctggaagcatcacactacctgacttcaaactatactacaaggctacagtaacccaaacagcatggtactggtaccaaaacagagatatagatcaatggaacagaacagagccctcagaaataacgctgcatacctacaactatctgatctttgacaaacctgagaaaaacaagcaatggggaaaggattccctatttaataaatggtgctgggaaaactggctagccatatgtagaaagctgaaactggatcccttccttacaccttatacaaaaatcaattcaagatggattaaagatttaaacgttagacctaaaaccataaaaaccctagaagaaaacctaggcattaccattcaggacataggcgtgggcaaggacttcatgtccaaaacaccaaaagcaatggcaacagaagccaaaattgacaaatgggatctaattaaactaaagagcttctgcacagcaaaagaaactaccatcagagtgaacaggcaacctacaacatgggagaaaattttcgcaacctactcatctgacaaagggctaatatccagaatctacaatgaactcaaacaaatttacaagaaaaaaacaaacaaccccatcaaaaagtgggcgaaggacatgaacagacacttctcaaaagaagacatttatgcagccaaaaaatacatgaaaaaatgctcatcatcactggccatcagagaaatgcaaatcaaaaccactatgagataccatctcacaccagttagaatggcaatcattaaaaagtcaggaaacaacagggacatggatgaaattggaaaccttcattctcagtaa

SEQ ID NO: 17198 - DNA, 3393 bp, Homo sapiens
  SIMILAR (1312)..(3120): 941254mologous to Homo sapiens putative p150,accession number U93574,Smith-Waterman Score=3006.
atgctaacccttaaccacaacagactcacagatgccattctgaacatctctacctgcctgtcaaggcatcttgaccttaatacagggggaaagaagagaatcagctacaaaagaaattacctcatggaggagcatcttgaaggactatgttctaatgaattcacctgggaaaattctactattatgactgatagtcaaatgttaatgcatagagaagaacctggaagcttaccaaatattcctattttaagtatcgtcttcaccaacaacagatcaaagagacagaaagttaacaaggatatccaggaactgaactcagctctgcaccaagcagacctaatagacatctacagaactctccaccccaaatcaacagaatatacgttcttttcagcaccacaccacacctattccaaaactgaccgcatagttggaagtaaagcactcctcagcaaatgtaaaagaacagaaattataacaaactgtctctcagaccacagtgcaatcaaactagaactcaggattaagaaactcactcaaaactgctcaactacatggaaactgaacaacctgctcctgaatgactactgggtacataacgaaatgaaggcagaaataaagatgttctttgaaaccaatgagaacaaggatacaacataccagaatctctgggacacattcaaagcagtgtgtagagggaaatttatagcactaaatgcccacaagagaaagcaggaaagatctaaaattgacaccctaacatcacaattaaaagaactagagaagcaagagcaaacacattcaaaagctagcagaaggcaagaaataactaagatcagagcagaactgaaggaaatagagacacaaaaaagcccttcaaaaaatcaatgaatccaggagctggttttttgaaacgatcaacaaaattgatagaccgctagcaagactaataaagaaaaaaagagagaagaatcaaatagacgcaataaaaaatgataaaggggatatcaccaccgatcccacagaaatacaaactaccatcagagaatactacaaacacctctacgcaaataaactagaaaatctagaagaaatggataaattcctcgacacatacactctcccaagactaaaccaggaagaagttgaatctctgaatagaccaataacaggagctgaaattgtggcaataatcaatagtttaccaaccaaaaagagtccaggaccagatggattcacagccgaattctaccagaggtacaaggaggaactgcatcattctgataccaaagccgggcagagacacaaccaaaaaaagagaattttagaccaatatccttcatgaacattgatgcaaaaatcctcaataaaatactggcaaaccaaatccagcagcacatcaaaaagcttatccaccatgatcaagtgggcttcatccctgggatgcaaggctggttcaacatacgcaaatcaataaatgtaatccagcatacaaacagaaccaaagacaaaaaccacatgattatctcaatagatgcagaaaaggcctttgacaaaattcgacaacccttcatgctaaaaactctcaagaaattaggtattgatgggacgtatctcaaaataataagagctatctatgacagacccacagccaatatcatactgaatgggcaaaaactggaagcattccctttgaaaatgggcacaagacagggatgccctctctcaccactcctattcaacatagtgttggaagttctggccagggcaatcaggcaggagaaggaaataaagtgtattcaattaggaaaagagaaagtcaaatcgtccctgtttgcagatgacatgactgtatatctagaaaaccccatcatctcagcccaaaatctccttaaggtgataagcaacttcagcaaggtctcaggatacaaaatcaatgtacaaaaatcacaaccattcttatacaccaataacagacaaacagagagccaaatcatgagtgaactcccattcacaattgcttcaaagagaataaaatacctaggaatccaacttacaagggatgtgaaggacctcttcagggagaactacaaaccactgctcaaggaaataaaagaggatacaaacaaatggaagaacattccacgctcatgggtaggaagaatcaatatggtgaaaatggccatactgcccaaggtaatttacagattcaatgccatccccatcaagctaccaatgactttcttcacagaattggaaaaaactactttaaagttcatatggaaccaaaaaagagcccgcatcaccaagtcaatcctaagccaaaagaacaaagctggaggcatcacactacctgacttcaaactatactacaagattacagtaaccaaaacagcatggtactggtaccaaaacagagatatagatcaatggaacagaacagagccctcagaaataatgccgcatacctacaactatctgatctttgacaaacctgagaaaaacaagcaatggggaaaggattccctatttaataaatggtgctgggaaaactggctagccatatgtaggaagctgaaactggatcccttccttacaccttatacaaaaatcaattcaagatggattaaagatttaaacgttagacctaaaaccataaaaaccctagaagaaaacctaggcatgacctttcaggacataggcatgggcaaggacttcatgtccaaaacaccaaaagcaatggcaacaaaagccaaaatagacaaatgggatctaattaaactaaagagcttctgcacagcaaaagaaactaccatcagagtgaacaggcagcctacaaaatgggagaaaattttcgcaacctactcatctgacaaagggctaatatccagaatctacaatgaactcaaacaaatttacaagaaaaaaacaaacaaccccatcaaaaagtgggcgaaggacatgaacagacacttctcaaaagaagacatttatgcagccaaaaaacacatgaaaaaatgctcatcatcactggccatcagagaaatgcaaatcaaaaccacaatgagataccatctcacactagttagaatggcaatcattaaaaagtcaggaaacaacagcaaagcccggatgatctcagcagagaactgctctcctaaactcactgagaaaatagaactctcagattggaattctccaaatattcaaacctgcacggatcctctctttttgtgtcctactgagagagctgtaacactcactgtgaaggtctgtggcttcactcctgaagtcattgagaccacgaacccaccaggaggaacaaacaactccggacgtgacacccttaagagctgtaacactcactgcgaaggtctgcggcttcactcctga

SEQ ID NO: 17199 - DNA, 2427 bp, Homo sapiens
  SIMILAR (1249)..(2424): 831254mologous to Homo sapiens putative p150,accession number U93572,Smith-Waterman Score=1644.
atggagaatggctttgacgagttgagagaagaaggcttcagacgatcaaactactccgagctacaggaggaaattcaaaccaaaggcaaagaagttaaaaacattgaaaaaaatttagatgaatgtataactagaatacccaatacagagaagtgcttaaagaagctgatggagctgaaaaccaaggctcgagaactacgtgaagaatgcataagcctcaggagccgatgcgaccaactggaagaaagcgtatcagtgatggaagatgaaatgcatgaaatgaagcgagaagggaagtttagagaaaaaagaataaaaagaaatgaacaaagcctccaagaaatatgggactatgtgaaaagaccaaatctacgtctgattggtgtacctgaagacagatcaatgagacagaaagttaacaaggatacccaggaattgaactcagctctgcaccaagcggacctaatagacatctacagaactctccaccccaaatcaacagaatatacatttttttcagcacccacaccacacctattccaaaattgaccacatacttggaagtaaagcactcctcagcaaatgtaaaagaacagaaattataacaaactgtctctcagaccacagtgcaatcaaactagaactcaggattaggaaactcactcaaaactgctcaactacatggaaactgaacaacctgctactgaatgactactgggtacataatgaaatgaagacagaaataaagatattctttgaaaccaacaagaacaaagacacaacataccagaatctctgggacacattcaaagcagtgtgtagagggaaatttatagcactaaatgcccacaagagaaagcacgaaagatctaaaatcgataccctaacattacaattaaaagaactagagaagaaagagcaaacaaattcaaaagctagcagaagacaagaaataactaagatcagagcagaactgaaggagatagagacacgaaaaacccttcaaaaaaaatcaacgaatccaggagcttgctttttgagaagatcaacaaaatagacagactgctagccagactaataaagaagaaaggagagaagaatcaaatagaagcaataaaaaatgataaaggggatatcaccaccaatcccacagaaatacaaactaccatcagagaatactataaacacctctacgcaaataaactagaaaatctagaagaaatggataaattcctggacacatacaccctcccaagactaaaccaggaagaagttgaatctctgaatagaccaataacaggctctgaaatcgaggcaataattaatagcttaccaaccaaaaaaagtccaggaccagatggattcacagccgaattctaccagaggtacaaggaggagctgcttatccaccatgaacaagtgggcttcatccctgggatgcaaggctggttcaacgtacacaaatcagtaaacgtaatccagcatataaacagaaccaaagacaaaaaccacatgactatctcaatagatgcagaaaaggcctttgacaaaattcaacaatgcttcatgctaaaaactctcaataaattaggtattgatgggatgtatctcaaaataataagagctatctgtgacaaacccacagccaatatcatactgaatggacaaaaactggaagcattccctttgaaaactggcacaagacagggatgccctctctcaccactcctattcaacatagtgttggaagttctggccagggcaatccggcaggagaaggaaataaagggcattcaatcaggaaaagaggaactcaaattgtccctgtttgcagatgacatgattgtatatctagaaaaccccatcatctcagcccaaaatctccttaagctgataagcaacttcagcaaagtctcaggatacaaaatcaatgtgcaaaaatcacaagcattcctatacaccaagaacagacaaacagagagccaaatcatgagtgaactcccattcacaattgcttcaaagagaataaaagacctaggaatccaacttacaagggacttgaaggacctcctcaaggagaactacaaaccacttctcaatgaaatgaaagaggacacaaacaaatggaagaacattccatgctcatgggtaggaagaatcaatatcgtgaaaatagccatactgcccaaggtaatttatagattcaatgccatccccatcaagctaccaatgattttcttcacagaattggaaaaaactactttaaagttcatatggaaccaaaaaagagcccacattgccaagtcaatcctaagccaaaagaacaaagctggaggcatcacgctacctgacttcaaactatactacaaggctacagtaaccaagacagcatggtactggtaccaaaacagacatatagacaaatga

SEQ ID NO: 17200 - DNA, 4260 bp, Homo sapiens
  SIMILAR (2062)..(4059): 921254mologous to Homo sapiens putative p150,accession number U93569,Smith-Waterman Score=3164.
atgataatgggagactttaacaccccactgtcaacattagacagatcaacgagacagaaagttaacaaggatatccaggaattgaactcagctctgcaccaagcggacctaatagacatctacagaactctccaccccaaatcaacagaatataccttcttctcagcatcacacctcacttattccaaaattgaccacatagttggaagtaaagcactcctcagcaattgtaaaagaacagaaattataacaaactatctctcagaccacagtgcaatcaaactagaactcaagattaagaaactgactccaaaccgctcaactacatggaaactgaacaacctgctcctgaatgactactgggtacataacgaaatgaaggcagaaataaagatgttctttgaaaccaacgagaacaaagacacaacataccagaatctctgggacacattcaaagcagagtgtagagggaaatttatagcactaaatgcccacaaaagaaagcaggaaagatctaaaattgacaccctaacatcacaattaaaagaactagagaagcaagagcaaacacattcaaaagctagcagaaggcaagaaataactaagatcagagcagaactgaaggaaatggagacacaaaaaaacccttcaaaaaaatcaatgaatccaggggctgaaatacaaactaccatcagagaatactataagcacctctacgcaaataaactagaaaatctagaagaaatggatacattcctcgacacatacaccctcccaagactaaaccaggaagaagttgaatctccgaatagaccaataacaggctctgaaattgaggcaataattaatagcttaccaaccaaaaaaagtccaggaccagatggattcacagccaaattctaccagaggtacaaggaggagctggtaccattccttctgaaactattccaatcaatagaaaaagagggaatcctccctaactcattttatgaggccagcatcatcctgataccaaagcctggcagagacacaacaaaaaaagagaatttcagaccaatatccctgatgaacatcgatgcaaaaatcctcaataaaatactggcaaaccgaatccagcagcacatcaaaaagcttatccaccatgatcaagtgggcttcatccctgggatgcaaggctggttcaacatacgcaaatcaataaacataatccagcatataaacagaaccaacaacaaaaaccatatgattatctcaatagatgcagaaaaggcctttgacaaaattcaacaacccttgatgctaaaaactctcaataaattaggtattgatgggacgtatttcaaaataataagagctatctatgacaaacccacagccaatatcatactgaatgggcaaaaactggaagcattccctctgaaaactggcacaagacagggatgccctctctcagcactcctattcaacatagtgttggaagttctggccagggcaattaggcaggagaaggaaataaaaggtattcaattaggaaaagaggaagtcaaattgtccctgtttgcagacgacatgattgtatatctagaaaaccccattgtctcagcccaaaatctccttaagctgataagcaatttcagcaaagtctcaggatacaaaatcaatgtgcaaaaatcacaagcattcttatacaccaacaacagacaaacagagagccaaatcatgagtgaactcccattcacaattgcttcaaagagaataaaatacctaggaatccaacttacaagggatgtgaaggacctcttcaaggagaactacaaaccactgctcaaggaaataaaagaggatacaaacaaatggaagaacattccatgctcatgggtaggaagaatcaataagcctccgctgctgatacccaggcaaacagggtctggagtggacctccagcaaactccaacagacctgcagctgagggtcctgactgctacaaggaaaactaaccaacagaaaggacatccacaccaaaaccccatctgtacatcaccatcatcaaagaccaaaggcagatcaacaagacagaaagttaacaaggatatccaggaattcaactcagctctgccccaagtggacctaatagatatctacagaactctccaccccaaatcaacagaaaatacattcttctcagcaccacaccacacttattccaaaattgatcacatagttggaagtaaagcactcctcagcagatgtaaaagaacagaaattataacaaactgtctctcagaccacagtgcaatcaaattagaactcaggattaagaaactcactcaaaactgctcaactacatggaaactgaacaacctgcttctgaatgacaactgggtacataacgaaatgaaggcagaaataaagatgttctttgaaaccaatgcgaacaaaaacacaacataccagaatctctgggacacatttaaagcattgtgtagagggaaatttatagcactaaatgcccacaagagacagcaggaaagatctaaaactgacaccctaacatcacaattaaaagaactagagaagcaagagcaatcacattcaaaagctagcagaaggcaagaaataactaagatcagagcagaactgaaggagatagggacacaaaaaatccttcaaaaaatcaatgaatccaggagctggttttttgaaaagatcaacaaaattgatagactgctagcaagactaataaagaagaaaagagagaagaatcaaacagatgcaataaaaaatgataaaggggatatcaccactgatcccacagaaatacaaactgccatcagcgaatactataaacacctctacgcaaataaactggaaaatctagaagaaatggataaattcctcgacacctacaccctcccaagactaaaccaggaagaagttgaatctctgaatagaccaataacaggctctgaaattgaggcaataattaatagcttaccaaccaaaaaaagtccaggaccagatggattcatggccgaattctaccagagggacaaggaggagctggtaccattccttctgaaactgttccaatcaatagaaaaagagggaatcctccctaactcattttatgaggccagcatcatgctgataccaaagcctggcagagacacaacaaaaaaagagaattttagaccaatatccctgatgaacatcgatgcaaaaatcctcaataaaatactggcaaaccgaatccagcagcacatcaaaaagcttatccaccatgatcaagtgggcttcatccctgggatgcaaggctggttcaacttacgcaaatcactaaacgtaatccagcatataaacagaaccaatgacaaaaaccacatgattatctcaatagatgcagaaaaggcctttgacaaaattcaacagcccttcatgctaaaaactctcaataaattaggtattgatgggatgtatctcaaaataataagagctatctatgacagacccacagccaatatcatactgaatgggcaaaaactggaagcattccctttgaaaactggcacaagacagggatgccctctctcaccactcctattcaatatagtgttggaagttctggccagggcaatcaggcaggagaaggaaataaagggtattcaattaggaaaagaggaagtcaaattgtccctgtttgcagatgacatgactgtatatttagaaaacgccatcgtctcagccccaaatctccttaagctgataggcaacttcagcaaagtctcaggatacaaaatcaatgtgcaaaaatcacaagcattcttatacactaataacagacaaacagagagccaaatcatgagtgaactcccattcagaattgcttcaaagagaataaaatacctaggaatccaacttacaagggatgtgaaggacctcttcaagcagaactacaaaccactgctcaatgaaataaaagaggatacaaacaaatggaagaacattccatgctcatgggtaggaagaatcaatatcgtgaaaatggccatactgcccaaggggacccagaggccctatgccaaggttagagttcaactgaacagtggagaggaattgcacttcttaggccttttagataccagtacacaggtgactgtgatccccacaaacccttgcatcaagatgaggagaaaacagatcgtgttctctgactttgggctcctactaacctccgttgtcatggcccccactactgaatga

SEQ ID NO: 17201 - DNA, 7313 bp, Homo sapiens
  SIMILAR (2927)..(3670): 861254mologous to Homo sapiens putative p150,accession number U93567,Smith-Waterman Score=1117.
atggtggtgaaaaccaatgcacgagaactacgtgacgaatgcacaagcctcagtagcccattcaatcaactggaagaaagggtatcagtgatggaaaatcaaatgaataaaatgaagcaagaagagaagtttagagaaaaaagaataaaaagaaacgaacaaagcctccaagaaatatgggactatgtgaaaagaccaaatctatgtctgattggtgtaactgaaagtgatggagagaatggaaccaagttggaaaacactctgcaggatattacccaggagaacttccccaatctagcaaggaaggccaacattcaaattcaggaaacacagagaacgccacaaagatactcctcgagaagagcaactctaagacacataattgtcagattcaccaaagttgaaatgaaggaaaaaatgttaagggcagccagagagaaagactttacaccaacaaagatcaaaagagacaaagaaggccattacataatggtaaagggatcaattcaacaagaagagctaactatcctaaatatatatgcacccaatacaggagcacccagattcgtaaagcaagtcctgagtgacctacaaagagacttagactaccacacaataatactgggagactttaacaccccactgtcaacattagacagatcaacgagacagaaagttaacaaggatatccaggaattgaactcagctctgcaccaagtggacctaatagacaactacagaactctccaccccacatcaacagaatatacattcttctcagcaccacacctcacttattccaaaatggaccacatagttggaagtaaaatagcactcctgaacaaatgtaaaagaacagaaattataaccaaactatctctcagacccacagtgccaatcaaactgaaactcaggattaggaaactcacccaaaactgctcaactaccatggaaactgaacaacctgctcctgaatgactactgggtatataacgaaatgaaggcagaaataaagatgttctttgaaaccaatgagaaaaaaagacaccaacataaccagaatctctggggacacatttaaagcagtgcatagagggaaattcatagcaaaaaaatgcccacaagaggaaagcaggaaagtatctaaaattgacaccctaacatcacaattaaaaaaaactagagaagcaaagagcaaacacattcaaaagctagaagaaggcaagaaataactaagatcagagcagaactgaaggaaatagagacacaaaaatcccttcaacccttcaaaaaaaatcaatgaatccaggagctggttttttattttttatttttgaaaagatcaacaaaattgatagaccgctagcaagactaataaaggagaaaagagaggaagaatcaaatcgacgcaataaaaaaatgataacggggatatcaccaccaccgatcccacagaaatacaaactaccatcagagaatactacaaacacctctacgcaaataaactagaaaatctagaagaaatggataaattcctcaaacacatccatcctcccaagactaaaccaggaagaagttgaatctctgaatagaccaataacaggctctgaaattgaggcaataattaatagcttaccaaccaaaaaagagtccaggaaccaggtggattcacagccgaattctaccagaggtacaaagaggagctggtaccattccttctgaaactattccaatcaatagaaaaagagggaatcctccctaaactcattttatgaggccagcatcatcctgatcccaaagcctggcagagacacaacaaaaaaaagagaattttagaccaaggtgcgttgatgaacattgatgcaaaaatcctcaataaaatactggcaaaccgaatccagcagcacatcaaaaagcttatccaccatgatcaagtgggcttcatccctgggatgcaagggctggttcaatatacgcaaatcaataaacgtaatccagcatataaacaagagccaaagacaaaaaccacatgattatctcaatagatgcagaaaaagcctttgacaaaattcaacaacccttcatgctaaaaactctcaataaattaggtattgatgggacgtatttcaaaataataagagctatctatgacaaacccacagccaatatcatactgagtgggcaaaaactggaagcattccctttgaaaactggtacaagacagggatgccctctctcacctcaccactcctattcaacatagtattctgccccatagtgttctggccagggcaatcaggcaagagaaggaaataaagggtattcaattaggaaaagaggaagtcaaattgtccctgtttgcagatgacatgattgtatatctagaaaaccccattgtctcagcccaaaatctccttaagctgataggcaacttcagcaaagtctcaggatacaaaatcaatgtgcaaaaatcacaagcattcttatacaccaataacagacaaacagagagccaaatcatgagtgaactcccactcacaattgctacaaagagaataaaatacccaggaatccaacttacaagggatgtgaaggacctcttcaaggagaactacaaaccactaatcaacgaaataaaagaggacacaaacaaatgggagaacattccatgctcatggataggaagaatcaatattgtgaaaatggccatactgcccaagctaatttatggattcaatgccatccccatcaagctaccaatgactttcttcacagaattggaaaaaaactactttaaagttcatatggaaccaaaaaagagcccgcattgccaagtcaatcctaagccaaaagaacaaagctggaggcatcacactacctgacttcaaactatactacaagactacagtaaccaaaacagcatggcactggtaccaaaacagcatggtactggtaccaaaacagagatatagatcaatggaacagaacagagccctcagaaataatgccgcatatctacaactatctgatctttgacaaacctttgcttgagaaaaacaagcaatggggaaaggattccctatttaataaatggtgctgggaaaactggctagccatatgtagaaagctgaaactggatcccttccttacaccttatacaaaaatcaattcaagatggattaaaaaaaaagatttaaacgttagacctaaaaccataaaaaccctagaagaaaacctaggcattaccattcaggacataggcgtgggcaaggacttcatgtccaaaacaccaaaagcaatggcaacaaaagccaaaattgacaaatgggatctaattaaactaaagagcttctgcacagcaaaagaaactaccatcagagtgaacaggcaacctacaaaatgggagaaaattttcgcaacctactcatctgacaaagggctaatatccagaatctacaatgaactcaaacaaatttacaagaaaaaaaaaaaaacaaccccatcaaaaagtgggcaaaggacatgaacagacacttctcaaaagaagacatttatgcagccgaaaaaacacatgaaaaaatgctcaccatcactggccatcagagaaatgcaaatcaaaaccactatgagataccatctcacaccagttagaatggcaatcatgaaaaaagtcaggaaacaacagagacagagagtctctccaattggtgatggctattgcacctaatagacgcaggactggtgtctacattgacttcattgaagagacagaagaggcagacaggaaaaatcccaagagacaggctttctatgaaggcaggagtgccaagatccatcacagagcagcccgtaaatgtggaggagatacactttccaagatctgtgagcagtttatagaggggacagcattattcttcgaagtgtgttcagagaaccagcatcacttgggtcagattggggtagtggttaaaacgcagacccaacgagaacacatggacacaggaaggggaacatcacacaccggggctggtgtgagatggtatctcattgtggttttgatttgcatttctctgatggccagtgatgatgagcattttttcatgtattttttggctgcataaatgtcttcttttgagaagtgtctgttcatgtccttcgcccactttttgatggggttgtttgtttttttcttgtaaatttgtttgagttcattgtagattctggatattagccctttgtcagatgagtaggttgcgaaaattttctcccatgttgtaggttgcctgttcactctgatggtagtttcttttgctgtgcagaagctctttagtttaattagatcccatttgtcaattttggcttttgttgccattgcttttggtgttttggacatgaagtccttgcccacgcctatgtcctgaatggtaatgcctaggttttcttctaggatttttatggttttaggtctaacgtttaaatctttaatccatcttgaattgatttttgtataaggtgtaaggaagggatccagtttcagctttctacatatggctagccagttttcccagcaccatttattaaatagggaatcctttccccgttgcttgtttttctcaggtttgtcaaagatcagataattgtaggtatgcggcgttatttctgagggctctgttctgttccattgatctatatctctgttttggtaccagtaccatgctgttttagttactgtagccttgtagtatagtttgaagtcaggtagtgtgatgcctccagctttgttcttttggcttaggattgacttggcgatgcgggctcttttttggttccatatgaaatttaaagtagttttttccaattctgtgaagaaagtcattggtagcttgatggggatggcattgaatctgtaaattaccttgggcagtatggccattttcacgatattgattcttcctacccatgagcatggaatgttcttccatttgtttgtatcctcttttatttccttgagcagtggtttgtagttctccttgaagaggtccttcacatcccttgtaaattggattcctaggtattttattctctttgaagcaattgtgaatgggagttcactcatgatttggctctctgtttgtctgttgttggtgtataagaatgcttgtgatttttgtacattgattttgtatcctgagactttgctgaagttgcttatcagcttaaggagattttgggctgagacgatggggttttctagataaacaatcatgtcgtctgcaaaaagggacaatttgacttcctcttttcctaattgaataccctttatttccttctcctgcctgattgccctggccagaacttccaacactgtgttgaataggagtggtgagagagggcatccctgtcttgtgccagttttcaaaggaatgcttccagtttttgcccattcagtatgatattggcagccttgcatcccagggatgaagcccacttgatcatggtggataagctttttgatgtgctgctggattcggtttgccagtattttattgaggatttttgcatcaatgttcatcaaggatattggtctaaaattctcttttttggttgtgtctctgcccggctttggtatcagaatgatgctggcctcataaaatgagttagggaggattccctctttttctattgattggaatagtttcagaaggaatggtaccagttcctccttgtacctctggtagaattcggctgtgaatccatctggtcctggactctttttggttggtaaactattgattattgccacaatttcagctcctgttattggtctattcagagattcaacttcttcctgctttagtcttgggagagtgtatgtgtcgaggaatttatccatttcttctagattttctggtttatttgcgtagaggtgtttatagtattctctgatggtagtttgtatttctgtgggatcggtggtgatatcccctttatcattttttattgtgtctatttgattctcctctctttttttctttattagtcttgctagcggtctatcaattttgttgatcctttcaaaaaaccagctcctggattcactgatttttttgaagggttttttgtgtctctatttccttcagttctgctctgattttagttatttcttgccttctgctaacttttgaatgtgtttgctcttgcttttctacttcttttaattgtgatgttagggtgtcaattttggatctttcctgctttctcttgtgggcatttagtgctataaatttccctctacacactgctttgaatgcgtcccagagattctggtatgttgtgtctttgctctcgttggtttcaaagaacatctttatttctgccttcatttcgttatgtacccagtagtcattcaggagcaggttgttcagtttccacgtagttgagcggctttgagtgagattcttaatcctgagttctagtttgattgcactgtggtctgagagatagtttgttataatttctgttcttttacatttgctgaggagagctttacttccaactatgtggtcaattttggaataggtgtggtgtggtgctgaaaaaaatgtatattctattgatttggggtggagagttctgtagatgtctattaggtccgcttggtgcagagatgagttcaattcctgggtatccttgttgactttctgtctcattgatctgtctaatgttaacagtgaggtgttaaagtctcccattattaatgtgtgggagtctaagtctctttgtaggtcactcagaacttgctttatgaatctgggtgctcctgtattgggtgcatatatatttaggatagttagctcttcttgttgaattgatccctttaccattatgtaatggccttctttgtctcttttgatcttcccttcttgcttcatttcattcatttcatcttccattgctgataccctttcttccagttgatcgcatcggctcctgaggcttctgcattcttcacgtagttctcgagccttggttttcagctccatcagctcctttaagcacttctctgtattggttattctagttatacattcttctaaatttttttcaaagttttcaacttctttgcctttggtttgaatgtcctcccgtagctcagagtaatttgatcgtctgaaaccttcttctctcagctcgtcaaagtcattctccatccagctttgatccgttgctggtgaggaactgcgttcctttggaggaggagaggcgctctgcattttagagtttccagtttttctgttctgttttttccccat

SEQ ID NO: 17202 - DNA, 1062 bp, Homo sapiens
  SIMILAR (1)..(1038): 911254mologous to Mus musculus myosin containing PDZ domain,accession number AB026497,Smith-Waterman Score=1598.
atgtttaacctaatgaagaaagacaaggacaaagatggcgggcggaaggagaagaaggagaaaaaggagaaaaaggagcggatgtcagcggcagagcttcggagcctggaggagatgagcctgcgacgtggcttcttcaacctgaaccgctcctccaagcgtgaatccaagacgcgcctggaaatctccaaccccatccccatcaaggtggccagcggctctgacctgcacctgactgacattgactccgatagtaaccggggcagcgtcatcctggactcgggccacctaagtacagccagctccagcgatgacctcaagggtgaggagggtagcttccgtggctcggtgctgcagcgggcagccaagttcggctcactggccaagcagaactcacagatgattgtcaagcgcttttccttctcccagcgtagccgggatgagagcgcctcagaaacctcgacgccctcagagcactctgccgccccctcgccacaggtggaggtgaggactctagagggacagctggtgcagcatcctggcccaggcatccctcgaccagggcaccgatcccgagcccctgagctagtgactaaaaagttcccagtcgacctgcgcctgccccccgtggtgcccctgcccccacctaccctccgggagctggagctgcaacgacggcccactggagactttggcttctccctgcggcgcacaaccatgctggatcggggccccgagggccaggcctgtcggcgtgtggtccactttgctgagcctggtgcaggcaccaaggacctggccctggggctggtgccaggagatcgactggtggagattaatgggcacaatgtggagagcaagtccagggatgagattgtggagatgatccggcagtcaggggacagcgtgcggctcaaggtgcagcccattccagagctcagcgagctcagcaggagctggctgcggagcggcgagggacctcgcagggagccatccgatgtgagtgcttccctgggcacctgggctaagcagggatggggaatgtgggcacctcctgcttga

SEQ ID NO: 17203 - DNA, 1095 bp, Homo sapiens
  SIMILAR (220)..(609): 991254mologous to Homo sapiens bA122O1.1 (A novel protein (ortholog of the mouse vesicular inhibitory amino acid transporter, VIAAT)),accession number AL133519,Smith-Waterman Score=682.
gacgatttcgtctccgccagacctgctgccagcttgcccggtccagccctgagagagcctcgaacgccagctgcgagggtcatgagccagagagccccggggcgccgcgcggagagcaagcggagatagcgactttgcgccccccagccctcgccttcttgcatcgcgttccccgcatcctcgggtccttctgtcctttccgctgtccccaccgccgccatggccaccttgctccgcagcaagctgtccaacgtggccacgtccgtgtccaacaagtcccaggccaagatgagcggcatgttcgccaggatgggttttcaggcggccacggatgaggaggcggtgggcttcgcgcattgcgacgacctcgactttgagcaccgccagggcctgcagatggacatcctgaaagccgaaggagagccctgcggggacgagggcgctgaagcgcacgtcgagggagacatccattatcagcgaggcagcggagctcctctgccgccctccggctccaaggaccaggtgggaggtggtggcgaattcgggggccacgacaagcccaaaatcacggcgtgggaggcaggctggaacgtgaccaacgccatccagtgtgaactgctgcaatcagtggccaaggctgcaagccaggcagggaaggggactgtgcaggagacagaagataaagaaatcgggaatccggcacagcagcgacaggagctcattgactcctccccaaggtgccccggagatgctgatgctgacctggaccagaggtgccagcctgggcactgccagtccccacagccattgactagagccccagggcacaggcagctagcaacttatctgggtgccccagggactgctattggcaaagtgatggccccacagggaccaaatgtgaagctaaagcaggatacgcaggtcggagataaggccaagaacagattccctttagcgctcaagtgctgtttgtcagaaattgacagccccacggccctggccggtgacaggcacaggggtctcactctgttgcccacactgaggtacactgccacaatcattgatcgtcacagccgcaaactcctgggctaa

SEQ ID NO: 17204 - DNA, 927 bp, Homo sapiens
  SIMILAR (364)..(609): 901254mologous to Homo sapiens NAG13,accession number AF194537,Smith-Waterman Score=384.
atggagctgaaaaacatgacacaagaactacgtgatgaatgcataagcttcagtagccgattcgatcaactaggagaaagagtatcagtgattgaagatcaaatgaatgaaatgaaaccaaatctacatcggattggtgtatctgaaagtgacccggagagtggaaccaagttggaaaacactctgcaggatattatccaggagaaattccccaacctagcaaagcaggccaacattcaaattcaggaaatacagagaatgccacaaagatactccttgagaagagcaactccaagacacataattgtcagattcaccaaagctgaaatgaaagaaaaaatgttaagggcagccagagagaaagaaatacaaactaccatcagagaatactataaacacctctatgcaaataaactagaaaatctagaagaaatggataaattcctggacgcatacaccctcccaagactaaaccaggaagaagttgaatccctgaatagaccaataacgggctctgaaattgaggcaataattaatagcctaccaaccaaaaaaagtccaggaccagacggattcacagccaaattctaccagaggagagatgaggacaatgactgggctgttctgtacagttcctccttatcactcgatgttgcattcttggtacatcctacacaagacttgcaagcaagagggttttttattgctgattcaatttcagaacttgttattgttctgttcagggtttcaaaagtcttcctggttcagtctttggagtttcttgtgaagaagatgttggcttccccttctgccgtaattaaaatttctttacgggtggaagccaatttacatggattaaccctctatgacactgcaccttgccctattaacaatgaacgaacacggctactttccagagatatttga

SEQ ID NO: 17205 - DNA, 1209 bp, Homo sapiens; identical to SEQ ID NO: 16193
  SIMILAR (580)..(1206): 771254mologous to Homo sapiens p40,accession number U93567,Smith-Waterman Score=833.

SEQ ID NO: 17206 - DNA, 1257 bp, Homo sapiens; identical to SEQ ID NO: 16196
  SIMILAR (667)..(1230): 661254mologous to Homo sapiens p40,accession number U93566,Smith-Waterman Score=636.

SEQ ID NO: 17207 - DNA, 685 bp, Homo sapiens
  SIMILAR (181)..(528): 621254mologous to Homo sapiens p40,accession number U93567,Smith-Waterman Score=352.
atggaaataatccttcgcatttgcaaattaacaatttccaaagaacttttggacagtgggtcatccagactcacaatgacccactataagcacaggtatttttcccactctgcagaggagcagattatttcagaagaattaaatgaaagtgaaatgatttgccagcatcatcacacagctgagaatgacttcgacgagctgagagaagaaggcttcagacgatcagtaataacaaacttctccaagctaaaggaggatgttcaaacccatttcaaagaagctaaaaaccttgaaaaaagattagacgaatggctaactagaataaacagcgtagagaagaccttaaatgacctgatgtagctgaaaaccgtggcatgagaactacgtgacacatacacaagcttcaatagccgattcgatcaagtggaagaaagggtatcagtgattgaagatcaaatgaatgaaatggagcgagaagagaagtttagagaaaaaagagtataaagaaatgaacaaagcctcaagaaatatggaactatgtgaaaagaccaaatcttcatctgattggtgtatctgaaattgacagggagaatggaaccaagttggaaaacactcttcaggatattttccaggagaacttcacctacctagcaaggcaggccaacattcaaattcaggaaataca

SEQ ID NO: 17208 - DNA, 1227 bp, Homo sapiens
  SIMILAR (349)..(867): 561254mologous to Homo sapiens p40,accession number U93564,Smith-Waterman Score=491.
ataatccttcgcatttgcaaattaacaatttccaaagaacttttggacagtgggtcatccagactcacaatgacccactataagcacaggtatttttcccactctgcagaggagcagattatttcagaagaattaaatgaaagtgaaatgatttgccagcatcatcacacagctgccaggtgcccctctgagacgaagcttccagaggaaggatcaggaaacaacatttgccgttctgcaatatttgctgttctgcaacctccactggtgatactcaggcaaacagggactggagtggacctccagcaaactccaacagacctgcagctgaaggtcctaactgtaacaaggaaaactaacaaacacaaaggacatccacaccaaaaccccatctgtacatcaccatcaacaaagaccaaagagaatgacttcgacgagctgagagaagaaggcttcagacgatcagtaataacaaacttctccaagctaaaggaggatgttcgaacccatcgcaaagaagctaaaaaccttgaaaaaagattagacgaatggctaactagaataaacagtgtagagaagaccttaaatgacctgatggagctgaaaaccatggcacaagaactacgtgacacatacacaagcttcagtagccgatttgatcaagtggaagaaagggtatcagtgattgaagatcaaatgaatgacatgaagcgagaagagaagtttagagaaaaaagagtaaaaagaaacgaacaaagcctccaagaaatatgggactatgtgaaaagaccaaatctacgtctgattggtgtacctgaaaagatacaaacgaccatcagagaatactataaacacctctatgcaaataaactagaaaatctagaagaaatggataaattcctggacacatacacctgcccaagactaaaccaggaagaagttgaatccctgaatagaccagtaacaggctctgaaattgaggcaataattaatagcctaccaacaaaaaaagtccaggaccaggcagattcacagccaaattctaccagagtttttaaaacagtctgcatatcttctcttgggcatacaacagccagtgcagatacccaggatgtctgccagctgccagtcacttctcttctggagcaagggctttcttccaagtcagcaggcttcttagactatgccgtccagcgactttggttgctaggcacagaacccctgtag

SEQ ID NO: 17209 - DNA, 1280 bp, Homo sapiens
  SIMILAR (745)..(608): 841254mologous to Homo sapiens putative p150,accession number U93572,Smith-Waterman Score=186.
ttatcctgagactttactgaagttgcttatcagcttaaggagattttgggctgagacgatggggtttgctagatatacagtcatgtcatctgcaaacagggacaatttgacttcctctttttctaattgaataccctttatttccttctcctgcctgattttcctggccagaacttccaacattatgttgaataggagtggtgagagagcgcatccctgtcttgtgccagttttcaaagggaatgcttccagtttgtgcccattcagtatgatattggctgctggtttgtcatagatagctcttattattttgagatacgtcccatcaatacctaatttattgagagtttttagcatgaagtgttgttgaattttgtcaaaggccttttctgcatctattgagataatcatgtggtttttgtcgttggttctgtttatatgctggattatgtttattgatttgcatatgttgaaccagccttgcatcccagggatgaagcccacttgatcatggtggataagctttttgatgtgctgctggattcgttttgccagtattttattgaggattttttcatcgatgctcatcggggatattggtctaaaattctttttttgttgttgttgtgtctctgccaggctttggtatcaggatgatgctggcctcataaaatgagttagggaggattccctctttttctattaattggaatagtttcagaaggaatgggtacaagctcctccttgtacctctggtagaatttggctgtgaatccatctggtcctggactttttttggttggtaagctattaattattgcctcaatttcagagcctgttattggtctattcagagattcagcttcttcctggtttagtcttgggagggtgtaagagttgaggaatttatccatttcttgtggattttctagtttatttgcatagaggtgtttatagtattttctgatggtagtttgtatttttttccatgcttcttgtgtccctgtgttgatgtctgtgcctctgatgaaatagtcatctccaattttagagtagcttttttcaaggttcctagcttccctgcattgggttagagcatgctcctttagctcggaggagtttgttattacccaccttctgaagcctacttctgtcaattcgtcaaactcattctctgtccagttttgttcccttgctggtgaggagttgtgaacctttggagtagaagaggcattctggtttttggaattttcaggctttttgagctggtttctccccat

SEQ ID NO: 17210 - DNA, 2331 bp, Homo sapiens
  SIMILAR (148)..(702): 991254mologous to Homo sapiens hepatocellular carcinoma- associated antigen 112,accession number AF258340,Smith-Waterman Score=952.
atgggggtatccggagcgcagccggggcgcagctgctggcacaggagctccacaggcagccaaggactcggtcctgtcccagagcctgcggactgtggaggggaggccgcaggaagagcccgggaggaggggactgtgtccctgacaatgggaacagccgacagtgatgagatggccccggaggccccacagcacacccacatcgatgtgcacatccaccaggagtctgccctggccaagctcctgctcacctgctgctctgcgctgcggccccgggccacccaggccaggggcagcagccggctgctggtggcctcgtgggtgatgcagatcgtgctggggatcttgagtgcagtcctaggaggatttttctacatccgcgactacaccctcctcgtcacctcgggagctgccatctggacaggggctgtggctgtgctggctggagctgctgccttcatttacgagaaacggggtggtacatactgggccctgctgaggactctgctaacgctggcagctttctccacagccatcgctgccctcaaactttggaatgaagatttccgatatggctactcttattacaacagtgcctgccgcatctccagctcgagtgactggaacactccagcccccactcagagtccagaagaagtcagaaggctacacctatgtacctccttcatggacatgctgaaggtaggtggccaaggggaaggggcagcagcaggccttgttcagaacccttcaggccatgctcttgggtgtctggattctgctgcttctggcatctctgacccctctgtggctgtactgctggagaatgttcccaaccaaaggggtgagtccctaaggtgtgtgcctgtgtatttggggcagtggaactgctcaaaggagacaggaatggacagtggacagtttggggaggagaaaggggcccatgacccaagtcccacctattatcatgcctgtctttctacccagtggtggcccagcccagaaagcccctatccccaaccaagtggcccccaagtcaaagagcccaggaatccagggaagtccatatccatgctatgcctttggatcaggtaccatgctgctgattctggtagctccagagctaagctgcccctggaggagagactccgccctttctctcccactcacgattgtcttgcctttcctcttccattagaaaagagaccagaaggaaatgttggaagcaggtgcccctctgggacaaagctaccggaggaaggatcaggcagcaatatttgctgttctgcaatatttcctgttctgcagcctccgctggtgatacctaggcaaacaaggtctggagtggacctccagcaaactccaacagacctgcagctgagggacctgactgttagaaggaaaactaacaaacagaaaggacacccacaccaaaaccccatgtgtacgtcaccatcatcaaagaccaaagagctaaaggaggatgttcgaacccatcacaaagaagctaaaaaccttgaaaaaagattagacaaaatggctaaatagaataaacagtgtagagaagaccttaaatgacccgatggagctgaaaacccatggcacgagaactacacgacaaatgcacaagcttcagtagccgattcgatcaactggaagaaagggtatcagtgactgaagatcaaatgaatgaaatgaagcgagaggagaagtttagagaaaaaagagtaaaaaagaaatgaacaaagcctccaagaaatacgggactatgtgaaaagaccaaatctatgtctgactggtgtacctgaaagtgatggggagaatgaaaccaagttggaaaacactctgcaggataatatccaggagaacttccccaacctagcaaggcaggccaacattcaaattcaggaaatacagagaacgccacaaagatactcctcgagaagagcaactccaagacacataattgtcagattcaccaaagttgaaatgaaggaaaaaatgttaagggcagctggagagaaaggtcaggttacccacaaagggaagcccatcacactaacagcagatctcttggcagaaactctacaagccagaagagagtggggaccaatatttaacattcttaaagaaaagaattttcaacccagaatttcatatccagccaaactaagcttcataagtgaaggagaaataaaatcctttacagacaagcaaatgctgagagattttgtcaccaccaggcctgccttacaagagctcctgaaggaagcactaaacatggaaaggagcaaccggtaccagccactgcagaaacatgccaaattgtaa

SEQ ID NO: 17211 - DNA, 666 bp, Homo sapiens
  SIMILAR (396)..(551): 961254mologous to Plasmid F 96 pct identical to gp:AB021078_30,accession number AP001918,Smith-Waterman Score=291.
ttatagcttggagtctagtaggttttctttcatgtgcatgcatataaacttctgccagatccttcttaatacagtggactgagagctagacacacagtctagcctgagaatgtactggcataaagtatttttattaaaattcagtttttcaactttcaaagatgtcaaagggtgttcagaagtaccttgagaacctcctgtcctgcctgaaggattttcaagtgcaaagcagacttgctgctgtacgacatgcttgtgtatgtcacactctggatacacagagctgtcacctacacacatcgggtaccgaaccactcgtatcgccggtctaatattaagtctgaaaccacggtcccactcgtatcgtcggtcctgtagaacggagtaacctcggtgtgcggttgtatgcctgctgtggattgctgctgtgtcctgcttatccacaacattttgcgcacggttatgtggacaaaatacctggttacccaggccgtgccggcacgttaaccgggctgcatccgatgcaagtgtgtcgctgtcgacggtgacccgtgtatgaaatctaacaatgcgctcatcgtcatcctcggcaccgtcaccctggatgctgtaggcataggcttggttatgccggtactgccgggcctcttgcgggatatcgtccat

SEQ ID NO: 17212 - DNA, 780 bp, Homo sapiens
  SIMILAR (642)..(4): 911254mologous to Cloning vector pBACe3.6 levansucrase,accession number U80929,Smith-Waterman Score=993.
ttagttgactgtcagctgtccttgctccaggatgctgtttttgacaacggatgttttattgcctttgatgttcattaagaagcttggcgcaaatgttgcctttttatcctcgaagaagcctctgtttgtcatgtagcttgtgataaccacattgttgcctttggcttgcggcactgcgaagtgagagtaagtgaatgtcacatcgtttggatcaagacccatttgcagcacaagccctgttttgttcagcggcttgtaagggccggttaaagagtttgatacataaccaagcatgtaaatatcgtttgagttaataccatcgatcgtcatttttgaaccgcgtgaatcagtgaacaagtaccatttgccgttcattttgaaaacattcgcgcgctcgatttcatcagttaccgtgtttgaagtgatcagcggcttcattacttttttcaatgtgtaatcattatttaactctatgataccgagggcgccgttcgctaactcagcatcgcgttttttagcgctctgctgaagcttctggctttctttacggaagaaattcgtgccgccgccgtagtacagcggggagttctcctggttacccagcccgtgccggcacgttaaccgggctgcatcgaatgcaagtgtgtcgctgtcgacggtgacccgtgtatgaaatctaacaatgcgctcatcgtcatcctcggcaccgtcaccctggatgctgtaggcataggcttggttatgccggtactgccgggcctcttgcgggatatcgtccat

SEQ ID NO: 17213 - DNA, 777 bp, Homo sapiens
  SIMILAR (12)..(236): 891254mologous to Homo sapiens Protein sequence encoded by clone p199-7 (PL mutet.rsT4),accession number P93369,Smith-Waterman Score=364.
atgaaatctaacaatgcgctcatcgtcatcctcggcaccgtcaccctggatgctgtaggcataggcttggttatgccggtactgccgggcctcttgcgggatatcgtccattccgacagcatcgccagtcactatggcgtgctcgtagcgctatatgcgttgatgcaatttctatgcgcacccgttctcggagcactgtccgacacctttgccgccgcccaggattttgccgatttcggaaccaccatcaaacaggattttcgcctgctggggcaaaccagcgtggaccgcttgctgcaactctctcagggccaggcggtgaagggcaatcagctgttgcccgtctcactggtgaaaagaaaaaccaccctggcgcccaatacgcaaaccgcctctccccgcgcgttggccgattcattaatgcagctggcacgacaggtttcccgactggaaagcgggcaatattcagttgcagtggatgtgctactgaattcagccttcaagattagggtgctcatcctccagatgttggaagtcctggctgcggacaacttgcaccaaacctcagtccctctccagaaccggattcagtcaatgggtgtggcctcatatggtgactggatgtttggatgggcacgggagttagttgtgtcagggatgttctcattacccgattatttagagggccagctaaacaagggttggctccctatcccggtcccggtatccagtaatatccagaatagaaaaggctcctccggcaactggacactttga

SEQ ID NO: 17214 - DNA, 933 bp, Homo sapiens
  SIMILAR (451)..(696): 921254mologous to Homo sapiens NAG13,accession number AF194537,Smith-Waterman Score=399.
atgagtggatttgagaaacagtacaagaaaatccgacttgataagacattggattcagagaatgaagggctggaactgccagtgcctgccaaacggagtaacctcggtgtgcggttgtatgcctgctgtggattgctgctgtgtcctgcttatccacaacattttgcgcacggttatgtggacaaaatacctggttacccaggccgtgccggcacgttaaccgggctgcatccgatgcaagtgtgtcgctgtcgacgtcaggcaccgtgtttgaaatctaacaatgcgctcatcgtcatcctcggcaccgtcaccctggatgctgtaggcataggcttggttatgccggtactgccgggcctcttgcgggatatcgtccattccgacagcatcgccagtcactatggcgtgctgctagcgctatatgcgttgatgcaattttctatgcgcacccaaatacaaactaccatcagagaatactacaaacacctctatgcaaataaactagaaaatctagaaggaatggataaattcctcaacacatacaccctcccaagactaaaccaggaagaagttgaatctctgaatagaccaataacaggctctgaaattgtggcaataatcaatagcttaccaaccaaaaagagtccaggaccagatggattcacagccgaattctaccagaagtacaaggaaggagctggagtccgctgtggaaggcacatcacatcccacggcctggctctcaactgctctaccgacctcacgtggtttgagcacatcgtgccctgtggactggttgggacaggcgtcacttccttgagtaaggagctccagaggcacgtcaccgtggaagaagtaatgccacctttccttgtggcctttaaggagatctacaagtgcacactgatctcagaggacagccccaactga

SEQ ID NO: 17215 - DNA, 1047 bp, Homo sapiens
  SIMILAR (735)..(1016): 1001254mologous to Homo sapiens Protein sequence encoded by clone p199-7 (PL mutet.rsT4),accession number P93369,Smith-Waterman Score=542.
aggtttgagcagcagagcacggaagaagcgagccacacccccatcacatgccctgtgagggggacaagggaacatttcctgtttcatcattattcttattttacagaagaagcagtaaatgtcattcccacgtcatcctcctctctttcacctctgaagcaagtcatagaaactagaatttctccttctccagttttaaatgccgcaactcagcaagaaaaaaaaagtgtctggtatcttcctgaacaactacctggtattatacagtgtgacaatctaaaaacttgtcacacttcacatggatctgtcatggcggaaacagcggttatcaatcacaagaaacgtaaaaatagcccgcgaatcgtccagtcaaacgacctcactgaggcggcatatagtctctcccgggatcaaaaacgtatgctgtatctgttcgttgaccagatcagaaaatctgatggcaccctacaggaacatgacggtatctgcgagatccatgttgctaaatatgctggaatattcggattgacctctgcggaagccaaacggagtaacctcggtgtgcggttgtatgcctgctgtggattgctgctgtgtcctgcttatccacaacattttgcgcacggttatgtggacaaaatacctggttacccaggccgtgccggcacgttaaccgggctgcatccgatgcaagtgtgtcgctgtcgacgtcaggcaccgtgtatgaaatctaacaatgcgctcatcgtcatcctcggcaccgtcaccctggatgctgtaggcataggcttggttatgccggtactgccgggcctcttgcgggatatcgtccattccgacagcatcgccagtcactatggcgtgctgctagcgctatatgcgttgatgcaatttctatgcgcacccgttctcggagcactgtccgaccgctttggccgccgcccagtcctgctcgcttcgctacttggagccactatcgactacgcgatcatggcgaccacacccgtcctgtggatctacccactagtcaattcaccatcttgttga

SEQ ID NO: 17216 - DNA, 1104 bp, Homo sapiens
  SIMILAR (813)..(1088): 1001254mologous to Homo sapiens Protein sequence encoded by clone p199-7 (PL mutet.rsT4),accession number P93369,Smith-Waterman Score=532.
atggtgcttgtgtggaaagagagtaaggaggaattacatggggtgtgggtgtatcaagtaccgtatcgtccggaaaagggagattatcgcggtgcgatgtggtgcccagactccagtggcagccccactactgttcaggggcacgaggttctcaaggtggaggcagggccacaagaggggcagcagaaaggctctgccagtggctggcacaccattacttctgctcatgtttctgtgttcagtgacagtcccatggcaaaccctacagtcagcatagctgggagggtcaccgtcgacagcgacacacttgcatcggatgcagcccggttaacgtgccggcacggcctgggtaaccaggtattttgtccacatacccgtgcgcaaaatgttgtggataagcaggacacagcagcaatccacagcaggcatacaaccgcacaccgaggttactccgttctacagtcatatataaaatttgagaacgctgaaattgcccaaggaacaaacaaacctattggaggactaaacaaactgccacatggtttctgtgcttggaagcagcaggcagcagatccgcttctgtttgaagcagctttctgttacacaggacaaggatcctataggacaaggcgattaagtcccaccagagggctttcaacccgagtgtgggaccacgatcccactcgtgttgtcggtctgattatcggtctgggaccacggtcccacttgtattgtcgatcagactatcagcgtgagactacgattccatcaatgcctgtcaagggcaatcaggcaccgtgtatgaaatctaacaatgcgctcatcgtcatcctcggcaccgtcaccctggatgctgtaggcataggcttggttatgccggtactgccgggcctcttgcgggatatcgtccattccgacagcatcgccagtcactatggcgtgctgctagcgctatatgcgttgatgcaatttctatgcgcacccgttctcggagcactgtccgaccgctttggccgccgcccagtcctgctcgcttcgctacttggagccactatcgactacgcgatcatggcgaccacacccgtcctgggatctacccactag

SEQ ID NO: 17217 - DNA, 735 bp, Homo sapiens
  SIMILAR (540)..(4): 991254mologous to Cloning vector pZC320 SopA,accession number U26464,Smith-Waterman Score=931.
ttatctaatctcccagcgtggtttaatcagacgatcgaaaatttcattgcagacaggttcccaaatagaaagagcatttctccaggcaccagttgaagagcgttgatcaatggcctgttcaaaaacagttctcatccggatctgacctttaccaacttcatccgtttcacgtacaacattttttagaaccatgcttccccaggcatcccgaatttgctcctccatccacggggactgagagccattactattgctgtatttggtaagcaaaatacgtacatcaggctcgaaccctttaagatcaacgttcttgagcagatcacgaagcatatcgaaaaactgcagtgcggaggtgtagtcaaacaactcagcaggcgtgggaacaatcagcacatcagcagcacatacgacattaatcgtgccgatacccaggttaggcgcgctgtcaataactatgacatcatagtcatgagcaactgtttcaatggccagtcggagcatcaggtgtggatcggtgggcagtttaccttcatcaaattgggggttctggttacccaggccgtgccggcacgttaaccgggctgcatccgatgcaagtgtgtcgctgtcgacggtgacccgtgtatgaaatctaacaatgcgctcatcgtcatcctcggcaccgtcaccctggatgctgtaggcataggcttggttatgccggtactgccgggcctcttgcgggatatcgtccat

SEQ ID NO: 17218 - DNA, 849 bp, Homo sapiens
  SIMILAR (849)..(418): 781254mologous to Cloning vector pZC320 SopB,accession number U26464,Smith-Waterman Score=540.
  misc_feature (1)...(849): n = a,t,c or g
ttagttgactgtcagctgtccttgctccaggatgctgtttttgacaacggatgttttattgcctttgatgttcattaagaagcttggcgcaaatgttgcctttttatcctcgaagaagcctctgtttgtcatgtagcttgtgataaccacattgttgcctttggcttgcggcactgcgaagtgagagtaagtgaatgtcacatcgtttggatcaagacccatttgcagcacaagccctgttttgttcagcggcttgtaagggccggttaaagagtttgatacataaccaagcatgtaaatatcgtaattggttgccaggccgtgccggcacgttaaccgggctgcatccgatgcaagtgtgtcgctgtcgacggtgacccgtgtatgaaatctaacaatgcgctcatcgtcatcctcggcaccgtcaccctggatgctgtaggcataggcttggttatgccggtactgccgggcctcttgcgggatatcgtccattccgacagcatcgccagtcactatggcgtgcanaacacgataatcactttcggtaagtgcagcagctttacgacggcgactcccatcggcaatttctatgacaccagatactcttcgaccgaacgccggtgtctgttgaccagtcagtagaaaagaagggatgagatcatccagtgcgtcctcagtaagcagctcctggtcacgttcattacctgaccatacccgagaggtcttctcaacactatcaccccggagcacttcaagagtaaacttcacatcccgaccacatacaggcaaagtaatggcattaccgcgagccattactcctacgcgcgcaattaacgaatccaccat

SEQ ID NO: 17219 - DNA, 655 bp, Homo sapiens
  SIMILAR (317)..(616): 921254mologous to Leishmania major probable levansucrase precursor,accession number AL160371,Smith-Waterman Score=494.
tcaggcaccgtgtatgaaatctaacaatgcgctcatcgtcatcctcggcaccgtcaccctggatgctgtaggcataggcttggttatgccggtactggcgggcctcttgcgggatatcgtccattccgacagcatcgccagtcactatggcgtgctgctagcgctatatgcgttgatgcaatttctatgcgcacccgttctcggagcactgtccgaccgctttggccgccgcccagtcctgctcgcttcgctacttggagccactatcgactacgcgatcatggcgaccacacccgtcctgtggatctacccactaaacggggaggaggttatcgataaaagcaattatacatccggcgacaaccatacgctgagagaccctcactacgttgaagacaaaggccataaataccttgtattcgaagccaacacgggaacagaaaacggataccaaggcgaagaatctttatttaacaaagcgtactacggcggcggcacgaacttcttccgtaaagaaagccagaagcttcagcagagcgctaaaaaacgcgatgctgagttagcgaacggcgccctcggtatcatagagttaaataatgattacacatgtgaaaaaagtaatgaagccgctgatcacttcaaacacggtaactga

SEQ ID NO: 17220 - DNA, 937 bp, Homo sapiens
  SIMILAR (317)..(934): 991254mologous to unidentified cloning vector 29kD protein essential for the replication of mini F plasmid,accession number AB015619,Smith-Waterman Score=1075.
tcaggccccgtgtatgaaatctaacaatgcgctcatcgtcatcctcggcaccgtcaccctggatgctgtaggcataggcttggttatgccggtactgccgggcctcttgcgggatatcgtccattccgacagcatcgccagtcactatggcgtgctgctagcgctatatgcgttgatgcaatttctatgcgcacccgttctcggagcactgtccgaccgctttggccgccgcccagtcctgctcgcttcgctacttggagccactatcgactacgcgatcatggcgaccacacccgtcctgtggatctacccactaatcagaaaatctgagggcacctcacaggaacatgacggtatctgcgagatccatgttgctaaatatgctgaaatattcggattgacctctgcggaagccagtaaggatatacggcaggcattgaagagtttcgcggggaaggaagtggttttttatcgccctgaagaggatgccggcgatgaaaaaggctatgaatcttttccttggtttatcaaacgtgcgcacagtccatccagagggctttacagtgtacatatcaacccatatctcattcccttctttatcgggttacagaaccggtttacgcagtttcggcttagtgaaacaaaagaaatcaccaatccgtatgccatgcgtttatacgaatccctgtgtcagtatcgtaagccggatggctcaggcatcgtctctctgaaaatcgactggatcatagagcgttaccagctgcctcaaagttaccagcgtatgcctgacttccgccgccgcttcctgcaggtctgtgttaatgagatcaacagcagaactccaatgcgcctctcatacattgagaaaaagaaaggccgccagacgactcatatcgtattttccttccgcgatatcacttccatgacgacaggatag

SEQ ID NO: 17221 - DNA, 729 bp, Homo sapiens
  SIMILAR (729)..(4): 851254mologous to Cloning vector pZC320 SopB,accession number U26464,Smith-Waterman Score=963.
tcagggtgctggcttttcaagttccttaagaatggcctcaattttctctatacactcagttggaacacgagacctgtccaggttaagcaccattttatcgcccttatacaatactgtcgctccaggagcaaactgatgtcgtgagcttaaactagttcttgatgcagatgacgttttaagcacagaagttaaaagagtgataacttcttcagcttcaaatatcaccccagcttttttctgctcatgaaggttagatgcctgctgcttaagtaattcctctttatctgtaaaggctttttgaagtgcatcacctgaccgggcagatagttcaccggggtgagaaaaaagagcaacaactgatttaggcaatttggcggtgttgatacagcgggtaataatcttacgtgaaatattttccgcatcagccagcgcagaaatatttccagcaaattcattctgcaatcggcttgcataacgctgaccacgttcataagcacttgttgggcgataatcgttacccaatctggataatgcagccatctgctcatcatccagctcgccaaccagaacacgataatcactgggggttcttcgtgtatgaaatctaacaatgcgctcatcgtcatcctcggcaccgtcaccctggatgctgtaggcataggcttggttatgccggtactgccgggcctcttgcgggatatcgtccattccgacagcatcgccagtcat

SEQ ID NO: 17222 - DNA, 678 bp, Homo sapiens
  SIMILAR (1)..(339): 1001254mologous to unidentified cloning vector 29kD protein essential for the replication of mini F plasmid,accession number AB015619,Smith-Waterman Score=576.
atggcggaaacagcggttatcaatcacaagaaacgtaaaaatagcccgcgaatcgtccagtcaaacgacctcactgaggcggcatatagtctctcccgggatcaaaaacgtatgctgtatctgttcgttgaccagatcagaaaatctgatggcaccctacaggaacatgacggtatctgcgagatccatgttgctaaatatgctgaaatattcggattgacctctgcggaagccagtaaagatatacggcaggcattgaagagtttcgcggggaaggaagtggttttttatcgccctgaagaggatgccggcgatgaaaaaggctatgaatcttttccttgtcaggcaccgtgtatgaaatctaacaatgcgctcatcgtcatcctcggcaccgtcaccctggatgctgtaggcataggcttggttatgccggtactgccgggcctcttgcgggatatcgtccattccgacagcatcgccagtcactatggcgtgctgctagcgctatatgcgttgatgcaatttctatgcgcacccgttctcggagcactgtccgaccgctttggccgccgcccagtcctgctcgcttcgctacttggagccactatcgactacgcgatcatggcgaccacacccgtcctgtggatctacccactagtcaattcaccatcttgttga

SEQ ID NO: 17223 - DNA, 687 bp, Homo sapiens
  SIMILAR (1)..(351): 951254mologous to Cloning vector pZC320 SopA,accession number U26464,Smith-Waterman Score=564.
atgaaactcatggaaacacttaaccagtgcataaacgctggtcatgaaatgacgaatgctatcgccattgcacagtttaatgatgacagcccggaagcgaggaaaataacccggcgctggagaataggtgaagcagcggatttagttggggtttcttctcaggctatcagagatgccgagaaagcagggcgactaccgcacccggatatggaaattcgaggacgggttgagcaacgtgttggttatacaattgaacaaattaatcatatgcgtgatgtgtttggtacgcgattgcgacgtgctgaagacgtatttccaaccgggatcggggttgctgccataaaagtgggtcaggcaccgtgtatgaaatctaacaatgcgctcatcgtcatcctcggcaccgtcaccctggatgctgtaggcataggcttggttatgccggtactgccgggcctcttgcgggatatcgtccattccgacagcatcgccagtcactatggcgtgctgctagcgctatatgcgttgatgcaatttctatgcgcacccgttctcggagcactgtccgaccgctttggccgccgcccagtcctgctcgcttcgctacttggagccactatcgactacgcgatcatggcgaccacacccgtcctgtggatctacccactagtcaattcaccatcttgttga

SEQ ID NO: 17224 - DNA, 643 bp, Homo sapiens
  SIMILAR (317)..(640): 1001254mologous to unidentified cloning vector 29kD protein essential for the replication of mini F plasmid,accession number AB015619,Smith-Waterman Score=567.
tcaggcaccgtgtatgaaatctaacaatgcgctcatcgtcatcctcggcaccgtcaccctggatgctgtaggcataggcttggttatgccggtactgccgggcctcttgcgggatatcgtccattccgacagcatcgccagtcactatggcgtgctgctagcgctatatgcgttgatgcaatttctatgcgcacccgttctcggagcactgtccgaccgctttggccgccgcccagtcctgctcgcttcgctacttggagccactatcgactacgcgatcatggcgaccacacccgtcctgtggatctacccactaaaccggtttacgcagtttcggcttagtgaaacaaaagaaatcaccaatccgtatgccatgcgtttatacgaatccctgtgtcagtatcgtaagccggatggctcaggcatcgtctctctgaaaatcgactggatcatagagcgttaccagctgcctcaaagttaccagcgtatgcctgacttccgccgccgcttcctgcaggtctgtgttaatgagatcaacagcagaactccaatgcgcctctcatacattgagaaaaagaaaggccgccagacgactcatatcgtattttccttccgcgatatcacttccatgacgacaggatag

SEQ ID NO: 17225 - DNA, 808 bp, Homo sapiens
  SIMILAR (304)..(807): 1001254mologous to Cloning vector pZC320 SopA,accession number U26464,Smith-Waterman Score=890.
atgaaatctaacaatgcgctcatcgtcatcctcggcaccgtcaccctggatgctgtaggcataggcttggttatgccggtactgccgggcctcttgcgggatatcgtccattccgacagcatcgccagtcactatggcgtgctgctagcgctatatgcgttgatgcaatttctatgcgcacccgttctcggagcactgtccgaccgctttggccgccgcccagtcctgctcgcttcgctacttggagccactatcgactacgcgatcatggcgaccacacccgtcctgtggatctacccactagatctggctctgaaggggctacgtgttttgctcgtggaaggtaacgacccccagggaacagcctcaatgtatcacggatgggtaccagatcttcatattcatgcagaagacactctcctgcctttctatcttggggaaaaggacgatgtcacttatgcaataaagcccacttgctggccggggcttgacattattccttcctgtctggctctgcaccgtattgaaactgagttaatgggcaaatttgatgaaggtaaactgcccaccgatccacacctgatgctccgactggccattgaaactgttgctcatgactatgatgtcatagttattgacagcgcgcctaacctgggtatcggcacgattaatgtcgtatgtgctgctgatgtgctgattgttcccacgcctgctgagttgtttgactacacctccgcactgcagtttttcgatatgcttcgtgatctgctcaagaacgttgatcttaaagggttcgagcctgatgtac

SEQ ID NO: 17226 - DNA, 675 bp, Homo sapiens
  SIMILAR (552)..(67): 991254mologous to Cloning vector pSacBII SacB,accession number U09128,Smith-Waterman Score=858.
  misc_feature (1)...(675): n = a,t,c or g
tcagcgtatggttgtcgccggatgtataattgccttcatcgataaactgctgaacgttctgatatgttttccgtctccgtcaaaaatcgttttgtgatcttccactccgttgattttgagtgtgtcatcagattttgacacatttacctgcgctgttgtcaggctttgtttgccgtaatgtttaccggaatagtcagtgtagaataaacggatttttccgtcagatgtaaaggttgcagaaccggaccattcttgcgtctgatctttcaggatcggatcgttggcgtcgaacttatcgctgtctttaaagacacggcccgcgtttttccagctgtcgattgagttgtcgccgaccttttgataaaacatgtagattgatgtgtcatcagcgtctttcgggcttcccgcaagagcaaacacaacgtgatagccgttgtattcagctactgttccgtcagcgttttgcagcggccagctgtcccacacatcaagtccttttgcagactcaatatttttaatcgttgattgatcgaattggggcacttggttttttcgttttgngtgtatgaatctaacaatgcgctcatcgtcatcctcggcaccgtcaccctggatgctgtaggcataggcttggttatgccggtactgccgggcctcttgcgggatatcgtccat

SEQ ID NO: 17227 - DNA, 1688 bp, Homo sapiens
  SIMILAR (395)..(778): 921254mologous to unidentified cloning vector 29kD protein essential for the replication of mini F plasmid,accession number AB015619,Smith-Waterman Score=606.
agatactggaaacaatgagtggaagcagcaggagggactcagtcacaacaattggcttggtcttggatgcctctttggtcctgagacacccattttctacccagcaacactgggtcatacaagcagtatttattatgaaagaaaaaaggaagataagaatggcatgaaggaagagcatgatacaagtgtcgcaatgttctttaccttattcaatttccaaatttctgttgagaacattagaaaaggccccatggtggtaggagagtcaattgctcagagttacctaaatgttgtacaagaaatattcaggtccagaaaccaccagcttctccaggacttaacaagggacttgtgtgacaatctaaaaacttgtcacacttcacatggatctgtcatggcggaaacagcggttatcaatcacaagaaacgtaaaaatagcccgcgaatcgtccagtcaaacgacctcactgaggcggcatatagtctctcccgggatcaaaaacgtatgctgtatctgttcgttgaccagatcagaaaatctgatggcaccctacaggaacatgacggtatctgcgagatccatgttgctaaatatgctgaaatattcggattgacctctgcggaagccagtaaggatatacggcaggcattgaagagtttcgcggggaaggaagtggttttttatcgccctgaagaggatgccggcgatgaaaaaggctatgaatcttttccttggtttatcaaacaacggagtaacctcggtgtgcggttgtatgcctgctgtggattgctgctgtgtcctgcttatccacaacattttgcgcacggttatgtggacaaaatacctggttacccaggccgtgccggcacgttaaccgggctgcatccgatgcaagtgtgtcgctgtcgacgtcaggcaccgtgtatgaaatctaacaatgcgctcatcgtcatcctcggcaccgtcaccctggatgctgtaggcataggcttggttatgccggtactgccgggcctcttgcgggatatcgtccatttccgacagcatcgccagtcactatggcgtgctgctagcgctatatgcgttgatgcaatttctatgcgcacccgttctcggagcactgtccgaccgctttggccgccgcccagtcctgctcgcttcgctacttggagccactatcgactacgcgatcatggcgaccacacccgtccgggggcattcagttttaaaagggaaacagcataaaagtgtggaaaatttgcagcctgataatgtgatagaaaagaaaatcccattttctggggagaaattcaagccagctgcagaaatttgcaaaagtaacagggagctgaatgttaatcaccaagacaatggagaaaatgtctccagggcttgtcagagacctttgctgcagcccctcccatcacaggcctggagatttaggaggaaaaactggttttgtgggccaggcccttggtcccccttcagtgtgcagtcaagggacttggtgccctgtgtcccagctgctccagccttgactaaaaggggccaaggtacggctcaggctgttgcttcagagggtggaagccccaagccttggcagcttccacatggtgttgagcctgcgggtgcacagaaatcaagagctgaggtttgggaacctccacctagatttcagaagatgtag

SEQ ID NO: 17228 - DNA, 640 bp, Homo sapiens
  SIMILAR (620)..(63): 971254mologous to Homo sapiens vaccinia related kinase 3,accession number AB031052,Smith-Waterman Score=999.
ccgcccttttttttttttttttctgttgcacactgcaaatggaaagttctggattccacctagggcaccatcgggaggccaatggggtcatatggagacacacgcagatcctgcagcaaagcttctaggttgttcctcagcatggcgtagggcggcttctcctcatacgtgagggccatcaccaccttcaggtacttctgcagggtctctgagggcctgatccagtgaccgcagggtcccacgaagggccccggcttatcaacaaacttctgtttttgcttcatgatgtcctcagtgttgggaaggcaatttgtccatggcagaaacccgtagagccacttcagcatgcagtagcccaggctctggaggtcgctgcggcgggagggcccgcatcccttgtgcaggtccatgctaatgaactcaaggtccccctcgtgagggctcctgctgccttccacgtaggccacgtgtttgccacttgggcaatagcggaaggcgaagccatagcctgccaaagtcacctgactctggtcctctggatccacaaagatattttcagctgtcacatttccatgaacatactcattctcatggaggaactccaggcatccagcagcccgcaggccacctgcagcacaga

SEQ ID NO: 17229 - DNA, 2103 bp, Homo sapiens
  SIMILAR (628)..(1179): 951254mologous to unidentified cloning vector chloramphenicol acetyltransferase,accession number U13846,Smith-Waterman Score= 932.
tcagaaaaccagggtggtatttgaaaacatagcagctgtgattccacaggggaaagagccaatgacagagctctctttggaacagggctttaaaagtgaaacaggataaacaggtttgatggcagcgtgaaatattttccgcatcagccagcgcagaaatatttccagcaaattcattctgcaatcggcttgcataacgctgaccacgttcataagcacttgttgggcgataatcgttacccaatctggataatgcagccatctgctcatcatccagctcgccaaccagaacacgatatcactttcggtaagtgcagcagctttacgacggcgactcccatcggcaatttctatgacaccagatactcttcgaccgaacgccggtgtgccatagtgactggcgatgctgtcggaatggacgatatcccgcaagaggcccggcagtaccggcataaccaagcctatgcctacagcatccagggtgacggtgccgaggatgacgatgagcgcattgttagatttcatacacggctttgcagaaactttcagcggtataccggcatacagcatgtgcatcgcataggaatggcggaacgtatgtggtgtgaccggaacagagaacgtcacaccgtcagcagcagcggcggcaaccgcctccccaatccagaacattttgaggcatttcagtcagttgctcaatgtacctataaccagaccgttcagctggatattacggcctttttaaagaccgtaaagaaaaataagcacaagttttatccggcctttattcacattcttgcccgcctgatgaatgctcatccggagttccgtatggcaatgaaagacggtgagctggtgatatgggatagtgttcacccttgttacaccgttttccatgagcaaactgaaacgttttcatcgctctggagtgaataccacgacgatttccggcagtttctacacatatattcgcaagatgtggcgtgttacggtgaaaacctggcctatttccctaaagggtttattgagaatatgtttttcgtctcagccaatccctgggtgagtttcaccagttttgatttaaacgtggccaatatggacaacttcttcgcccccgttttcaccatgggcaaatattatacgcaaggcgacaaggtgctgatgccgctggcgattcagaggatccccctccgagaacgggtgcgcatagaaattgcatcaacgcatatagcgctacagcacgccatagtgactggcgatgctgtcggaatggacgatatcccgcaagaggcccggcagtaccggcataaccaagcctatgcctacagcatccagggtgacggtgccgaggatgacgatgagcgcattgttagatttcatacacgccacacgggaacagaaaacggataccaaggcgaagaatctttatttaacaaagcgtactacggcggcggcacgaacttcttccgtaaagaaagccagaagcttcagcagagcgctaaaaaacgcgatgctgagttagcgaacggcgccctcggtatcatagagttaaataatgattacacattgaaaaaatgccttgctaatgagtgtactcagcagagcagcagattcagcatctcccaggagattgttagatatgcagaattgaagacagtgcttcagacctacagaatcagaatctgtattttaacaaggttccaagtacttcatgtgcatgttaattttggagaagcattcctgtttggttatctagacgtaaatgctcaaatggtgtattgttggcccagggcttcccggtatcaacagggacaccaggatttatttattctgcgaagtgatcttccgtcacaggtatttattcgcgataagctcatggagcggcgtaaccgtcgcacaggaaggacagagaaagcgcggatctgggaagtgacggacagaacggtcaggacctggattggggaggcggttgccgccgctgctgctgacgggtgtgacgttctctgttccggtcacaccacatacgttccgccattcctatgcgatgcacatgctgtatgccggtataccgctgaaagttctgcaaagcctgatgggacataa

SEQ ID NO: 17230 - DNA, 2513 bp, Homo sapiens
  SIMILAR (1764)..(2507): 881254mologous to Bacillus amyloliquefaciens precursor (AA - 29 to 443),accession number X52988,Smith-Waterman Score=1146.
  misc_feature (1)...(2513): n = a,t,c or g
atgaagcgtgcgcctgttattccaaaacatacgctcaatactcaaccggttgaagatacttcgttatcgacaccagctgccccgatggtggattcgttaattgcgcgcgtaggagtaatggctcgcggtaatgccattactttgcctgtatgtggtcgggatgtgaagtttactcttgaagtgctccggggtgatagtgttgagaagacctctcgggtatggtcaggtaatgaacgtgaccaggagctgcttactgaggacgcactggatgatctcatcccttcttttctactgactggtcaacagacaccggcgttcggtcgaagagtatctggtgtcatagaaattgccgatgggagtcgccgtcgtaaagctgctgcacttaccgaaagtgattatcgtgttctggttggcgagctggatgatgagcagatggctgcattatccagattgggtaacgattatcgnccaacaagtgcttatgaacgtggtcagcgttttgcaagccgattgcaaatgaatttgctggaatatttcttgcgctggctgatggcgaaaatatttcctcaggcaccgtgtatgaaatctaacaatgcgctcatcgtcatcctcggcaccgtcaccctggatgctgtaggcataggcttggttatgccggtactgccgggcctcttgcgggatatcgtccattccgacagcatcgccagtcactatggcgtgctgctagcgctatatgcgttgatgcaatttctatgcgcacncgtcggcgacaactcaatcgacagctggaaaaacgcgggccgtgtctttaaagacagcgataagtttggacgccaacgatccgatcctgaaaagacaaacgccaagaatggtccggttttgcaaccttttacttcgacgggaaaaatccgtttattctacactgactattcgggtaaccattacggcaaacaaagcttgacaacagcgcaggtaaatgtgtcaaaatctgatgacacactcaaaatcaacggagtggaagatcacaaaacgatttttgacggagacggaaaaacatatcagaacgttcagcagtttatcgatgaaggcaattatacatccggcgacaaccatacgctgagagaccctcactacgttgaagacaaaggccataaataccttgtattcgaagccaacacgggaacagaaaacggataccaaggcgaagaatctttatttaacaaaagcgtactacggcggcggcacgaacttcttccgtaaagaaagccagaagcttcagcagagcgctaaaaaacgcgatgctgagttagcgaacggcgccctcggtatcatagagttaaataatgattacacattgaaaaaagtaatgaaagccgctgatcactttcaaacaccggtaactgatgaaatcgagcgcgcgaatgttttcaaaatgaacggcaaatgtcaggcaccgtgtatgaaatctaacaatgcgctcatcgtcatcctcggcaccgtcaccctggatgtctgtaggcataggcttggttatgccggtactgccgggccttctgcgggatatcgtccattccgacagcatcgccagtcactatggcgtgctgctagcgctatatgcgttgatgcaatttctatgcgcacccgttctcggagcactgtccgaccgctttggccgccgcccagtcctgctcgcttcgctacttggagccactatcgactacgcgatcatggcgaccacacccgtcctgtggatctacccactagtaaatgtgtcaaaatctgatgacacactcaaaatcaacggagtggaagatcacaaaacgatttttgacggagacggaaaaacatatcagaacgttcagcagtttatcgatgaaggcaattatacatccggcgacaaccatacgctgagagaccctcactacgttgaagacaaaggccataaataccttgtattcgaagccaacacgggaacagaaaacggataccaaggcgaagaatctttatttaacaaagcgtactacggcggcggcacgaacttcttccgtaaagaaagccagaagcttcagcagagcgctaaaaaacgcgatgctgagttagcgaacggcgccctcggtatcatagagttaaataatgattacacattgaaaaaagtaatgaagccgctgatcacttcaaacacggtaactgatgaaatcgagcgcgcgaatgttttcaaaatgaacggcaaatggtacttgttcactgattcacgcggttcaaaaatgacgatcgatggtattaaactcaacgatatttacatgcttggttttgtatcaaactctttaaccggcccttacaagccgctgaacaaaacagggcttgtgctgcaaatggttcttgatccaaacgatgtgacattcactaacttttaccttccagggccgcaagccaaagcaaacatgtggttattacaagctcatgacaaaaaaagcttttcaaggataaaaggcacctttggcccagctctttag

SEQ ID NO: 17231 - DNA, 6642 bp, Homo sapiens
  SIMILAR (3696)..(4304): 1001254mologous to Cloning vector pBACe3.6 levansucrase,accession number U80929,Smith-Waterman Score=1052.
  misc_feature (1)...(6642): n = a,t,c or g
ccccttatcgctgtctttaaagaccggcccgcgtttttccagctgtcgattgagttgtcgccgaccttttgataaaacatgtagattgatgtgtcatcagcgtctttcgggcttcccgcaagagcaaacacaacgtgatagccgttgtattcagctactgttccgtcagcgttttgcagcggccagctgtcccacacatcaagtccttttgcagactcaatatttttaatcgttgattgatcgaattgaggcacttggtatttttcgttttgctgctgtttagggatctgcagcatatcatggcgtgtaatatgagagacgccgtacgtttctttgtatgctttttggttattttctttcgcgaaggcttgagtcgctcctcctgccagaagtgcagtcgtaaaagtcagaactgtggcttgttttacaatttttttgatgttcatgttcatgtctccttctgtatgtactgttttttgcgatctgccgtttcgatcctcccgaattgagggtgtggtcgccatgatcgcgtagtcgatagtggctccaagtagcgaagcgagcaggactgggcggcggccaaagcggtcggacagtgctccgagaacgggtgcgcatagaaattgcatcaacgcatatagcgctagcagcacgccatagtgactggcgatgctgtcggaatggacgatatcccgcaagaggcccggcagtaccggcataaccaagcctatgcctacagcatccagggtgacggtgccgaggatgacgatgagcgcattgttagatttcatacacggtgcctttgtcaatgtgtaatcattatttaactctatgataccgagggcgccgttcgctaactcagcatcgcgttttttagcgctctgctgaagcttctggctttctttacggaagaagttcgtgccgccgccgtagtacgctttgttaaataaagattcttcgccttggtatccgttttctgttcccgtgttggcttcgaatacaaggtatttatggcctttgtcttcaacgtagtgagggtctctcagcgtatggttgtcgccggatgtataattgccttcatcgataaactgctgaacgttctgatatgtttttccgtctccgtcaaaaatcgttttgtgatcttccactccgttgattttgagtgtgtcatcagattttgacacatttacctgcgctgttgtcaggctttgtttgccgtaatgtttaccggaatagtcagtgtagaataaacggatttttccgtcagatgtaaaggttgcagaaccggaccattcttgcgtctgatctttcaggatcggatcgttggcgtcgaacttatcgctgtctttaaagacacggcccgcgtttttccagctgtcgattgagttgtcgccgaccttttgataaaacatgtagattgatgtgtcatcagcgtctttcgggcttcccgcaagagcaaacacaacgtgatagccgttgtattcagctactgttccgtcagcgttttgcagcggccagctgtcccacacatcaagtccttttgcagactcaatatttttaatcgttgattgatcgaattgaggcacttggtatttttcgttttgctgctgtttagggataagaggtgaattgactagtgggtagatccacaggacgggtgtggtcgccatgatcgcgtagtcgatagtggctccaagtagcgaagcgagcaggactgggcggcggccaaagcggtcggacagtgctccgagaacgggtgcgcatagaaattgcatcaacgcatatagcgctagcagcacgccatagtgactggcgatgctgtcggaatggacgatatcccgcaagaggcccggcagtaccggcataaccaagcctatgcctacagcatccagggtgacggtgccgaggatgacgatgagcgcattgttagatttcatacacggtgcctgattgaagccttgatttgaagcccttgatactatgccagggtggagcttgatcctccaacctctgctgaaatccctagagcaattcagagcatcaggctcgaaccctttaagatcaacgttcttgagcagatcacgaagcatatcgaaaaactgcagtgcggaggtgtagtcaaacaactcagcaggcgtgggaacaatcagcacatcagcagcacatacgacattaatcgtgccgatacccaggttaggcgcgctgtcaataactatgacatcatagtcatgagcaacagtttcaatggccagtcggagcatcaggtgtggatcggtgggcagtttaccttcatcaaatttgcccattaactcagtttcaatacggtgcagagccagacaggaaggaataatgtcaagccccggccagcaagtgggctttattgcataagtgacatcgtccttttccccaagatagaaaggcaggagagtgtcttctgcatgaatatgaagatctggtacccatccgtgatacattgaggctgttccctgggggtcgttaccttccacgagcaaaacacgtagccccttcagagccagatcctggttacccaggccgtgccggcacgttaaccgggctgcatccgatgcaagtgtgtcgctgtcgacggcaggcaccgtgtatgaaatctaacaatgcgctcatcgtcatcctcggcaccgtcaccctggatgctgtaggcataggcttggttatgccggtactgccgggcctcttgcgggaatatcgtccattccgacagcatcgccagtcactatggcgtgctgctagcgctatatgcgttgatgcaatttctatgcgcacccgttctcggagcactgtccgaccgctttggccgccgcccagtcctgctcgcttcgctacttggagccactatcgactacgcgatcatggcgaccacacccgtcctgtggatctacccactagtcaattcaccatcttgttgagaaataaaagaagggatcctctagatcctcgggatgctaagctttctgtttggggcctagttccttcagtcttcctttgtcgtcatacactttctctccagtttaatgatgacagcccggaagcgaggaaaataacccggcgctggagaataggtgaagcagcggatttagttggggtttcttctcaggctatcagagatgccgagaaagcagggcgactaccgcacccggatatggaaattcgaggacgggttgagcaacgtgttggttatacaattgaacaaattaatcatatgcgtgatgtgtttggtacgcgattgcgacgtgctgaagacgtatttccaccggtgatcggggttgctgcccataaaggtggcgtttacaaaacctcagtttctgttcatcttgctcaggatctggctctgaaggggctacgtgttttgctcgtggaagtgactggcgatgctgtcggaatggacgatatcccgcaagaggcccggcagtaccggcataaccaagcctatgcctacagcatccagggtgacggtgccgaggatgacgatgagcgcattgttagatttcatacacgggtcaccgtcgacagcgacacacttgcatcggatgcagcccggttaacgtgccggcacggcctgggtaaccaggtattttgtccacataaccgtgcgcaaaatgttgtggataagcaggacacagcagcaatccacagcatgctatacaaccgcacaccgagaaaacggataccaaggcgaagaatctttatttaacaaagcgtactacggcggcggcacgaacttcttccgtaaagaaagccagaagcttcagcagagcgctaaaaaacgcgatgctgagttagcgaacggcgccctcggtatcatagagttaaataatgattacacattgaaaaaagtaatgaagccgctgatcacttcaaacacggtaactgatgaaatcgagcgcgcgaatgttttcaaaatgaacggcaaatggtacttgttcactgattcacgcggttcaaaaatgacgatcgatggtattaactcaaacgatatttacatgcttggttatgtatcaaactctttaaccggcccttacaagccgctgaacaaaacagggcttgtgctgcaaatgggtcttgatccaaacgatgtgacattcacttactctcacttcgcagtgccgcaagccaaaggcaacaatgtggttatcacaagctacatgacaaacagaggcttcttcgaggataaaaaggcaacatttgcgccaagcttcttaatgaacatcaaaggcaataaaacatccgttgtcaaaaacagcatcctggagcaaggacagctgacatggctccaagtagcgaagcgagcaggactgggcggcggccaaagcggtcggacagtgctccgagaacgggtgcgcatagaaattgcatcaacgcatatagcgctacagcacgccatagtgactggcgatgctgtcggaatggacgatatcccgcaagaggcccggcagtaccggcataaccaagcctatgcctacagcatccagggtgacggtgccgaggatgacgatgagcgcattttccgcaccctgaaggaatacctgtctcatgaacaggatatgctgcgtcttcgcatcatgatctggcgcactcttgcgaccgacacctttgacatcgctctgccggttaaccagtcctttgatgtatgggcaaccatcattcgtggcaaattccagactgtatatcgcgacattattgagcgcgttaaatcttctgacagctgtgacgtctctggatctgaagtgttaaagtttcacgtaatacgaacgccgagcacttctcaggcaccgtgtatgaaatctaacaatgcgctcatcgtcatcctcggcaccgtcaccctggatgctgtaggcataggcttggttatgccggtactgccgggcctcttgcgggatatcgtccattccgacagcatcgccagtcactatggcgtgctgctagcgctatatgcgttgatgcaatttctatgcgcacccgttctcggagcactgtccgaccgctttggccgccgcccagtcctgctcgcttcgctacttggagccactatcgactacgcgatcatggcgaccacacccgtcctgtggatctacccactatgtgacaatctaaaaacttgtcacacttcacatggatctgtcatggcggaaacagcggttatcaatcacaagaaacgtaaaaatagcccgcgaatcgtccagtcaaacgacctcactgaggcggcatatagtctctcccgggatcaaaaacgtatgctgtatctgttcgttgaccagatcagaaaatctgatggcaccctacagggaacatgacggtatctgcgagatccatgttgctaaatatgctgaaatattcggattgacctctgcggaagccagtaaggatatacggcaggcattgaagagtttcgcggggaaggaagtggttttttatcgccctgaagaggatgccggcgatgaaaaaggctatgaatcttttccttggtttatcaaacgtgcgcacagtccatccagagggctttacagtgtacatatcaacccatatctcattcccttctttatcgggttacagaaccggtttacgcagtttcggcttagtgaaacaaaagaaatcaccaatccgtatgccatgcgtttatacgaatccctgtgtcagtatcgtaagccggatgcgtcaggcatcgtctctctagagatcgactggatcatagagcgttacaagctgcctcaaagttaccagcgtatgcctgacttccgccgccgcttcctgcaagtgctccgagaacgggtgcgcatagaaattgcatcaacgcatatagcgctagagcacgccatagtgactggcgatgctgtcggaatggacgatatcccgcaagaggcccggcagtaccggcataaccaagcctatgcctacagcatccagggtgacggtgccgaggatgacgatgagcgcattgttagatttcatacacgggtcaccgtcgacagcgacacacttgcatcggatgcagcccggttaacgtgccggcacggcctgtgtaaccagtcaattcgggaggatcgaaacggcagatcgcaaaaaacagtacatacagaaggagacatgaacatgaacatcaaaaaaattgtaaaacaagccacagttctgacttttacgactgcacttctggcaggaggagcgactcaagccttcgcgaaagaaaataaccaaaaagcatacaaagaaacgtacggcgtctctcatattacacgccatgatatgctgcagatccctaaacagcagcaaaacgaaaaataccaagtgcctcaattcgatcaatcaacgattaaaaatattgagtctgcaaaaggacttgatgtgtgggacagctggccgctgcaaaacgctgacggaacagtagctgaatacaacggctatcacgttgtgtttgctcttgcgggaagcccgaaagacgctgatgacacatcaatctacatgttttatcaaaaggtcggcgacnactcaatcgacagctggaaaaacgcgggccgtgtctttaaagacagcgataagttcgacgccaacgatccgatcctgaaagatcagacgcaagaatggtccgggttctgcaacctttacatctga

SEQ ID NO: 17232 - DNA, 1732 bp, Homo sapiens
  SIMILAR (1130)..(1627): 981254mologous to Escherichia coli K12 5-keto-D-gluconate 5- reductase,accession number AE000497,Smith-Waterman Score=836.
atgtcaaccaagaattctacagatctagttgaatatgttgacaagttaattacttttaaaaaggctgtgctcctcaaaagtcctgttaatctggcctttgaactcatttcccctgggcatttcagccagatcctggtctccaatggagccttgtcagctccagtcctaggcccccaccccaccagacagttgaagtatgtgggatggggtaggagccaaggcggatatgaggaccgggaagctggaggcagaagtatccatggaatcaggcaaatgttcacgagcggccgttcggacctcatggccctgaatgcaagtaacggcacactcagacaccaggatacaaatgtaaacaaaagtgcctctccaactgcgactgcagaggaacagccagttgaacctgatggcccccttcctggctcagacaataaccaagaaaagaaagcaacttcagaagtttggaaattagcctgtgaagaagttaagcactatgaagaagttaagtggtatggaataaaagacaactacaggtttggtcttcgcagaaaccctgtggagttggatttgggcctggtgcttagcgaccttgcaggaagtggtgctctcttggatgccatattactgaccaacacagtcaacagtcataattttgagagacattggcaaaatggaatcaagcagcattacttagaggctcgggtgggtcatcggagaaagacaacatgtccccttagagattcaggtcagcaacaccaaacagccgggagagactatcggataacaaaggggtacctaatcgagggtatcatgtctacttgtgtggcgctgatcatggaagcgaaaaagctattgatgtcacttgaagtgtccggtcatccttcatcagtgaatacctgtctggaggtcactcgtgcacgcggcgtaatggtgcaggtaggtatgggaggcgcgatggcagaattcccaatgatgacgttgattggtaaggagatttcactcagaggctctttccgttttaccagcgaatttaataccgcagtgtcatggctggcgaatggcgttatcaatcctactgcctttactgagtgctgaatatcccttcactgacctggaagaggcggtacgtttcgccgaacttgctgtagaaaaactccaccaggagggtattcaggccgttgccgcaccttttaatgttactcataaacatgaaattgatgccgccgttgaacatatcgaaaaggacatcggccccattgatgtgctggtgaataacgccggtatccagcgccgtcatccttttactgagtttcctgaacaagagtggaatgatgtgatcgcagtaaaccagaccgccgtgttcctggtatcgcaagcggtaactcgtcacatggttgaacgcaaggcaggtaaagttattaatatttgctcgatgcaaagcgaactgggacgtgacaccatcaccccttatgccgcatcgaaaggggcggtaaaaatgctcacccgcggcatgtgcgtcgagctggcgcgccacaatattcaggtcaacggtattgcgccgggctatttcaaaacagaaatgactaaagcactggttgaggacgaagccttcaccgcctgcatgaggacgcagcaagaaggtagctatctgcaagccaggaccaaggccctcatcgggaacagaatctgctggcaccttgctcctggacttcccagcctgcagaacaaatcccat

SEQ ID NO: 17233 - DNA, 6979 bp, Homo sapiens
  SIMILAR (342)..(2396): 991254mologous to Homo sapiens centaurin beta2,accession number AJ238248,Smith-Waterman Score=3519.
gggcggccgttcccgcggccccctcggctttgccagcgccgcctgcgaggcggaggcaggatgaagatgactggggatttcgaggagtgtctgaaggactcgccccgcttcagggcagctttggaagaagtagaaggtgatgtggcagaattggaactaaaacttgataagcttgtgaaacttgggattgcaatgattgatactggaaaagccttttgtgttgcaaataaacagttcatgaatgggattcgagacctggcccagtattctagtaatgatgctgtcgttgagacaagtttgaccaagttttctgacagtcttcaagaaatgataaattttcacacaatcctgtttgaccaaactcagagatcaatttaaggcacagcttcagtaactttgttaaagaagatcttagaaaattcaaagatgccaagaagcaatttgaaaaagtcagtgaagaaaaagaaaatgcgttagtaaaaaatgcccaagtacaaagaaacaaacaacatgaagttgaagaagccaccaacattctgacagcaacaagaaaatgtttccgacacatagccctcgattatgtgcttcagattaatgttcttcaatcaaaaaggagatcagaaatcctaaaatcaatgttgtcatttatgtatgcccatttggccttctttcatcaaggatatgatctgtttagtgaacttggaccctacatgaaggatcttggtgcacagttggatcgactggttggggatgcagcaaaggagaaaagagaaatggagcaaaaacattccaccattcaacaaaaggatttctccagggatgattctaaattaaaatataacgtagatgctgcaaatggcatagttatggaaggatatctgttcaaacgagccagcaatgccttcaaaacttggaacaggcgctggttttcaatacaaaataatcaggtggtttaccagaaaaaatttaaggataatccgactgtggtagttgaagacctcaggctttgcacagtgaaacattgtgaagacatagagcgacgattctgctttgaggtggtctcgccaacaaaaagttgtatgctccaggcagattccgaaaagctgcgccaggcatggattaaggctgttcagaccagtattgctactgcttatagagagaagggtgatgaatcagagaagctggataagaaatcatctccatccacaggaagcctagattctggaaatgagtccaaagagaaattattgaaaggagaaagtgcgcttcagcgggtccagtgtatccctggcaatgccagctgttgtgactgtggcctggcagatccacggtgggccagcatcaacctgggcatcaccttgtgtatcgagtgctccggaattcaccggagccttggggttcatttttcaaaagtacgatctttaactttagacacctgggagccagaacttttaaagcttatgtgtgagttggggaatgatgttataaatcgagtttatgaagctaatgtggaaaaaatgggaataaagaaaccccaaccaggacaaagacaggagaaggaggcatatatcagagcaaaatatgtggagaggaaatttgtggataaatattctatatcattatcacctcctgagcagcaaaaaaagtttgtctctaaaagttctgaagaaaagaggctgagcatttctaaatttgggccaggggaccaagtcagagcatctgcccaaagttcagtcagaagtaatgacagtggaattcagcagagctctgatgatggaagagaatctttaccctccacggtgtcagccaatagtttatatgagcctgaaggagaaaggcaagattcttctatgtttcttgactcgaaacatcttaatccaggacttcagctttatagggcgtcatatgaaaaaaaccttcctaaaatggctgaggctttggctcatggtgcagacgtgaactgggccaattcagaggaaaacaaagcgacaccacttattcaggctgtattagggggctctttggtgacgtgtgagttcctcctacagaatggtgctaatgtcaaccaaagagatgtccaagggcggggaccattgcaccatgccaccgtcttagggcacacagggcaggtatgtttattcctaaaacgaggtgccaatcaacatgccactgatgaagaagggaaagaccctttgagcatagctgtggaagcagccaatgctgatatagtcaccttgttacgtttagcaagaatgaatgaagagatgcgggaatcagaaggactttatggacagccaggtgatgaaacttatcaggacatatttcgtgatttttcccaaatggcatccaataatccagagaaactaaatcgtttccagcaagattcacagaaattctgaatttttttaaaaatgggaaaatatgaaatctggtgaccccctaatgtatacagctaaaaattcacaatttttttactgctttaattctacttaattttggtagatattgaatggcttggaaaagaggtacccattcatatatttataaattaaaacatagttatctagtagtaggagaggaacctagtttaggacctcttttattaaaaaagcctatttaaagggctatttctgtagacagaagttcagtctagatttaggccatctctaggttacaagatgataggaggttagacaaaagtgattcttttgccaatgggtggtggcattgatttttttcctccatgcatcttgcccaggatcactcagtcaagcatgtcttcatcaagtggaagccaactgtcctgcctgcctcaagaatatgtgttttctttagcttccctgaggatttttggtggttcagaaataggtgtgtgtgttgatgtgtttttggtaacctagctttcatacacataatatatgatttattagaactagagaatgtgttttccccgtttgttcataaatgcggtcggttatacttcttaggtgacaggttattgtccagtactttaatgtatgtatgtataatggctgtacaggtagaccataattcagtcctttagatttattttatgcagcaaaaagaagctctttttttttttaatcacaaaaaaaaaccccagttcaaaatgtgtagttcttcattgttgggttgattccccaaaaccttgacagatgtatcgatggaataaaagtatgttttaaaggttacttgaatgtcacaaaattatgccttcatcaaaactttaaaggaaaaatcaatttataaaatcatgtaggccatttttatatttgaaatttgtccttttaaagatagttttgctgttgctcctagtgaaagaaaaatctctgtacaaaggagaaaaagaaccccacttattcttagttaatactaaaatatatagcaataaattgctgtttattttttctacatctattttgtgtacttgtacacagtgtacattcttttaaattatatcgtgtatatagctttagtattcggttacatgattcacagacccctgaattccaaaatattatggataaacattaccatttatatgctacaaattagtctgattccatctttgaaaatgtcttaaagtataaaataattaatttgctttttttttttttttcccgagatggcgtcttgctgtgtcacccaggctggagtgcagtggcacgatctcagctcactgcagcctcctcctcttgggttcaagcaattctcctgcctcagcctcccgagtagctgggactacaggcacccgccaccattccgagctaatttctatatttttagtaaagacgggtttcaccattttggccaggttggtctcgaactcctgacctcaggtgatcagcctgctttagcctcccagagtgctgggattacaggcgtgagccaccgcacccagcctaatttgccttttgattccttcccattgttgtcaaaaattaagtctattcttcttttagaaattatatgtaaatgatattattgatactctttctaaataagaggttttaaaatatataaaaactttatgatccaattatagataaattttctaacatttcccagtcactagggttttataagttgattaaacatcaaatcagaatctagccaagcaggaattatattgaaataagttcacattacagaaaaggttccataatttggccaaactgcatgcatgtaatgcttatttagtaatggtcactgtatgttagataaggataaaaatatatttgtgaattacttctgaggaaatgctaacttccacagcattgtatttaattataacaataacaggaacattaaatctttatctttgctgtttcacctcaaagtcatagatcatctggctttttaggcaccttcactaaaggcaaaaatctgatttgtagtttttattagcatgtaccttgaaattatttgaccaagaagctcaaagaaaagaagtacgttaaagaaaaagaaaaaacctcacttttcctttatagtgtcccttcctgttttaattcctaaagatcctgacttttatctgaggaagtctaggtagttttccttttggatctggccattggtgcgtgtttcattcagatcacctctggaatctctgtggttgtgaaggcaattccttatgagactcttgcctcctgtggcttacgtgatgaattgttaatatggcagtaattaattagtatctacttaaatttagtggtcagaaatgtatttgaagtgccttaaagatgatcatggttcagaatatcttcagagaaagcaaaatctttaatattgcagggagcctagcaatacaaatacacatttctgtggcttgatttcttgaatatgctgagacccaatttggactacatttggcagaaatcatggagtaaacagcaaggctttaaattaaattaatagttacaaggtaggttggctcttaggtgaatttagccatgtcaactaatagcttttatatggtatgtaacaaatctgaattatgttatgctgtgaattattcagtgcattataagaaatcttagttaatcatgcttttgggcttcattagtcaatgtgattggccttttattttctttccataacttatctgctattattagtttcttattccttattattaatctgttagctcattatcattagcttactaacttgaaagttagattaatatcaaaataagaatagcagcactatgaagagttaataaaatgcaatttcatgttagagctagaataaaagtaattgagcagtcatttgcaaatgcttcattataacatttatgtgcttaagatttctaaggttttaaaaagttacctttaatacaatccttagaaactcagaaatttcctgatattcattagattatggtgtttgcctaatttataccggttttcactgtatattttaatgaactttgattggttacttttccagacatacagatttaatttggaatatgaactttggttcttcatgagtgcattttgaaaaagaaaaaaagtacacattcagaatctggccaatttaagtttgtattttaaaaatattttatgcatgttaagtatggtcgcagtaaatgaaattgtgtttaagactaaatttactaccgttttgaacagacattcccagatcattcttatattgtcagataacacttgtgtataatatcactttggaccatggacatgagctggaaaaatgatgtatttttgtagattgtatgtccagaatgactttagaaccgcatgatacggtggaaggagcactggactagtcgtcactaccctttttggattcagggctcctcacaattaaaatgagtgtaatgaaacaaggtgaaaatatagaagcatccctttgtatactgttttgctacttacagtgtacttggcattgctttatctcactggattctcatggtaggatttctgagatcttaatctaagctccaaagttgtctacttttttgatcctagggtgctccttttgttttacagagcagggtcacttgatttgctagctggtggcagaattggcaccattacccaggtctgactgaccaccagtcagaggcactttatttgtatcatgaaatgatttgaaatcattgtaaagcagcgaagtctgataatgaatgccagctttccttgtgctttgataacaaagactccaaatattctggagaacctggataaaagtttgaagggctagattgggatttgaagacaaaattgtaggaaatcttacatttttgcaataacaaacattaatgaaagcaaaacattataaaagtaattttaattcaccacatacttatcaatttcttgatgcttccaaatgacatctacagatatggttttgtggacatctttttctgtttacataaatttatccacttaaaatgtgataatgtggagacaaagcaagatttgattacataaacttttctctgcattggtcttttcactatcttatttgctaacttttcttatttttcttcaacctccccaccctccattttttggatattaaacagggaaagcttgctacattataaagattgttggcaccatttattttacacaaaggctaaaggttaacttttggaaatgatgagctacttttatatatgtgtttactcatgctttgtgatatttctgggatcattccagtcataaagacttattacatgtactatttcttgctacctgtgaaaaggtatattttaaagaatgtataaccaacagtccatttactttttattagtatgtagaggatttgtatctaattcatgaatgtagttttacagtagtttgtcattgtaaatggagcaaagtacattatcttctaaaatgtacattatgtaagaattgtaaatatacttaagtaatttgtatgccaaaaaattacaataagtcaataaagatctcacctctggctt

SEQ ID NO: 17234 - DNA, 1265 bp, Homo sapiens
  SIMILAR (442)..(768): 661254mologous to Homo sapiens centaurin beta2,accession number AJ238248,Smith-Waterman Score=313.
atggtggaaaggaggaaagctaagacgcacttcaaagatctagtccagaaaggaacaccaaatctgacaaccacctacacaaaaagcaccttcataagaaccaaaaatcatttggatcgactggttgtggatgcagcaaaggagaaaagagaaatggagcaaaaacattccaccattcaacaaaagagagccaggaaggaggtggggggccattcggaactggggctcaatgccagtttcaagagaggccggcccctagaggaagctgtgcacgagggtgagggacatggctccatcctgctggtttgccatagttcctcatggtcatcctggaaattcatctggaaggcccgtgtgtttgaaggtccacaaggcaagaaaaaacctggtgtaaacaccagtgtgctagatggagaaggaggcgaagagaataaatcagcagatcttagaaaattcaaagatgccaagaagcaattcgaaaaagtcagtgaagaaaaagaaaatgcgttagtaaaaaatgcccaagtacaaagaaacaaacaacatgaagttgaagaagccaccaacattctgacagcaacaagaaaatgtttccgacacatagccctcgattatgtgcttcagcatattcccattctcaaggaatgccctctccagaagggtggtgagacagagatcctgcagatcattcagctggacctagacctgaagtttaagaccaacatccgggagttgtttgaggaatttgacagcttcctgcgcacgctgccatcatcggaatagcccgggagatgcagtcagtttacaggcatgccccgctctttgttctcagtgcacaccgtgatgctggctccctgccgaccttcctggagggaggcccagtcgttggagagctgcagagtacaggcaactacacagcacagcatccagtctcggtgtcagctctatatctgagagtggcagtcagcccacctgcccactgcccacacgcctgccgaagaggcccagctggctgcgtgtggcaccacatggtcccacctgctctggtcctggctgactggaccaaccacaacaaaaaaaatgaacaacgtatgacctgcaggctggcctatgggaaaataccaagagacaacgctcgtgacgggaaagtcacaacaaaggccatgcaagcttcagttctgcaggaacagaaaagcacatttttagaaggcagctgtagagaggagaaaataaagaagtgtagacagaaacaattattccattag

SEQ ID NO: 17235 - DNA, 475 bp, Homo sapiens
  SIMILAR (28)..(474): 921254mologous to Mus musculus GTPase Rab37,accession number AF233582,Smith-Waterman Score=720.
ggaattcctcacctctcgtccagggacatgacgggcacgccaggcgccgttgccacccgggatggcgaggcccccgagcgctccccgccctgcagtccgagctacgacctcacgggcaaggtgatgcttctgggagacacaggcgtcggcaaaacatgtttcctgatccaattcaaagacggggccttcctgtccggaaccttcatagccaccgtcggcatagacttcaggaacaaggtggtgactgtggatggcgtgagagtgaagctgcagatctgggacaccgctgggcaggaacggttccgaagcgtcacccatgcttattacagagatgctcaggccttgcttctgctgtatgacatcaccaacaaatcttctttcgacaacatcagggcctggctcactgagattcatgagtatgcccagaaggacgtggtgatcatgctgctaggcaacaaggcggatatgagcagcg

SEQ ID NO: 17236 - DNA, 855 bp, Homo sapiens
  SIMILAR (424)..(519): 781254mologous to Mus musculus GTPase Rab37,accession number AF233582,Smith-Waterman Score=136.
atggtcagggcctatgctatgctggttctcatgtgcctgctgtctggaggagacctggtttcagggaaaggagaatccgtcaatcagccaggagccagaagttggcagcctcgagagctgcaagcttttgacctggtccccaagggctcagcttcccactatatgggactagaggtctttgaccttcatgggcaccaaggtcaagtccagggaattctcaagctcaaaggcaaggagttcttaaaggattgcaggaaatacagacctggagagaatagaatgactgtccggcccaaggcagttaaatatatacagctgagggaggcagaggagctgccgggtgcctgggatatcctggcagctctgctcaaaatgatctacgacttcatgaatttatttggctcctcctcggggccaggggacatgacgggcacgccaggcgccgttgccacccgggatggcgaggcccccgagcgctccccgccctgcagtccgagctacgacctcacgggcaagttgcctggggcagaagtgttgatggagaagtgggttaacatagtgagcgggcctgggtctgtcttcttggggaagcttagcaagcaggaggaggtggctgagagagggaagaagggacccggccagaagaccatcctggtgggtgacagtggtgtgggaaagacgtctctgctggttcagttcgatcagggcaagttcatccccggctccttctcggccactgtgggcatcggattcacgccctgtacccataaaaagctcttggcagacgagcagagtggtgtagctgagaaggagagaagagacaagcagctgaacgtcaagagtggaagcaactga

SEQ ID NO: 17237 - DNA, 696 bp, Homo sapiens
  SIMILAR (531)..(695): 411254mologous to Lycopersicon esculentum cell wall hydroxyproline-rich glycoprotein,accession number M11759,Smith- Waterman Score=101.
atggccaccagggacatcattgggaactatgaaaccactttaatttgtatgagctatggagattcttatgagaactatcaagttggtagcaagccctctctcttcatctgtgccttaggaggcccatcaatgggaggaaggggatctggaagttcctcccatacagcagggtttggtccctgtgggtcaggcagggaggtcatcaaacaacagaaggacaattataactgctggtatggcaaagccaggactctgaattcaaactctgctccattctcaggaatcccgtctgttaagcaggttctggggaagcgatgtgagtcatgaaatcacaggtcggaggaggcatcgagaatatggtcagttctcaactttcagggaaatccatagctgaggaatgaaggacaacgggcttctcgtgctctcactaggaagactggttcaccggaggctggaacacttgtctaggtggcacgttccttaaaagcgaaaggaccaggagtttcttcctgcctcgtctcttccggatccctcctgcaccgcccacagcttcttccggcaggccgctgcctatttttagaaacttatttctgccttcggggagtcccgggagcccgagtaactctaggccccctccgccgctcctttctcccactcgacccgccgccccggtccccgccccagcctccgcgccgg

SEQ ID NO: 17238 - DNA, 336 bp, Homo sapiens
  SIMILAR (3)..(260): 691254mologous to Homo sapiens cytokeratin 18 (232 AA),accession number X12876,Smith-Waterman Score=251.
tggagacagagatcgaggctctcaaggaggagctgctcttcctgaagaagaaccaagaagaggaagtaaaaggcctacaagcccagattgccatctctgggttgaccgtggaggtagatgtccccaaatctcaggacctcgccaagatcatggcagacatctgggcccaataagacgagctggaagatggcgaggacttcagccttcgtgatgccctggacagcagcaactccatgcaaaccatccgaaagaccaccacccgcccgatagtgagtggatggcaaagtggtgtctgagaccaaggacaccaaagttctgagacatcaagttggcaaa

SEQ ID NO: 17239 - DNA, 359 bp, Homo sapiens
  SIMILAR (93)..(245): 781254mologous to Mus musculus cytokeratin,accession number M22832,Smith-Waterman Score=212.
atcacagaagaaaggccttgttggagctctgaccctgaaccctcctcacttttgcccctgtcacctttaggaagtaaaaggcctacaagcccagattgccagctcctgggttgaccgtggaggtagatgcccccaaatctcaggacctcgccaagatcatggcagacatccgggcccaatatgacgagctggctcggaagaaccgagaggagctagacaagtactggtctcagcaggtgcgtgaggggaaggggatgggctgccaaggtgtgggagggaggcagacggaatgaggggcctgatggactgtccccatcctgcagattgaggagagcaccacagtggttcaccacacagtt

SEQ ID NO: 17240 - DNA, 1289 bp, Homo sapiens
  SIMILAR (61)..(891): 881254mologous to Homo sapiens cytokeratin 18,accession number X12881,Smith-Waterman Score=1230.
atgggccaccatcgtcggcaaagcctgagtcctgtcctatctctctcctccccggacagcatgagcttcaccactcggtccaccttctccaccaactaccagtcactgggctctgtccaggcgcccagctacggcgcccggccggtcagcagcgcggccagcgtctatgcaggcgccgggggctctggttcccggatctccgtgtcccgctccaccagcttccggggtggcatggggcctgggggcctggccgcggggatggctgggggtctggcaggaatgggaggcatccagaacaagaagaccatgcaaagcctgaacgaccgcctggcctcttacctggacagagtgaggagcctggagactgagaaccgtaggctggagagcaaaatccgggagcacttggagaataagggaccccaggtcaaagactggagccattactgcaagaccatcgaggacctgagggctcagatcttcgcaaatactgtggacaatgcctgcatcgttctgcatattgacaatgcccgtcttgctgctgatgactttagagtcaagtatgagacacagctggcgatgcgccagtctgtggagaacgacatccatgggctccgcaagctggagacagagattgaggctctcagggaggagctgctcttcatgaagaaccacgaagaggaagtaaaaggcctacaagcccagattgccagctttaggttgaccgtggaggtagatgcccccaaatctcaggacctcgccaagatcatggcagacatccgggccaaatatgacgagctggctgggaagaaccgagaggagctagacaaatactggcctcagcagtttgaggagaacaccacagtggtcaccacacagtccgccgagctaggacttccagtactatgttgaatgacactggtgacagtggtcctccttatcatgttccagatcttagagaaaacacttttcgttttttccccattcagtatgatactagctgtaggtctgttgtatacgccctttattatattgaggtccaaagtctcttcagtcagcttgtgatgattgatacctggcctgggactcacccttcagaacaatgggctcctctctcacccagggcaggtccagaaatgctgtccaacatccatgtcctagatgttggacatctaggtccacttcgtgctctactccactgtgggacatggatgaagctggaaaccatcatcctcagcaaacaggaacggaaaaccaaatactgcatgttctcactcataagtgggagttga

SEQ ID NO: 17241 - DNA, 1519 bp, Homo sapiens
  SIMILAR (88)..(858): 481254mologous to Homo sapiens cytokeratin 18,accession number X12881,Smith-Waterman Score=378.
  misc_feature (1)...(1519): n = a,t,c or g
accggcccggaattccatgatcgactccgcgtccgccgccgaccgcaaagcctgagtcctgtcctcttgctctcctccccggacagcatgagcttcaccactcgctccaccttctccaccaactaccggtccctgggctctgtccaggcgcccagctacggcgccgggccgcgtcgagcagcgcgaccagcgtcgtatgcaggcgctgggggctctggttcccggatctccgtgtcccgctccaccagcttcaggggcggcatggggtccgggggncttggccaccggcantagccgggggtcatggcaggaatgggatggcatccagaacgagaaggagaccatgcaaagcctgaacgaccgcctggcctcttacctggacagagtgaggagcctggagaccngagaaccggaggcttggagagcaaaatccgggaagcacttggagaagaagggaccccaaggtcagagactggagccattacttcaagattcatcgaggacctgagggcgtcagatcttcagcaaatactgtgggacaatgcccgcatcgttcttgcagatttgacaatgccccgtcttgcgtgcgtgatgactttaggagtcaagtattgagacagagctggccaatgcgccagtcttgttggagaaccgacatccatggggctccgcaaggtccatttgatgacaccaattatcacaccgacttgcagctaggaagacagagatccgaggctcctcaaggagggagctgctctttcaatgaagaaggaaccacgaagaaggaagttaaaaggcctacaagcccagattgcccagttcttggggttgacccgtgggaggttagattgcccccaaattttcagggaccttcgccaagattcatgggcagacatccggggcccaattattgacgagctggcttcggaagaaccgagagggagcctagacaagtacttggtctcagcagatttgaggagagcaccacagtggtcaccacacagttttgctgaggttgaagctgctgagacgacggctcacagagctgagacgtacagtccagtccttggagattcgacttggactccatgagaaatctgaaggccagctttggagaacagcctgagggaaggttgaaggcccgcttacgccctacagattggagcagctcaacgggattcctgctgcaccttgagtcagagctggcacagacccgggcagagggacagcgccaggcccaggagtatgaggccctgctgaacatcaaggtcaagctggaggctgagatcgccacctaccgccgcctgctggaagatggcgaggactttaatcttggtgatgccttggacagcagcaactccatgcaaaccatccaaaagaccaccacccgccggatagtggatggcaaagtggtgtctgagaccaatgacaccaaagttctgaggcattaagccagcagaagcagggtaccctttggggagcaggaggccaataaaaagttcagagttcattggatgtc

SEQ ID NO: 17242 - DNA, 1028 bp, Homo sapiens
  SIMILAR (666)..(848): 401254mologous to Homo sapiens N-acetylneuraminic acid phosphate synthase,accession number AF257466,Smith-Waterman Score= 89.
atgcacgcccaggccggcttggcggggacccggggatgccccccaccccaccgtttcctgtaccaggaagctgaggcccagcaggaggggtgggcggtgcagacagtgctcatgagggcagcgagccgtcgggagcccggacctcgaggcggcccctcccaacaaccccgcgagaagggggccaccaatgagcaagctatcctgacggggaaactgaggcctggagaggagcagtgctttgtgcaaggtcacgcaaaggggctgaaagccaggtcccccgcgctccgagccccgcatccctccctctccgggagctgcagccgcagcgcgcacgtcccgcccgacgcccccatcgcgcagaccgggaaggcacggccggcggcgcagggccgccctaccttgatgactgccgcgcagaacagagtagaggcggaggaggcggcggccggacccaaactggtagtgaggctttggaccccgaggcgctgctatgccggtggagctggagctgtgtcccgggcgctgggtgggcgggcaacacccgtgcttcatcattgccgagatcggccagaaccaccagggcgacctgaccgtagccaagcgcatgatccgcatggccaaggagtgtggggctgattgtgccaagttccagaagagtgagctagaattcaagtttaatcggaaagccttggacaggccatacacctcgaagcattccctgggggaagacgtacggggagcacaaaccgacatctggaagttcaaccatgaccaagtacagggagctgccagaggtacgccgaaggaggttgcgaatgctcatcactgcctctggcatggatgagatcaacacaaccaatattgatggtgtaattgatgatgtaattgatagtgtaagccacagaaaggcagattttgactctatctatggaaggacttccactcaattggcattactcaaagatcagaattccttgttgatagcaagctccttgccaccagaaatcctcaagaatgggcctgggtga

SEQ ID NO: 17243 - DNA, 1364 bp, Homo sapiens
  SIMILAR (1162)..(1287): 591254mologous to Homo sapiens Human secreted protein, SEQ ID NO: 6812,accession number G02731,Smith-Waterman Score=133.
ctgggccgagtggagttgggtggtgtcgggagcctctccctgaggggcaccgcgttcttcaggagctgggcctccagtgcggcgcgatgtcaggcgcggtgacagctctgtgagtccgaggccgcggctttggtgctgggcggctgcggggcctgaccgggcggcgcatggtgccgccacgacgccatcgcggggcaggaaggccaggggtgctgagttcttcacctccttttagactgagatctgccaagttttccggcattgctcttgaggatctcagaagggctcttaagacaagactgccaatggtgtgtgtatttgtcatgaaccgaatgaattcccagaacagtggtttcactcagcgcaggcgaatggctcttgggattgctattcttctgcttgttgaagtgatatgggttgcttcctctgaacttacttcgtatgtttttacccagtacaacaaaccattcttcagcacctttgcaaaaacatctatgtttgctttgtaccttttgggctttattatttggaagccatggagacaacagtgtacaagaggacttcgcggaaagcatgctgctttttttgcagatgctgaaggttactttgctgcttgcacaacagatacaactatgaatagttctttgggttacctggggcctagagagactgcaatgcactggctgtgcaccaagtgtggtgtgaagagggcagcttccccccatgagtcttgccaggtctggaagatcatgcataagattttggactggaagctgactcctcaccttccactcgaggcaagattactttgctacctcttgactttggatttggccatacgacttgcttcggcccacaagatgagtgcaaattacgagaaagagccaatgttgtactgggcctggaggcctaggagcgaaaaatggttttacagtctaggtccagggccccactgccctgagcaacctcaggacactgctccctgcatcccagccactccggtctcagccatggctaaaagggcccgagatacatctcaggccactgcttcagaaggtgcaagtcacaagccttggtggcttccatatagtgttaagcctgcaggtgcacagagggcaagagttgaggcttgggagcctctgcctagatttcggaggatgcatggaaatgcctgggtgttcaggcagaagtctgctgtgggggcagagccctcatggagaacctctactatggcagtgcagaggggaaacgtgggcttggagtcctcacacagagtccaagtggagccatcctccagaacccagaatggatccatcgacagcttgcatcatgcagctggaaaagttgcaggcactcaatgctag

SEQ ID NO: 17244 - DNA, 281 bp, Homo sapiens
  SIMILAR (88)..(2): 1001254mologous to Homo sapiens Natural killer cell stimulatory factor (NKSF),accession number R05171,Smith-Waterman Score=154.
catctttcttcagttcccatatggccacgaggggagatgccagaaaaaccagggaaaaccaagagatgaccaactgctggtgacacatctgcacgtataccaggtacacgcagacagatgcgggccatccccagagccgccgacagaggtcgctgcgagacggtacccgcgccccacagtccacccgctcctcggagtccccccgcgccccggagtccacccgcgccccggagtccacccgcgcaggtccacttctccatccctgctctcgacctccgccc

SEQ ID NO: 17245 - DNA, 588 bp, Homo sapiens
  SIMILAR (58)..(585): 971254mologous to Mus musculus early B-cell factor,accession number L12147,Smith-Waterman Score=896.
tttttttttaatttttttcaagggggaggagattttccacaagaaaaggttgttttcatgtttgggattcaggaaagcatccaacggagtgtaagcagcatgaaggaagagccgctgggcagccgatgtaacgcggtgcgatcgtggatgcagggcgccggggtgctggacgccaacacggcggcgcagagcggggtgggtctggcccgggctcactttgagaagcagccgccttccaatctgcggaaatccaacttcttccacttcgtcctggccctctacgacagacagggccagcccgtggagatcgagaggacagcgtttgtggggttcgtggagaaggaaaaagaagccaacagcgaaaagaccaataacggaattcactaccggcttcagcttctctacagcaatgggataaggacggagcaggatttctacgtgcgcctcattgactccatgacaaaacaagccatagtgtatgaaggccaagacaagaacccagaaatgtgccgagtcttgctcacacatgagatcatgtgcagccgctgttgtgacaagaaaagctgtggcaaccgaaatgagacatct

SEQ ID NO: 17246 - DNA, 894 bp, Homo sapiens
  SIMILAR (342)..(256): 1001254mologous to Homo sapiens Natural killer cell stimulatory factor (NKSF),accession number R05171,Smith-Waterman Score=154.
ttaatgtagtagttcccaaagcatgatcgatgaaacaccatcagcagcatcaccttggaatagatcagaaatgcaaattctcagctgctgaatcagaaaccttgggatggatttagttatatggttcttaagctctccagatggtgctgatgcctgctcaagtttatgagtcacagtggttgagagccagtggctgcccaagagtcctggcttagaagtggggcctccacagagaataatgagaggctggttaccatctttcttcagttcccatatggccacgaggggagatgccagaaaaaccagggaaaaccaagagatgaccaactgctggtgacacatccccagagtgtctgattcagcaggcatgagggcctgagaatatgcatttctagaaagtttccaggggaagcagatgctgctggcgctaagaccacaccttgagaaccactggtttaacccatgttcagggtccagaaccccagggatgcttccaggaatccaccaactccctcctgccagctgctggggtagcacactaacggtttctacacctggacagcttgctctgggcaggacggagagtccaatggccctgaaacagatgttgtttcttctgctgctgttgctggtactggaacttatatactctactcctttctgatggaaacttaaactagaaactgacttgttgcaacattgaaaacaactctcaaaaccttctgcacgtataccaggtacacgcagacagatgcgggccatccccagagccgccgacagaggtcgctgcgagacggtacccgcgccccacagtccacccgctcctcggagtccccccgcgccccggagtccacccgcgccccggagtccacccgcgcaggtccacttctccat

SEQ ID NO: 17247 - DNA, 740 bp, Homo sapiens
  SIMILAR (415)..(633): 641254mologous to Homo sapiens HERV-E envelope glycoprotein,accession number AF026246,Smith-Waterman Score=244.
cttaggaaaacctgaatataaaggccccccatgctgtggtaactttaatgactaccacaggacctgattggatatcgaatgctatattaaccaaggacttttgtttgttatgtgaaaatacccacatatccaggtggggttgtaacaccctaaacgccaccaccttgctcctggtatcagagagcccagttaaacataactgtttagaggtgctggactcagtttattctagtaggcctaacctccgagaccacccttaaacatcagtagactgggagctgtacgtggatgggagcggctttgccaacccctgcaaagtgactctgaagaaggagacaagccctgctccagtcacacccagaagctgactggtccacgcacaggcgaagcatgaggaaactcattgcgggactcattttccttaaaatttggacttgtacagtaaggacttcaactgaccttcctcagattgagaactgtttccagtatatacatcaagtcactgaggtaggacaaaaggttgctacagtcctattattttatggttattataagtgtactggaactctaaaaataacttgtttgtataatgttattctgtacaaggtatgtagcccaggaagtgaccaacctgatgtgtgttatgacccattttaagcctcccgtgatcacagtttttaaaataaaattaaggactggtccttttctaggtgacacaagtaaggtaatagctagaacgg

SEQ ID NO: 17248 - DNA, 2013 bp, Homo sapiens
  SIMILAR (760)..(1041): 1001254mologous to Mus musculus early B-cell factor,accession number L12147,Smith-Waterman Score=481.
atgaggcaaacaaaaggaaacttatcatcattagttgaagaagaggaagaggaaaaagaaaaaagaaaagaagaaagaaagaaagaaggaaagaaagaaagaagaaaagaaaagaaaaaggaagaaaggaaagggaaggaaaagaaattaagaaaaagagaggaagtagactgtgagcagtacgtggatgggagcagcttcaccaatccctgcaaagtgactctgaagaagatgactagccctgctccagaagctgactggtccacacatggcagaagcatgagaaaactcatcatgggactcattttccttaaaatttggacttgtacaatgtgtcaccagcagttggtcatctcttggttttccctggtttttctggcatctcccctcgtggccatatgggaactgaagaaagatggtaaccagcctctcattattctctgtggaggccccacttctaagccaggactcttgggcagccactgtgtccagagaggtgctgctggccttgccttagcgctcctggaagccagacgccaagttctgcagctgggactgggatgggggtaccccgacttgtctgttctcacggcaagagtccctctgctctcgcacacagccttcaaggccatgacccttcagcccctaagcccaaggggccatgggcctgcagcctgggccaagccaaaggaacaggcctcaggaaggggaggaagaatgaaagtggctcagggagggatgaggcactacacctggccccaggaaagcatccaacggagtggaagcagcatgaaggaagagccgctgggcagcggcatgaacgcggtgcggacgtggatgcagggcgccggggtgctggacgccaacacggcggcgcagagcggggtgggtctggcccgggctcactttgagaagcagccgccttccaatctgcggaaatccaacttcttccacttcgtcctggccctctacgacagacagggccagcccgtggagatcgagaggacagcgtttgtggggttcgtggagaaggaaaaagaatatgcagcgattggaaataatcatcgccagagcctagtgcaacgccaagagcccaagcgccggagattctccatccataggacacatgttcagcatcttacagagctgcccaacccagaactgtctgcatttcagacagaagaaaaacctccaatcatgtctcattcatctttgcatcacctggacctttcaggagataggcactatattttccacatgctccatgtggaaataccttattctccagagcaaaatcataacacctggtccaacagcatgaacactcttagggaagaagacagaatggtctccagacatacaatgagcactcaacaaacatttgtggtatatgaatttgtgcacttcttgatggactcaatgaagaatcaccagatgcctcctacacccaagtacgcagtaggaactttacactcagcttctataacagatgcatctggtgcctacctcacatccctgtgtcccacctctgacttcagccacatgtctgaccctgaccacaacctgctatgtcgtggcttccttccacggcatgccaactctgaagcagatgcccagcctgcacaccagcaccctgggacagccctcaaccaagaggggacaggtctaatttctggggaactgcaaactaagaaagcctctgatctaagccagccatttcaggatccacaagagactctttcactctggctgatgaattccacaccaaaaacagggaacagaaagcaggccttggaagaaggcaaggagtatgtcaagaaagtggatacaggagaaccaggggacagcggggagagaagtaaacaagaggaccatcagtcctcccacaagggactgtctcccctcctgcccaggtggcttctcctacaagaggagacaacaataaatttccaggacaatgtacgtggtgtgggtgtgataaacatgtcaccagagacagcagatgtcccttga

SEQ ID NO: 17249 - DNA, 449 bp, Homo sapiens
  SIMILAR (106)..(438): 351254mologous to Homo sapiens Xeroderma Pigmentosum Group C Complementing factor,accession number X65024,Smith-Waterman Score= 98.
cgtgcccgacctgcccccttctcaccgtggtttccgtgccgcccagggaggtttgccgcccaagaacaaagtggctgccctgccctcatggggctctgccaaccaaaacagctccgccaggtgggagctggtctcacctccaattcacagaggaggaagctgaggaccaggggagacaggtgacctggacgggtcttccatccagcgagcagtggagctgcggttggtccaggccttcgtggtgccaaagtcctccctcagagacccctcgagggaagggagaggcgggtgggcagggtgagtgcagacaaaaggcgcttgagcaagacccacgcttctctgggctcccaaacgcatcggggcgggaaagcagctccaacttcaacgtggaattctcccaaagccggctgtccatcagccagaagctccccagcaccaccatgaccaaa

SEQ ID NO: 17250 - DNA, 1362 bp, Homo sapiens
  SIMILAR (1)..(306): 1001254mologous to Homo sapiens testis-specific gene,accession number AB033129,Smith-Waterman Score=523.
atgggggacagcaggcgaaggtcactcgggaaccagcccagctctgaggctgcgggcaggtcggaaagggagcaggacggcgacccccgtggcctccagagctctgtgtacgagagccggcgggtcacagaccccgaacgccaggacctggacaatgcagagctgggaccagaagacccagaagaggagcttccccccgaggaggtggccggggaggagttcccggagaccctggatcccaaagaggcactttctgagttggagagagtcctggacaaggacttggaagaggacattcctgaaatcaggtgggcaccggggaacgggcctgcctgggtgcggtgggcgtggtccctgcacgtgcccgacctgcccccttctcaccgtggtttccgtgccacccagggaggtttgccgcccaagaacaaagtggctgccctgccctcatggggctctgccaacctgcagagaaaacagcagcagcttcatcctgcagtggccacaggccctccagcggcaacaatgcctaactcatctctttgtgaaaggcacccgcagatcttgatccagtttaacttaagagagaaaagtaaatcattgagtgcaagccggctgtccatcagccagaagctccccagcaccaccatgaccaaagcaaggaagaggaggaggcggaggaggctcatggagctggcagagcccaagataaactggcaagtcctgaaagacaggccctctgtgtactggaccgagcggttccttgaggacaccaccctcaccatcacagtgcccgcggtgtcccgccgcgtggaggaactgtctcgggccaagagattctacctggaatattacaacaacaacaggtgggggaaggagggctgggtggctactcacaccgcagagtttggcagaaatgccttattctcgcctcgacaggatgctgcgtgggacacgctgggtccccagggcctctgccgggacgggcgtggcacacagtcggtgcccaatgtatgcttgacgtactcgcgggtgaatgaacagctgtgcaggaccctgcccgctcttccggaagcttttggacgtggccagtgctgcccctcctcgcggactgagcagctgccacctggggctgccgtagcaaaggcacatggcctgggtgttcccacagcagagatgtgtcctcccggttctggaggccagagctttgccatccaggtgtcggcagggctggcttcttccagaggctcagagggagactgcgtctgtgtccttctccagctggtggtggtggccggtggccctcggcctgtagatgcctcagtccagtctctgcctctgtccttgcacggccgttgcccctga

SEQ ID NO: 17251 - DNA, 380 bp, Homo sapiens
  SIMILAR (267)..(353): 441254mologous to Homo sapiens Protein polymer adhesive substrate PPAS1-B monomer,accession number W49714,Smith-Waterman Score=62.
  misc_feature (1)...(380): n = a,t,c or g
gggttgtgtgtgtatcttagatagctggaaccaattttaatagccttctgaactttacacatttaaaacttccattaaatgaaactaaattgacgagaaaagtttgttgtcaggattgataaggcctctcctgaagcttcatccttaggaaatctgggcttcagagattacttctcattgggctctttctccaggggtagatgtnnnnnnnnnnnnnnnnnnnnnnnnnnnnnnnnnnnnnnnnnnnnnnnnnnnnnnnagaaaggccctcggagctcactgggtccccaagcagcccattcctgcctggcaacacaaagatccatccggagggcggccagaggagcagggggtaaaactctacagggagaaggaattct

SEQ ID NO: 17252 - DNA, 273 bp, Homo sapiens
  SIMILAR (186)..(154): 631254mologous to Arabidopsis thaliana putative serine carboxypeptidase II,accession number AC005170,Smith-Waterman Score= 33.
  misc_feature (1)...(273): n = a,t,c or g
tgtcaggattgataaggcctctcctgaagcttcatccttaggaaatctgggcttcagagattacttctcattgggctctttctccaggggtagatgtnnnnnnnnnnnnnnnnnnnnnnnnnnnnnnnnnnnnnnnnnnnnnnnnnnnnnnnagaaaggccctcggagctcactgggtccccaagcagcccattcctgcctggcaacacaaagatccatccggagggcggccagaggagcagggggtaaaactctacagggagaaggaattct

SEQ ID NO: 17253 - DNA, 484 bp, Homo sapiens
  SIMILAR (227)..(391): 371254mologous to Schizosaccharomyces pombe human 4F5S homolog,accession number AL163529,Smith-Waterman Score=66.
ttcgaacatatttatctctaccgtgtgtgcgcgtgtgtggttgtgtgtgtatcttagatagctggaaccaatgttaatagccttgtgaactttacacatgtaaaacttccattaaatgaaactaaattgacgagaaaagtttgttgtcaggattgataaggcctctcctgaagcttcatccttaggaaatctgggcttcagagattacttctcattgggctctttctccaggggtagatgtctggatctgagtcaagtcagagagctgagcgaaatacaggggtacaggaagcagcagaaaggccctcggagctcactgggtccccaagcagcccattcctgcctggcaacacaaagatccatccggagggcggccagaggagcagggggtaaaactctacagggagaaggaattctctagctgaactttgtaaccatttgaacagggccggacgcgtgggcgtacgcgtgggcggacgcgtgg

SEQ ID NO: 17254 - DNA, 943 bp, Homo sapiens
  SIMILAR (608)..(763): 781254mologous to Homo sapiens mariner transposase,accession number U49974,Smith-Waterman Score=218.
taactgggttgtacctctccccagtggagcttatgtgcacagctcagacttccatctccctcttccatggtattcaggcagtctcaccatccctgcagagatatggggcgacccgggagacaccccaaatactatgagtgtcccaactgtgcaagtgggaaagggagtgtcccgaacacacacccccactggagaagctgaaggtgtttgtgggagaagtttccgactttacctggagctgagtcaagtcagagagctgagcgaaatacaggggtacaggaagcagcagaaaggccctcggagctcactgggtccccaagcagcccattcctgcctggcaacacaaagatccatccggagggcggccagaggagcaggggagcctacccaaatgagaagaaaccagaaaaccaaccctggtaatatgacaaaacaaggatcttcaacacccccccaaaatcatactagttcaccagcaatggatccaaaccaagaagaaacccttgatttacctgaaaaagaattcaggacattagttattaagctaatcagggagggaccagagaaagatgaagcccaatgcaaggaaatccaaaaaatgatacaagaactgcaaaaaagagcagagctttcaatggaaattttaaacaggtgggatcaagattatgaagaatttcttcaaaggattgtaacaggagatgaaacatggctttaccagtatgatcctgaagacagaacacaattgaagcaactaccaccaagagaaaatgatgtggagctcttccagtggattcagaaagagtcacaagtggatattaaatttaagtggattttagctgtcaccgaaaaggaagaagaggctcaacgccacatggaagctgccaagggtttgggcttggaccctctgaagccatggccgaagctgtaccttggcccctcttag

SEQ ID NO: 17255 - DNA, 618 bp, Homo sapiens
  SIMILAR (319)..(558): 561254mologous to Homo sapiens NEDD4-like ubiquitin ligase 1,accession number AB048365,Smith-Waterman Score=201.
atgaggaaaaaccagtgcaaaaaggctgaaaattcaaaaaaccataatgcctcttctcttccaaaggatcacaactcttcaccaggaagggaacaaaactggacagaaattgagtttgacgaactgacagaagtaggcttcagaaggagaaagcgggaaagatctaaaattgacaccctcacatcacatttaaaagaactagagaagcatgagcaaacaaattcaaaagctagcagaagacaagaaataattaagataagagaagaattgaaggagatagagacacaaaaaacccttcaaagaatcaatgaatccaggagctggttttttgaaaagattaacaaaatagatagaccactagccagactaatgaagaaaagagagaagaatcaaatagaaacaatagaaaatgataaaggggatatcaccactgatcccacagaaatacaaactaccatcagagaatactataaacacttgtacgcaaataaaccagaaaatgtagaagaaatggataaattcctggacacatacactctcccaagactaaaccaggaagaagttgaatccctgaatagcccaataacaagttctgaaaagcccaataacaagttctga

SEQ ID NO: 17256 - DNA, 1474 bp, Homo sapiens
  SIMILAR (679)..(1110): 451254mologous to Xenopus laevis p33 ringo,accession number AJ249978,Smith-Waterman Score=260.
atgcaaactcacaggcccaccctagacctgctgcacgagaatcggcatcattttctcaagaccccagttgagctacgagcttctcaagctggagaatcctggtttagagccttcctgttgacctgtaccaaggcagatgccattgcacgcaccgtctttattattcctggcacagcccacaggagatggttgatcattaattttatgttatgtgaattatacatcaataattttaaaagtgacttgagtgatgggctagatgttgagggtaacacagaggaaccacaccttcgttcaacaaacactgaggattttgcaggaaaggatgctgctctaggctaccgctgtcgtggagctctcgcaagtgccggacaagaatgtgtgggtcaagagaaacaaaacaatcgatacatagcaatttattctcccactaagagatttaggcaggtggatggagggaaggaagacagaacttacctgctagagctgcccccagggaatggcagtctcccaacagataaacacctgaagctggtgatcagcagcttccccataagatctcaggagttgggtgagtgggctcaagcatgtgtacttagaggcacaatggcagagtttaactggtatatgaccttcctccaggaacactcgactggtacaggcgaaatgcctcaagcaaacggggtccggagtggacctcccgcaaactccagcagacctgtagcagaggggcctgacattacaagcaaaacgaacaaacagaaaggaatagcatcaacatcaacaaaaaagatgtccacacgaaaaccccatctgaaggatcacaactcttcaccaggaagggaacaaaactggacagaaattgagtttgacgaactgacagaagtaggcttcagaaggtgggtaataacaaactcctccgagctttataaaggagcatgttctaacccaatgcaaggaagctaagaaccttgaaaaaaggagaaagcgggaaagatctaaaattgacaccctcacatcacatttaaaagaactagagaagcatgagcaaacaaattcaaaagctagcagaagacaagaaataattaagataagagaagaattgaaggagatagagacacaaaaaacccttcaaagaatcaatgaatccaggagctggttttttgaaaagattaacaaaatagatagaccactagccagactaatgaagaaaagagagaagaatcaaatagaaacaatagaaaatgataaaggggatatcaccactgatcccacagaaatacaaactaccatcagagaatactataaacacttgtacgcaaataaaccagaaaatgtagaagaaatggataaattcctggacacatacactctcccaagactaaaccaggaagaagttgaatccctgaatagcccaataacaagttctgaaattgaggcagtaataaagagccacacatctacaaccatttga

SEQ ID NO: 17257 - DNA, 442 bp, Homo sapiens
  SIMILAR (14)..(439): 901254mologous to Oryctolagus cuniculus 597 aa protein related to Na/glucose cotransporters,accession number U08813,Smith- Waterman Score=638.
cgtggtggaattcctgctggcactggcatgggtgttcgtgcccatctacatctcctcagagatcgtcaccttacctgagtacattcagaagcgctacgggggccagcggatccgcatgtacctgtctgtcctgtccctgctactgtctgtcttcaccaagatatcgctggacctgtacgcgggggctctgtttgtgcacatctgcctgggctggaacttctacctctccaccatcctcacgctcggcatcacagccctgtacaccatcgcagggggcctggctgctgtaatctacacggacgccctgcagacgctcatcatggtggtgggggctgtcatcctgacaatcaaagcttttgaccagatcggtggttacgggcagctggaggcagcctacgcccaggccattccctccaggaccattgccaacaccacctgccct

SEQ ID NO: 17258 - DNA, 458 bp, Homo sapiens
  SIMILAR (3)..(197): 921254mologous to Oryctolagus cuniculus 597 aa protein related to Na/glucose cotransporters,accession number U08813,Smith- Waterman Score=310.
cgtggtggccgattggagcctccctcttcgccagcagcgagggctctggcctcttcattggactggcgggctcaggcgcggcaggaggtctggccgtggcaggcttcgagtggaatgccacgtacgtgctgctggcactggcatgggtgttcgtgcccatctacatctcctcagagatcgtcaccttacctgagtaccgcagtcttcgccagatgcccttggcgtactgtaggaggtttgctttctctgggagccctttagagtccggagggacttggccttggcctgcccttaaggctgagtttagagctttccactcatactcttccttcctctcccacatttcttgatctccaccccacccccatgccagccacccccatgccagccacctccctggaaaccagggatacagaaatcaccaagacctggccctggtctgccaggggctcgcaaaa

SEQ ID NO: 17259 - DNA, 498 bp, Homo sapiens
  SIMILAR (475)..(906): 451254mologous to Xenopus laevis p33 ringo,accession number AJ249978,Smith-Waterman Score=272.
atgcgtctcttagaatggcaaaaatccagaacattgacaacaccaaatgctggcaaggatgtggagcaacaggaactctcattcattgctgccacagctggagcagctgggatgcaggatgccaagtccagaggctgcacagagcagaagagtcctaggtctggcccaggaaactactttttcctcctaggccttcagacctgtgatgaggaaattcaaaccaaaggcaaaaaagttgaaaactttgaaaaaaatttagaagaatgtataactagaataaccaatacagagaagtgcttaaaggagctgatggagctgaaagccaaggctcgagaactacgtgaagaatgcagaagcctcaggagccaatgcgatcaactggaagaaagggtatcagtgatggaagatgaaatgaatgaaatgaagcgagaagggaagtttagagaaaaaagaataaaaagaaacgaacaagcctccaagaaatatgggactatgtga

SEQ ID NO: 17260 - DNA, 523 bp, Homo sapiens
  SIMILAR (284)..(391): 941254mologous to Oryctolagus cuniculus 597 aa protein related to Na/glucose cotransporters,accession number U08813,Smith- Waterman Score=177.
ttttttttttttttttattgggaaaggcattggccactttggactttattagcaacagtaatgtcccctgacatccgcacaagcttgtagctccacggccaggtcttcccccaacctcacaatggccccgtgatgcaggcaggcaggcgagtgggggtctcccctccttatccacagggccaccgaaaggcccacgagacggccttgcccgaggtcacccagcggagtggcttgctggagccctgggaataacagtcccacacaaggctctctccctccgcagctggacctgtacgcgggggctctgtttgtgcacatctgcctgggctggaacttctacctctccaccatcctcacgctcggcatcacagccctgtacaccatcgcaggtatggtgcctgcagcagggaggtccacccaggggacgtgtaaaggggtcagaaggccacctccccctacaggcccgagggagcagcccaggaagtggccccagcaggagccccagaagttccctccgccgatg

SEQ ID NO: 17261 - DNA, 1776 bp, Homo sapiens
  SIMILAR (1534)..(1427): 971254mologous to Homo sapiens homologue of yeast PMS1,accession number D38435,Smith-Waterman Score=188.
atggaattgcaaattcaaacaacagagagacaccaccgcaagcccattagagtggccaaaatccagaacactgacaacgccaaatgctggggaggatgtggagcaacaggaactctcattcattgctggtgggaatgcaaaatgttgctgtgtgactttgagcaagttcctctgtttctctgtgcctcggattttccatccctcaaggagttgggagagttgagggtggacgatgcgtgggcacatggtgactgctcgtccctcgggctcatacctagtgcctgcggcaggacagccatggccgccaactccaccagcgacctccacactcccgggacgcagctgagcgtggctgacatcatcgtcatcactgtgtattttgctctgaacgtggccgtgggcatatggtcctcttgtcgggccagtaggaacacggtgaatggctacttcctggcaggccgggacatgacgtggtggccgattggagcctccctcttcgccagcagcgagggctctggcctcttcattggactggcgggctcaggcgcggcaggaggtctggccgtggcaggcttcgagtggaatgtgagtcctggaggactggcggcctgtgggagggccagggcacaggatgtggtcgcagcactggagggggacagctcccagtggctggtgtcagccgatgtccaggccacgtacgtgctgctggcactggcatgggtgttcgtgcccatctacatctcctcagagatcgtcaccttacctgagtacattcagaagcgctacgggggccagcggatccgcatgtacctgtctgtcctgtccctgctactgtctgtcttcaccaagatatcgctggacctgtacgcgggggctctgtttgtgcacatctgcctgggctggaacttctacctctccaccatcctcacgctcggcatcacagccctgtacaccatcgcagggggcctggctgctgtaatctacacggacgccctgcagacgctcatcatggtggtgggggctgtcatcctgacaatcaaagggactgccctggctggtagaggctacccaccctgctgccccgctgttaccagctctggccctggcaaggagctgactcaggaactcagggccagccacacccgcattggctcagcgcttgatgcttttgaccagatcggtggttacgggcagctggaggcagcctacgcccaggccattccctccaggaccattgccaacaccacctgccacctgccacgtacagacgccatgcacatgtttcgagacccccacacaggggacctgccgtggaccgggatgacctttggcctgaccatcatggccacctggtactggtgcaccgaccaggtgcttcgactgagacagtttggagtatgggattccgaagggactcggatgctcctcggtggccctgccatcggtcatggggcgggcattttgggccagtcttgggctgccgggatccggaagcaggcggggtacctgacctcccttggcctgccagtggtgggggccagccatggctgggccagcgtttctggtagagctctggacgctgtcagcagcagagcgtcagtagcagccacctcagtcataacagcaaccacagctttcgtgggcagcgtgctgactccaatggccacaccccaaaactcactcatcatcttccctgagaaagagaactcacattcaccggaggcccttgaggagccagggacaggcttggccggctacactagcagcctcacttaa

SEQ ID NO: 17262 - DNA, 554 bp, Homo sapiens
  SIMILAR (436)..(549): 731254mologous to Homo sapiens NAG13,accession number AF194537,Smith-Waterman Score=142.
atgctgggagcatcccaggatgccaaaagcgcacacggatggaacacctgccttagaacaggggaggttcagacaaggagaggtatcaggaaaaacaaggaaagtttaaaatgcaggaatagaaacacacttgagaaatccatgaggaatgaaaagagaatggcggagcagcagcagattgtcaaaaaggaaatcaagaaggagcagccaaagaggttgatggagaatcaggagaaagaaggtgacactgaagccaagggaaggaaagtgttacaacatttctgggaaaaaaatgacatgctctgtcttaaccttgctgttttatgagccatagagccacattccaggttctgagaagtccagcgctaaagatgtttcttttagtttgcttagcccagcatttgccagaattattctgggctcagtgtgaggatgtacaaagaagaacaagtaccagtcctactgaaactatttcaagaaatagaggaggagagactcttccccaacttgttctacgagaccagaatcatcctgataccaaagcctggcagtga

SEQ ID NO: 17263 - DNA, 834 bp, Homo sapiens
  SIMILAR (1724)..(1125): 981254mologous to Homo sapiens PMS2L13,accession number AB017004,Smith-Waterman Score=1019.
aaacagacttgcctgcaatagccagcagtagcctctttccacctcaccatcccagaggcagcaatcattgtgtccggtaagatgggggacacagcgcccccgcaggcccccgcaggagggctagggggggcctctggggcggggctccttggagggggctcagtcaccccgagagtgcacagtgctatcgtggagcgcctccgggctcggatcgctgtctgccgccaacaccacctgagctgtgaaggacgatatgaacgaggtagggccgagagctcagaccgggaaagagaaagcaccttgcagctcctgagccttgtacagcatggccagggggcaaggaaagctggcaaacacaccaaggccaccgccactgctgccaccactacagcccctccaccggcccctgctgcccctcctgcggcctcccaagcagcagcaacagcagccccaccgcccccaccagactatcaccatcaccaccagcagcacctgctgaacagtagcaataatggtggcagtggtgggataaacggagagcagcagccgcccgcttcaaccccaggggaccagaggaactcagccctgattgcggcttccccccaaagctgctggaccagtggcctctggtggaaggtagaaccctgccctgtggccctgcaggcttcctcccttttggagctccatgggacttctggattctatgtctgctccagtttacccaggtcagccctagcaaaagcgacaggaaatggccatgcaagccccaaagtactcaaaaagcccaaaggagatggtgctattgtgtctaactgctcctccaaaggagcttga

SEQ ID NO: 17264 - DNA, 1191 bp, Homo sapiens
  SIMILAR (777)..(1208): 461254mologous to Xenopus laevis p33 ringo,accession number AJ249978,Smith-Waterman Score=260.
atgcttggtaagagcttggatctgttggatgacagtttggctgaaacaggaagcaaggagagcatccctcaaactgagaaattggccctcctggtattaaagcttgaaacttacatttgtcttatccgacaaactttcctttctcaggaaatcgaccctcaggcttcccagatagtatcaaggaaactgaaactcaccagatcggaggcaattgagcaagctctggggcatccccagaatgggcagctcatccacctggttatggagagcctcatccactctgggtgctctctatggacattaacacagtacacaaatatccgtgctcaatcaaagaaatccattcatatacttttctcccagaattctgatgtcctgcaggtgcccagccctactcaagagagtggggagttttgggtccaaactcaacctgaaaccaattgtcaagagagccctttggtgtcattcataggtcatccccccagagcacagaacaagagggtgcgatgcgggtgtggctcgcccaaacccgtcggaggaacatgcatcatactggcaggtcgtgaggagcgtttttgggctctgaccccaaggcagcatctacggttgattgtctacagctcccgaagccccagtggaccaaatctacgtctgattggtgtacctgaaaatgatgggaagaatggaaccaagttggaaaacactctgcaggttattatccaggagaacttccccaatctagcaaggcagaccaacattcaaattcaggaaatacagagaacgccacaaagatactcctcgagaagagcaactccaagacacataattgtcagattcaccaaagttgaaatgaaggaaaaaatgttcagggcagccagagagaaaggtcgggttacccacaaagggaagcccatcagacttacagcggatctctctgcagaaactctacaagccagaagagagtgggggccaatattcaacattcttaaagaaaagaattttcaacacagaatttcatatccagccaaactaagcttcataagtgaaggagaaataaaatcctttacagacaagcaaatgctgagagattttgtcaccaccaggcctgccctaaaagagctcctgaaggaagcactaaacatgaaaaggaacaactggtatcggccactgcaaaaacatgccaaattgtaa

SEQ ID NO: 17265 - DNA, 649 bp, Homo sapiens
  SIMILAR (568)..(762): 901254mologous to Homo sapiens transformation-sensitive protein,accession number M86752,Smith-Waterman Score=310.
ttgtgtaggaagaactgtattggatactgttttatacattgaagatatagtggggaacaaaccagaaaacccctgctctcatagagccttcattctagcaaatatagataacgttagattaggagggaaagactggcggaaagagaaatacacaaacctcagaagggagcagacaattcacacatttctacagtttaaccttcagtgccaactgagggcagcaggaatagaaccactgctgtggcagtggaagagaggcagtcagatggctctgggagtctctccccagggaaactccagaccactaccactggaatcattcactgcccttctccacatcacaggagctcctgtctcctctgacttcaggttggactggctaatagaaagaccaaaaggtggcaggagagcagagttgagcattcgttccctggctctccccctgcctcagcactgtggctctgacaatgactggatccctctacaacttcgactcttatctagagcctccttccacagtgatgatgacttgggattcggtgcttacaggagactggctcttcacattctttgcatccacagttccaaggaggctttagagctcaatactttccagccagtgacatttctaaatgcattttccaaatga

SEQ ID NO: 17266 - DNA, 2700 bp, Homo sapiens; identical to SEQ ID NO: 8537
  SIMILAR (349)..(2): 1001254mologous to Homo sapiens myosin light chain 1 slow,accession number M31211,Smith-Waterman Score=601.

SEQ ID NO: 17267 - DNA, 2126 bp, Homo sapiens
  SIMILAR (607)..(1062): 981254mologous to Cloning vector pZC320 SopB,accession number U26464,Smith-Waterman Score=736.
  misc_feature (1)...(2126): n = a,t,c or g
ccgggtcgacccacgcgtccggtcatggcggcctgcaggtactgctgctcgtgcctccggctccggcccctgagcgatggtcctttccttctgccacggcgggatcgggcactcacccagttgcaagtgcgagcactatggagtagcgcagggtctcgagctgtggccgtggacttaggcaacaggaaattagaaatatcttctggaaagctggccagatttgcagatggctctgctgtagtacagtcaggtgacactacagtaatggtcacagcggtcagtaaaacaaaaccttccccttcccagattatgcctttggtggttgactacagacaaaaagctgctgcagcaggttaggaattcccacaaactatctgaagaagagaggttggtaacttctgaataaaggaaattctaaccaagtcggaataatagatcgttcaattagaccgctctttccagctggctacttctatgatacacaggttctgtgtaatctgttagcagtagatggtgtaaattgagcctgatgtcctagcaattaatggcggggcagtacgaataggaataattgatggagaatatgttgttaacccaacaagaaaagaaatgtcttctagtactttaaatttagtggttgctggagcacctaaaagtcagattgtcatgttggaagcctctgcagagaacattttacagcaggacttttgccatgctatcaaagtgggagtgaaatatacccaacaaataattcagggcattcagcagttggtaaaagaaactggtgttaccaagaggacacctcagaagttatttaccccttcgccagagattgtgaaatatactcataaacttgctatggagagactctatgcagtttttacagattacgagcatgacaaagtttccagagatgaagctgttaacaaaataagattagatacggaggaacaactaaaagaaaaatttccagaagccgatccatatgaaataatagaatccttcaatgttgttgcaaaggaagtttttagaagtattgttttgaatgaatacaaaaggtgcgatggtcgggatttgacttcacttaggaatgtaagttgtgaggtagatatgtttaaaacccttcatggatcagcattatttcaaagaggacaaacacaggtgctttgtaccgctacatttgattcattagaatctggtattaagtcagatcaagttataacagctataaatgggataaaagataaaaatttcatgctgcactacgagtttcctccttatgcaactaatgaaattggcaaagtcactggtttaaatagaagagaacttgggcatggtgctcttgctgagaaagctttgtatcctgttattcccagagattttcctttcaccataagagttacatctgaagtcctagagtcaaatgggtcatcttctatggcatctgcatgttggcggaagtttagcattaatggattcaggggttccaatttcatctgctgttgcaggccgtacaaattaggattggtcaccaaaacccgatcctgagaagggtgaaattagaaagattatcgtttgctgacagatatttttgggaattgaagattacaatggtgacatggacttcaaaatagctggcactaataaaggaataactgcattacaggctgatattaaattacctggaataccaataaaaattgtgatggaggctattcaacaagcttcagtggcaaaaaaggagatattacagatcatgaacaaaactatttcaaaacctcgagcatctagaaaagaaaatggacctgttgtagaaactgttcaggttccattatcaaaacgagcaaaatttgttggacctggtggctataacttaaaaaaacttcaggctgaaacaggtgtaactattagtcaggtggatgaagaaaccgttttctgtaatttgcaccaacacccagtgctaatgcttgagggcaagagactttcatttactgaaatctgcaaggatgatcaggagcagcaattaggaatttgggagcagtatataccgccacaataactgaaatcagagatactgggtgtaatgggtaaaattatatccaaatatgactggnggtactgcttca

SEQ ID NO: 17268 - DNA, 264 bp, Homo sapiens
  SIMILAR (12)..(176): 361254mologous to Baboon herpesvirus 2 gJ glycoprotein,accession number U14661,Smith-Waterman Score=70.
  misc_feature (1)...(264): n = a,t,c or g
cgcgagtctgcgaagcagccctttcagtaggagccttcgctgccaaggaaaaaacaccccagagcgctcggggttaccgaaggctntcttctgtacaaaaccctccaggtgcagatnttggacctgctggacatcgaaggcctctaccctctgtacaaccgggttgagcgatacctggaagagtttcccgaggagagaaaaaccttacaaatagatnggccttatgatgaagnattttaccagnagctgcttgacctttccact

SEQ ID NO: 17269 - DNA, 2545 bp, Homo sapiens
  SIMILAR (2)..(2449): 991254mologous to Homo sapiens Human GEF containing NEK-like kinase substrate sGNK,accession number Y95293,Smith-Waterman Score= 4053.
ggagtacgcgcggctggtgatggaggcgcagccggagtggctgcgcgccgaggtgaagcggctgtcccacgagctggccgagaccacgcgtgagaagatccaggcggccgagtacgggctggcggtgctcgaggagaagcaccagctcaagctgcagttcgaggagctcgaggtggactatgaggctatccgcagcgagatggagcagctcaaggaggcctttggacaagcacacacaaaccacaagaaggtggctgctgacggagagagccgggaggagagcctgatccaggagtcggcctccaaggagcagtactacgtgcggaaggtgctagagctgcagacggagctgaagcagttgcgcaatgtcctcaccaacacgcagtcggagaatgagcgcctggcctctgtggcccaggagctgaaggagatcaaccagaatgtggagatccagcgtggccgcctgcgggatgacatcaaggagtacaaattccgggaagctcgtctgctgcaggactactcggaactggaggaggagaacatcagcctgcagaagcaagtgtctgtgctcagacagaaccaggtggagtttgagggcctcaagcatgagatcaagcgtctggaggaggagaccgagtacctcaacagccagctggaggatgccatccgcctcaaggagatctcagagcggcagctggaggaggcgctggagaccctgaagacggagcgcgaacagaagaacagcctgcgcaaggagctgtcacactacatgagcatcaatgactccttctacaccagccacctgcatgtctcgctggatggcctcaagttcagtgacgatgctgccgagcccaacaacgatgccgaggccctggtcaatggctttgagcacggcggcctggccaagctgccactggacaacaagacctccacgcccaagaaggagggcctcgcaccgccctcccccagcctcgtctccgacctactcagtgagctcaacatctctgagatccagaagctgaagcagcagctgatgcagatggagcgggaaaaggcgggcctgctggcaacgctgcaggacacacagaagcagctggagcacacgcggggctccctgtcagaacagcaggagaaggtgacccgcctcacagagaatctgagtgccctgcggcgcctgcaggccagcaaggagcggcagacagccctggacaacgagaaggaccgtgacagccatgaggatggggactactacgaggtggacatcaacgggcctgagatcttggcctgcaagtaccatgtggctgtggctgaggctggcgagctccgcgagcagctcaaggcactgcgcagcacgcacgaggctcgtgaggcccagcacgccgaggagaagggccgctatgaggctgagggccaggcactcacggagaaggtctccctgctagagaaggccagccgccaggaccgcgagctgctggcccggctggagaaggagctaaagaaggtgagcgacgtcgccggcgagacacagggcagcctgagtgtggcccaggatgagctggtgaccttcagtgaggagctggccaatctctaccaccacgtgtgcatgtgcaacaatgagacacccaaccgtgtcatgctggactactaccgcgagggccagggcggggccggccgcaccagtcccgggggccgcaccagccccgaggcgcgtggccggcgctcacccatcctcctacccaaggggctgctggctcctgaggcgggccgagcagatggtgggacgggggacagcagcccctcgcctggctcctcactgccatcacccctgagtgacccacgccgggagcccatgaacatctacaacctgatcgctatcatccgtgaccagatcaagcacctgcaggcagccgtggaccgcaccacggagctgtcacgccagcgcattgcctctcaggagctgggccccgccgtggacaaggacaaggaagcgcttatggaggagatcctcaagctgaagtcgctgctcagcaccaagcgggagcagatcaccacgctgcgcactgtgctcaaggccaacaagcagacggccgaggtggcccttgccaacctgaagagcaagtatgagaatgagaaggccatggttaccgagaccatgatgaagctgcgcaatgagctcaaggccctcaaggaggacgcagccaccttctcctcgctgcgtgctatgtttgccaccaggtgtgacgagtacattacacagctggatgagatgcagcggcagctggcggctgctgaggacgagaagaagacgctgaactcgctgctgcgcatggccatccagcagaagctggcgctgacccagcggctggagctgctcgagctggaccatgagcagacccggcgtggccgtgccaaagccgccccgaagaccaagccagccacaccgagcgtaagtcacacctgtgcctgtgccagcgacagggccgagggcaccgggctggccaaccaggtgttctgcagcgagaagcacagcatttactgtgattag

SEQ ID NO: 17270 - DNA, 403 bp, Homo sapiens
  SIMILAR (34)..(291): 401254mologous to Arabidopsis thaliana gene_id:MJB21.19~,accession number AB007647,Smith-Waterman Score= 155.
ctttccactgaggatgacgggacagtggccttctcgctaacgaatgtgcagcagtaccgcgtcgccatgactgccaaggactgctccatcatgattgcactgtctccctgtctgcaggatgccagctctgatcaaaggcctgtcgtcccttcatcgaggtccaggtttgacttttccgtgtctgtgctggaccttgacctcaagccctacgagagcattccccatcagtataaactggacggcaagatcgtcaactattattcaaagactgtacgtgccaaagacaacgccgtgatgtcgactcggttcaaggaaagcgaagattgcacattagttctccacaaggtctaaactctttccctgcagtgtctttgaaacttgaacataatgtgaaggctgaatg

SEQ ID NO: 17271 - DNA, 543 bp, Homo sapiens
  SIMILAR (148)..(303): 381254mologous to Rattus norvegicus truncated FGF-5,accession number D64086,Smith-Waterman Score=75.
gtggggcgcagaggaatgaggtcctttatgaaagaaaggcccccctgcatagcataagtgctatatcgatcgtcccggatgtgccgtaagatccgtgtcctcatcagtcgcccatttagcattgttaagatctgtgaacgcgtgttgtctcaaaccagtcagggccgtcatgactacgcagcagcagcagtttccaagacgggccagaaacgcatccacagcagtggcacccgcggctcaggggctcctcacagcccgggctggtgggagccaagtccagacagagtgggggtctccatctgttttctcttctccctcaaatacaggctgttttcatcgtgtctagtccagccctgtctgggccctgtgctaggcaataactcttgcagccctgaagggcctagggagcccagcccaccttcccacggactggggttccctaaaatgtgcacttgaacccaggtcccagcatcaaccacacaaagtgacaatgggcaaaatcatcccaacccaggctgccccatgcccatttcaccggattcc

SEQ ID NO: 17272 - DNA, 1117 bp, Homo sapiens
gtcgaattcgtgacagctgcgctgccggcccggctgcggtcagcaacgcgccatggacgcagagctggcagaggtgcgcgccttgcaagctgagatcgcggccctgcggcgagcgtgtgaggacccaccggcgccctgggaagagaagtcccgagtccaaaaatcttttcaagccatacaccaattcaatttggaaggatggaagtcttcaaaagatctgaaaaatcagcttggacatttagaatcagaactttcatttctaagtacgcttactggcatcaatataagaaatcactccaagcagacagaagacctaacaagcactgagatgacagaaaagagtattagaaaagttctacagagacacagattatcaggaaattgccacatggttacatttcaacttgaatttcagattctggaaattcagaataaggagagattatcttctgctgttactgacctcaacataataatggagcccacagaatgctcagaattaagtgaatttgtgtctagagcagaagagagaaaagatctgttcatgtttttccgaagcctgcatttttttgtggagtggtttgaatatcgtaagcgcacgtttaaaccatctcaaggaaaagtacccagatgccgtgtacctctcggaggggccctcctcctgctccatggggatccgcagcgccagccggccagggtttgaattagtcattgtttggaggatccaaatagatgaagatgggaaggtttttccaaagctggatcttctcaccaaagtcccacagcgagccctggagctggacaagaacagagccatagaaactgctcctctcagcttccgaaccctggtaggactgcttggaatcgaagctgctctggaaagcctgataaaatcgctttgtgcagaggagaacaactagttccaaatcagtgaacgtggagaatgaagatgatgcgtggaggaacatgcaattttattcaatataaacatttgctattttccgcttagaaaccacaccctgaagacgtgctgtctatgcagttatggcccattatatggaaactctcatgacatgaaaaatgaatacaactagttaagtataaaatgccaaataaa

SEQ ID NO: 17273 - DNA, 432 bp, Homo sapiens
  SIMILAR (128)..(9): 431254mologous to Homo sapiens Human secreted protein sequence SEQ ID NO:134,accession number Y87095,Smith-Waterman Score =66.
tgagggctggcccaggtgctctcacagggcgacctcttgacgcccgtgctcaccgtggccctcgctcctaatcccaccctcaggttctgaggcaggaagcagttcccacacttggctactgggaaggaaggttgtgtgggggggcagaggcttccttgtgtgaccgtggagctgatctttcccgcccctgcaggtgcagcagtaccgcgtcggccatgactgccaaggactgctccatcatgattgcactgtctccctgtctgcaggatgccaggtgaggcccccactgcaaggcatgcagcctgggtctaacggggttttatggacagttggtgaattgttaataggatagttggtttccccatatttagagactccatggcggagtgacaccacttccttggcctatgtgacatcatggggcttactaac

SEQ ID NO: 17274 - DNA, 3458 bp, Homo sapiens
  SIMILAR (2079)..(5258): 1001254mologous to Homo sapiens alpha-5 type IV collagen,accession number M58526,Smith-Waterman Score=6061.
cacatatggctgggagacacagcagctacgcaggtctcaggtccacatacagggcaacgaccctccacaccgctgtctgcccatgcatggcctgaactcacagtcacccagcctgaaaactgggccacggcacagaactgtcagcatgcgaggttccaacggagctgaggctggcgccagagagcgtccaacctcaccaggatttggcccacagcagcgaggtggaactcctgagccttcaggttcctccagtatgacccacgcatcagatggggagcagagaagggccctgaatgcaggaagcctccgcgactcgatagctgtcccctccttaagccccaagctgagacctggggaagccaagatcaatggcatgcatgctaccgctgtcccctcccaagctgaaggcaggcatcaacaatcaatcatgggaaatcgactggtttcctcgctgcagcctgaaggtgcagtacttgggccagtggccacatctcagatcaaccagaatgtggagatccagcgtggccgcctgcgggatgacatcaaggagtacaaattccgggaagctcgtctgctgcaggactactcggaactggaggaggagaacatcagcctgcagaagcaagtgtctgtgctcagacagaaccagctcctgccgaggagaggaaatactgatcagcacgtccctgctctgacgctgctcaccatggccttggcgctcactgctgccctgccccagaatcctgtttgtagaaaaaacaaatccctgactaagctgctgggtgtcgtttctgctgagcagctggtcgtaaggaaccgggccttcagctttccccgcatgctggctttccaatttgacatcactgaccaggcactaagagattcccaggtgctagacgaggaaaagtacccagatgccgtgtacctctcggaggggccctcctcctgctccatggggatccgcagcgccagccggccaggatttcaaaaagcacataacgacatgttttactgctttttcaggtttgaattagtcattgtttggaggatacaaatagatgaagatgggaaggtttttccaaagctggatcttctcaccaaagtcccacagcgagctagtcgggaggagtgcggggtcttggtgaggtccatgccagcagaaaacaaaagaccaaaagctgccaccttgaagtttcttacccggtttaatgttttctttatagccctggagctggacaagaacagagccatagaaactgctcctctcagcttccgaaccctgaaccgtgacctcatcagtcgcccatttagcattgttaagatctgtgaacgcgtgttgtctcaaaccagtcagggccgtcatgactacgcagcagcagcagtttccaagacgggccagaaacgcatccacagcagtggcacccgcggctcaggggctcctcacagcccgggctgccattggcaagatgggcatcggcaccagcaggcctgcctcacaggagaactgacccagggagtgcatgcccaggagggagtctgggtgctgtgtagcacagcaggtcttgagctcaggtctcggcctaaagtgtccctgtccacaaccatatccactcaaacaaataatgagaaaggaaaacagaaagacatgccctatcagttcctgatgtatctgttgaacactcctgttcagtttgctgagtttgtaatgtcctctctaagggagaagaaaagacattacaaactcaacgggaatgttcagcaggtgcagcagtaccgcgtcgccatgactgccaaggactgctccatcatgattgcactgtctccctgtctgcaggatgccagaacatttagtgttgctataaaggaatacctgaagctagaagaaagcctgccctatgtcaccctagccagtccatccaacagacacaggcaacagccaccccatgagcgttctaacagctccaagctgaaaacaaccccagggtcggtctacctgacagtggctcccagccactaccgccttcctgaccacaaaggctctggccaggaccggactctgggctgccccaggagagtaatgtgcaggatgcacagcaaagctctgaaggccggggagcgtggaggcaggccaagatacaattttcatgtagacaagactttgatgttgcttttcccacctaccttcgagctcttccaggtggagtttgagggcctcaagcatgagatcaagcgtctggaggaggagaccgagtacctcaacagccagctggaggatgccatccgcctcaaggagatctcagagcggcagctggaggaggcgctggagaccctgaagacggagcgcgaacagaagaacagccggaatggtgagctgatttacggctgcaaagatgcccggagccccgtggctgactggagcgagcttgcacaccacctgaagccgttcttcttcccttccaacggcctggccagtgggccccactgcacaagggctgtgatcagggagcttggtgcacgtgatcacacgggtgctgctgagtggctcggacaagggccgggcaggcaccctgagtccggggctcgggcctcagggcccgcgagtctgcgaagccagccctttcagtaggagccttcgctgccaagtgccagtccagggtgcagtccttgcctgtggtgatgcccgtatggcggagcccaggatgagccctgcggtctgcgccggcctgtgtctccctccacgttctttgataatcaacatgctctcgttttcccctgatgttctcggaaaaaacaccccagagcgctcggggttaccgaagggctgtcttctgtacaaaaccctccaggtgcagatgttggacctgctggacatcgaaggcctctaccctctgtacaaccgggttgagcgatacctggaagagtttcccgaggagagaaaaaccttacaaatagatgggccttatgatgaagcattttaccagaagctgcttgacctttccactgaggatgacgggacagtggccttcgcgctaacgaaggactcagaagatggcacagaatgggtgacagtgggttgcatctcgagagagcaggtttttgccagtcgcttgatatatgctccagagagaaagccccaaagacacaaagatgtgggaatcatggatgagtgtggcctcggggttactaatgggtgcacctgggtttggggatcagggaagacagtggacatggactcgtaccaatacctggactcttcacacaccaaatcctgggggccaggcactgttgtaggtgccagatatttaattcacatcacagatgtgccatgcctcatttcctacaagtcctgcgctgcacagaaggctctctctcatcccatgtttgcatactgcaggaagaacatcactgtgctccttctagtgctgacagccaatgaccatgcagatctccttacctag

SEQ ID NO: 17275 - DNA, 1755 bp, Homo sapiens; identical to SEQ ID NO: 14854
  SIMILAR (299)..(526): 341254mologous to Homo sapiens soluble adenylyl cyclase,accession number AF176813,Smith-Waterman Score=93.

SEQ ID NO: 17276 - DNA, 3462 bp, Homo sapiens
  SIMILAR (1322)..(735): 481254mologous to Mus musculus MUS MUSCULUS GENOMIC DNA CONTAINING THE FV1 GENE,accession number A67508,Smith-Waterman Score=434.
tcatttcttatcgctggaatttcctagttcttgtttgatgactaaacggggtgatggtagaggtagcagccgcatttgcccagcctggagcgaggaattctcagctggtggatcagctgcttctgtgtctttgccatcttgtggtttagggttttctgtgcgaccgcgtcggtaatcgaagttgcggcggccccggtgctgaggtggctggtgaccttgggtctcatctcccggattgtctttatcctcttcctcgctgtcctctacaggccgtcttgggtgaggtgggtcctgcggaatcgtggtctgcgtccccggtacactcgctgccccgctggtgtccccgctccccgcgctgtcacccccgcatcgctgctcccggccgccccggaggctggagaactgcggcctccatggaggaaagtgggactcaggccctggaacacttgccgccgcctcgcccttttctccctcaacatcggactccgcggcctccgcagctcccccgccgccagggtcctccccggggttctccttcacggcagtctgatgaacacacatcttccttggtgacgttcctttggaagcttgttcttgaagcacttttccgacgagtctgacagcgtctttacccttggccgagtccagccccactcctaaggcatggcccttcggggaatgccctgggcgccccgaatactcagtggggcctgttacttggctggtggcagcttcagtgatttccagccccacctgatctttgggagtttgtatgggacttggccttgatcgtcttctgttgctcatctggtgggaactgagtttctcaacatggaggagcgtggcccagacggctttcccacgcaggggagcatggtccagatggctttcccacgtggggcagcctggctcagacggctttcccacgcaggggagcatggtccagacggctttcccacaccggggagcgtggcccagacggctttcccacgctggggagcctggtccagacggctctatatccaactgccggttgagcagctctccctgggtgctgcacaggcaactttgatgtccagtatctaaggtcacacagctcaagctaagaaactgggacgcgtcttgagaggcagaggactctaccgagcctactgggtcatcaccttccaaatgccactgctgtgaagaggagccatcgcagatcgccatggcgacagagcccttctgacccaggggatccactgctctcaggcactgtccaaccgacacctggtatagccgattgtttttcccaaaggtccactgctgggatcctcctgacccgtggcatttcatgagccgtggcgggtctgatgagcgagtctctgacatatctagacaaaggagactatttaaaaccaattcatgctcttcattatagatccagatctgatttgggtcactgtagtcacaggccttaagcaccacgagacctcccttctgacttgggcggccctgggccaccaggcatttgttggtctggaggtgatagagccttccacgttgaaggactttgggtcgttttggccctctattgacaaaaatgggttgttggggtttggcgtgggacccagatatctgcatctctgggtatacattatccaaataccatttaaatgatttacagcccaacttctttctcagttccacacgctcactgatattgccatagcttttcgtcttcaggtcaggtcttaaggaaaaatactgctccttgtattcatccaaccagacatgtgccagccgcaaagagttgtgtgtcatggtgtcctggccttcgggagatccatatggtcgcctttttcggaaaatgtgtcctactctagagcaagggatgatgaagagcttaccgccacacatccagatccgaaatgatatttccaaattttctcctccccagatatccatgccactatcatactgtccaagttcatggaaatactgtctgttcatggcaaacaaacctccagccattgttggtgactttattggtgcagtggctccctccgctcgtcctagctcagaaagggggacaagatcccatttgaagtgcagtccccagttgaaccctccgcggacgacaggggacgagctgtaggccagcgtgtcggcgctgatgatgtcaatcactgggcacaccacggtgtgccggtcctcacggatggcggccagcaagggctgcagccacatcacattcacttcacagtggctgtccaggaacacaaggacttctccaaagtcactatcatcatccacaaggatgatctcatgaagcaggtgtgctggcgtgcggtctatgacactgtgcactgtccgaagcaaggcagaaaacgcttcattatagaaacagataacaacactagcagctggcaggtcaggtgggtagaacttttctttacatgctgcattccttgtgtctggcacatctctgtggtagcccaagcggtcactgataagcatattaaaagcatgtttctgatagcccaagtctctcaactcttgatcgcgttcattaaaaatcatacctaattcagaagagaatttcaagtggccttcttctggatcttcaacacgactgtctatcacatcgtcaattttgtttgctttgaactgtggctcgagcactcgacttgggcctcgagtgaaacggggatagaatttttttggagatggtccgtggggcccagaccccttgacgggcacattcttaagtggctgagtcacttcatgctcgggagtcatgtggccagacgtcgcaaaattcatgacttcctcgattgttcgtctttcctttgttcgaatgtgctctcgccattgttccaactgcgatgagcaccctttctttctcagcattccacaagttacttcctctttcctttgttctcctctgcctttgcctcttttaaaaagttctaagttgctagccaatcgggacaaatacagaatgtgaggtcccgttccagccaatggaaaccagacacagcagtagggtggatgcgtcaggttataaatgaccctgtctcctttgttcggtgtactctcatggcaaaactgctggtaagtgtacccttttgttgtttgcaggtccccttgagcattactatcccgcacagtgttctgaattccaactgccagtacctgtatctctggcttctgaagcccatctgcccacgtgcagggcaggcccaaactggagcagaaactgccagagccataagctggtgctggatgctcggtgtggactagtgagagtgagaaactcggggaagcagtctcaggaggtgcgagacccacacttctgtgggctttacctccaggaactccaccaggcactaaggtaaaagatcccagagagatccctcttctgccatgattggatgcttcccgaggccttcctagaagccaagcagatgccagcaccat

SEQ ID NO: 17277 - DNA, 1115 bp, Homo sapiens
  SIMILAR (808)..(1179): 791254mologous to Mus musculus Pro-Pol-dUTPase polyprotein,accession number Y12713,Smith-Waterman Score=505.
atggtgtgtgtaggaggctcagtgagagtgaaggctttgctttggccatggggagtactgccagactactacctaagttcccttaaggcccacaagctcttcagtcagtttgtggtgaatgctgcctggcctgggcctcacccttcagggcggcgtgctcccctctgtccaagggcaggtccagaaatgctgtccaagagtcaaatccttggactggggaccccaagagcccacgtggtgctctgccctgccatggctttgcttgtacctaagaaagggtacactcgccagcagttttaccacaagagtacaccaaacaaaggagacagagtcatttataacctgacgcgtccaccctactgctatgtccggtttccattggctagtacgggacctcacattctgtatttgtcccaattggctagcaacttagaactttttaaaagaggcacgggcagacgagaacaaaggaaggaggaagtaacttgtggaatgctgagaaagatcattgaaaaccaactggatacagaaacaataactattagttatgaatttatcctctgtcaacatcttatcgcaaataccgagttcagctatttggcactccctgaaaattataaccgtttgtttttaccaaattcaaaaaaccaaacaaataatcgtttcaaaacgttaaacagcaaagctattggcaggctacttgctgctggtggcgtatacaatgggaacattgaaggattcagagatactgcggaaaaactgggtggagatgcaataaaaggctatgatcaaatactaaatgaaaaaacagcgggcatagcgatagcaacagcatctattcttttaacaaagcgttctaatgttgatacatatacagaaataaatagttacttaggcaaacttagaggtcaacaaaaacttcttgatggtatagacataatagaaataatatacattaagagaccttcaaaagacttagctaacttacgaaaggagtttaataaaactgtgcgttaccagctaagcgcgcggcctcatctccagtttcgagaaattctcgtgcttcgaaacagaaataccagccctggctaaagcgtccatgtagagtaatgacg

SEQ ID NO: 17278 - DNA, 1150 bp, Homo sapiens
  SIMILAR (891)..(1028): 401254mologous to Homo sapiens DC33,accession number AF260332,Smith-Waterman Score=72.
aatgcaaggatggaagagggaaagaggatgctcttccccttctccctcaagtaccccaggtatctgttaggaagagaagggagccagggatacctgctcctctctttctagatgagtagcccttcatcttcagtctgtgcccctttagaatgcatcctgaatccctgggactcctttgaaaaaatgccttctctttttcctttcttttcctctgtcctctcttcactgataggtaattgtgtctctgtactatgggaccctcccctcagatgcatcctccaaactggaaagagttaatttcccaaaccttaaactggttggcttaggactgggttcaggggaaggaaacccagaagcccaacatgccggcaaaagggccatcaaactccaagcggtcatgcaaccagaacctctgacaatagccccttctgccagggacccttaccatctgactgtcaccattgccacaaacccaattcaacacaaaagcagctcctacgtcagaaccagtcctcgcagcagttcagataggcctaggaggcaaaatgaaatggatctacccacactgattcatttacctgaagagaatcagctcaggaagtgggagaacaacacagccacaagcacgcaacagtgctcagacaggaaggcttgggaaaaatcaagttttttgctggtgggaatgaccatcaaactgcatgaccattttgatgatgcagcaggcgaggaagcctggggtctggctctaggtgcagcgtcggaagggcccagaggagcaggtcatccagagccagcccctcgtggcataatcaggactgcagggattggcaacatctacctccaggagcctgtctccagtctcccagatctggcccctcagttccttgtgacatcacacgactggctcctcgcccttcagagctcagcttgcacgtgccctccccactccatcctctgtactccccccagcagctcctacactgtacatactttgtctgcctccatgccaattctcagctccacgaggccagggcctgtctttgtctatggctctactgccagcactttgccattatcatcccctgaaggaggagaccagagcctcggaccaccaccagcctgggcagggagaccggatgctctactctga

SEQ ID NO: 17279 - DNA, 1719 bp, Homo sapiens
  SIMILAR (274)..(651): 761254mologous to Mus musculus Pro-Pol-dUTPase polyprotein,accession number Y12713,Smith-Waterman Score=511.
atggacggcgagagcgaggtggatttttctagcaacagcataacccctttgtggcggaggcggtcgattcctcagccccaccaggttctgggccggagcaagccgaggccccagtcctaccagagccccaacgggttactaattacggatttcccggtggaggacggagggacgctcctcgcagcgcagattcccgcccaggtgcccaccgcctcggacagcaggacggtacataggagccccctgcttctgggcgcccagcggagagcggtggccaatggtgggacggcatccccggagtacagggctgcctctcctcgacttcgacggcccaagtcacccaagctccccaaagcggtgcctggcggctccccgaaatccccagcaaatggcgcggtgaccttgcctgcgccgccgccgccgccggttctgcgccccccgcggactcctaacgcgcccgccccctgcacccccgaggaggaccttactgggttgactgccagcccggtgccttcgcccactgcaaatggccttgccgctaataacgactctcctgggtcaggttcgcagtccggccggaaggcaaaggaccccgaacgggggctctttcctgggccccagaaaagttcttcggaacaaaaactccccctccaaaggctgccctcccaggagaacgagctcctcgagaatccttccgtggttttgagtacaaacagccccgccgccctcaaagtggggaagcagcagatcattccgaagagtctggcctcggaaattaaaataagtaaatccaacaatcaaaatgtggagccccacaagagactcctcaaggtgcgcagcatggtggagggcctaggaggacccctgggtcacgcaggggaggagagtgaggtcgataacgacgtggatagcccagggtctctgcggagaggcttgcggtccacgtcttatcgcagggcagtggtcagtggctttgattttgacagtcctaccagctcgaagaagaagaacagaatgtcccagcctgttctgaaagtggtgatggaagacaaggagaagttttccagtctgggaaggataaagaaaaaaatgctgaaaggacaaggaacatttgatggggaagaaaatgctgtcctgtatcaaaactacaaggaaaaggcccttgacattgattctgatgaagagtcagagcccaaagaacagaagtcagatgaaaaaattgtgattcaccataagccattgagatccacatggagccaactctctgcgattgcactggccaggacttccagtactattgtattagtccgttttcatgctgctgataaagacatccctgagactgggttctttatagagttggaagcaagacatcagaataatatcttcatagatgacataagtgacattgtggaaaaacacacagcatccacatttgacccatatgtgaaatactgcacaaatgaagtctaccaacaacgaacactacaaaaattgttagctaccaatccatcctttaaggaagtattgtcaaggattgagtcccatgaagactgtaggaacttacccatgatctcttttctcattctccccatgcagagggtgacccgccttcccctgctgatggatactatctgtcaaaaaacacctaaggactctccgaagtatgaagtctgcaaaagagccttgaaggaagttagcaaggtaactgttgggtga

SEQ ID NO: 17280 - DNA, 588 bp, Homo sapiens; identical to SEQ ID NO: 3858
  SIMILAR (120)..(299): 391254mologous to Homo sapiens retinoblastoma-interacting protein,accession number AF043431,Smith-Waterman Score=106.
  misc_feature (1)...(588): n = a,t,c or g

SEQ ID NO: 17281 - DNA, 2109 bp, Homo sapiens
  SIMILAR (703)..(1212): 791254mologous to Homo sapiens gephyrin,accession number AJ272343,Smith-Waterman Score=677.
atgccaagcctgggggccaagttgctccatttaataaaccacacagcaccctgcagagggccccatcaccattaccaccaccgccatcaccaccgtcatcaccatcaccaccatcgtcaccaccactgccatcaccaccgtcatcaccatcgccaccatcaccaccaccaccaccgccatcaccatcaccaccaccatcaccatcatcaccaccgtcaccaccaccaccatcacatcaccatcaccaccatcatcaccatcaccaccaccaccattaccaccatcaccgtcaccaccaccaccaccatcaccaccgtcataaccaccaccaccaccaccatcaccaccaccaccaccgtcaccaccaccaccaccgtcaccaccaccatcgccatcaccaccatcaccatcactgtcaccaccaccaccaccgccataaccatcaccatcatcaccaccaccgccatcaccactgtcaccaccatcaccaccactaccgtcaccaccatcaccaccaccaccatcaccactgccatcaccatcaccaccaccgccatcaccaccaccaactgctcccttctgggggccaacagccctgcagggcaggcaggatcctcagacgtgccacgccacatcgcccatcattgtcatcgcaattggagtggttttccaatactgcaacgttgtatcaactggcatgggaccttatctcctaagctgtgcttttggaatgccttggtgctcaggcacacattcatggctcccgtgaccagtgccttgagcaagtcacagaatagcaggatccgggcagcctccctcagcgggccacctatgagccaaaaagttcagaaagaggtggccactggaagagcaggaacagaatgttccagacggaggagcagcccccgtgacggcactgaggaagcgagtcacgtcccagcgctgctccctggagtttctggaagatgccgtgggatgcgctccagcacagaggtacacgcccccgtccgccccgagctctacgactccgctcgggctgccactgacccctgcggggccagagggtcctgggaggaaaagagtgacctgtgtcctttgccttgcagaaccaaacacacatctggatcaccgagacataaaggcctgaagaagacccacttcatcaagaacatgaggcagtacgacaccaggaacagcaggatcgtgctcatctgtgccaagcggtccctgtgcgcggccttctcggtcctgccctatggggaaggcctgcggatcagtgacctgagggtggacagccagaagcagaggcacccgtccggcggcgtctctgtgtcttccgagatggtctttgagctagaaggtgtggagctaggagcagacgggaaggtcgtgtcttatgcgaagttcctgtatcccaccaacgccctggtcacacacaagagtgacagccatggcctgctgcccacacctcggcccagtgtcccccggactctgccagggtcaagacataaacctgcccccaccaagtcggcaccagccagcacagaactagggagtgacgtgggggacaccctggagtacaaccccaacctcctggatgacccgcagtggccctgcggcaagcacaaacgtgtcctcatctttgcgtcgtacatgaccacagtgatagaatacgtgaagccctcagacctcaaaaaggacatgaacgagaccttcagggagaagttcccccatgtcaaactgacgctgagcaaaatcaggagcttaaagcgggagatgcggagcctgtcggaggagtgcagcctggagcccgtgacggtggccatggcctacgtgtactttgagaagctggtcctgcagggcaagctcatcaaacagaaccgcaagctgtgcgctggcgcctgcgtgctgctggctgccaagatcagcagtgacctgcgcaagagcggcgtgacgcagctcatcgataagttagaagaaaggtttcgattcaacaggcgcgacctgatagggtttgagttcacagtgctcgtggccttggagctggccctgtatcttcccgagaaccaagtgttacctcattacaggcgcctcacccagcagttctag

SEQ ID NO: 17282 - DNA, 2531 bp, Homo sapiens
  SIMILAR (979)..(1371): 1001254mologous to Homo sapiens dJ908M14.3 (novel protein),accession number AL121832,Smith-Waterman Score=687.
atggagagcttcatggagtcgctgaacaggctgaaggagatccacgagaaggaagtcctgggcctgcagaacaagcttctggaactgaactcagagaggtgccgggaccacactggccacttcatccccctgaagccccagtgtgccagcactaccaccgtcctatggtgcagaagggaaactgaggctcagtgtgggggcggggggagtcacttgtccaaggtcacacggacagacatcacagaggagcgtgcagatgactggggggggtgcgtggacgggacagacgtcacagaggagcgtgcagatgactggggggggtgggacgcccagaggatcgaggagctcttctccaagaaccaccagctccgggaacagcagaagacactgaaggagaacctgcgggtgctggagaacaggctgcgggccggcctgtgcgaccgctgcatggtcacccaggagctggccaggaagcggcagcaggagttcgagagctcccacctgcagaacctgcagcgcatcttcatcctcagccggcactgctcattcaacagcatccaatcagccatgcacgcagccagcatccacggcgcccctgctgcctgccaggccctgggctacgtgctgggggcactgctgaggggcttccctgtgccttttgcagccaacgagatgaacgggctgaaggaagagaacgagaccttgaaggaggaggtgaagcggcttcggggcctgggagacaggcccaagccccgggccaaggagggcacctcggaccccccctcacccctgctgctcccctcccctggtggctggaaggccatcacagagaagccaccgggaggccacgaggaggctgaggaagaccaccagggcgtgggcctacggggagaagaaaagccagcagggcacaggacatctccagtggccaaaatctccccaggggccaccctgcctgagtcgcgagccccagacatgagcccccagcgcatctccaaccagctgcacgggaccattgccgtggtgcggcctgggtcccaggcttgccctgccgaccgaggccccgccaatgggacgcccccaccactgcccgccaggagcagcccacccagcccagcgtatgagcgtggcctctccctggacagcttcctgcgggcctcccggccctccgccatgacccatgaggccccgaagctctccccgaaggtggaccggctctgcctcctaaaccgccccctgtccctgcaccttcagagcccccacagcagccccctggcccctgctgcagcccccagcgacccccggctccaggacctgaaggccagagaagcagaggcctgggaggagcccacagaactgctggggctgcccagtgccctggcgggcatgcaggaccttcgcctggagggggcactgcacctgctcctggcccagcagcagctgcgggctagggccagggcaggcagtgtcaggccaaggggccagcccacacccggggagatgctgccctccctaccagtcggctcagactctgagggccctgagaatgaggggaccagggcagctctggccgcagcaggcctgtctggagggcggcacacacagcctgcaggcccgggccgcgcccagaggacagaggctgcagccacgcaggactgtgccctagacaagcccctggacctctcggagtggggccgggcccggggccaggacactcccaagccggccggccagcatgggtcactcagccctgccgctgcccacactgccagccccgagccacccacccagtccggacccctgactcgcagtccccaggcactcagcaatggcaccaaggggaccagagtgccagagcaggaggaggcttccactcccatgccgcctgacctggacggccacccagagcccagcaaggctgaagtgctgagaccagagtccgacgaactggatgagacagacaccccaggcagcgaggtgggcctgagctcccaggcggaggccactacgagcacgaccggggaggggcctgagtgcatctgcacccaggagcacgggcagggtccaccacggaagaggaagcgggcctcggagcctggggacaaaggtacagctggcatggggcagccgttcccaggcagtgcccacgctctgggaggcaacggaccactcggacccccacccctgcccgccaagctccaagcacaatcttggacgccccctcgtgggctgacagcaaacagatgtctggcagaagcgagtcacgtcccagcgctgctccctggagtttctggaagatgccgtgggatgcgctccagcacagaggtacacgcccccgtccgccccgagctctacgactccgctcgggctgccactgacccctgcggggccagagggtcctgggaggaaaagagtgacctgtgtcctttgccttgcagaaccaaacacacatctggatcaccgagacataaaggcctgaagaagacccacttcatcaagaacatgaggcagtacgacaccaggaacagcag

SEQ ID NO: 17283 - DNA, 1509 bp, Homo sapiens
  SIMILAR (910)..(1443): 801254mologous to Homo sapiens putative p150,accession number U93563,Smith-Waterman Score=703.
atggatgctatgttcccactcagtgctgctctgaaagtgtgggcccctctgccgctcagatactggctgcagatctcagtttcacacttccagattgcacactacaaccctgggcttgggcacactggaggtgccaggacagcaaagagtgtcttttttccccagcgcagtggcaacaagggaggtactgctacattggcaatggcaaaggtgctgtctgtttcctctgagaactccaacgcagaaagacatagaggcgctgccaatgagattgttcagccaggggtgagagatcctggcttccttgttggcaggactatggcagctggcaccagggttttcagagatccagggccctctgggctccaagtgggtctgagtggtggctctgctcagactccacatggctctgcatgtcagtctggaggccccatgagtagcaggtcaagggaatctcctgtgcccaggattgcaaaggtccataggtccatagcagaagtgaacaccaaatttaacaactatctacaccaaaaaaggcaccttcgtaagaaccaaaaaccaggtagcacagcttgcagctttgaaagagacctctaccttccatttgaggagaggagaggagagccactccaactccagccatggctaaaaggggccaaggtgcagattgggccactgtttcagaggatgcaagccccaagccttggtggtttccacgtagtgttgggcctgacggtgcacagaaggcaagagtttaaaaacctccacgaagatttcagaagatgcctgaaaacacctgcatgtctaggtagaagtctgctgcaggggcagagccttcatgaaaagcttctaccagatcagcttgcagttaccttgctctatgtacaatttcctgatgtgaataataaactccttgcaaattatcaagtattggaagttctggccagggcaatcaggcaagagaaagaaacaatgggtattcaaataggaagagaggaagtcaaattttctctatttgcagatgacatgaatttatatttagaaaaccccatcatcatctcagcccccaaactacttaagctgataagcaatttcagcaaagtctcaggacacaaaatcaatgtgcaaaaatcacaagcattcctttacattaacaatacacaagcaaagagccaaatcatgaatgaactcccattcagaatcactaccaagagaataaaatatgtaggaatacagttaacaaggtacgtgaaggacctctttgaggagaactacaaaccactcctgaaggaaataagagaggatgcaaacaaatggaaaaacattccatcctcattgataggaagaatcaatatcgtgaaaatggccacactgaccaaagtaatttatagattcaatgctattcccattaaactaccattgacattcttcacagaattagaaataaactggcacatgtgtacatatgtaactaacctgcacattgtgcacatgtaccctaaaacttaa

SEQ ID NO: 17284 - DNA, 579 bp, Homo sapiens
  SIMILAR (88)..(165): 1001254mologous to Homo sapiens interferon alpha/beta receptor,accession number X60459,Smith-Waterman Score=122.
tttcgtgacttaggacggggcgatggcggctgagaggagctgtgcgtgcgcgaacatgtaactggtgggatctgcggcggctcccagatgatggtcgtcctcctgggcgcgacgaccctagtgctcgtcgccgtggcgccatgggtgttgtccgcagccgcaggtgagaggcggggaggagagtcttggcgcagggcgggaggtagggcacgcagctgggctacgggggcggcgatgctgttgggggcgacagacgcccagtctgggaaaccttcggtccactttgccgcgccaaagattaaacccgacctgggctcgcaaatcaaccaggagaaagtggtgttctgggtcctctcttgccgcttgcctgtggccgtgtacgggtcctcgggagcgcccgggtcccacccccgtgaaatggcggtgccagagctttgtgtcgagtttgattctttccgggaaactcatcagatattgttagtgtattttgtgtgtggcccaagacagttgttcttccagtgtggcccacggaagccaaaaagagtggacacccttgatgcagatgaggcctgcagatag

SEQ ID NO: 17285 - DNA, 2844 bp, Homo sapiens
  SIMILAR (518)..(1837): 1001254mologous to Homo sapiens interferon alpha/beta receptor,accession number X60459,Smith-Waterman Score=2324.
agaccgcgccgaactacccggtcgacccacgcgttcggggcggtgagagctaaaaggggcagcgcgtgtgcagaggggcggtgtgacttatgacggggcgatggcggctgagaggagctgcgcgtgcgcgaacatgtaactggtgggatctgcggcggctcccagatgatggtcgacctcctgggcgcgacgaccctagagctcgtcgccgtggcgccatgggtgatgtccgcagccgcaggtggaaaaaatctaaaatctcctcacaaagtagaggtcgacatcatagatgacaactttatcctgaggtggaacaggagcgatgagtctgtcgggaatgtgactttttcattcgattatcaaaaaactgggatggataattggataaaattgtctgggtgtcagaatattactagtaccaaatgcaacttttcttcactcaagctgaatgtttatgaagaaattaaattgcgtataagagcagaaaaagaaaacacttcttcatggtatgaggtttgactcatttacaccatttcgcaaagctcagattggtcctccagaagtacatttagaagctgaagataaggcaatagtgatacacatctctcctggaacaaaagatagtgttatgtgggctttggatggtttaagctttacatatagcttacttatctggaaaaactcttcaggtgtagaagaaaggattgaaaatatttattccagacataaaatttataaactctcaccagagactacttattgtctaaaagttaaagcagcactacttacgtcatggaaaattggtgtctatagtccagtacattgtataaagaccacagttgaaaatgaactacctccaccagaaaatatagaagtcagtgtccaaaatcagaactatgttcttaaatgggattatacatatgcaaacatgacctttcaagttcagtggctccacgcctttttaaaaaggaatcctggaaaccatttgtataaatggaaacaaatacctgactgtgaaaatgtcaaaactacccagtgtgtctttcctcaaaacgttttccaaaaaggaatttaccttctccgcgtacaagcatctgatggaaataacacatctttttggtctgaagagataaagtttgatactgaaatacaagctttcctacttcctccagtctttaacattagatcccttagtgattcattccatatctatatcggtgctccaaaacagtctggaaacacgcctgtgatccaggattatccactgatttatgaaattattttttgggaaaacacttcaaatgctgagagaaaaattatcgagaaaaaaactgatgttacagttcctaatttgaaaccactgactgtatattgtgtgaaagccagagcacacaccatggatgaaaagctgaataaaagcagtgtttttagtgacgctgtatgtgagaaaacaaaaccaggaaatacctctaaaatttggcttatagttggaatttgtattgcattatttgctctcccgtttgtcatttatgctgcgaaagtcttcttgagatgcatcaattatgtcttctttccatcacttaaaccttcttccagtatagatgagtatttctctgaacagccattgaagaatcttctgctttcaacttctgaggaacaaatcgaaaaatgtttcataattgaaaatataagcacaattgctacagtagaagaaactaatcaaactgatgaagatcataaaaaatacagttcccaaactagccaagattcaggaaattattctaatgaagatgaaagcgaaagtaaaacaagtgaagaactacagcaggactttgtatgaccagaaatgaactgtgtcaagtataaggtttttcagcaggagttacactgggagcctgaggtcctcaccttcctctcagtaactacagagaggacgtttccctgtttagggaaagaaaaaacatcttcagatcataggtcctaaaaatacgggcaagctcttaactatttaaaaatgaaattacaggcccgggcacggtggctcacacctgtaatcccagcactttgggaggctgaggcaggcagatcatgaggtcaagagatcgagaccagcctggccaacgtggtgaaaccccatctctactaaaaatacaaaaattagccgggtagtaggtaggcgcgcgcctgttgtcttagctactcaggaggctgaggcaggagaatcgcttgaaaacaggaggtggaggttgcagtgagccgagatcacgccactgcactccagcctggtgacagcgtgagactctttaaaaaaagaaattaaaagagttgagacaaacgtttcctacattcttttccatgtgtaaaatcatgaaaaagcctgtcaccggacttgcattggatgagatgagtcagaccaaaacagtggccacccgtcttcctcctgtgagcctaagtgcagccgtgctagctgcgcaccgtggctaaggatgacgtctgtgttcctgtccatcactgatgctgctggctactgcatgtgccacacctgtctgttcgccattcctaacattctgtttcattcttcctcgggagatatttcaaacatttggtcttttcttttaacactgagggtaggcccttaggaaatttatttaggaaagtctgaacacgttatcacttggttttctggaaagtagcttaccctagaaaacagctgcaaatgccagaaagatgatccctaaaaatgttgagggacttctgttcattcatcccgagaacattggcttccacatcacagtatctacccttacatggtttaggattaaagccaggcaatcttttactatg

SEQ ID NO: 17286 - DNA, 373 bp, Homo sapiens
  SIMILAR (102)..(371): 981254mologous to Homo sapiens cAMP response element regulatory protein,accession number M86842,Smith-Waterman Score= 476.
ggcgtattaggggcagcagtgcctgcggcagcattggcctttgcagcggcggcagcagcaccaggctctgcagcggcaacccccagcggcttaagccatggcaggatgccttctccgggacagattggatgttggagaaaatggatttgaaggagttcgacttggatgccctgttgggtatagatgacctggaaaccatgccagatgaccttctgaccacgttggatgacacttgtgatctctttgcccccctagtccaggagactaataagcagcccccccagacggtgaacccaattggccatctcccagaaagtttaacaaaacccgaccaggttgcccccttcaccttcttacaacctcttcccctttc

SEQ ID NO: 17287 - DNA, 432 bp, Homo sapiens
  SIMILAR (317)..(403): 411254mologous to Mus musculus metallothionein-III,accession number M93310,Smith-Waterman Score=41.
ctgccacgtttcgtggggcaacagccaagacccctgggacccttgcggggctcggggtccgagggctgtagggctcctggggaagcagtccgggcacccgactacgctttcccgatcccaggcacgcgagcgtctcgttaaatcgcttcccccttggcggcaccgcctggccccaggcgcaccccaccaatccaaaacccgcgccggccccaggagcacagctggacgacccgccccggtactcacgccatggcttaagccgctgggggttgccgctgcagagcctggtgctgctgccgccgctgcaaaggccaatgctgccgcaagctgctgcccctaatacgccatggtggccgtggaccctgagggcggggaggagggaaaacgcacacgcgcagagaaaactacatctgtgggcgggcaaagtagaaa

SEQ ID NO: 17288 - DNA, 376 bp, Homo sapiens
  SIMILAR (137)..(340): 891254mologous to Homo sapiens dJ1104E15.2 (activating transcription factor 4 (tax-responsive enhancer element B67)),accession number AL022312,Smith-Waterman Score=306.
cctggccgtatttggacgtggggacggagcgctttcctcttggcggccggtggaagaatcccctggtctccgtgagcgtccattttgtggaacctgagttgcaagcagggaggggcaaatacaactgccctgttcctcccccttcgaccagtcgggtttgggggctgaagaaagcctaggtctcttagatgattacctggaggtggccaagcacttcaaacctcatgggttctccagcgacaaggctaaggcgggctcctccgaatggctggctgtggatgggttggtcagtccctccaacaacagcaagggtgagtgggccaccaccacatcgtcctggtgggatctagggttaggggcctcctacctttgtatc

SEQ ID NO: 17289 - DNA, 457 bp, Homo sapiens
  SIMILAR (7)..(339): 771254mologous to Homo sapiens cAMP response element regulatory protein,accession number M86842,Smith-Waterman Score= 423.
cgggttttggggcttgaagaaagcctaggtctcttagatgattacctggaggtggccaagcacttcaaacctcatgggttctccagcgacaaggctaaggcgggctcctccgaatggctggctgtggatgggttggtcagtccctccaacaacagcaaggaggatgccttctccgggacagattggatgttggagaaaatggatttgaaggagttcgacttggatgccctgttgggtatagatgacctggaaaagaagaacgaggctctaaaagagagggcggattccctggccaaggagatccagtacctgaaagatttgatagaagaggtccgcaaggcaagggggaagaaaagggtcccctagttgaggatagtcaggagcgtcaatgtgcttgtacatagagtgctgtagctgtgtgttccaataaattattttgtagggaaaaaaaaaaaaa

SEQ ID NO: 17290 - DNA, 1233 bp, Homo sapiens
  SIMILAR (820)..(1227): 911254mologous to Homo sapiens dJ1104E15.2 (activating transcription factor 4 (tax-responsive enhancer element B67)),accession number AL022312,Smith-Waterman Score=646.
gttcgcagttcgaggcggagccggggcaggcacaaagatggcaagcacgtggtggggcccctgaggtgtgcagagggtcgctgcacctataagcctgtcgctggcgcggtctgggcgggaggttctgcggcgggaggcagcctgttggttgcagggctgaaaaagcagttctacaaggcaagccagctggtcagtgagaaggtcggagggtctgaggggaccaagctggacaatgacttcaaagagatggagaagaaggtggatgtcaccagcaaggcggtgacagaagtgctggccaggaccatcgagtacctgcagcccaacccagcctcgcaggctaagctgaccatgctgaacgcggtgtgcaagatccggggccaggtgaagaaccccggctacccgcagtcggaggggctcctgagcgagtgcctgatccgccaccagaaggagctaggcaacgagtccaacttcagtgacgcactgctggatgccggcgagtccatgaagcacctggcagaggtgaaggactccctggacatagagaagcggcaggacaagatccccgatgaggagctgcgccaggcgctggagaagtctgaggactccaaggaggtagcagaaaccagcatgcggtcctggacaccgacattgagcagggtccacggccaccatggcgtatcaggggcagcagtacctgtggcagcattggcctttgcagcggcggcagcagcaccaggctctgcagcggcaccccccagcggcttaagccatggcgcttctcagggcattcagcagcagcgttgctcaaagcaccgcaacatgaccgaaatgagcttcctgagcagcgaggtattggtgggggacttgatgtcccccttcgaccagtcgggtttgggggctgaagaaagcctaggtctcttagataactacctggaggtggccaagcacttcaaacctcatgggttctccagggacaaggctaaggcgggcttctccgaatggctggctgtggatgggttaggcagtccctccaataacagcaaggaggatgccttctccgggacagattggatgttggagaaaatggatttgaaggagttcgtctttgatgccctgttgggtatagatgacctggaaaccatgccagatgaacttttgaccactttggatgacacttgtgatctctttgcccccctagtccgggagactaataaggagacccccagacggtga

SEQ ID NO: 17291 - DNA, 2085 bp, Homo sapiens
  SIMILAR (888)..(1439): 411254mologous to Homo sapiens cAMP response element regulatory protein,accession number M86842,Smith-Waterman Score= 217.
  misc_feature (1)...(2085): n = a,t,c or g
gttttctactttgcccgcccacagatgtagttttctctgcgcgtgtgcgttttccctcctcccccgccctcagggtccacggccaccatggcgtattaggggcagcagtgcctgcggcagcattggcctttgcagcggcggcagcagcaccaggctctgcagcggcaacccccagcggcttaagccatggcgtgagtaccggggcgggtcgtccagctgtgctcctggggccggcgcgggttttggattggtggggtgcggcctggggccagggcggtgccgccaagggggaagcgatttaacgagcgcccgggacgcgtggtctttgcttgggtgtccccgagacgctcgcgtgcctgggatcgggaaagcgtagtcgggtgcccggactgcttccccaggagccctacagccctcggaccccgagccccgcaagggtcccaggggtcttggctgttgccccacgaaacgtggcaggaaccaagatggcggcggcagggcggcggcgcgggcgtgagtcaagggcgggcggtgggcggggcgcggccgccctggccgtatttggacgtggggacggagcgctttcctcttggcggccggtggaagaatcccctggtctccgtgagcgtccattttgtggaacctgagttgcaagcagggaggggcaaatacaactgccctgttcccgattctctagatggccgatctagagaagtcccgcctcataagtggaaggatgaaattctcagaacagctaacctctaatgggagttggcttctgattctcattcaggcttctcacggcattcagcagcagcgttgctgtaaaccgacaaagacaccttcgaattaagcacattcctcgattccagcaaagcacctgcaacatgacgcagaatgagcttcatgagcagcgaggtgttggtgggggaattgatgtcccccttcgaccagtcgggtttgggggcttgaagaaagcctaggtctcttagatgattacctgggaggtggccaagcacttcaaacctcatgggttctccagcgacaaggctaaggcggggctccttccgaatggcttggctgtggaatgggttggtcagtccctccaacaacagcaaggagagatgccttcttccgggacagattgggatgttgggagaaaatgggttttgaaggagttcgactttggatgcccatgcttgggtatagaatgaccctgggaaaccattgccagattgacctttttgaccacgtttgggattgacatttgtgattctcttttgcccccctagttccaggggagattaattaaggcagccccccccagacggttgaacccaattgggccatcttccccagaaatttttaacaaaaccccgancagggttggcccccttcaccttctttacaacctctttcccctttccccaggggtcctgttcctccactccagattcatttccttttagttttaggagctggggcagttgaaagtgggatattcactgaaagggagattagggaagccagactacactgcttacgttgccaatgatccctcagtgcataaaggagggaagacaccccttcagattaatgattagtggcatctggtatgagcccagagtcctaatctggggtctcctcagcacagcccctctaccaaggggctctccaaataggagcctcccatctccaggtgttctctgtgggtctgcccgtcccaaaccttacgatcctcctggagagaagatggtagcagcaaaagtaaagggtgagaaactggataagaagctgaaaaaaatggagcaaaacaagacagcagccactaggtaccgccagaagaagagggcggagcaggaggctcttactggtgagtgcaaagagctggaaaagaagaacgaggctctaaaagagagggcggattccctggccaaggagatccagtacctgaaagatttgatagaagaggtccgcaaggcaagggggaagaaaagggtcccctagttgaggatagtcaggagcgtcaatgtgcttgtacatagagtgctgtagctgtgtgttccaataaattattttgtaggg

SEQ ID NO: 17292 - DNA, 1824 bp, Homo sapiens
  SIMILAR (345)..(1364): 431254mologous to Lycopersicon esculentum extensin-like protein,accession number AF159296,Smith-Waterman Score=594.
tcatcagagtccacagaccatatcggtgaagaagatgaataggattcttgctgcatccagggtacaatgcgcctttccagaacacagcagcgacccggggtagagggatcgctcaaacagcaccagaggctgcattccaacttttcctccatcaacgagtccgttttcattgttagtttctccttaaacacgattggctctggcgggaggggcgcggaaggtgagcccgtcgggagccgctgtcacggccgcaaccacccgcgggacctctcggcggcgctctcccagctccgcctctccctgatgcctcaactctagtcggagtagggccgacttcttcagctcctttacttgctgctccaactgcagtgtgctcttgttctcgttgttcagctcctcgaagccgctgcgtggctcggcccgctgctcgtacagggcttcccaccccagctccagcatcctctccagctcccgcagcctctccagctcccgcagcctctccagctcctgcagagtctcctgctgccacagcctctcatcctgttgccgaagcctctcctgctccaggagctcctccacctcgtccaggagctcctccacctcgtccagcagcctctccctctccagcagcctctcctgctcctcctgccgcctctcctgttctaacagcttctccacctcttccagcagcctctccctctccagcagcctctcctgctcctcctgctgcctctcctgttctaacagcttctccacctcttccagcagcctctccctctccagcagcctctcctgctcctcctgccgcctctcctgttctaacagcttctccacctcttccagcagcctctcctgccctggcagcttctcctgttcacacagcctctcctcctgttcacgtagcctctcctcctgttcacacagcctctcctcctgttcacgtagcctctcctcctgttcacacagcctctcctcctgttcacgtagcctctcctcctgttcacacagcctctcctcatgttcacgtagcctctcctcctgttcacacagcctctcctcctgttcacgtagcctctcctcctgttcatgtagcctctcctcctgttcacgtagcctctcctcctgttcacatagcctctcctcctgttcacacagcctctcctcatgttcacgtagcctctcctcctgttcatgtagcctatcctcctgttcacgttgcctctcctcctgttcatgtagcctctcctcctgttcacgtagcctctcctcctgtctcctgttcaggagactcaacatctgattgttttccacctcagcctggagctgtcttcccacactctctagctccttccttaggtggttggtctcatcttgtagctgctctaccttagatggccctgctgggggctctggggccaggggttcagccatctggtttttgagtttgaacaagctcctcccaagcttctgtaccagatgtatctcatgcttcttctcctccttagatgtgcgaaccagtgaattgatgttttcagtgagttgactgattattgcggagcttgaatccagggccactgatagttcttggtactggctctccagatcctccagggtagtagaggatgcacggccctccccgtagatacctgttgctgaatccccaggtgagtggtaaccaccagaagtggctgtgtcagggctactgccattgactttctttttcctgttagctcctgctggaatgccagggctcttcctctgccaatatgcttttaactttttcttggctgcggccaatttcccctgttgtgttttttctgacat

SEQ ID NO: 17293 - DNA, 704 bp, Homo sapiens
  SIMILAR (704)..(630): 1001254mologous to Homo sapiens Human normal ovarian tissue derived protein 3,accession number Y59726,Smith-Waterman Score=134.
ttactcacgatgaaccagcacgaataaacccagcaaaaagagaactgcatacttaaatttaggatagtcattcatgaggatcgtcacaattccaatataaggaacaaatcccctggctctccccacaacatcttttttctctagccaatgttgtccttgtttatagaggcctcggtcatcaaccgcattattatctcctttggtcaaaaacttgatatgcccattttgcttttcatgaatcttcaagactcggtgaactataggaatctctcttccttctatcctaaaaacaacaatttctcccactcgtatgggatcttcaactcgatttgttagaaagagaagatctcctctatgaaatgcaggttcccatgctgccactggagcaccactacaatcggactttcacttccagtttattaccattaaccccttccagatcattagtgccgatgagacaatcattccaaaatttaggacttgataatagagcttacaggtgtataaagtgcttcacacatggcaagagctcaaaaaagttattgttttgccttagtccttttctacacatttaggctccttgaaggccgagtctttcttaactatctttgcatttctctcattgtacctgccgcttgttcatccgccgcacatcgtccaaaaagtctagagacagcatggcggggacggcgagcaggacaccg

SEQ ID NO: 17294 - DNA, 1019 bp, Homo sapiens
  SIMILAR (254)..(643): 851254mologous to Mus musculus Zfp-29,accession number X55126,Smith-Waterman Score=572.
cgacgatttcgtctggaggggccgggccgagcccgggggcgctttttcatgcgaagcaaccgctagagcaggacctggtctcccgagaggtgagccggagaggcaggcctggagccacgcggaccccgggcagtagcccgagcgggactacttgttgatatttgaggagggaagtgtcttacctgagagcctggctggagaagactgaggtccaaggcttgaagcctaagtgattgccccaggactgtggatgatggctgcagacatcccgagagtgaccactccgctgagctccttggtccaggtgcctcaagaggaagatagacaggaggaggaggtcaccaccatgatcctggaagatgactcctgggtgcaagaagctgtgctgcaggaggatggccctgagtctgagccctttccccagagtgctggcaagggcggcccccaggaggaggtgaccaggggaccacagggtgcactcggccgcctccgagagctctgccggcgctggctgagaccagaggtacacaccaaggagcagatgttaaccatgctgccaaaggaaattcaggcttggctgcaagagcatcggcctgaaagcagtgaggaggcagcggccctggtggaagacttgacccagaccctttaggacagtgctgtagctgtctttgcttcccttccggtggaggtgaccagtttgtaatgaacttctggatctccagtcagatactatggaggagagagtgatggagggctgaggagtaggcctcaggttgttatttggttggggaggcacagagcagaggttcaggtctcagcaggtgtcagaggtgattacagcccttcccatccaccttgcagcaggggctttgtgcctttcatctttaactgggcacctgagatgggaaccaatggggaccatcccagacacatgggtttgtctgtccctgacttctgcctctgagattgtctttgttggtctttgtttaataaacgccccgaccttcctcatgattgca

SEQ ID NO: 17295 - DNA, 1280 bp, Homo sapiens
  SIMILAR (1165)..(1278): 551254mologous to Homo sapiens HSPC264,accession number AF161382,Smith-Waterman Score=107.
ctcaacatcatctcttgccagccggcagctccttttcttccttgatcttctaaatgtacaggggaagacagctggcagcctgtcatgtttcaaaccttcattaaagttctggattttggcctcttcgttttcccctagatgtcattaaagctgtcagcaccattgctgtgcatgagaaagaggagagtctctggcctagggtggccgtcttctccacattggcacccggagtcctccatggggcgaggctccgcagtctgcaggtcgttgatctggagtcccggaagaccacgtacacctcaggtaccgtggtactttgtcccttgcttgctgctccagccggcatcaccccccagcccaactcagccactataaaaactgagttcaactctctgtgccaggtgttggggatacacagtgaataagaggtaagccctggcctctaagggctcctatgctggggcaggattaggcagtcccagggaccagcacccaaccagctgagcagacaatggtgagatgagtgggaagggagatgtgatttattctgcctgggactggtgggaagggacctgtgaccagccagccctgccaaattgccagacccatctgcctccagccgcttgtctcctttgctgtcggtcttccagatgtcagtgacagtgaggagctgagtagcctgcaggtcctagatgcagacacctttgccttctgctgtgcttcgggccggctggggcttgttgacacccaggcagaagtgggcaccgttggagaatcgcagccctggccctgggtctggtggagagagatggtgtgctgaagttgggagctggggccagggccctgggcccagcattgccagccttggctcagatgggcatctttgtcttcttgacccccgggatctctgccatcctgtgagctcagtccagtgcccagtatccgtacctagccctgacccagagctgctgcgagtgacttgggccccaggcctgaagaattgcttggccatctcaggttttgatggtacagtccaggtctatgatgccacatcttgggatggaacacggagccaagatggaacacggagccaagtagaacctctcttcactcacagaggtcacatcttcctagatggaaatgggatggaccctgctcctttgggtcaccacccacacctggcatccctgcagaccaaggactttggttatcagcaacaaatgatgcctctctgcatgtgtgggactgggtggacctttgtgccccccgctgacaccagc

SEQ ID NO: 17296 - DNA, 1916 bp, Homo sapiens
  SIMILAR (1155)..(1481): 611254mologous to Homo sapiens HSPC264,accession number AF161382,Smith-Waterman Score=356.
ccgggtcgcccacgcgtccgggcggtggtgctggtgtccttttaagctgtggcttgacaggaggagcgcctcctgtcggtggagtctgttacaaggggagcagccgcccaggccgccacacagctccccgcagaggcctcggtgccccttgccattttccagccctactccgactagagttgaggcagcggggagaggcggagccgcgagagcgccgccgagaggtcccgcgggtggtcgcggccatgacagcggctcccgaccggctcaccttccgcgcccctcccgccagaggtgagagtaaaatgtccgtgtcagggttcaaggccaagctgaagttgttgtcctctattttccacaagaaccaggagccgccgcggcagctcaggctccactgcaacatcacggtgaggcgcccagtggcggcctcacggggcagggcgagggcggagaggaggcgcccagagtcccgggacaaaaggggaacctggcccaggagaggccccggttccccgggccgggagtctttgttgctggctatgaaagcctgaaaaagaatgaaattcttcatctgaaattacctctcagactttctgtaaaggaaaacaagggcttattcccagaaagagatttcaaagtgcgccatggaggattttcagacaggtctatctttgatctaaagcatgtgccacataccaggtatggtcaattttgtgatccagccatccacacaggatgggatgggatggctgcaaatgcctgggggtattctgcctcctcatctccattcccaccccctcagcacacaggcacatatgtcattaaagctgtcagcaccattgctgtgcatgagaaagaggagagtctctggcctagggtggccgtcttctccacattggcacccggagtcctccatggggcgaggctccgaagtctgcaggtcgttgatctggagtcccggaagaccacgtacacctcagatgtcagtgacagtgaggagctgagtagcctgcaggtcctagatgcagacacctttgccttctgctgtgcttcaggccggctggggcttgttgacacccggcagaagtgggcaccgttggagaatcgcagccctggccctgggtctggtggagagagatggtgtgctgaagtttgggagctggggccagggccctgggcccagcattgccagccttggctcagatgggcagctttggcttcttgacccccgggatctgtgccatcctgtgagctcagtccagtgcccagtatccgtacctagccctgacccagagctgctgcgagtgacttgggccccaggcctgaagaattgcttggccatctcaggcactgcccaggctgtcagccccaaaccctactccggggaccgcggtcaggttcgtctccgggcggactacatctcccacaatgccttgggcccagcctccctcctgccgcccggctgggtgccgtctccaccaacagaaaggcagaatttccagggccgttctcggcagccaatgagcgcggcggtgcctcaagaggaagatagacaggaggaggaggtcaccaccatgatcctggaggatgactcctgggtgcaagaagctgtgctgcaggaggatggccctgagtctgagccctttccccagagtgctggcaagggcggcccccaggaggaggtgaccaggggaccacagggtgcactcggccgcctccgagagctctgccggcgctggctgagaccagaggtacacaccaaggagcagatgttaaccatgctgccaaaggaaattcaggcttggctgcaagagcatcggcctgaaagcactctattatcaagtcctaaattttggaatgattgtctcatcggcactaatgatctggaaggggttaatggtaataactggaagtga

SEQ ID NO: 17297 - DNA, 403 bp, Homo sapiens
  SIMILAR (65)..(3): 951254mologous to Homo sapiens unnamed protein product,accession number AK000459,Smith-Waterman Score=111.
ggcaagtgcttctgcaaggggctttgcttctcctcataacagtggcacaggctggccgcgtgctcaaacttggcgtcagccgtgagtttcaggatcttcttatactatggggaaaggagaccttcaggcggtgccaggcccatgctcaccagcccttcacttacagcctggatcatcaatcccctgtcccagcagctcctttagtacctggctgcagagcagccgcaacttcacagaggaccgccccgtacccccgcccctgtctcgggagcggagtagcggtggacttttctcacgcccgcacacactgtttgcggagaggccagggcagacaacctccacccgtttccggagccactggcgccccctcattcccgctccagcagcccatgcctcgacgaaa

SEQ ID NO: 17298 - DNA, 299 bp, Homo sapiens; identical to SEQ ID NO: 14218
  SIMILAR (123)..(299): 911254mologous to Homo sapiens melanoma-associated chondroitin sulfate proteoglycan (MCSP),accession number X96753,Smith-Waterman Score=260.

SEQ ID NO: 17299 - DNA, 398 bp, Homo sapiens
  SIMILAR (547)..(434): 891254mologous to Homo sapiens golgin-95,accession number L06147,Smith-Waterman Score=163.
gctcaaacttggcgtcagccgtgagtttcaggatcttcttatactatggggaaaggagaccttcaggcggtgccaggcccctgctcaccagcccctcacctacagcctggatcatcaatcccctgtcccagcagctcctttagtacctggctgcagagcagccgcaacttcacagaggaccgccccgtacccccgcccctgtctcgggagcggagtagcggtggacttttctcacgcccacacacactgtttgcggagaggccagggcagacaacctccacccgtttccggagccactggcgccccctcattcccgctccagcagcccatgcctcgcttcacccctggtgcctcatcatcgcaccaggaagccacgaaatcgtcgacccgggaattcc

SEQ ID NO: 17300 - DNA, 626 bp, Homo sapiens
  SIMILAR (626)..(552): 841254mologous to Homo sapiens golgin-95,accession number L06147,Smith-Waterman Score=102.
ttttttttttttttttttctttttagtttgttcctttaataaacacacttgcatagttacattacaatttcataaaaataaaaactgattatctcatgccaactgtccccagcattttcacagtctcaatactcttaatactatagttttcaagacacataaaattttaaggcaaaaacagcactttgcaacaatttaataatttattacattacagtagcatcacagtagcagtgaataatcccactttaggcaacagtgtttccgtatttccattatacattctgtttacaggaattcatcaattggtaaaagtcattctaagaaaacttggcaaataaaggtttggacttgaattggcatctctttctctacttttccttcctccagtttctttgttttaaactactgtattcatattttaaaatgttataatctcagccaccgctttgccccaagcttcctgctgctgcagctggtccacgagctgggtctgcagcagtaactgcctgtgcagcgcctccttctcagaggtcagctgctgataggtgggccacgtactgctgcaggtgacccaggtactagtctcactgctgctgcagactctgagactcttggctcttcat

SEQ ID NO: 17301 - DNA, 467 bp, Homo sapiens
  SIMILAR (303)..(467): 891254mologous to Homo sapiens melanoma-associated chondroitin sulfate proteoglycan (MCSP),accession number X96753,Smith-Waterman Score=233.
ggatttcgtcccagtcccacaaggagcttggatgtgcggacaagcagggtgccaatcgtgtttaaggagaaactaacaatgaaaacggactcgttgatggaggaaaagttggaatgcagcctctggtgctgtttgagcgatccctctaccccgggtcgctgctgtgttctggaaaggcgcattgtaccctggatgcagcaggaatcctattcatcttcttcaccgatatggtctgtggactctgatgagccaaatctgacatcagttctggaacgtctagaagatactaaggacaacagttcgcttccttctttggttacaaccacccggaggtgactgtggccatggctctgactgacatagacctgcagctgcagttctccatgtcccaacccgaagccctccttctcctggcagcaggcccagctgaccacctcctgctgcagctctactctggacacctgcag

SEQ ID NO: 17302 - DNA, 478 bp, Homo sapiens
  SIMILAR (83)..(400): 801254mologous to Homo sapiens MSTP063,accession number AF119814,Smith-Waterman Score=413.
tgaccatgcttacgtctttcttggccggacggcctgttacctgatgaaagcatacagaaaggtcaatccgcgggttattttttcttctaatactatagaaactcatcccaaagacttattacactcttgtgaccatccttttgccgaaaaaacccagttcacagtgagtacattggatgatgtgaagaattctggcagtattcgagacaattattgtcgaacttctgaaatatctgctgtccacattgatacagagtgtgtttcagttatgctgcaagctggtacacctcctttacaagtaaaatgaaggaaaaatttccagcagagaaagcaaggatagaaaatgaaatgggacccttcagatatttcaaattccatggcagaagtccttggctaaaaaagaagagctagcagatcgtctaggaaaaggccaatgaagaagccattgctagtgctattgctgaagaagaacagttaa

SEQ ID NO: 17303 - DNA, 436 bp, Homo sapiens
  SIMILAR (37)..(426): 961254mologous to Homo sapiens Human secreted protein clone yd73_1 protein sequence SEQ ID NO:92,accession number Y73435,Smith- Waterman Score=639.
gaaaaagaaattcccgggccctggcttcttggcgcgatgaggttccggttctgtggtgatctggactgtcccgactgggtcctggcagaaatcagcacgctggccaagatgtcctctgtgaagttgcggctgctctgcagccaggtactaaaggagctgctgggacaggggattgattatgagaagatcctgaagctcacggctgacgccaagtttgagtcaggcgatgtgaaggccacagtggcagagctgagtttcatcctctccagtgcggccaagcacagtgtcgatggcgaatccttgtccagtgaactgcagcagctggggctgcccaaagagcacgcggccagcctgtgccgctgttatgaggagaagcaaagccccttgcagaagcacttgcgggtctgcagcctacgcacagacaagttccaggtcg

SEQ ID NO: 17304 - DNA, 1950 bp, Homo sapiens
  SIMILAR (1050)..(943): 471254mologous to Homo sapiens Human secreted protein clone yd73_1 protein sequence SEQ ID NO:92,accession number Y73435,Smith- Waterman Score=77.
ctacgactctgaggcctgaaggtcggggagggaagccctgtcttctctttcctcttgccttctaatctcctgccagttcctccacttgctaatccagccagaaactgctgacacggaagccttagaagcacataggaactcttctaccagagtcacaggtccacctggttttaagggaggggacatagaacaaacaataattttacgtacttcttcagcattaccctccaacagaaggctgttttgtatacatcgaacctgttgtttagtgtagccatgttcatcagtgatcttagctagatcttttggataacttgctgcagcttctacatcagcacttgctgcctcaccttgcatttttatgttgtggagacagcttctttccttaaacctcatgaaccaacctctgctagcttctgacttttcttttgcagcttcctcacctctctcagccttcatagaattggagcgagttaggacattgctctggattaggctttggctctcaagttttttaaaaagtgtcttcacaatgtaagtctcgggcacactagcagttctataataaaacaccaagtagatcagaatgtccaaacttactgcaccacatgaggacagagggtccacctggaggagtggatcagccagatggccaccaagctggatggccaccgccagagcctgcaggacagcagagggggcgccagagtgggtgccaccttcttcagggtggcgccagccccaggccttcatgtggcactgtgcacgccagggcctgcacaccaccagcctcctgtcctccatgccacaggtatcggtctcatttacagagggggaaatggtggccaaaagcctcccccagcacacacggctagaccacacagaggtcttaggtgcagctgaggggtccacagtctctgctgtcccttctgccactcgtgctgccagggaccacgtgcgtaggctgcagacccgcaagtgcttctgcaagggggctttgcttctcctcataacagcagcacgggctggccgcgtgctctttgggcagccccagctgctgcagttcactggccaaggatttgccatcgacactgtgcttggccgcaccggagaggatgaaactcagcactgccactgtggccttcacatcgcctgactctccctgttgccctattaacttcagctcaaagcccccaggcctcctggagccataggcactgctactgctccaccaggagctggcagaggacaggaaggtgggactgtcaatgtctttctttccctcatgctcctccacaaacttggcatcagctgtgagtttcaggatcttcttataccctcctccacccagtgtagaccctgtgcactcaaccatcttggccagcgtgctgatctctgccaggacccggtcaggacagtccagatcaccacagaaccgaaacctccgccccattcgggagagggatggcggtggacttttctctaccagacctgctgccctgacgcccgcacacactgtgtttgcggagcggccagtgcagacaacctcaacccgtttccggagccactggcgccccctcattcccgctccagcagcccatgcccgcttcacccctggtgcctcatacatcgcgcgaggaagccagggcccgggaatttctttttccggtcccgccaggtcagctgagtcgacgatcacgtgacttggactaacggcctctggcggggcgggacctgctcgagtgaggccgggagcggaccgcagcccgctggaggtgccgggggcgaaatgctggcgtctgctcctccgtctcccagaatcctgccctatcattcgatgcagagaccagcttcttccctgggccagggctgctctggaggcagggaggtcgtggccaggccatggggtgtagcagagcactgggtatggatcaggctctccaggtacac

SEQ ID NO: 17305 - DNA, 6628 bp, Homo sapiens
  SIMILAR (76)..(2679): 1001254mologous to Homo sapiens KIAA1055 protein,accession number AB028978,Smith-Waterman Score=4556.
gcggccgcggagcccggggcgggtccggcgcgggagccagcgcggctgtgtggctatctgcagaagctgtcgggcaagggccccctgcgtggctaccgcagccgctggttcgtgttcgacgcgcgccgctgctacctttactatttcaagagtccgcaggacgcgctgcccctcggccacttggacatcgcggacgcctgcttcagctaccagggccccgacgaggcggcggagccgggcacggagccgcccgcgcacttccaggtgcacagcgcgggagccgtcacggtgctcaaggctcccaatcgtcaactcatgacttactggttacaggagcttcagcagaagagatgggaatattgtaacagtcttgacatggtcaagtgggacagcaggacctctccaactcccggggattttcctaagggtcttgtagccagagataacactgatttaatttacccacacccaaatgcttctgcagaaaaagccagaaatgtcctagctgtggagactgtgcctggagagctggtgggagaacaagctgcaaatcagcccgccccagggcatccaaattccattaatttttactctttgaaacagtggggcaatgagctcaagaattcgatgtcttctttccgtcctgggagaggacataatgatagtcggaggactgtgttttataccaatgaagagtgggaacttttagacccaacccctaaggacctagaggagtccatagtacaggaagaaaagaagaagctgacccctgaaggaaacaaaggagtaactggctcaggattcccctttgattttggacgtaacccctacaaaggaaagcgccctttgaaagacataattgggtcgtacaaaaatcgtcacagcagtggtgacccttcaagtgaaggcacatcaggcagtggcagcgtcagcatcaggaagccggcctccgaaatgcaactgcaggtccagagccagcaggaagagctggaacagttaaagaaagacctgtccagtcagaaggagcttgttcgactgctccagcagacagtccggtcatcccagtatgacaagtatttcacaagcagccggctctgtgagggggtcccaaaggacacgctcgagcttctgcaccaaaaggatgatcagattctgggccttaccagccagctggagaggttcagcttggagaaggagagtcttcagcaggaagtaaggacgctgaagagcaaagtgggcgagctcaacgagcagctgggaatgctcatggagaccatccaagccaaggacgaggtcatcatcaagctcagcgagggcgagggcaacgggcctcctcccaccgtggcgcccagctccccttcggttgtgcctgttgccagggaccagctggaactggacaggctgaaagataatctacaggggtacaaaacccaaaacaaatttctaaataaggagattttggaactctcagctctacgaagaaatgcagaaaggagagagagggatctgatggcaaagtattctagcctggaagccaagctctgccagatagaaagtaaatacctgatattgctccaagaaatgaagacaccagtgtgctcagaagaccaggggcccacccgggaggtcatagcccagttgctggaggatgctctgcaggttgagagccaagagcagccggagcaagcatttgttaaacctcatcttgtcagtgaatatgatatttatgggttcaggactgtacctgaggatgatgaggaagagaaattggttgccaaggtccgcgcgttggatctgaagactctctacctcacagaaaaccaggaagtctccactggggtcaagtgggaaaactattttgcaagtacagtgaacagggagatgatgtgctctccagagttaaaaaacctcatccgtgcgggcattccccacgagcaccgttccaaggtgtggaagtggtgtgtggaccgtcacaccaggaagttcaaggacaacactgagcctggccacttccagaccttgctgcagaaggcgctggagaaacagaacccagcctccaagcagattgagctggacttgctgcgaactctgcccaacaacaaacattactcctgccccacctcagaaggcatacagaagttacgcaatgtcctcctcgccttctcctggcggaatccagatatcggctactgtcaaggcctaaacaggttggtggcagtggccctcctgtacctggaacaagaagatgctttctggtgtctcgttaccatagtggaagttttcatgcctcgagactattatacaaagactcttttaggatcccaggtggaccagcgggtgttcagagaccttatgagtgagaagctgcctcggttgcatggccactttgaacagtacaaagtcgactacactctcatcactttcaactggtttctggtggtatttgtggatagtgtcgttagtgacatcctctttaaaatatgggactctttcctttatgaaggaccaaaggttattttccgttttgctctggcactttttaagtacaaggaagaggagattttgaaattgcaagattcgatgtctatatttaagtatctccgctacttcactcgcactatccttgatgctagatccggaaccgacgcgcctaccacttggagaaagtccggctggagctgaccgagctggaggccatccgtgaggacttcctgcgtgagcgggacaccagccctgacaagggtgagctggtcagtgacgaggaggaggatacctgagtgggctcgggatgctgctcttccttccttcacaaccaaagtgtgcccaaagggtgaaagtgcacttaaaagccagaatgtaacgtgtgtgtcctctggggatctgctgggcagatgtcccaagccaggctgcccttcctcatttcccactgtgcggggggcaggggtgggaggtctaatctgtttacaaccatttccgtgccatgcttttggttacacgtatctcagtcacgctttctgcctggttggtggatcctcaggcttaccagtggctatttgcaagagcctgtttccagcctccgtcagcctgtcggtgctctgaccctctgaaaccttgctttgctgggcatctccccatattctctctcctgtacatagtgggcagtggtgtgtggttttgaatggcagtgctataaaggatgccagctgtgctttaggcacctgtaggccagagggttgctgcctcaggcataaggttggtatgaaaaggggctgccttagaaaagcaggcacatcccttgttcagaaatggccactgtaggaaagcctgtgaacctcccaccagtggctttaagctgccagccatgccccatttctagaatagcctttgctcttccacacgcaacccttccatcagtgtcttccagcctgcatggggagggcctggctgcccagacacccaccctcacttctcatggccagcctgtgtttgcagatcactgggctgctctgtccccagcttgccccgtgccaggcatggctctgtgagattctgtggaatgcccttcttgacttgtggaaatcattcaccaagtacgatgggatgggattccaagtaaacagtggaccgtcatattgcaaagcaggcccacgcctgggctggccttggttgaggggatggaggaatgttttcgggggtgctttgcagggcagtggtgcagccgcagcgtgaacgctcttggacagctgaaaaccatggcctccttggggatggccagtgctcctggtgtctccacctgcctgggttgtgcaggaggccggctgccagtgcctggggctgggaaacttttttgcttggggcaggcttgggtgagctctcccagatgtgtgcccaccccaccactgcctggaacatccttgttctctgccaggatgcaggggcactgttgcctctgacacagcagtttctgggaactcagaggactgcctttctgaaggctggggagaggctttgagcaaggagcttgtttttgcttaatcgctctagaccatccctgatgcgtagatgtgagaggatgttttctggcacagtgttatgaaaatacaagataaatgatctcagtggaatgtttcatattacccgaaaaaaactggaaatcatcctttgttgtgaacacactgagactaagaattgaagcaatgcagttttaagaagtatttttcctattttttgctgtcaactttttggcaatgccacggcaaagttggtgtttcagcacatgctagagtgagctccggcttcgtgtctttaaccaactccactaatgtttcactgggtagacggagctggcctctatatttagccagaagcctttgcctcttttcaggcatcaaaaatgggttttgtcattgtctttgtctttgagagcagcagtttgaggtctgactccttcagttgtcctgtgagctgggcgttgcagtctgctcgaatcaagtgttggaaaccccccacccctcagcccatcgtgaaacgacagctgtcagcctggggggcggctgctgaggaggtgcagcaggaatggggctgggccctgaggttttactttccgagccaatggcccctggaacatgccagcacacactgccatgtcctggggctaagagctgcctttagggacaggctcgtgttgtccagtttgccctgagagatgcacctgaccaggggcccgtcgtggctgcaacccacggtggtatgttagtgtttccaggcagttgtcagcagctgccgggtagtgtgtgtgtgcgacagcaggagagttcctggaggaaagggactggggacactttctcagaggttctcctgcctggaatcaagtgatgcgtgtccagaaggcaagagagggcggctccgcctggttaaagtttgggaacgggacggagccaactcctccttccaggactgtgggccccactcttttgcgctaacacttcccctccctcgggtcactgaggaaagagctgctctgtcccctccagtgccctgaaggtccctggcctccactggctgccatggcagggggcccttctgacaggggctgccccaagctgctgttcctcctctgaaccttcaccccaacacccagcccgtggcccctgcaagggggaccctgccagctgggaaacccaaaggcctgtccaaacgtgcgcaccaggaccgaggggagctccctcccaacacctgctaggaattgccaacttttaaatggatggggttttttatgggttgaacctctgttaatacttttgtacactctcactacagtttatatttttataggctattttctcaaggtgtttctagattccacatatctattttatataacaagttattatgttatgtgtgtgactcccttgtgtgtatctgtgccagcctcagcctccgagttgcttttccctctggccctgactctcactgactcaccgatgtgatgtgcaggcccacttcttaccccagatagcctcgggcgctgcctgtagtcatgctgacagctgtacagtagccgccaagactgctgacagctggagacggttctggtttcaactacgaagagtcaacagatacaacaggcccagggaggtgcccctgggggccccagtccccatcactccaaggggcagtcctgcaagtgacaaggtgggcccaatccctgtggaacaggtctctgaggaccacagagtggggccccagggaaagctgggagccgagctagaggcaggcagcaagtaagggcaaagctgtgcccctgcccggaagaccttcctgcccccagaacccgaccctccgcagatagccctccctgggcagcagccccccagcttccaaggcccgtgcctcaccagacgccatgctctcacggacttgtttgctgctctgtaccctgcagatctgccccagaggagcaggtgaaaagccgcgcctgccgaggtgctgtggcggtggagttttgggcagaggagtggggggaagagtttctcacttttaagattctccaaatccaagatgaagtcatgctgtgctttggaatggtagatgctcatttatgtaaaatcataataaatgttacacaaactgttagaataaaaaaataccttttttgagggggaggaggtccccagcctgctgctgggtagtgagagggggttagcaccattagggcgcagggggcgggagctccgccacagcccgtggtgggcactgaggtctgtcggtcggtctgtgcatcctggcacagtcagcggcgggcaacccgctgatggcctcggggagggggcgccgtggctgggctaagagcacgaagcggcaacactgggtgcggatggtgggcagctggcagcggcccagtaggcgcagcgtctcgcagaacccgaaggacaggcggtcccgctcacagcggggaggctcgacgggctcacaatcctcggtgccacacggccgggagctctcaggccaggcctcgtggccacactggtcactgtcttcctcgggcagccctggtctgggtgttgacacacttgaccaggcgccgctggacaccaccaccacagggggctgagcactggccccaggg

SEQ ID NO: 17306 - DNA, 4559 bp, Homo sapiens
  SIMILAR (864)..(1538): 951254mologous to Homo sapiens melanoma-associated chondroitin sulfate proteoglycan (MCSP),accession number X96753,Smith-Waterman Score=1118.
  misc_feature (1)...(4559): n = a,t,c or g
atgggctgctggagcgggaatgagggggcgccagtggctccggaaacgggtgcaggttgtctgccctggcctctccgcaaacaatttaaatttacccaccacccaaatgcttctgcagaaaaagccagaaatgtcctagctgtggagactgtgcctggagagctggtgggagaacaagctgcaaatcagcccgccccagggcatccaaattccattaatttttactctttgaaacagtggggcaatgagctcaaggtgtcttcagatgagtcagcatgtgggctgttttactccccgctcagctcctccatgtggcctgggtcacaaatgattgtgatgattagccagtaccaagaactagcagtagccctggagtcaagctccgtgacaatcaatcaactcaatgaaaacatagaatcattgaaacagcagaagaaacaagtggaacatcagctggaagaaataacgtgattttctttgcttacaacatgactgctgggtttggggggcactcagatgcagagaacaatgagaaaaagagcgcactgcagttggagcagcaagtaaaggagctgcaggagaagctagacgaggtgaaggagatgagccagtaccaagaactagcagtagccctggagtcaagctccgtgacaatcaatcaactcaatgaaaacatagaatcattgctggcccttgtagagcatagcgtcaaagtggctgcactggacgtggcggaaggaggggcggccagcggagcaggcctgcaggttgcagaggcggaagcgcttccgctcacccacacagtatctgcctttgtatttgggcctgtggggagaaccggggtgggccccagtgagggcccagcagggggccggcgtggggacttcatctatgtggacatatttgagggccacctgcgggccgtggtggagaagggccagggtacggtattgctccacaacagtgtgcctgtggccgatgggcagccccatgaggtcagtgtccacatcaatgctcaccggctagaaatctccgtggaccagtaccctacgcatacttcgaaccgaggagtcctcagctacctggagccacggggcagtctccttctcggggggctggatgcagaggcctcttgtcacctccaggaacaccgcctgggcctgataccaggggccaccaatgtctccctgctgggctgcatggaagacctcagagtcaatggccagaggcaggggctgcgggaagctttgctgacgcgcaacatggcagccggctgcaggctggaggaggaggagtatgaggacgatgcctatggacattatgaagctttctccaccctggctcctgaggcttggctggccatggagctgcctgagccatgcgtgcctgagccagggctgcctcctgtctttgccaatttcacccagctgctgactatcagcccactggtggtggccaaggggggcacagcctggcttgagtggtggcacgtgcagcccacgctggacctgattggagctgagctgcgcaaatcccagtgctcagccccctgtggcagtggcgtccagcggcgcctagtcaagtgtgtcaacacccagacagggctgcccgaggaagacagtgaccagtgtggccatgaggcctggcctgagagctcccggccgtgtggcaccgaggattgtgagcccatcgagtctccccnagctacacatgtgaacgtctgggtcatcaccaatgtggatggagagggtacagagcagggggaatggtggagctgtgacatggaaacagaaggtgtccttgactgcctccgaggcacgtgccatggccccataggtcacccggccagcctgtacatcatcctagggagagccacgaggctcaaccgggtctctagctgttggttccgctggctggcagcttctaggtgctcccaaggggatgggaaacagagtgagaaggcacggaggttgccaggtcatccccctcggggccccatcctcagcaactccctcccctgggtctcctgcaacttttggcgggccatctcagccaccgctttgccccaagcttcctgctgctgcagctggtccacgagctgggtctgcagcagtaactgcctgtgcagcgcctccttctcagaggacgaaggaaccctagagtttacactcaccacacagagccggcaggcacccttggccttccaggcagggggccggcgtggggacttcatctatgtggacatatttgagggccacctgcgggccgtggtggagaagggccagggtacggtattgctccacaacagtgtgcctgtggccgatgggcagccccatgaggtcagtgtccacatcaatgctcaccggctagaaatctccgtggaccagtaccctacgcatacttcgaaccgaggagtcctcagctacctggagccacggggcagtctccttctcggggggctggatgcagaggcctcttgtcacctccaggaacaccgcctgggcctgataccaggggccaccaatgtctccctgctgggctgcatggaagacctcagagtcaatggccagaggcaggggctgcgggaagctttgctgacgcgcaacatggcagccggctgcaggctggaggaggaggagtatgaggacgatgcctatggacattatgaagctttctccaccctggctcctgaggcttggctggccatggagctgcctgagccatgcgtgcctgagccagggctgcctcctgtctttgccaatttcacccagctgctgactatcagcccactggtgtgctctaccacctgcggcctgggtgtggtctggaggccggtgcgctgtagctctggccgggatgaggactgtacccccgctggccggccccagcctgcccgccactgccacctgcagccctgtgccacctggcactcaggcaactggagtaagctaaaagaatatcagcaaaggaagagccctggtgttccagcaggagcaaagacaaaaaagaaaaaaactggcagtagccctgagacaaccacttctggtggttgccactcacctggggatctaaaagaatatcagcaaaggaagagccctggtgttccagcaggagcaaagacaaaaaagaaaaaaactggcagtagccctgagacaaccacttctggtggttgccactcacctggggatagataccccgtggcagtgctgagtttcatgctctccggaactgccaagcacagtgtcgatggcgaatccttggccagtgaactgcagcagctggggctgcccaaagagcacgcggccagcctgtgccgctgttatgaggagaagcaaagccccttgcagaagcacttgcgggtctgcagcctacgcacgtggtccctggcagcacgagtggcagaagggacagcagagactgtggacccctcagctgcacctaagacctctgtgtggtctagccaaccacctggtcggtcggctctgaccgacatagacctgcagctgcagttctccacgtcccagcccgaagccctccttctcctggcagcaggcccagctgaccacctcctgctgcagctctactctggacgcctgcagactcggaaggtagggagggagcgtggccagggcggctgcctgcaggtgcgtgtcctgctgctccccaactcaacatgctcacctcatttcacaccaacaagccccatcctcagaggaggagcccaaggctctgagaggaagaagctgatcagtatctcctttggggacctgaaccctttccccctacgccagatccggaaccgacgcgcctaccacttggagaaagtccggctggagctgaccgagctggaggccatccgtgaggacttcctgcgtgagcgggacaccagccctgacaagggtgagctgtccatggcagaagtccttgctaaaaaagaagagctagcagatcgtctagaaaaggccaatgaagaagccattgctagtgctattgctgaagaagaacagttaactagagaaattgaagctgaagaaaacaatgatattaacattgaaactgacaacgacagtgatttttctttcacagtgagtacattggatgatgtgaagaattctggcagtattcgagacaattatgttcgaacttctgaaatatctgctgtccacattgatacagagtgtgtttcagttatgctgcaagctggtacacctcctttacaagtaaatgaagaaaaatttccagcagagaaagcaaggatagaaaatgaaatggacccttcagatatttcaaatgtgagtgctgctaacttgttcacagtgagtacattggatgatgtgaagaattctggcagtattcgagacaattatgttcgaacttctgaaatatctgctgtccacattgatacagagtgtgtttcagttatgctgcaagctggtacacctcctttacaagtaaatgaagaaaaatttccagcagagaaagcaaggatagaaaatgaaatggacccttcagatatttcaaatgtgagtgctgctaacttggatatgctggctttgtaa

SEQ ID NO: 17307 - DNA, 2664 bp, Homo sapiens
  SIMILAR (4)..(1221): 731254mologous to Homo sapiens putative p150,accession number U93569,Smith-Waterman Score=1466.
atgagacagaaagttaacaaggatatccaggaattgaactcagcgctgcaccaggtggacctaatagatatctacagaactctccatcccaaatcaacagaatatacattcttctcagcaccacatctcacttattccaaaattgaccacttagttagtagtaaagcactcctaagcaaatgtaaaagaacagaaattataagaaactgtctctcagaccacagtgcaaccaaactagaactcaggattaagaaactcactcaaaaccgctcaactacatggaaactgaacaacctgctcctgaatgactactgggtacataacgaaatgaaggcagaaataaagatgttctttgaaaccaatgagaacaaaaacacaacataccagaatctctgggacacattcaaagcagtgtgtagagggaaatttatagcactaaatacccacaacagaaagcaggaaagatctaaaattgacaccctaacatcacaattaaaagaaccagagaagcaagatcaaacacattcaaaagcgagcagaaggcaagaaataactaagatcagagcagaactgaaggaaatagagacacaaaaaacccttcaaaaaatcaatgaatccaggagctggttttttgaaaagatcaacaaaattgatagaccgctagcaagactaataaagaaggaaggagagaagaatcaaatacacacaataaaaaatgataaaggggatctcaccaccaatcccatagaaatacaaactaccatcagagaatactatatacacttctacgcaaatacactagaaaatctagaagaaatggataaattcctcaacacatacaccctcctaagactaaatcaggaagaagttgaatctctgaatagacgaataacaggctctgaaattgaggcaataattaatagcttaccaaccaaaaaaagtccaggaccagatgcagaaaaggcctttgacaaaagtcaacaacgcttcatgctaaaaactctcaataaattaggtattgatgggacgtatctcaaaataataagagctatctatgacaaacccatagccaatatcatactgaatgggcaaaaactggaagcattccctttgaaaacaggcacaagacagggatgccctctctcaccactcctattcaacatagtgttggaagttctggccagagcaatcaggcaggagaaggaaataaagggtattcaatcaggaaaagaggaactcaaattgtccctgtttgcagatgacatgattgtatatctagaaaatcccatcctctcagcccaaaatctccttaagctgataggcaacttcagcaaagtctcaggatacaaaatcaatgtgcaaaaatcacaagcattcctatacaccaagaacagacaaacagagagccaaatcatgagtgaactcccattcacaattgcttcaaagagaataaaagacctaggaatccaacttacaagggacgtgaaggacctcttcaaggagaactacaaaccactgctcgaagaaataaaagaggatacaaacaaatggaagaacattccatgctcatggataggaggaatcaatattgtgaaaatagccatactgcccaagccatgtggaaagctgaaactggatcccttccttacaccttatacaaaaattaattcaagatggattaaagacttacatgttagacctaaaaacgtaaaaaccctagaagaaaacctaggcaataccattcaggacataggcatgggcaaggacttcatgtctaaaacaccaaaagcaatggcaacaaaagccaaaattgacaaatgggatctaattaaactaaagagcttctgcacagtaaaagaaaccaccatcagagtgaacagacaacctacagaatgggagaaaatttttgcaatctactcatctgacaaagggctaatatccagaatctacaatgaactcaaacaaatctacaagaaaaaaacaaacaaccccatcaaaaagtgggcaaaggatatgaacagacacttctcaaaagaagacatttatgcagccaaaagacacatgaaaaaatgctcagcatcactggccatcagagaaatgcaaatcaaaaccacaatgagataccatctcacaccagtcagaatggcgaccattaaaaagtcaggaaacaacaggggatatatgacaatgttggagcaagagagcttctttctctccctgaatattgcttatgactcagtacttttgccagtcattttaccggtccctccattcggggtccctgacttcccgcaacaggtacctggttcatctcactgggactggttggacagtgagtgcagcccatggaggtgtagcctgactgggagacacctcccagtaggggccaacagacacctcatagaggtgggtgcccctctgggacgaagcttccagaggaaggatcaggcagcaatatttgctgttctgcagcctctgctggtgatacccaggcaaacagcgtctggagtggacctccggcaacctccaacagacctgcaggaacacaactcctcaccagcaagggaagaaaactggacagagaatgagtttgatgagttgacagaagtaggcttcagaaggttggtaataacaaagttctccgagctaaaggaggatgtttga

SEQ ID NO: 17308 - DNA, 2290 bp, Homo sapiens
  SIMILAR (734)..(2287): 911254mologous to Homo sapiens putative p150,accession number U93564,Smith-Waterman Score=2487.
tgcaatcaaactagaactcagaattaagaaactcactcaaaactgctcacctacatggaaactgaacaacctgctcctgaatgactactgggtacataacgaaatgaaggcagaaataaagatgttctttgaaaccaacgagaacaaagacacaacataccagaatctctgggacacattcaaagcagtgtgtagagggaaatttatagcactaaatgcccacaagagaaagcaggaaagatctaaaattgacaccctaacatcacaattaaaagaactagaaaagcaagagcaaacatattcaaaagctagcagaaggcaagaaataactaagatcagagcagaactgaaggaaatagagacacaaaaaatccttcaaaaaatcaatgaatccaggagctggttttttgaaaagatcaacaacattgatagaccgctagcaagactaataaagaagaaaagagagaaaaatcaaatagatgcaataaaaaatgatacaggggatatcaccaccaatcccacagaaatacaaactaccatcagagaatactataaacacctctacacaaataaactagaaaatctagaagaaatggataaattcctggacatatacacactcccaagactaaaccaggaagaagttgaatctctgaatagaccaataacaggctctgaagttgaggcaataattaatagcttaccaaccaaaaaaattccaggaccagatggattcacagccgaattctaccagagaaaaagaggaatccttcccaactcattttatgaagccagcattatcctgataccaaagcctggcagagacacaacaaacaaagagaattttagaccaatatccttgatgaacatcgatgcaaaaatcctcaataaaatactggcaaaccgaatccagcagcacatcaaaaagcttatccaccatgatcaagtgggcttcatccctgggatgcaaggctggttcaacatacgcaaatcaataaacgtaatccagcacataaacagaaccaatgataaaaaccacatggttatctcaatagatgcagaaaagacctttgacgaaattcaacaacccttcatgctaaaaactctcaataaattaggtattgatgggacgtatctcaaaataataagagctgtctatgataaacccacaggcaatatcatactgaatgggcaaaaactggaagcattccctttgaaaactggcacaagacagggatgccctctctcaccactcctattcaacatagtgctggaagttctggccagggcaatcaggcaggagaaggaaataaagggtattcaattaggaaaagaggaagtcaaattgtccctgtttgcagatgacaagattgtatatctagaaaaccccatcgtctcagcccaaaatctccttaagccaataggcaacttcagccaagtatcaggatacaaaatcaatgtgcaaaaattacaagcattcttatacaccaataacagacaaacagagagccaaatcgtgagtgaattcccattcacaattgcttcaaagagaataaaatacctaggaatccaacttataagggacatgaaggacctcttcaagcagaactacaaaccactgctcaatgaaataaaagaggatacaaacaaatggaagaacattccatgctcatggataggaagaatcaatatcatgaaaatggccatactgcccaaggtaatttatagattcaatgccatccccataaagctaccaatgactttcttcacagaattggaaaaaactactttaaacttcaggtggaaccaaaaaagagcccgcattgccaagtcaatcctaagccaaaagaacaaagctggaggcatcacgctacctgacttcaaactatactacaaggctacagtaaccaaaacagcatggtactggtaccaaaacagagatatagacaaatggaacagaacagagccctcagaaataatgccgcatatctacaaccatctgatctttgacaaacctgacaaaaacaagaaatggggaaaggattccctatttaataaatggtgctgggaaaacgggctagccatatgtagaaagctaaaactggatcccttccttacaccttatacaaaaattaattcaagatggattaaagacttaaacgttagacctaaaaccataaaagccctagaagaaaacctaggcaataccattgaggacataggcatgggcaaggacttcatgtctaaaacaccaaaagcaagggcaacaaaagacaaaattgacaaatag

SEQ ID NO: 17309 - DNA, 1992 bp, Homo sapiens; identical to SEQ ID NO: 4222
  SIMILAR (1)..(1272): 821254mologous to Homo sapiens putative p150,accession number U93570,Smith-Waterman Score=1773.

SEQ ID NO: 17310 - DNA, 1680 bp, Homo sapiens; identical to SEQ ID NO: 6838
  SIMILAR (427)..(1677): 921254mologous to Homo sapiens putative p150,accession number U93569,Smith-Waterman Score=1964.

SEQ ID NO: 17311 - DNA, 2178 bp, Homo sapiens
  SIMILAR (2078)..(2176): 931254mologous to Homo sapiens putative p150,accession number U93574,Smith-Waterman Score=174.
atgggagactttaacaccccactgtcaacattaggcagatcaacgagacagaaagtcaacaaggatacccaggaattgaactcggctctgcaccaggcggacctaatagacatctacggaactctccaccccaaatcaacagaatatacatttttttcagcaccacaccacacctattccaaaattgaccacatagttggaagtaaagctctcctcagcaaatgtaaaagaacagaaattataacaaactgtctctcagaccacagggcaatcaaactagaactcaggattaagaaactcactcaaaaccgctcaactacatggaaactgaacaacctgctcctgaatgactactgggtacataacgaaatgaaggcagaaataaagatgttctttgaaaccaacgagaacaaagacacaacataccagaatctctgggacacattcaaagcagtgtgtagagggaaatttatagcactaaatgcccacaagagaaagcaggaaagatccaaaattgacaccctaacatcacaattaaaagaactagaaaagcaagagcaaacacattcaaaagctagcagaaggcaagaaataactaaaatcagagcagaactgaaggaaatagagacacaaaaaacccttcaaaaaattaatgaatccaggagctggttttttgaaaggatcaacaaaattgatagaccgctagcaagactaataaaggaaaaaagagagaagaatcaaatagacgcaacaaaaaatgataaaggggatatcaccactgatcccacagaaatacaaactaccatcagagaatactacaaaaccctctacgcaaataaactagaaaatctagaagaaatggataaattgctggacacatacactctcccaagactaaaccaggaagaagttgaatctctgaacagaccaataacaggatctgaagttgtggcaataattaatagcttaccaaccaaaaacagtccaggaccagatggattcacagccaaatactaccagaggtacaaggaagaactggtaccattccttctgaaactattccaatcaacagaaaaagagggaatcctccctaactcattttatgaggccagcatcatcctgataccaaagcctggcagagacacaaccaaaaaagagaattttagaccaatatccttgatgaacgttgatgcaaaaatcctcaataaaatactggcaaaccgaatccagcagcacatcaaaaagcttatccaccatgatcaagtgggcttcatccctgggatgcaaggctggttcaatatatgcaaatcaatcaatgtaatccagcatataaacagaaccaaagacaaaaaccacatgattatctcaatagatgcagaaaaggcctttgacaaaattcaacaacccttcatgctaaaaactctcaataaattagtgttggaagttctggccagggcaattaggcaggagaaggaaataaagggcattcaattaggaaaagaggaagtcaaattgtccctgtttgcagatgacatgattgtatatttagaaaaccccatcatctcagcccaaaatctccttaagctgataagcaacttcagcaaagtctcaggatacaaaatcaatgtgcaaaaatcacaagcattcttatacaccaataacagacaaacagagagccaaatcatgagtgaactcccattcacaattgcttcaaagagaataaaatacctaggaatccaacttacaagggatgtgaaggacctcttcaaggagaactacaaaccactgctcaatgaaataaaagaggatacaaacaaatggaagaacattccatgctcatggataggaagaatcaatatcgtgaaaatggccatactgcccaaggtaatttatagattcaatgccatccccatcaagctaccaatgactttcttcacagaattggaaaaaactactttaaagttcatatggaaccaaaaaagagcccgcatcaccaagtcaatcctaagccaaaagaacaaagctggaggcatcacgctacctgacctcaaactatactacaaggctatagtaactcaaaacagcatggtactgctaccaaaacagagatatagaccaatggaacagaacagagccctcagaaataatgctgcatatctacaactatctgatctttga

SEQ ID NO: 17312 - DNA, 1773 bp, Homo sapiens
  SIMILAR (304)..(1029): 881254mologous to Homo sapiens putative p150,accession number U93563,Smith-Waterman Score=1052.
atgggagactttaacaccccactgtcaacattagacagatcaatgagacagaaagttaacaaggatacacaggaattgaactcagctctgcaccaagcagacctaatagacatctatagaactctccaccccaaatcaaaagaatatacatttttttcagcactgcaccacacctattccaaaattgaccgcacagttggaagtaaagctctcctcagcaaatgtaaaagaacagaaattatcacaaactctctctcagaccacagagcaatcaaactagaactcaggattaagaaactcactcaaaaccgttcaactacatggaaactgaacaacctgctcctgaatgactactgggtacataacgaaatgaaggcagaaataaagatgttctttgaaaccaacgagaacaaagacacaacataccagaatctctgggacacattcaaagcagtgtgtagagggaaatttatagcactaaatgcccacaacagaaagcaggaaagatccaaaattgacaccctaacatcacaattaaaagaactagagaagcaagagcaaacacaatcaaaagctagcagaaggcaagaaataactaaaatcagagcagaactgatggaaatagagacacaaaagacccttcaaaaaagtaatgaatccaggagctggttttttgaaaggatcaacaaaattgatagaccactagcaagactaataaagaagaaaagagagaagaatcaaatagacgtaataaaaaatgataaaggggatatcaccaccgatcccacagaaatacaaactaccatcagagaatactacaaacatctctacgcaaataaactagaaaatctagaagaaatggataaattcctggacacatacaccctcccaagactaaaccaggaagaagttgaatctctgaatagaccaataacaggctctgaaattgtggcaataatcaatagcttaccaaccaaaaagagtccaggaccagatggattcacagtcgaattctaccagagggcaattaggcgggagaaggaaataaagggtattcaattaggaaaagaagaagtcaaattgtccctgtttggagatgacatgattgtatatctagaaaaccccatcgtctcagaccaaaatctccttaagctggtaagcaacttcagcaaagtctcaggatacaaaatcaatgtacaaaaatcacaagcatttttatacaccaataacaggcaaacagaaagtcaaatcatgagtgaactcccattcacaattgcttcaaagagaataaaatacctaggaatccaccttacaagggatgtgaaggacctcttcaaggagaactacaaaccactgctcaatgaaataaaagaggatacaaacaaatggaagaacattccatgctcatgggtaggaagaatcaatatcgtgaaaatggccatactgcccaaggtaatttgtagattcagtgccatccccatcaagctaccaatgactttcttcacagaattggaaaaatctactttaaagttcatatggaaccaaaaaagagcccgcatcaccaagtcaatcttaagccaaaagaacaaagctggaggcatcacgctacctgacttcaaactatactacaaggctacagtaatcaaaacagcatggtactggtaccaaaacagagatatagatcaatggaacagaacagagccctcagaaataatgccacatatctacaacaatctgatctttgacaaacttgagaaaaataagcaatggtga

SEQ ID NO: 17313 - DNA, 1104 bp, Homo sapiens
  SIMILAR (412)..(1101): 901254mologous to Homo sapiens putative p150,accession number U93563,Smith-Waterman Score=1061.
atggcacaagaactacatgacgaatgcacaagcctcagcagccgatgtgatcaactggaagaaagggtatcagcgatggaagatgaaatgaatgaaatgaagcgagaagagaagtttagagaaaaaagaataaaaagaaacgaacaaagcctccaagaaatatgggactacgtgaaaagaccaaatctacgtctgattggtgtacctgaaagtgacggggagaatggaaccaagttggagaacactctgcaggatattatccaggagaacttccccaatctagcaaggcaggccaacattcaaattcaggaaatacagagaacgccacaaagatactcctcgagaagagcaactccaagacacataattttcagattcaccaaaattgaaatgaaggaaaaaatgttaagggcagccagagagaaagaactcaggattaagaaactcactcaaaaccgctcaactacatggaaactgatcaacctactcctgaatgactactgggtacataacgaaataaaggcagaaataaagatgttctttgaaaccaacgagaacaaagacacaacataccagaatctctgggacacattcaaagcactgtgtagagggaaatttatagcactaaatgcccacaagagaaagcaggaaagatctaaaattgacaccctaacatcacaattaaaagaactagagaagcaagagccaacacattcaaaagctagcagaaggcaagaaataactaagatcggagcagaactgaaggaaatagagacacaaaaaacccttcaaaaaatcaatgaatccaggagctggttttttgaaaagatcaacaaaattgatagaccactagcaagactaataaagaagaaaagagagaagaatcaaatagacgcaataaaaaatgacaatggggatatcaccaccgataccacagaaatacaaactaccatcagagaatactataaacacctctacgcaaataaactagaaaatctagaagaaatggataaattccttgacacatacactctcccaagactaaaccaggaggaagttgaatctccaaaaagaccaatagcaggctctgaaattgaggcataa

SEQ ID NO: 17314 - DNA, 1614 bp, Homo sapiens
  SIMILAR (4)..(1221): 731254mologous to Homo sapiens putative p150,accession number U93569,Smith-Waterman Score=1466.
atgagacagaaagttaacaaggatatccaggaattgaactcagcgctgcaccaggtggacctaatagatatctacagaactctccatcccaaatcaacagaatatacattcttctcagcaccacatctcacttattccaaaattgaccacttagttagtagtaaagcactcctaagcaaatgtaaaagaacagaaattataagaaactgtctctcagaccacagtgcaaccaaactagaactcaggattaagaaactcactcaaaaccgctcaactacatggaaactgaacaacctgctcctgaatgactactgggtacataacgaaatgaaggcagaaataaagatgttctttgaaaccaatgagaacaaaaacacaacataccagaatctctgggacacattcaaagcagtgtgtagagggaaatttatagcactaaatacccacaacagaaagcaggaaagatctaaaattgacaccctaacatcacaattaaaagaaccagagaagcaagatcaaacacattcaaaagcgagcagaaggcaagaaataactaagatcagagcagaactgaaggaaatagagacacaaaaaacccttcaaaaaatcaatgaatccaggagctggttttttgaaaagatcaacaaaattgatagaccgctagcaagactaataaagaaggaaggagagaagaatcaaatacacacaataaaaaatgataaaggggatctcaccaccaatcccatagaaatacaaactaccatcagagaatactatatacacttctacgcaaatacactagaaaatctagaagaaatggataaattcctcaacacatacaccctcctaagactaaatcaggaagaagttgaatctctgaatagacgaataacaggctctgaaattgaggcaataattaatagcttaccaaccaaaaaaagtccaggaccagatgcagaaaaggcctttgacaaaagtcaacaacgcttcatgctaaaaactctcaataaattaggtattgatgggacgtatctcaaaataataagagctatctatgacaaacccatagccaatatcatactgaatgggcaaaaactggaagcattccctttgaaaacaggcacaagacagggatgccctctctcaccactcctattcaacatagtgttggaagttctggccagagcaatcaggcaggagaaggaaataaagggtattcaatcaggaaaagaggaactcaaattgtccctgtttgcagatgacatgattgtatatctagaaaatcccatcctctcagcccaaaatctccttaagctgataggcaacttcagcaaagtctcaggatacaaaatcaatgtgcaaaaatcacaagcattcctatacaccaagaacagacaaacagagagccaaatcatgagtgaactcccattcacaattgcttcaaagagaataaaagacctaggaatccaacttacaagggacgtgaaggacctcttcaaggagaactacaaaccactgctcgaagaaataaaagaggatacaaacaaatggaagaacattccatgctcatggataggaggaatcaatattgtgaaaatagccatactgcccaag

SEQ ID NO: 17315 - DNA, 1878 bp, Homo sapiens; identical to SEQ ID NO: 11186
  SIMILAR (1818)..(1877): 901254mologous to Homo sapiens putative p150,accession number U93563,Smith-Waterman Score=100.

SEQ ID NO: 17316 - DNA, 1764 bp, Homo sapiens
  SIMILAR (598)..(1755): 941254mologous to Homo sapiens putative p150,accession number U93563,Smith-Waterman Score=1880.
gccttagaagcttcttattttatatcttcaaaaacttctggacaaaaaaggtatcaaccccactgtcctccaagctgtgatcacaattgtctccaaaagggactctacctccatagcccaccccaatttcctttcaatggcttcaaggccttcaagagtgcactgatgagttcctactggtgctcagggaaaggggatgtgatcgatgactggtgcaggtgtgacctcagcgcctttgatgccaatgggctccccaactgcagcccccttctgcagccggtgctgcggctgtccccaacagtggagccctccagtactgtggtctccttggagtgggtggatgttcagccagctattgggaccaaggtctccgactatattctgcagcataagaaagtggatgaatacacagacactgacctgtacacagtgggcaaggtgaaccccctgggcagttacaaattcaggggcttgtccaggattgcccttgtggctacctgctcatggttcagtgcccccccacgctccagcaatggatccagaggccagcccaagtggctgcctagttcttttggactggggctgactctggtactctattggtgggaacacagtgcaatcaaacttgaactcaggattaagaaactcactcaaaaccgctcaactacatggaaactgaacaacctgctcctgaatgactactgggtacataacgaaatgaaggcagaaataaagatgttctttgaaaccaatgagaacaaagacacaacataccagaatctctgggacacattcaaagcagtgtgtagagggaaatttatagcaataaatgcccataagagaaagcaggaaagatctaaaattgacaccctaacatcacaattaaaagaactaaaaaagcaagagcaaacacattcaaaagctagcagaaggcaagaaataactaaaatcagagcagaagtgaaggaaatagagacacaaaaaacccttcaaaaaattaatgaatccaggagctggttttttgaaaggatcaacaaaattgatagaccactagcaagactcataaagaagaaaagagagaagaatcaaatagacgcaataaaaaatgataaaggggatatcaccaccgatcccacggaaatacaaactaccatcagagaatactacaaacacctctacgcaaataaactagaaaatctagaagaaatggataaattcctggacacatacaccatcccaagactaaaccaggaagaagttgaatctctgaatagaccaataacaggatctgaaattgtggcaataatcaatagcttaccaaccaaaaagagtccaggaccagatggattcacagccgaattctaccaggggtacaaggaggaactggtatcattccttctgaaactattccaatcaacagaaaaagagggaatcctccctaactcattttatgaggccagcatcatcctgataccaaagccgggcagagacacaaccaaaaaggagaattttagatcaatatccttgataaacattgatgcaaaaatcctcaataaaatactggcaaaccgaatccagcagcacatcaaaaagcgtatccaccatgatcaagtgggcttcatccctgggatgcaaggctggttcaatatatgcaaatcaataaatgcaatccagcatataaacagaaccaaagacaaaaatcacatgattatctcaatagatgcagaaaaggcctttgacaaaattcaacaaccttcatgctaa

SEQ ID NO: 17317 - DNA, 1878 bp, Homo sapiens; identical to SEQ ID NO: 4880
  SIMILAR (1)..(1038): 891254mologous to Homo sapiens putative p150,accession number U93563,Smith-Waterman Score=1577.

SEQ ID NO: 17318 - DNA, 1614 bp, Homo sapiens; identical to SEQ ID NO: 12684
  SIMILAR (358)..(1236): 871254mologous to Homo sapiens putative p150,accession number U93567,Smith-Waterman Score=1322.

SEQ ID NO: 17319 - DNA, 4542 bp, Homo sapiens; identical to SEQ ID NO: 12694
  SIMILAR (328)..(2418): 941254mologous to Homo sapiens putative p150,accession number U93563,Smith-Waterman Score=3389.

SEQ ID NO: 17320 - DNA, 6294 bp, Homo sapiens
  SIMILAR (1288)..(2796): 901254mologous to Homo sapiens putative p150,accession number U93572,Smith-Waterman Score=2384.
atggcgcgatctcggctcaccgcaacctccgcctcccgggttcaagcgattcttctgcctcatcctcccaacccggtgtcgttccccgcggtaggtggtccccgacgagctgcagccatgggaaacaccaccagcgaccgggtgtccggggagcgccacggcgccaaggctgcacgctccgagggcgcaggcggccatgccccggggaaggagcacaagatcatggtggggagtacggacgaccccagcgtgttcagcctccctgactccaaggtggaagagccaatgattccacgacttgtttactcctcagtagtacttcaaaatgttgcgtggctaaaaaaacgacaacccacagctgccctgaagaccttgctctcaattccaaggactttcaggaagagaacaacttgttttcactctctccctggggacaaagagtttgtatcatggcagcaggatttggaggactccgtaaagcccacacagcaggcccggcccactgttatccgctggtctgaaggaggcaaggaggtcttcatctctgggtccttcaacaattggagcaccaagattccactgattaagaggattaagaaacccactcaaaaccgctcaactacatggaaactgaacaacctgctcctgaatgactactgggtacttaacaaaatgaaggcagaaataaagatgttctttgaaaccaacgagaacaaagacacaacataccagaatctctgggacacattcaaagcagtgtgtagagggaaatttatagcactaaatgcccacaagagaaagcaggaaagatccaaaattgacaccctaacatcacaattaaaagaactagaaaagcaagagcaaacacattcaaaagctagcagaaggcaagaaataactaaaatcagagcagaactgaaggaaattgagacacaaaaaacccttcaaaaaattaatgaatccaggagctggttttttgaaaagatcaacaaaatcgatagactgctagcaagactagtaaagaagaaaagagagaggaatcaaatagatgcaataaaaaatgataaaggggatatcaccaccaatcccacagaaatacaaactaccatcagagaatactacaaacacctctatgcaaataaactagaaaatctagaagaaatggataaattcctcaacacatacaccctcccaagactaaaccaggaagaagttgaatctctgaatagaccaataacaggatctgaaattgtggcaataatcaatagcttaccaaccaaaaaaagtccaggaccagatggattcacagccgaattctaccagaggtacaaggaggaactgcatataaacagagccaaagacaaaaaccacatgattatctcaatagatgcagaaaaagcctttgacaaaattcaacaacccttcatgctaaaaactctcaataaattaggtattgatgggacgtatctcaaaataataagagctatctatgacaaacccacagccaatatcatactgaatgggcaaaaactggaagtattccctttgaaaactggcacaagacagggatgtcctctctcaccactgctattcaacatagtgttggaagttctggccagggcaattaggcaggagaaggaaataaagggtattcaattaggaaaagaggaagtcaaattgtccctgtttgcacatgacatgattgtatatctagaaaaccccattgtctcagcccaaaatctccttaagctgataagcaacttcagcaaagtcttaggatacaaaatcaatgtacaaaaatcacaagcattcttatacaccaataacagacaaacagagacccaaatcatgagtgaactcccattcacaattgcttcaaagagaataaaatacctaggaatccaacttacaagggatgtgaaggacctcttcaaggagaactacaaaccattgctcaaggaaataaaagaggatacaaacaaatggaagaacattccatgctcatgggtaggaagaatcaatatcgtgaaaatggccatactgcccaaggtaatttatagattcaatgtcatccccatcaagctaccaatggctttcttcacagaattgggaaaaactactttaaagttcacatggaaccaaaaaagagcctgcattgccaagtcaatcttaagcaaaaagaacaaagccagaggcgtcacgctacctgacttcaaactatactacaaggctacagtaaccaaaacagaatggtactggtaccaaaacagacatatagatcaatggaacagaacagagccctcagaaataatgccgcatatctacaaccatctgatctttgacaaacctgagaaaaacaagaaatggggaaaggattccctatttaataaatggtgctgggaaaactggctagccatatgtacaaagctgaaactggatcccttccttacaccttatacaaaagttaactcaagatggattaaagacttacatgttagacctaaaaccataaaaaacctagaagaaaacctaggcaataccattcaggacataggcatgggcaaggacttcatgtctaaaacaccaaaagccatggcaacaaaagccaaaattgacaaatgggatttaattaagctaaagagcttctgcacagcaaaagaaactaccatcagagtgaacaggaaacctacagaatgggagaaaatttttgcaaactactcatctgacaaagggctaatatccagaatctacaatgaactcaaacaaatttacaagaaaaaaacaaccccatcaaaaagcgtcagagccagcgtcccgggaaacgcccgggtccgcgacttcccaaaggaagcagaacgccccgtggactctagtgatggctctttccgttcttggctccgccttcacccgactttctacgccgcttgggctcccctagctcaactcggcttcggtcgagcaaggtcaagcatcaccgcttgccttgtggcccgccgtgatcgtatagtggttagtactctgcgttgtggccgcagcaacctcggttcgaatccgagtcacggcaaagttgctcgtctgggtagtcagctgatccgttttgctccccgcaaccaggcgcgtcaggatcagcccttaattcaaataagagcagttggaacgacaaaaggtgttcagttgtacccttggaatccacagaaatcctgggtagggaagctcgagtaccaccaactggaaagacagggatgcctagtagctgattcggggcccattgtcgtaggctttgtccactttgcaaactggagacagggactcgactcaccttctccagccactggaggaccgggaggaccttcagaggaggtgaggtcgacttcatggaggggcgagaggatcctcggtgagcgaacccagccttctacctggctggccctggtcaacaggctcagaagaggccgatttggaggacagaacagaaggaaagacctaaaggtagaaactcatgatgtcgagatgttaaaagcctcaaatcctaagtcagcggaggcgagggatgcggctaaacaccttacaatccaccgaagggcccctcccccaccccgtaatacccattccgcggaggtggagaaactcgcgtgtagatcaatgcccacgcacttggccgatgggaaatcacgaattggtgaccagttcgatcttggccctgaggaaaaaactcaaacgtcagcgggaacccttggagctttgcccagagcatacggaagggtggcgttgcagtatagcctaagatgggaaaatggcagtgcgcggctctggcccggtgacccgctactgtctctccatgcgctgccgcttcacaaaggcgcatctctaggtcggtggtcaggttctgcccggacgctgcaactggctccgggacttgtgtccttgaatttagcgctttcaccgccgcagctcgggttggattaccagtcagggaattgttttgcactgactgccttcccgcaggaatcttcctttacgcccgctagatgccagccctcctggaactgcacccaagaagcccaccgtctttgccgcctctgccgtcccggaggcgccgatcgggctgagctgcgaataactaagagagaggccaaggcaagtcgtggcgtttgtgcgtgccacaaattatcagctgacaggggacggtcagtggagcctcctcacctccgttcgcgggtaacgtgcttcttaggccttcagaagaagcgactggaggcgatgcccgcgaggttggaagtgggactgagcggtaaagggaggcgatgtttgctgacccaacaaagacagcacgtggagcaggcacaaatggaaaactgtggccgctctcgaacagacagatgtgagctctctgtcttttacacgctgaatttggctattggcaaaaaagccctgacccagagcttgggtctccttccgacctgcacacgactccccgactcccgcctccaagcgcggctcttggctcgctggcgggcagcgtccacagagtgtggaaccgccgcagccgcagctcccgcccgctggcgggcagacactagcaggagaaaggacacaaggcctgcgtggtgggaaagcatgggagacctcgctttcccaccggacgagaaggtctccctgcagtctttggacaccagatggatggaggcaccccttctaggaacaaggcggctgctcctgaggcctggcttcgcacagtggctcctgggtcccgcgcgccctctcccttcccgcggtagcaagagctgctttacacatctcagccggcttcctctttctccccagctgtccttgggacagcaaggcccccagccccgggtccagggggctggttcagggcccaggactcctcgctcctcctggagggcctgggtcgcgtggcctaggagctggccacatgggcatctccagcactgctcctcagggaacgggaggcattatcctgcaggacccactcttacccatgagagacaccgggaaatgctcctgcggaagctggagctctgcgcgcttgaccacttcggggtgaagcttccgtccgcccatccttccttcgaggggccttggggagaggagaaatgctccaggacgatgccctttgcagtgtctcaaccgagaccagaggaaaggaggtcttacaggagcacctttcactcattagaggaacagcaagttggcttggctcttgacataggtagtgagtactccattgtgaaggtgataaagctccagttagcatcccaggccagtgtcacccttgtctacctctcagtggaagatgtgacccaggtttcactgaatttatctccattttctgtgtcttctaagttggcttgttttagctcatctgtccatcatcttgctggacctcagtgtgatcaagtgaaaaaggacgatcgagaggcaacatgtcccagtttttcctacttcttcaagctcagcagggagctgttggaagtggaagagcctgaagtcttgcaggactcactggatagatattattcgactcctaccagttatcttgaactgcctgactcatgccagccctacagaagtacttttactcattggaggaacagcatgttggcttggctcttgatggggacagattggacagtggattgttgcatgaataggggaatagacttaatgtgtctgtccctgtctgactttgttgcagacattgaaaaaaatcaagaagaagaagaagaccaagacccacaatgccccaggctgagcccggatctgccagaggtggaggaacaggacgtcccacaggactccctggatgaagtttacttgactccttcactcccccatgacctgtctgactgccagcaaccttacaacagcacgttgtactcattggaggatcagctcacctgctttgctctcgatgtagcctgtgctggcctaactgatgaagaaagcacagtggttctcatccccatgatctccagcaaacccctccttctcttgtcccacctgatgagaaacgcccacaggtgtggaggggcaggccaccccttcaagtctgatacactgtgctctcaggaagatgaagaacagatacacggaaggcattttaaggaaaacttagagaaaccttgctcccacccaggtggcctgtcctcacgggccttggagtggagacttgagccaccacctgtcagaggtggaggcttcacaggcacagctggagccaagaaccctggtgcccagttgtctgtgactgcaactggatcaagggtttga

SEQ ID NO: 17321 - DNA, 1915 bp, Homo sapiens
  SIMILAR (227)..(1234): 891254mologous to Homo sapiens putative p150,accession number U93563,Smith-Waterman Score=1530.
atcactgaccttcagtccagcaatttccagtgtcctgcaggctgctgatcccaagatgctcagccacacaaaggtgttgcggccaacctccgctggtgatacccaggcaaacagggttggagtggacctccagcaaactccaacagacctgcagctgagggtcctcactgttagaaagaaaactaacaaacagaaaggacatccacaccaaaaccccatctgtacgtcaccatcatcaaagaccaaagacagatccacgagacagaaagttaacaaggatatccaggacttgaactcagctctgcacaaagcggacctaatagacatctacagaactctccaccccaaatcaacagaatatacattcttcttagcaccacatcacacttattccaaaattgaccacatagttagaagtaaagcactcctcagcaaatgtaaaagcatagaaattataacaaactgtctctcagaccacagtgcaatcaaactacaactcaggattaagaaactcactcaaaaccactcaactacatggaaactggacaacctgctcctgaatgactactgggtacataacgaaatgaaggcagaaataaagatgttctttgaaaccaatgagaacaaagacacaacataccagaatctctgggacacatttaaagcagtgtgtagagggaaatttatagcactaaatgcccacaagagaaagcaggaaagatctaaaatgggtaccctaacatcacaattaaaagaactagagaagcaagagcaaacatattcaaaagctagcagaaggcaagaaataactaagatcagagcagaactgaaggagatagagacacaaaaaacccttcaaaaaaaaatcaatgactccaggagctggtttttggaaaagatcaacaaaattgataaaccgctagcaagactaataaagaagaaaggagagaagaatcaaatagatgcaataaaaaatgataaaggggatctcaccaccgatcccacagaaatacaaactaccatcagagaatactataaacacctctatgcaaataaactagaaaatctagaagaaatggataaattcctgcacccacacaccctctcaagactaaaccaggaagaagttgaatctctgaatagaccaataacaggctctgaaattgaagcaataattaatagcctaccaaccaaaaaatgtccaggaccagacggattcacagccgaattctaccacagcatcatcctgacaccaaagcctggcagagacacaacaaaaaaagagaattttagaccaatatccctgatgaacatcgatgcaaaaatcctcaataaaatactggcaaacggaatccagcagcacatcaaaaagcttatccaccatgatcaagtgggcttcatccctgggatgcaaggctggttcaacatacgcaaatcaacaaatgtaatccatcatataaacagaaccaaagacaaaaaccacatgattatctcaatagatgcagaaaaggcctttgacaaaattcaacagcccttcatgctaaaaactctcaataaactaggtattgatgggacgtatctcaaaataacaagagctatttatgacaaacccacaggcaatatcatatggaatgggcaaaaactggaagtattccctttgaaaactgccacaacacagggatgccctttctcaccactcctattcaacatagtgttggaagttctggccacggcaatcaggcaggagaaagaaataaaggttattcaattaggaaaagaggaagtcaaattgtccctgtttgcagatgacatgattgtatatttagaaaactccatcgtctcaatccaaaatcttcttaagttgataagcaacttcagcaaagtctcaggacacaaaatcaatgtgcaaaaataa

SEQ ID NO: 17322 - DNA, 1029 bp, Homo sapiens
  SIMILAR (154)..(1026): 841254mologous to Homo sapiens putative p150,accession number U93567,Smith-Waterman Score=1241.
atgcctaatgcctatctaattggccatattgctggctggatttcagatgtgctttatacttctcttagaacagggatcctcaactccggctgcactttagagtcacctgcagaacttctgaaacataccaatgttgggccaccaacaccaaagagacggaaggttaacaaggatatccagggcctgaactcagctctgcaacaagcagacctaacagaaatctacagaactctccaccccaaatcaacagaatatacattcttctcagcaccacatcgcacttattctaaaattgaccacataattgaaagtaaagcactcctcagcaaaggtaaaagaccagaaatcacaacaaactgtctctcagaccacagtgcaatcaaattagaactcaggattaagaaactcactcaaaaccacacaactacatggaaactgaacaacctgctcctgaatgactactgggtaaataaggaaatgaaggcagaaataaagatgttctttgaaaccaatgagaacaaagacacaatgtaccagaatctctgggacacatttaaagcagtgtgtagagggaaatttatagcactaaatgcccacaagagaaagcaggaaagatctaaaatggacatcctaacatcacaattaaaagaactagagaagcaagagcaaacaaatgcaaaagctagcagaaggcaagaaataactaagatcagagcagaagtgaaagagatagagacacacaaaaaaaaaaccttcaaaaaaatcaatgaatccaggagctggatttttgaaaaaatcaacaaaattgatagaccgctagcaagactaataaagaagaaaagagagaagaatcaaatagatgcaataaaaaatgataaaggggatatcaccacccatcccacagaaatacaaactaccatcagagaatactataaaatatatataaaatacctctatgcaaataaactagaaaatctagaagaaatggataatttcctggacacatacaggttcccagaactaaactag

SEQ ID NO: 17323 - DNA, 2115 bp, Homo sapiens; identical to SEQ ID NO: 8964
  SIMILAR (712)..(1584): 801254mologous to Homo sapiens putative p150,accession number U93563,Smith-Waterman Score=1148.

SEQ ID NO: 17324 - DNA, 1884 bp, Homo sapiens
  SIMILAR (394)..(1467): 911254mologous to Homo sapiens putative p150,accession number U93569,Smith-Waterman Score=1673.
atggagaatggctttgacgagttgagagaagaaggcttcagacgatcaaactactccgagctacaggaggaaattcaaaccaaaggcaaagaagttaaaaacattgaaaaaaatttagatgaatgtataactagaatacccaatacagagaagtgcttaaagaagctgatggagctgaaaaccaaggctcgagaactacgtgaagaatgcataagcctcaggagccgatgcgaccaactggaagaaagcgtatcagtgatggaagatgaaatgcatgaaatgaagcgagaagggaagtttagagaaaaaagaataaaaagaaatgaacaaagcctccaagaaatatgggactatgtgaaaagaccaaatctacgtctgattggtgtacctgaagacagatcaatgagacagaaagttaacaaggatacccaggaattgaactcagctctgcaccaagcggacctaatagacatctacagaactctccaccccaaatcaacagaatatacatttttttcagcaccacaccacacctattccaaaattgaccacatagttggaagtaaagctctcctcagcaaatgtaaaagaacagaaattataacaaactatctctcagaccacagtgcaatcaaactagaactcaagattaagaagctcactcaaaacttctcaactacatggaaactgaacaacctgctcctgaatgactactgggtacataacaaaatgaaggcagaaataaagatgttctttgaaaccaacgagaacaaagacacaacttaccagaatctctgggacacattcaaagcagtgtgtagagggaaatttatagcactaaatgcctacaagagaaagcaggaaagatccaaaattgacaccctaacatcacaattaaaagaactagaaaagcaagagcaaacacattcaaaagctagcagaaggcaagaaataactaaaatcagagcagaactgaaggaaatagagacacaaaaaacccttcaaaaaattaatgaatccaggagctggttttttgaaaggatcaacaaaattgatagaccgctagcaagactaataaagaaaaaaagagagaagaatcaaatagacgcaataaaaaatgacaaaggggatatcaccaccgatcccacagaaatacaaactaccatcagagaatactacaaacacctctacacaaataaactagaaaatctagaagaaatggataaattcctcgacacatacaccctcccaagactaaaccaggaagaagtggaatctctgaatagaccaataacaggatctgaaattgtggcaataatccatagcttaccaaccaaaaagagtccaggaccagatggattcacagcccaattctaccagaggtacaaggaggaactgagaataaaatacctaggaatccaacttacaagggatgtgaaggacctcttcaaggagaactacaaaccactgctcaaggaaataaaagaggagacaaacaaatggaagaacattccatgctcatgggtaggaagaatcaatatcgtgaaaatggccatactgcccaaggtaatttacagattcaatgccatccccatcaagctaccaatgactttcttcacagaattggaaaaaactactttaaagttcatatggaaccaaaaaagagcccgcatcgccaagtcaatcctaagccaaaagaacaaagctggaggcatcacgctacctgatttcaaattatactacaaggctacagtaaccaaaacagcatggtactggtaccaaaacagagatatagatcaatggaacagaacagagccctcagaaataacgccacatatctacaactatctgatctttgacaaacctgagaaaaacaagcaatag

SEQ ID NO: 17325 - DNA, 1698 bp, Homo sapiens
  SIMILAR (1102)..(1695): 811254mologous to Homo sapiens putative p150,accession number U93563,Smith-Waterman Score=838.
atgaggaacagtagggagaggtctgaagagaaccaaccagcagcatcacagaagtctaaggagcagaaagttcgagagtgtcaaagttggcagggattaaaagaactgaagaagtcctgctattgcgtaagatgtcagccacagctcccagagagctgcagagccaaccagcaggcaagttttaattccccggccgaagagatttcgacctgcagggcactggtgacaatggatgaacagaggcaggatggctcctggaacaatgcgaccggcacccaagtgttctgcatcttggtaaacaacaccgccagctacccggacactcaacccaaaaccttgcccccgtctgcatttctgtcacatcccacggtccgttcttcagaaaattctgtgttctaccttcaaatacagccaaatccaaccacttctcaccatgtcttctctatcatcctcattgagacaccaccagctctcacttgctcattgcatgagcctcccctacttctgctcctccaaacccaccctccagaatattccacaaagcagccagagcatccatttaaaacacccatcagacacgttgactgccacatcccagccccagttcagcacggctggggaggactcaaggaacttatgatcatagtggaaggggaagcaaacacatccttcttcacatggcagcaacaaggagaagtgcagcacgaagagggagagaagccccttataaaagcatcagatctcaagagaactcactatcacaagaaaagcatggagaacaatgaaattgaccaaatagcaacggggggaaagagtcctgggatccgaataagccacaaactggatattgggctctggatcctggagagctaccctctggccagaaaccaaaatgggcttggctcattcctggtaaatattccaaccacactaggtgccgagcacctgagagagcaaggggaagggagccaggccccaggcctgccaccggtcactgggccggggacccaactggacagcagcttcccagaggcagcgcctcccaacgccccctcctccggtggctccacctccgcaacagaccgggttccgggcatccctgtgagctcgggcctgtccaaccacaccagtgcttcaggcgaccagattaagaaactcactcaaaaccacacaactacatggaaactgaacaacctgctcttgaatgactactggctacataacaaaatgaaagcagaaataaagatgttctttgaaaccaatgagaacaaagacacaaggtaccagaatctctgggacacatttaaagcagagtgtagagggaaatttatagcactaaatgcccacaagagaaagcaggaaagatctaaaatcgacaccctaacatcacaattaaaagaactagagaagcaagagcaaacacattcaaaagctagcagaaggcaagaaataactaagatcagggcagaactgaaagagattacagacacaaagaaacccttcaaaaaaatcaatgaatccaagaactggttttttgaaacgatcaacaaaattgatagagcactagcaagattaataaagaagaaaagagagaagaatcaaacagacacaataaaaaatgataaagggaatatcaccaccgatcccacggaaatacaaactatcatcagagaatactataaacacttctatgcataa

SEQ ID NO: 17326 - DNA, 3779 bp, Homo sapiens
  SIMILAR (1262)..(3592): 891254mologous to Homo sapiens putative p150,accession number U93572,Smith-Waterman Score=3562.
atggagctgaaaaccaaggctcgagaactacgtgaagaatgcagaagcctcaggagccgacgcaatcaactggaagaaagggtatcagcaatggaagatgaaatgaatgaaatgaagcgagaagggaagtttagagaaaaaagaataaaaagaaatgagcaaagcctccaagaaatatgggactatgtgaaaagaccaaatctacgtctgattggtgtacctgaaagtgatgcggagaatggaaccaagttggaaaacactctgcaggatattatccaggaggacttccccaatctagcaaggcaggccaacgttcagattcaggaaatacagagaacgccacaaagatactcctcgagaagagcaactccaagacacataattgtcagattcaccaaagttgaaatgaagcaaaaaatgttaagggcagccagagagaaagactttaaaccaacaaagatcaaaagagacaaagaaggccattacataatggtaaagggatcaattcaacaagaggagctaactatcctaaatatatatgcacccaatacaggagcacccagattcataaagcaagtcctgagtgacctacaaagagacttagactcccacacattaataatgggagactttaacaccccactgtcaacattagacagatcaacaagacagaaagtcaacaaggatacccaggaattgaactcagctctgcaccaagcagacctaatagacatctacagaactctccaccccaaatcaacagaatatacatttttttcagcaccacaccacacctattccaaaattgaccacatagttggaagtaaagctctcctcagcaaatgtaaaagaacacaaattataacaaactatctctcagaccacagtgcaatcaaactagaactcaggattaagaatctcactcaaagccgctcaactacatggaaactgaacaacaacatgctcctgaatgactactgggtacataacaaaatgaaggcagaaataaagatgttctttgaaaccaaaagagaacaaaggacacaacataccagaatctctgggacgcattcaaagcagtgtgtagagggaaatttatagcactaaatgcgcacaagagaaagcaggaaagatctaaaattgacaccctaacatcacaattaaaagaactagaaaagcaagagcaaacaaacacattcaaaagctagcagaaggcaagaaataactaaaatcagagcagaactgaaggaaatagagacacaaaaaacccttcaaaaaaattaatgaatccaggagctggttttttgaaaggatcaacaaaattgatagaccactagcaagactaataaagaagaaaagagagaagaatcaaatagacacaataaaaaatgataaaggggatatcaccaccgatcccacagaaatacaaactaccatcagagaatactataaacacctctacgcaaataaactagaaaatctagaagaaatggataaattcctcgacacatacaccctcccaagactaaaccaggaagaagttgaatctctgaatagaccaataacagactctgaaattgaggcaataattaatagcttaccaaccaaaaaaagtccaggactagacggattcacagccgaattgtaccagaggtacaagggaggagctggtaccattccttctgaaactattccaatcaatagaaaaagagagaatcctccctaactcatttcatgaggccagcatcatcctgataccaaagcctggcagagacacagcaaaaaaaagagaattttagaccaatatccctgatgaacattgatgcaaaaaatcctcaataaaatactggcaaaccgaatccagcagcacatcaaaaagcttatccaccatgatcaagtgggcttcatccctgggatgcaaggctggttcaatatacgcaaatcaataaatgtaatccagcatataaccagaaccaaagacaaaaaccacatgattatctcaatagatgcagaaaaggcctttgacaaaattcaacaacccttcatgctaaaaactctcaataaattaggtattgatgggacgtatctcaaaatcataagagctatctatgacaaacccacagccaatagcatactgaatgggcaaaaactggaagcattccctttgaaaactggcacaagacagggatgccctctctcaccactcctattcaacatagtgttggaagttctggccagggcaatgaggcaggagaaggaaataaagggtattcagctaggaaaagaggaagtcaaattgtccctgtttgcagatgacatgattgtatatctagaaaaccccattgtctcagcccaaaatctccttaagctgataagcaacttcagcaaagtctcaggatacaaaatcaatgtacaaaaatcacaagcattcttatacaccaacaacagacaaacagagagccaaatcatgagtgaactcccattcacaattgcttcaaagagaataaaatacctaagaatccaacttacaagggatgtgaaagacctcttcaaggagaactacaaaccactggtcaaggaaataaaagaggatacaaacaaatggaagaacattccatgctcatgggtaggaagaatcagtattgtgaaaatggccataccgcccaaggtaatttacagattcaatgccatccccatcaagctaccaatgactttctttacagaattggaaaaaactactttaaagttcatatggaaccaaaaaagagcccgcatcgccaagtcaatcctaagccaaaagaacaaagctggaggcatcacgctacctgacttcaaactatactataaggctacagtaaccaaaacagcatggtactggtaccaaaacagagatatagatcaatggaacagaacagagccctcagaaataacgccgcatatctacaactatctgatctttgacaaacctgagaaaaacaagcaatggggaaaggattccctatttaataaatggtgctgggaaaactggctagccatatgtagaaagctgaaactggatcccttccttacaccttatacaaaaatcaattcaagatggattaaagacttaaacattagacctaaaaccacaaaaaccctagaagaaaacctaggcattaccattcaggacataggcatgggcaaggactttatgtccaaaacaccaaaagcaatggcaacaaaagccaaaattgacaaatgggatctaattaaactaaagagcttctgcacagcaaaagaaactaccatcagagtgaacaggcaacctacaaaatgggagaaaattttcgcaacctactcatctgataaagggctaatatccagaatctacaatgaactcaaacaaatttacaagaaaaaaacaaacaaccccatcaaaaagtgggcgaaggacatgaacagacacttctcaaaagaagacatttatgcagccaaaaaacacatgaaaaaatgctcatcatcactggccatcagagaaatgcaaatgaaaaccactatgagatatcatctcacaccagttagaatggcaatcattaaaaagtcaggaaacaacagtcaggtggaacattcaggaggccctgagctaaacattgccagcagcaaggtcacaactgccagaacagccaaggccactcctgctcagcacagagaaggcagccaagcagatttcttggagcagctgccaagagagtctgcccagtgtgatggagaaagagccccacgtgtggagcacctgccag

SEQ ID NO: 17327 - DNA, 738 bp, Homo sapiens
  SIMILAR (55)..(525): 891254mologous to Homo sapiens alpha-tectorin,accession number AF055136,Smith-Waterman Score=767.
atgagagggagggatgagcttatagaacacacacagctggacgtggtggttttgcaatggggcatgagaaatgagggaataatcaagagtgagccccaggcatctagtacgggacaattccttcggcgaggggaggtgttttgggatgacttgaactgcaccgtcaagtgccgctgtctggatttcaacaatgagatctactgccaggaggcttcctgtagcccctacgaggtgtgcgaacccaaaggcaaattcttctactgcagcgctgtggagaccagcacatgcgtggtgtttggggagccacactaccacacttttgacggcttcctcttccacttccaaggctcctgtgcctacttgctggcccgacagtgtttgcagacttccagcctccctttcttcagtgtggaggccaagaatgaacaccgcagaggttcagccgtctcctgggtgaaggagctctcagtggaggtgaatggctacaagattctcatccccaaaggaagctatggaagagtcaagagctgctgcttcattttcagagaaacctccaaatggattgatgtctccagaggtaccacctgtgcaggcacctggattggctttggtgacttccttagtgaggcttgggtgggaaagtcccatgaaagctctgcccagacacccctcgaatacagtccccaactcccacctagaataacagagaagaacatgggcatctgctggccagtttag

SEQ ID NO: 17328 - DNA, 2544 bp, Homo sapiens
  SIMILAR (1768)..(2223): 921254mologous to Homo sapiens alpha-tectorin,accession number AF055136,Smith-Waterman Score=768.
atgcagatatttggggaagacaagtgggaaacatctatggcttcagggtctcacaaggccaaaatcaatgtgtctgcagggctgttttctatatcagaggctctggaggagaatctctttgcaggtacagtcagaatggtggcagaattctcttctttcttatacttttcatgtgtgccatcttcaaaccagcaatggtatcatgaactgatcactaaatatgggaagttggagcctttggcagaagtggacctaagaccccagagcagtgcaaaagtagaagtccactttaacgatcaggtggaagaaatgagcattcgtctggaccaaacagtggcagaactaaagaaacagttaaaaactctagtacaattacccacaagcaacatgcttctctactattttgaccatgaagcaccctttggcccagaggaaatgaaatttttggaagtaggaaaaaagtatggcaacagtgtcatgaagattgaaactgtcagtaaaattgtgtcaaatgttcctcagttggagtttctaaacctgagttccaaccctctgaatttgtcggttttagaaagaacatgtgctgggtccttctctggggttcgcaaacttgtcctcaacaacagcaaagcttcttgggagacggtccacatgatactacaggagttaccagatttggaggagctcttcctgtgccttaatgactatgaaacagtgtcttgtccttctatttgctgtcattctcttaagctactacatataacagacaataacctccaagactggactgaaatacgaaagttaggagttatgtttccttcactggataccctcgtcctggccaacaatcatttgaatgctattgaggagcctgatgattcattggccaggttgtttcctaatcttcgatccatcagcctccacaagtcaggtttgcagtcctgggaagacattgataaactaaattcatttcccaaactggaagaagtgagattgttaggaattcctcttctgcagccatataccaccgaggagcgaaggaaattggtaatagccagattgccatcagtttccaaacttaatggcagcgttgttactgatggtgaacgagaagattctgagagattttttattcgttactatgtggatgttccacaggaagaagtgccattcagactgggagatgcgccacttagacccccgtacaacagagatgtgagaagcacagttggccaacagcctccagccctcagtgccttcaggctcagccccagtgctgaaacccaggacacactcttcatggggcagccctccgccaatgaccgggcaaggtgctccagaaggtggaagataaatcctacaaagattcagggatgctatttcagtaaagttgtaaggaatccagtggccaggaacatgctgggacaactcctccaaaggaaaaggcaaattgctgcatcttgtagcctgtctacaaagaaattctttgttctttgtcagcttcttcgggttctgcaggctacattttccaaactcagagaaattgcctcagtactgctcactctttgggtccacactgcttttatgagctgtaacactcaccgcgaaggtctgcagcttcactccggagccagcgagaccactaacccaccagaaggaagaaactccggacgcatccgaacatcagaaggaagaaactccagacgcgccaccttaagagctgtagcattcaccgcgagggtccgcggcttcattcttgaagtcagacaattccttcggcgaggggaggtgttttgggatgacttgaactgcaccgtcaagtgccgctgtctggatttcaacaatgagatctactgccaggaggcttcctgtagcccctacgaggtgtgcgaacccaaaggcaaattcttctactgcagcgctgtggagaccagcacatgcgtggtgtttggggagccacactaccacacttttgacggcttcctcttccacttccaaggctcctgtgcctacttgctggcccgacagtgtttgcagacttccagcctccctttcttcagtgtggaggccaagaatgaacaccgcagaggttcagccgtctcctgggtgaaggagctctcagtggaggtgaatggctacaagattctcatccccaaaggaagctatggaagagtcaaggttgaggacagggtcagaggaatgaagcaaggaattacatttggggacaagagttctctgggatctcctgctctaagcactgtgggacacaagcacaatgactctatagggagagtgaaagggggtgcaatgatcacttatgccagaaaaaaaaaggtatcaactggaacattactgacacccacagtcacccaggtgtcaggtcagcctgagtgcgacaagaacagaggcagggaaactggcgtcctgagggttgtgatgttcttctctggaaaagaagttcctgtttggtctttacaacaaccctacgaggtcgacactcttatctccattttcttactagtgaggaagttgatgcacagatag

SEQ ID NO: 17329 - DNA, 1464 bp, Homo sapiens
  SIMILAR (774)..(803): 901254mologous to Homo sapiens alpha-tectorin,accession number AF055136,Smith-Waterman Score=44.
atggctaatccaaggctagagcagagaaagtacaagatgagcccggagtacatcgtgcctcgtggaaagcaacgaatgatgaagcaaatgtcaacagaaaccattgctggaggggactcccactggccgtatatggaacaatttgagcataaaacaaattatgataacagatacaatcggtatcatgaactgatcactaaatatgggaagttggagcctttggcagaagtggacctaagaccccagagcagtgcaaaagtagaagtccactttaacgatcaggtggaagaaatgagcattcgtctggaccaaacagtggcagaactaaagaaacagttaaaaactctagtacaattacccacaagcaacatgcttctctactattttgaccatgaagcaccctttggcccagaggaaatgaaccagattctcaaagacattctaattcatgtatgccgccatcttgtgtatctggttatgcccagacggcatttataccagcagcagtcttgcctcgagaaggatggagcatcaaattgtgtgctggtgctttgcacctgcagcaccttcgtgggcacagtctctttagactcctgtcaggcccagcatgtctctggctgggttatgtggcagcttagcccagattataggcctggcattcaggagagaagggttcttacgtggattaaatggtataatggaagtaaagcatttagcccaatgcctggcacagaggggaaatgctcagtaaatgttggctctaatgtcattattccccaggacaattccttcggcgaggggagcgctgtggagaccagcacatgcgtggtgtttggggagccacactaccacacttttgacggcttcctcttccacttccaaggctcctgtgcctacttgctggcccgacagtgtttgcagacttccagcctccctttcttcagtgtggaggccaagaatgaacaccgcagaggttcagccgtctcctgggtgaaggagctctcagtggaggtgaatggctacaagattctcatccccaaaggaagctatggaagagtcaaggtcaataacaacggagttgtttccttcaatgtgctagtgagccagttcacgccagaatcctttcccctgacagatgggagagccttcgtcgccccattttgggcagatgtgcacaatggaattcgaggcgagatctattacagagagaccatggagcctgccatcttgaaaagagccaccaaggacatcaggaagtacttcaaagacatggcaaccttctctgccacttgggttttcattgtgacatgggaggaagtcacgttttatggaggcagcagcaccacacctgtaataattcaaattttctgctttccacttcataacctgacatctaattcttgtccatcttcgctaccacgaaggagtctaattattagagctaaggagtgtcagttcccttga

SEQ ID NO: 17330 - DNA, 429 bp, Homo sapiens
  SIMILAR (277)..(429): 1001254mologous to Mus musculus ribosomal protein,accession number M76763,Smith-Waterman Score=265.
  misc_feature (1)...(429): n = a,t,c or g
cgccgcttgtgctgcagccatgtctctagtgatccctgaaaagttccagcatattttgcgagtactcaacaccaacatcgatgggcggcggaaaatagcctttgccatcactgccnnnnnnnnnnnnnnnnnnnnnnnnnnnnnnnnnnnnnnnnnnnnnnnnnnnnnnnnnnnnnnnnnnnnnnnnnnnnnnnnnnnnnnnnnnnnnnnnnnnnnnnnnnnnnnnnnnnnnnnnnnnnnnnnngttaaccttctgtcgaacggtttatatctggaaagggtgtgggccgaagatatgctcatgtggtgttgaggaaagcagacattgacctcaccaagagggcgggagaactcactgaggatgaggtggaacgtgtgatcaccattatgcagaatccacgccagtacaagatcccagactggttcttg

SEQ ID NO: 17331 - DNA, 618 bp, Homo sapiens; identical to SEQ ID NO: 11551
  SIMILAR (280)..(615): 851254mologous to Mus musculus ribosomal protein,accession number M76763,Smith-Waterman Score=478.

SEQ ID NO: 17332 - DNA, 643 bp, Homo sapiens
  SIMILAR (51)..(356): 681254mologous to Mus musculus ribosomal protein,accession number M76763,Smith-Waterman Score=322.
attgcaccgcctgcaggaattcggcacgagccgccgcttgtgctgcagccatgtctctagtgatccctgaaaagttccagcatattttgcgagtactcaacaccaacatcgattgggcggcggaaaatagcctttcgccatcactgccattaagggtgtgggccgaagatatgctcatgtggtgttgaggaaagcagacattgacctcaccagagagggcgggagaactcactgaggatgaggtggaacgtgtgatcaccattatgcagaatccacgccagtacaagatcccagactggttcttgaacagacagaaggatgtaaaggatggaaaatacagccaggtcctagccaattggtctggacaacaatgctccgtgaagacctgggagccgactgaagaagattcgggcccatagagggctggcgtcacttactggggcccttcgtgtccgaaagccagcacaaccaagaaccactgggccgcckgtgggccggcaccgtcgggtgtgtccaaggaggaaataaggtctgtagggcttgtcttgttaataaataggtttatataccaaaaaaaaaaaaaaaaaaaaaaaaagtcgacgcggccgcgaatttagtagtagtagtagtagtaggcggccgc

SEQ ID NO: 17333 - DNA, 406 bp, Homo sapiens
  SIMILAR (269)..(183): 311254mologous to Caenorhabditis elegans contains similarity to multiple EGF-like domains,accession number U80815,Smith-Waterman Score=37.
tttttttttttttttttacagaaagtgggtatttacttacacatcaaaacttttcaacaacatcgtttgtgggtgacatcagctgctttcttgtctctaagcagcatggctgcagttgggacatcctcctccctcagtgagaatagtggtcctggccacggcgggaagcagacattctaaggacctggggcacagacattccagaaggtaggcaccatttcagtgcccaggccttctctgtagttgctgggaggggtacggctgctgccctcctgcacgggagccatgtgcctcaggggcgtctcaagaatcggttctcgcagtgggggccctcccagccatcccgacacttgcagcggtagctcccattctgcaggacgcagctgccctcattcatgcacgggct

SEQ ID NO: 17334 - DNA, 3485 bp, Homo sapiens
  SIMILAR (1302)..(1811): 351254mologous to Gallus gallus collagen type XII alpha 1 chain,accession number X61024,Smith-Waterman Score=292.
gagtaaagccatcattaggaatttggactccagaagctatttgtctcatgaaaaaacttgtacagaacaaaataatcacagtgaaagtggtggacaagttggaaaacagttccctggtggagcttattgataaatccgagacgcctcatgtcagtgttagcaaagttctcctagatgcaggctttgctgtgggagaacagagtatggtgacagataaacccagtgacgtgaaagaaaccagtgttcccttgggtgtggaaggaaaagtaaatccattggagtggacatgggttgaacttggtgttgaccaaacagtagatgttgtggtctgtgtgatatatagtcctggagaattttattgccatgtgcttaaagaggatgctttaaagaaactcaatgatttgaacaagtcattagcagaacactgccagcagaagttacctaatggtttcaaggcagagataggacaaccttgttgtgctttttttgcagatatacagtctagaaacaaacattggtctgaagaagccataacaagattccagatgtgtgttgctgggataaaattgcaagccagagtggttgaagtcactgaaaatgggataggagttgaactcaccgatctctccacttgttatcccagaataattagtgatgttctgattgatgaacatctggttttaaaatctgcttcaccacataaagacttaccaaatgacagacttgttaataaacatgagcttcaagttcatgtacagggacttcaagctacctcttcagctgagcaatggaagacgatagaattgccagtggataaaactatacaagcaaatgtattagaaatcataagcccaaacttgttttatgctctaccaaaagggatgccagaaaatcaggaaaagctgtgcatgttgacagctgaattattagaatactgcaatgctccgaaaagtcgaccaccctatagaccaagaattggagacgcatgctgtgccaaatacacaagtgatgatttttggtatcgtgcagttgttctggggacatcagacactgatgtggaagtgctctatgcagactatggaaacattgaaaccctgcctctttgcagagtgcaaccaatcacctctagccacctggcgcttcctttccaaattattagatgttcacttgaagcccctggcttgcagatcactcccaactactttgtaggaagccagagggccctggtaaatctcatcttgtgccggatggagtgtgagagctgctggcaggaagtccatgtaagcaaagaaaccatcgggaagatttcagctgccagcaaaatgatgtggtgctcggctgcagtggacatcatgtttctgttagatgggtctaacagcgtcgggaaagggagctttgaaaggtccaagcactttgccatcacagtctgtgacggtctggacatcagccccgagagggtcagagtgggagcattccagttcagttccactcctcatctggaattccccttggattcattttcaacccaacaggaagtgaaggcaagaatcaagaggatggttttcaaaggagggcgcacggagacggaacttgctctgaaataccttctgcacagagggttgcctggaggcagaaatgcttctgtgccccagatcctcatcatcgtcactgatgggaagtcccagggggatgtggcactgccatccaagcagctgaaggaaaggggtgtcactgtgtttgctgtgggggtcaggtttcccaggtgggaggagctgcatgcactggccagcgagcctagagggcagcacgtgctgttggctgagcaggtggaggatgccaccaacggcctcttcagcaccctcagcagctcggccatctgctccagcgccacgccagctgggagccccgagcttgtcttcatggagcggttaatgggcatctctctgataggcccctgtgactcgcagccctgccagaatggaggcacatgtgttccagaaggactggacggctaccagtgcctctgcccgctggcctttggaggggaggctaactgtgccctgaagctgagcctggaatgcagggtcgacctcctcttcctgctggacagctctgcgggcaccactctggacggcttcctgcgggccaaagtcttcgtgaagcggtttgtgcgggccgtgctgagcgaggactctcgggcccgagtgggtgtggccacatacagcagggagctgctggtggcggtgcctgtgggggagtaccaggatgtgcctgacctggtctggagcctcgatggcattcccttccgtggtggccccaccctgacgggcagtgccttgcggcaggcggcagagcgtggcttcgggagcgccaccaggacaggccaggaccggccacgtagagtggtggttttgctcactgagtcacactccgaggatgaggttgcgggcccagcgcgtcacgcaagggcgcgagagctgctcctgctgggtgtaggcagtgaggccgtgcgggcagagctggaggagatcacaggcagcccaaagcatgtgatggtctactcggatcctcaggatctgttcaaccaaatccctgagctgcaggggaagctgtgcagccggcagcggccagggtgccggacacaagccctggacctcgtcttcatgttggacacctctgcctcagtagggcccgagaattttgctcagatgcagagctttgtgagaagctgtgccctccagtttgaggtgaaccctgacgtgacacaggtcggcctggtggtgtatggcagccaggtgcagactgccttcgggctggacaccaaacccacccgggctgcgatgctgcgggccattagccaggccccctacctaggtggggtgggctcagccggcaccgccctgctgcacatctatgacaaagtgatgaccgtccagaggggtgcccggcctggtgtccccaaagctgtggtggtgctcacaggcgggagaggcgcagaggatgcagccgttcctgcccagaagctgaggaacaatggcatctctgtcttggtcgtgggcgtggggcctgtcctaagtgagggtctgcggaggcttgcaggtccccgggattccctgatccacgtggcagcttacgccgacctgcggtaccaccaggacgtgctcattgagtggctgtgtggagaagccaagcagccagtcaacctctgcaaacccagcccgtgcatgaatgagggcagctgcgtcctgcagaatgggagctaccgctgcaagtgtcgggatggctgggagggcccccactgcgagaaccgtgagtggagctcttgctctgtatgtgtgagccagggatggattcttgagacgcccctgaggcacatggctcccgtgcaggagggcagcagccgtacccctcccagcaactacagagaaggcctgggcactgaaatggtgcctaccttctggaatgtctgtgccccaggtccttag

SEQ ID NO: 17335 - DNA, 390 bp, Homo sapiens
  SIMILAR (90)..(389): 991254mologous to Homo sapiens lipocortin II,accession number D00017,Smith-Waterman Score=506.
gacgctctcagctctcggcgcacggcccagcttccttcaaaatgtctactgttcacgaaatcctgtgcaagctcagcttggagggtgatgggctgggaaccgaccaggactctctcattgagatcatctgctccagaaccaaccaggagctgcaggaaattaacagagtctacaaggaaatgtacaagactgatctggagaaggacattatttcggacacatctggtgacttccgcaagctgatggttgccctggcaaagggtagaagagcagaggatggctctgtcattgattatgaactgattgaccaagatgctcgggatctctatgacgctggagtgaagaggaaaggaactgatgttcccaagtggatcagcatcatgaccgagc

SEQ ID NO: 17336 - DNA, 425 bp, Homo sapiens
  SIMILAR (60)..(206): 621254mologous to Xenopus laevis annexin II,accession number M60768,Smith-Waterman Score=134.
ccgggtcgacccacgcgtccggctctcagctctcggcgcatggcccatttttcttcaaaatgtctactgttcacgaaatcctgtgcaagctcagcttggagggtgatcactctacacccccaagtgcatatgggtctgtcaaagcctatactaactttgatgctgagcgggatgctttgaacattgaaacagccacctccagaaagtatttgataggtacaagagttacagcccttatgacatgttggaaagcatcaggaaagaggttaaaggagacctggaaaatgctttcctgaacctggttcagtgcattcagaacaagcccctgtattttgctgatcggctgtatgactccatgaagggcaaggggacgcgagataaggtcctgatcagaatcatggtctcccgcagtgaagtggacatgg

SEQ ID NO: 17337 - DNA, 333 bp, Homo sapiens
  SIMILAR (332)..(6): 831254mologous to Homo sapiens lipocortin II,accession number D00017,Smith-Waterman Score=447.
gtgtattgctggggataatagtacagggacttgccgcactttctcttgaattcagacctaattttcaacatgtccacttcactgcgggagaccatgattctgatcaggaccttatctcgcgtccccttgcccttcatggagtcatacagccgatcagcaaaatacaggggctcgttctgaatgcactgaaccaggttcaggaaagcatattccaggtctcctttaacctctttcctgatgctttccaacatgtcataagggcctgaactctttgacctatcacaaactttctggaggggggcacgctccggtcggcaatatgctgaccacttg

SEQ ID NO: 17338 - DNA, 1137 bp, Homo sapiens
  SIMILAR (745)..(1077): 981254mologous to Escherichia coli proton-glutamate,accession number M84805,Smith-Waterman Score=547.
atggtgagcaccatttctggacgctcaggccgtgtcgggcttcagtcatctccaccacacagagtatccaccagctctcatggtgctaaacctaggcccaatgttacaataacaattacaattgtcgcaattaaccctaacctcaagtaccccctcgcaagaattgaaattgagattgggggcgcgtcgcgaattcagctcaggatggccgaaaaaatagaacgacaccgcgactggctggtcgtcaatttgctctctccggcgggtgatatcttcatccatctgattaaaatgattgttgtgccgattgtgatctccacgctggtggtgggtatcgcgggtgttggtgatgccaaacagctcgggcgtattggcgcgaaaaccattatctacttcgagttgaacgacaagaagctgggtggaaagaacacggacttctggttgccagtagttatctgtctcaggactgcccggatcctcgaggcagaagatgcatttgcgcgaagttgtatgatttcgggcttccctggcaacgaaaacatccacttcgctcaaaaaaacaaaaagataccggcgggatcggggaaagtatttgataggtacaagagttacagcccttatgacatgttggaaagcatcaggaaagaggttaaaggagacctggaaaatgctttcctgaacctggtatgtcacgttctcgcgtttctgaacggggaacggcgctccattgaggaagtcattcatatgaaaaatataaaattcagcctggcctggcagattctgtttgctatggtgctgggcattctcctgggaagctacctgcactaccatagcgacacgcgcgactggctggtcgtcaatttgctctctccggcgggtgatatcttcatccatctgattaaaatgattgttgtgccgattgtgatctccacgctggtggtgggtatcgcgggtcttggtgatgccaaacagctcgggcgtattggcgcgaaaaccattatctacttcgaggtgatcaccaccgtcgccatcattttggggatcactctggcgaacgtcttccagcccggtgccgggggtagaagagcagaggatggctctgtcattgattatgaactgattgaccaagatgctcgg

SEQ ID NO: 17339 - DNA, 1511 bp, Homo sapiens
  SIMILAR (459)..(932): 351254mologous to Homo sapiens lipocortin II,accession number D00017,Smith-Waterman Score=125.
tctcatctctcggcgcacggcccagcttccttcaaaatgtctactgttcacgaaatcctgtgcaagctcaacttggagggtgatcactctacacccccaagtgcatatggctctgtcaaagcctatactaactttgatgctgagcgggatgctttgaacattgaaacagccatcaagaccaaaggtgtggatgagggcaccattgtcaacattttgaccaaccgcagcaatgcacagagacaggatattgccttcgcctaccagagaaggaccaaaaaggaacttgcatcagcactgaagtcagccttatctggccacctggagacggtgattttgggcctattgaagacacctgctcagtatgacgcttctgagctaaaagcttccatgaaggggctgggaaccgacgaggactctctcattgagatcatctgctccagaaccaaccaggagctgcgaggaaattaaccagagtctacaagggaaatgtacattgactgtatctggagaaggggacattatttcggacacgatctggtggacgttccgcaagctgatggttagccctggcaaagggtagaagagcagaggatggctctgtcattgattatgaacctgattgaccaagatgctcgggatctctatgacgctggagtgaagaggaaaggaactgatgttcccaagtggatccagcatcatgacccgagcggaagcgtgccccacctccaagaaaagtatttgataggtacaaagagttacagccctttatgacatgtttggaaaagcatcagggaaagaggttaaagggagaccttggaaaattgctttcctggaacctgggtttcagttgcatttcaggaacaagccccctgtaatttttgctgattcgggctgtatgtactcccatggaaggggcaaggggaccccgagattaaggtccctgattcagaatccatgggtcttcccgcagttgaagttggacatgtttggaaatttaggtcttgaatttcaaggagaaagtacgggcaagtcccctgttactatttattatcccagccaaggacattaaggggcgattacccagaaagccgctgctgtaacctgtgtggttggagattgactgaagccccgacaccggccttgagcgtccccgaaaatggtggctcacccatgctttccagcttaacaggttttagaaaaccagcttgcggaattaacagtccccgtggccatccctgttgaggggtgacgttagcattacccccaacctcatttttagttgcctaagcattggctggcccttctgtctagtctcttctgttagccaaagaaatgaacattccaaggagttggaagtgaagtctatgatgtgaaacactttgcctcctgtgtactgtgtcataaacagatgaataaactgaatttgtactttagaaacacgtactttgtggccctgctttcaactgaattgtttgaaaattaaacgtgcttggggttcagctggtgaggct

SEQ ID NO: 17340 - DNA, 377 bp, Homo sapiens
  SIMILAR (128)..(376): 651254mologous to multiple sclerosis associated retrovirus polyprotein,accession number AF009668,Smith-Waterman Score=266.
ggaccaaggggaacagtccaaaaaggaaaagcaagatcagagaaagaccgtagccttagtcatggccctcagacaaataaaccttggtggttcagagaggacagaaaatggagcaggtcaatcagccgggtttagggatagccctcaactgtttggtcaggcactggcccaagatctaggccacttctcaagtccaggcactcttgtccttcaatatgtggatgatttacttttggctaccagtttggaagcctcatgccagcaggctactctagatctcttgaactttctagctaatcaagggtacaaggtgtctaggtcgaaggcccagctttgcctacagcaggtcaaatatctaggcctaatcttagccagag

SEQ ID NO: 17341 - DNA, 211 bp, Homo sapiens
  SIMILAR (7)..(162): 681254mologous to Human endogenous retrovirus W polyprotein,accession number AB021921,Smith-Waterman Score=177.
gatggggaaccaatcgagcatgactgccaacaaattatagtccagacttctgctgctcgagaggatcttttagaagtccccttagctaatcctgaccttaacctatataccgatggaagttcatttgtggagaatggggaagtagctaaagcggtcatcgcccaattcccgacaacagttggggtgtcctgtttagatgggagattgagag

SEQ ID NO: 17342 - DNA, 735 bp, Homo sapiens
  SIMILAR (22)..(471): 721254mologous to multiple sclerosis associated retrovirus polyprotein,accession number AF009668,Smith-Waterman Score=549.
atgcagcagtcccagcaacaaattctaggagtacaaaaactgaacagtcagtggagactagcgcaagattttagactcatcaatgaggcagtaattcctctatatccagttgtacccaacccctataccctgctctctcaaataccagaggaagcagaatcgttcactgttctggacctcaaggatgccttcttctgtattcccctgcactctgactcccagtttctctttgcctttgaggatcccacagaccacaactcccaacttacatggatggtcttgccccaggggtttagggatagccctcatctgtttggtcaggcacaggcccaagatctagttcacttctcaagtccaggcactctggttgttcagtatatggatgatttacttttggctaccagttcggaagcctcatgccagcaggctactctagatctcttaaactttctagctaatcaagggtgcaagagagtgggaatagctcttggagtccttactcagactcatgggacaaccccacaaccagtggcatacctaagtaaggaaactgatgtagcagcaaaaggtcccctgacagccatcttgctattactcgcctttgggccctgtatttttaacctccttgtcaaacttgtttcctccaggattgatgccatcaagttacaaatggtcttacaaatggaaccccaaatgagctcaactaacaacttctaccgaggacccctggactga

SEQ ID NO: 17343 - DNA, 3006 bp, Homo sapiens
  SIMILAR (1708)..(2541): 691254mologous to multiple sclerosis associated retrovirus polyprotein,accession number AF009668,Smith-Waterman Score=980.
atgcctggggctcaggacctgcagcccaccatgccggagcctccccacccccagtgggctcccacgtggcctgagcctcctcgacgggtgccgccccctgctccgcggcgcccagtcccattgactgcccaagggctgagtgtggatcaaagcagactggggaagttttcagatgatcctgataggtacatagatgtcctacagggtctagggcaaacctttgatctcacttggagagatgtcatgctactgttagatcaaaccctggcctttaatgaaaagaatgcagctttagctgcagcccgagagtttaaagatacttggtatcttagtcaagtgaatgatagaatgacagccgaagaaagggataaattcccttctggtcagcaagctgtccccagtatggatccccactgggaccttgactcagattatggggactggagtcataaatatctgttgacctgtgttcttgaaggactaaggagaattaggaaaaagcccatgaattattcaatgatgtccaccataactcaaggaaaggaagaaaatcctgccttccttgagcagctatgggaggccttaaggaaatatattcccctgtcacccaaatcactcgagggtcaattgattctaaaagataagtttattacccagtcagctgcagatatcaggggaaagctccaaaagcaatccctggtccctgaacaaaatttggaggcattactaaacctggcaacctcagtgttctataatagggaccaagaggaacaagcccaaaaggaaaagcaagatcagaaaaaggctgcagccttagtcttggcccccacacaagcaagccttggtggttcagagaggacagagggtggagcaggccaatcacccatgctaatctcctgtcctggacgactgtcctcaaggtccattaccatccgaggaatcctgggacagcctgtaaccaggcaatatcccttaaggcctgaagctcataaaggattacaggatattgttaaacatttaaaagctcaaggtttagcaaggaaatgcagcagtccctgcaacaccctaattctaggagtacaaaaaccgaatgttcagtggagactagtgcaagatcttagactcatcaatgaggtagtaattcctttatatccagttgtacccaactcctataccctcctctctcaaataccagaggaagcagaatggttcacagtgctggacctcaaggttgccttcttctgtattcccctgcactttgactcccagtttctctttgcctttgaggatcccacagaccacacatcccaacttacgtggacagtcttgccccaagggttcagggatagccctctcctgtttggtcaggcactggccaaagatctaggccacttctcaagtccaggccctctgttccttcagtatgtggatgatttgcttttggctaccagttcagaagcctcatgccagcaggctactctagatctcttgaactttctagctaatcaagggtacaaggcccagagggaccaaggccctcagcaaggaatgaatacagcctatactggcttatccttgcccgaagacattaaaacagttgtggggcttccttggaatcaccggcttttgctgactatggatcccctgatacaagagagcagagatagctcttggagtccttacccagactcgtgggaaaaccccacaccagtggcatacctaagtaaggaaactgatgtagtagcgaaaggctggcctcactgtttacgggtagttgcggcggtggctgtcttagtgtcagaggctatcaaaataataaaaggaaaggatctcactgtctggactactcatgatgtaaatggcatactaggtgccaaaggaagtttacggctatcagacaactgcctacttagataccaggtgctactccttgagggactggtgcttcaaaaatgtacatgcatggccctcaaccctgccacttttctcccaaaagatggggatccaatcgagcatggctgccaacaaattatagtccagacttatgctgcccgagatgatctcttagaagtctccttagctaatcctgactttaacctatataccaatggaagttcatttgtggagaatgggatacgaagggccggttatgccatagttagtgatgtaaccatacttgaaagtaagcctcttcccccagggaccagtgcccagttaccagaactagtggcatttacccgagctttagaactgggaaagggaaaaagaataaatgtgtatacagatagcaagtatgcttatctaatcctacatgcccatgctgcaatatggaaagaaagggaattcctaacctctgggggaacccctattaaataccacaaggaaattatagagttattgcacacagtgcaaaaacccaaggaggtgacagtcttacattgccaaagccaccagaaaggtgaaggagaaaaggcaggaggaaactgtcaggcagaagctgaggccaaaattgctgccaggcagaacctcccactagaaatacctacggaaggaccctcgagtgaccgcagcagcagcctcagcgaactcgcgtggacagaggcgtccctgatcaccaaacaggggccacacaccgtacatatagacggaagaacaagcgcggtggccccaccggtatgtcgggacagacgcccccagatacgccaaatcaacacatcggatcgtaacaacgggagaaaccaagcaggggaaaggttccccagaaaaaaatggctgcggggaaactggctaccaatatgtagaacgctgaaacggtatcctgtcgtcacacgttatacaaaaatcaatgcacgagggattaaagacttaaatgttcgacctaaaaccataaaaaccctagaagaaaacctaggcattactattcaggacataggcatgggcaaggacttcatgtctaaaacaccaaaagcaatggcaacaaaagccaaaattgacaaatgggactaa

SEQ ID NO: 17344 - DNA, 627 bp, Homo sapiens
  SIMILAR (325)..(621): 651254mologous to multiple sclerosis associated retrovirus polyprotein,accession number AF009668,Smith-Waterman Score=324.
atgaatacagcctatactggcttatcctcaccccaagacattaaaacagttgtgggggttccttggaatcaccgcttttgcccagtatggatccccagatgcagcaagatagccaagtccctctatactctaatcaaggagacccagagagcaaatactcatctagtagaatgggaaccagaggcagaaacagccttcaaaaccttaaagcaggccctagtacaagctccaactttaagccttcccacaggagaaaacttctctttatatgtcacagaaagagcagggatagctcttggagtccttactcagactcgtgggacaaccccacaacctgtgacatacctaaaggatggggaaccaatgaaatgtgactgccaacaaattatagtccagacttatgccacccaagatgatctcttagaagtccccttagctaatcctgaccttaacctatatactgatggaagttcatttgtagagaatgggatacgaagggcaggttatgccatagttagtgatgtaaccatacttgaaagtaagcctcttcccccagggaccagtgcccagttagcagaactagtggcacttacccgagccttagaactgggaaagggaaaagaataa

SEQ ID NO: 17345 - DNA, 2631 bp, Homo sapiens; identical to SEQ ID NO: 13622
  SIMILAR (694)..(1590): 751254mologous to multiple sclerosis associated retrovirus polyprotein,accession number AF009668,Smith-Waterman Score=1186.

SEQ ID NO: 17346 - DNA, 568 bp, Homo sapiens
  SIMILAR (22)..(471): 721254mologous to multiple sclerosis associated retrovirus polyprotein,accession number AF009668,Smith-Waterman Score=549.
atgcagcagtcccagcaacaaattctaggagtacaaaaactgaacagtcagtggagactagcgcaagattttagactcatcaatgaggcagtaattcctctatatccagttgtacccaacccctataccctgctctctcaaataccagaggaagcagaatcgttcactgttctggacctcaaggatgccttcttctgtattcccctgcactctgactcccagtttctctttgcctttgaggatcccacagaccacaactcccaacttacatggatggtcttgccccaggggtttagggatagccctcatctgtttggtcaggcacaggcccaagatctagttcacttctcaagtccaggcactctggttgttcagtatatggatgatttacttttggctaccagttcggaagcctcatgccagcaggctactctagatctcttaaactttctagctaatcaagggtgcaagagagtgggaatagctcttggagtccttactcagactcatgggacaaccccacaaccagtggcatacctaagtaaggaaactgatgtagcagcaaaag

SEQ ID NO: 17347 - DNA, 852 bp, Homo sapiens; identical to SEQ ID NO: 5302
  SIMILAR (361)..(810): 721254mologous to multiple sclerosis associated retrovirus polyprotein,accession number AF009668,Smith-Waterman Score=563.

SEQ ID NO: 17348 - DNA, 369 bp, Homo sapiens
  SIMILAR (7)..(189): 601254mologous to Human endogenous retrovirus W polyprotein,accession number AB021921,Smith-Waterman Score=200.
gatggggatccaatcaagcatgactgccaacaaattatcgtccagacttatgccacacaagataatctcttagaagtccccttaggtaatcctgaccttagcctatatactgatggaagttcatttgtgaagaatgggatacaaagggcaggttatgccatagttagtgatgtaactatacttaaaaccctaatattactgagccaaaataacaaagaagaaacagatattttacctgagcctttttcttcaatacgtaagaaaaaggaccaggaataccctccagttattagtccctgtcttcagctggcagcaataaaaggagagttattagcctgcccggtaatgcaaaatcagccaagtaatcag

SEQ ID NO: 17349 - DNA, 1635 bp, Homo sapiens; identical to SEQ ID NO: 5320
  SIMILAR (910)..(1626): 741254mologous to multiple sclerosis associated retrovirus polyprotein,accession number AF009668,Smith-Waterman Score=939.

SEQ ID NO: 17350 - DNA, 1837 bp, Homo sapiens
  SIMILAR (694)..(1590): 751254mologous to multiple sclerosis associated retrovirus polyprotein,accession number AF009668,Smith-Waterman Score=1186.
atgacagctgaagaaagggacaaattccctaccagtcagcaagctgtccccagtatggatgcccactgggacctcgactcagatcatggggactggagtcgtaaacatctgttgacctgtgttctagaaggactaaggagaattaggaaaaagcccatgaattattcaatgatgtccaccataactcagggaaaggaagaaaatccttctgccttccttgagcagctacaggaggccttaagaaaatatactcctctgtcacccaactcactagtgggtcaattgatcctaaaagataagtttattacccaatcaaccacagatatcagaagaaagctccaaaatagggaccaagaggaacaggcccaaaaggaaaagcgagatcagagaaaggccatagccttagtcatggccctcagacaaaccttggtggttcaaagaggacagaaaatggagcaggccaatcacctggtggggcttgttaccagtgtggtttgcaaggacaccttaaaaaagattgtccaacgagaaacaagccgccccatcgtccatgtccactatacggaggcaatcactggaagtcacactacccagagggcaaagcttctctgggccagaagcccccaaccagatgatccaatgacaggactgaggatgactgcggcaagcacccgttcatgtcatcaccccctcactgagccctgggtatgtttaatcattgagggccaggaaattgacttcctcctggacactggcacgaccttctcagtgttaatcccctgtcttggacgactgtcctcaaggtccgttaccatccaaggaatcctgggacagcctgtaaccaggtatttctcccacctcctcagttgtaattgggagactttgctcttttcacatgcctttcttgttatgcctgaaagtcccacacccttattagggagggatatattagccaaagctggagctattatctccatgaagacagggaacaagttacccatttgttgtcccctacttgagggaatcaaccctgaagtctgggcattggaaggacaatttggaagggcaaaaaatgcccatccactccaaatcaggctaaaagaccccatcagttttccttatcaaaggcaatatcccttaaggcctgaagctcataaaggattacaggatattgttaaacatttaaaagctcaagactcagtaagaaaatgcagcagtccctgcaacaccccaattctaggagtacaaaaactgaacagtcagtggagactagtgcaagatcttagactcatcaatgaggcagtaattcctctatatccagttgtacgcaacccctatacccttctctctcaagtaccagaggaagcagaatggttcactgttctggacctcaaggatgccttcttctgtattcccctgcactctgactcccagtttctttttgcctttgaggatcccacagaccacacatcccaacttatgtggatggtcttgccccaaaggtttagagatagccctcatctgtttggtcaggcacaggcccaagatctaggccacttctcaagtccaggcactctggtccttcaatacagcgagatagccaagaccctctatactctaatcaaggagatggagagggcaaatactcacctagtagaatgggaaccagaggcagaaacagccttcgaaaccttaaagcaggccctagtacaagctccagctttaagccttcccacaggacaaaacttcgctttatatgtcatagagagagcagggatagctcttggagtccttactcagactcacaggacaaccccacaaccagtggcatacctaa

SEQ ID NO: 17351 - DNA, 958 bp, Homo sapiens
  SIMILAR (322)..(399): 531254mologous to porcine endogenous retrovirus viral polypeptide,accession number AJ133817,Smith-Waterman Score=50.
tgaaatctcatttgtggagaatgggatacaaagggcaggttatgccatagttagtgatgtaactgtacttgaaagtaagcctcttctcccagggaccagtgctcagttagcagaactagtggcacttacccgagcctttgaactgggaaagggaaaaagaataaatgcaaatacagatagcaagtatgcttatctaattctacatgctcttgctgcaatatggaaagaaagggagttcctaatctctgggggaacccccattaaataccacaaggaaattatggagttattgcatgcaatgcaaaaacccaaggaggtggcagtcttacactgccaaagccatcagaagggctaggaatggctactgctacaggaactggaatagccagtttatctacttcagtatcctactaccacacactctcaaaggatttctcaagacagtttgcaagaaataacaaaatctatccttactctgcaatcccaaatagactctttggcagtagtgaatatccaaaaccgccaaggcctagacctcctcactgctgagaaaggaagactctgcaccttcttaggagaagactgttgtttttacactaaccactcagggatagtacaagatgctgcccagcagttacaggaaaaggcttctgaaatcagacaatgcctttcaaactcttataccaacctctagagttgggcaacatggtttctcccctttctacgtcccatgacagccatcttgctatcattcgcctttgggccctgtatttttaaccctcttgtcaaatttgtttcctctaggatcaaggccatcaagctacagatgatcttacaaatggaaccccaaataagctcagctaacaacttctaccgaggacccctggaccgacccgctggccctttcactggcctaaagagttcccctctggaggacactacaactgtggtgttgtag

SEQ ID NO: 17352 - DNA, 2508 bp, Homo sapiens
  SIMILAR (1645)..(2496): 721254mologous to multiple sclerosis associated retrovirus polyprotein,accession number AF009668,Smith-Waterman Score=1053.
atgagtgaactcccattcacaattgcttcaaagagaataaaatacctaggaatccaacttacaagggacgtgaaggacctcttcaaggagaactacaaaccgctgctcaatgaagtaaaagaggacacaaacaaatggaagaacattccatgctcatgggtaggaagaatcagtatcgtgaaaatggccgtactgcccaaggtaatttatagattcaatgccatccccatcaagctaccaatgactttcttcacagaattcgaaaaaactactttaaagttcatatggaagcaaaaaagagcccacattgccaagtcaatcctaagccaaaagaacaaagctggaggcatcacgctacctgacttcaaactgtactacaaggctacagtaaccaaaacagcatgtgttcctgtgtgcacgggcatctgcagccaggcctgtaggggaccgctccccgaagatgttgggggtctttccaggaaagtggtgagttcagaagttgccctggtgcataggaagagaataccccaaggggctactgaaagggccttgagtagggcactgattggtccattttacagggtgctgactggtccattttacaaacctctagctagccacagagcactgactggtgcatttttacagagcgctgactggcgcattttacaatcctcttgtaagatatcaaagttctccaagtccccattcgacccagggagtccagctggcttcacctctcaatgtcccctctagacaggacaccccaactgctgttgggaatttggccgatgacagctctagctacttcctgctggatagggaaggaaacaagcaaagaaatctccaaaggaccacaaaaactcccaggctatcggttatgtccccttcaagctgtagggggaggggaatttggcccaacccagggtctagggcaaaccttcaatcctcacttggagaaatgtcatgctattgttagatcaaacccttgcctttaatgaaaagaatgtggctttagctgcagcccaagagtttgaagatacctggtatcttggtcaagtaaatgatagaatgacagccaaagaaagggacaaattccctaccagtcagcaagccatccccagtatggatccccaccgggtcctcgactcagatcatggggactggagtcgtgaacatctgttaacctgtgtcctagaaggactaagcagaattaggaaaaagcccatgaattattcaatgacatccaccataactcagggaaaggaagaaaatcctaccgccttcctcgagcggctacaggaggccttaagaaaatatacttccctgttacccgactcactcgagggtcaattgatcctaaaagataagtttattacccagtcagctgcagatatcaggataaagctccaaaagctagccctggcccctgaacaaaatttggacgcattattaaacctggcaacctccgtgttctacagtagggatcgagaagaacaggctgaaaaggaaaaacggctgtcctcaaggtccgttaccatccgaggctcagtgttaatctcctgtcccggacagctgtcctcaaggtccattaccatccgaggaatcctgggacagtctgtaaccaggagtacaaaaaccagtcagtggagactagtgcaagatcttagactcatcaatgaagcagtaattcctctatatccagttgtacccaagccctataccctgttctctcaaataccaaaggaagcagaatcgttcacagttctggacctcaaggatgccttcttctgtattcccctgcactctgactcccagtttctctttgcctttgaggatcctacagatcacacgtcccaacttacgtggacagtcttgccccaaaggttcagggatagccctcacctgtttggtcaggcactggtccaagatctaggccacttctcaagtccaggcactctggtccttcagtttgtggatgatttacttttggctgccagttcggaagcctcatgccagcaagctactcgagatctcttgaactttctagctaatcaagggtacaaggcatctaaatcaaaggcccagctctgcctacaacaagtcaaatatctaggcctaatcttagccagaggaaccagggccctcagcaagaaacgaatacagcctatactggcttatcctcgccctaagacattaaaacagttgcgggggttccttggaatcaccagcttttgccgactacagatccctggatacagcaagatggccaggccactctatactctaataaaggagacccagagggcaaatactcatctagtagaatgggaaccagaggcagaaacagccttcaaatccttaaagcaggccctagtacaagctccagccttaagccttcccacaagacaaaacttctctttatacgtcagagagagagcaggaatagctcttgaagtccttactcagactcacgggacaaccctacaaccagtggcaaaaggctag

SEQ ID NO: 17353 - DNA, 2418 bp, Homo sapiens
  SIMILAR (130)..(1953): 701254mologous to multiple sclerosis associated retrovirus polyprotein,accession number AF009668,Smith-Waterman Score=2187.
gtatgttcaactattgagggccaggaaattgacttcctcctggacactggcgccgccttctcagtgttaatctcctgtcctggacgactgtcctcaaggtccgttaccatccgaggaatcctgggacagcctgtaaccaggcaatatcccttaaggcctgaagttcataaaggattacagaatattgttaaacatttgaaagctccaggcttagtaaggaaatgcagcagtcactgcaacaccccaattctaggagtacaaaaaccgaacggtcagtggagactagtgcaagatcttagactcattaatgaggcagtagttccactatatccagttgtacccaacccctataccctgctctctcaaacaccagaggaagcagaatggttcatggttctggacctcaaggatgccttcttctgtattcccctgcactctgactcccagttcctctttgcttttgaggatcccacagaccacacgtcccaaattacgtggatggtcttgccccaagggtttagggatagcccttatctgtttggtcaggcactggcccaagatctaggccacttctcaagtcgaggcactctggtccttcaatatgcagatgatttacttttcgctaccagttcagaagcctcatgccagcaggctactctagacctcttgaactttctagctaatcaagggtacaaggtgtctaggtcaaaggcccagctttgcctacagcaggttaaatatctaggcctaatcttagccaaagggaccagggccctcatcaaggaacgaatacagcctatactggcttatccttgccctaagacattaaaacagttgcgggggttccttggaattaccggcttttgccaactatggatccccggatacagcgagatagccaggcccctctatactctaatcaaggacacccagagggcaaatactcatctagtagaatgggaatcagaggcagaaacagccttcaaaaccttaaagcaggccctagtacaagcgccaggtttaagccttcccacaggacaaaacttctctttatatgtcacagagagagccgggatagctcttggagtccttactcagactcgtgggacaaccccacaaccagtggcacacctaagtaaggaaactgatgtagtagcaaaaggctggcctcactgtttaagggtagttgcagcagtggccgtcttagtgtcagaggctatcaaaataatacaaggaaaggatctcattgtctggactactcatgaagtaaatggcatactaggtgccaaaggaagtttacggctatcagacaactgcctacttagataccaggtgctactccttgagggactggtgcttcaaaaatgtacatgcatggccctcaaccctgccacttttctcccaaaagatggggatccaatcgagcatggctgccaacaaattatagtccagacttatgctgcccgagatgatctcttagaagtctccttagctaatcctgactttaacctatataccaatggaagttcatttgtggagaatgggatacgaagggccggttatgccatagttagtgatgtaaccatacttgaaagtaagcctcttcccccagggaccagtgcccagttaccagaactagtggcatttacccgagctttagaactgggaaagggaaaaagaataaatgtgtatacagatagcaagtatgcttatctaatcctacatgcccatgctgcaatatggaaagaaagggaattcctaacctctgggggaacccctattaaataccacaaggaaattatagagttattgcacacagtgcaaaaacccaaggaggtgacagtcttacattgccaaagccaccagaaaggtgaaggagaaaaggcaggaggaaactgtcaggcagaagctgaggccaaaattgctgccaggcagaacctcccactagaaatacctacggaaggaccctcgagtgaccgcagcagcagcctcagcgaactcgcgtggacagaggcgtccctgatcaccaaacaggggccacacaccgtacatatagacggaagaacaagcgcggtggccccaccggtatgtcgggacagacgcccccagatacgccaaatcaacacatcggatcgtaacaacgggagaaaccaagcaggggaaaggttccccagaaaaaaatggctgcggggaaactggctaccaatatgtagaacgctgaaacggtatcctgtcgtcacacgttatacaaaaatcaatgcacgagggattaaagacttaaatgttcgacctaaaaccataaaaaccctagaagaaaacctaggcattactattcaggacataggcatgggcaaggacttcatgtctaaaacaccaaaagcaatggcaacaaaagccaaaattgacaaatgggactaa

SEQ ID NO: 17354 - DNA, 5168 bp, Homo sapiens
  SIMILAR (2832)..(3884): 661254mologous to multiple sclerosis associated retrovirus polyprotein,accession number AF009668,Smith-Waterman Score=1166.
atgggtgcacatggattacaaggcggcataatagacactggagactacaaaaggtgcaagagtggaaggtccatgccatctttaagagctgtaacactcaccacgaaggtccgtggcttcattcttgaagtcactgagaccacaagcccactggaaggaaccaactccggacacatcttgggtgttcgtctgggatattgccacacggtgagtaccatcggactcgtctgggatattgccacacgaggaaaggcaatggtgcaggttttcgagaatgcgttggtgagggccactaaatccgaccttcctcggtcctctttgtggtctaggaggaaatctagtgtttccactgctgcttcacttgaccttttctgtaagagggaaggcaaatggagtgaaatgccttatgtccaagctttcttttcactgaaggataatccacaactatgcaaagcttgcaatctacatcccacaggaggacctctcagcttacctccatatcctagccttcctacagctctccttcctattaatgataagcctcctctaatctccccgacccagaaggaaacaagcaaagaaatctccaagggaccacaaaaaccccccggctgtcagttatgtccccttcaagctgtagggggaggggaatttggcccaacccagctacatgtccacttctccctctctgatttaaagcagatcaaggtagacctggaaaagtttccagatgatcctgataggcaatattcctttaggcctgaagctcgtaaaggattacaggatattgttagacatttaaaagctcaagacttagtgagaaaattcagcagtccctgcaacaccccaattctaggacgacaaaaactgaatggtgagtggagattagtgcaagatcttagactcatcaatgaggcagtaattcctctatatccagttgtacctaaccactataccctgctctctcaaatacccgaggaagaagaatggttcactattctggacctgaaggatgccttattctgcattcccctgaactctgactcccagtttttctttgcctttgaggatcccacagacaacacatcccaacttaggtggacgttcttgcctcaagggtttagggatagccatcatctatttggtcaggcactggcccaagatctaggccatttctcaagtccaggcactctgctccttcagcatgtgaatgatttacttttggctaccagttcggaagcctcatgctggcaggctactctagatctcttgaactctctagctaatcaagggtacaaggtgtctaaattgaaggcccagctctgcctacagcaagtcaaatatctaggcctaatcttagccagaggaaccagggccctcagcaaggaacgaatacagcctatactggcttatcctcaccctaagacattacaacagttgtgggggttccttggaatcaccggcttttgccaactatgtatccccgggtacagcgagatggccaggctaccctatactctaatcaaggagacccagagggcaaatactcatctagtagaatgggaaccagaggcagaaacagccttcaaaaccttaaagcaggccttagtacaagctccagccttaaaccatcccacaggacaaaacttatctttatacatcacagagagagcgggaatagcttttggagtccttactcagactcataggacaaccccacaaccagtggcatacctaaggtggttaacaacagaagagggaaaggtacttataccagaagccagccagtggaaaatactgaagtacctccaccaaacttttcatgtgagtattgagaacactcatcaaatgcccaaatctctatttacagggccaaatctcctctgggccgtccaacaagaagtcaaagcctgtgaggtgtgccaaatgaataatcccttggtccatcataaggcccctataggggaacaaagaacagggcactatcccagagaggagtggcagttagacttcacccatatgcctaagtcaaaaggatttcaatacttgttggtctgtgttgataccttgacaaattggatagaagctgtcccctgcaagacagagaaggctcaggaagtggttaaagtcctaattcatgaaataactactagatttgggcttccacaaagcttacaaaacgacaatggtccggctcttaaagccacggatcgataccatcaagctacagatggtcttacaaatggaaccccaaatgagctcaactcacaacttctaccaaggacccctggaccaaccagctggccctttgactggcctaaagagttcccctctggaggacactacaactgcagggccccttcttcacccctatccagcagaaagtagctagagcggtcatcagccaaattcccaacagcagttggggtgtccctagccagcagcggcaacccactcgggtccccttccacgctgtgtaagttttgttctttcactctttgcaataaatcttgctgctgctcactctttgggtccacactaactttatgagctgtaacactcactgtgaaggtctgcagcttcactccgtgaagatctgcagattcagtcctgaagtcagtgagaccacaaacccaccagaatgaaaaaactccggacacatcttggggacttgtccaggatatcgctatgcgaaaggcaaagaaacaggcaaagaaatcatcaagggaccacaaaaccccccaggctatcggttatgtccccttcaagctgtagggggaggggaatttggcccaacccaggtgcatgtccccttttctctctctgatttaaagcagatcagggtagacctggggaagttttcagatgatcctgataggcaatatcccttaaggcctgaagctcatgaaggattacaggatattctcagatatttaaaagttcaagggttagtaagaaaatgcagcagtccctgcaatacccgaattctaggagtacaaaaaccaaaaggtcagtggagactagtgcaagatcttagattcatcaatgaggcagtaattcctctacattcagttgtacccaactcctataccctgctctctcaaataccagaggaagtggaatggttcactgttttggacctgaaggatgccttcttctgcattcccctgcactctgtctgccagtttctctttgcctttgaggatcccacagaccacacgtcccaatttacatggacggttttgcctcaagggtttagggatagccctcatctgtttggtcagatattggcccaagatctaggccacttctcaagtccaggcactctggtccttcagtatgtggatgatttacttttggctaccagtttggaagcctcatgccagcaggctactctagatctcctgaaccttctagctaatcaagggtacaaagcatctaaaccgaaggcccagctctgcctacaacaagtcaaatatctagacctaagcttagccagagtaaccagggccctcagcaaagaacgaatacagcctatactggcttgtcctcgccctaagacattaaaacagttgcgggggttccttgggatcaccaacttttgccaactatggatccctggatacagtgagatggccaggccactctatactctaatcaaggagacccagagggcaaatagtcatctagtagaaagggaacgagaggcagaaacagccttcaaaaccttaaagcaggccctagtacaagctctagccttaagccttcccacaggacaaaacttctctttatatgccagagagagagcaggaatagctcttggaatccttactcagactcacgggacaaccccacaaccagtgacatacctaaggaaattgatatattcatttgtggagaatgggatgcgaagggcaggttatgccatagttagtgatgtaacagtacctgaaagcaagccccttcccccagggaccagcacccagttagcagaactagtggtgcttacccaagccttagaactgagaaagaaaaaaagaataaatgtgaacacagatagcaagtacgcttatctaatcctacatgcccatgctgcaatatggaaagaaagggagttcctaacatctgggggaacccccaataaataccacaaggaaatcatggagttactgcatgctgtacaaaaacccaaggaggtggcagtcataccctgccaaagccatcaaaaaggtgaagagaaaaggcagaaggaaaccgtcgggcagatgctgagggccaaaattgctgccaggcggaacctcccaacagaaatacctatggaaggacccttggtatggaacaaccctgtccaagagattaagccccagtattccctgaccaaaacagaatggggactttcacaggggcatagttttctccccctggggtggttaacgacattagaggggaaggctggtagagccaccccgaatccccgaaacgtctacttcccactacaccttcgtggactgcgaacgggacggctaccgctctcccagagcacccgggcccaagaaatgaccctcgtcaggccccgtcccagctcctccccgcccccggaaaaagcggcggaggggcgggggcggcgatgctcctctgagaccaagctgcgacacagacgcctcttccgcccgctccgcacccctctctgcgccaccgcccccttggccgcttccgtggccgccgtcctcgccgccgccccggctgctgcggcgcgcgtccgctttcacgcactccgccgtggccgcgcacgcgccactgcgcgctggcgtcacttagcaaccgatcgacagcgggctgctgggtccggcgatgcaggcccagaaagtcgcctaaggcagcttccgcggctttttcgcatcggcccgaccctctgcccctccagaacagggggccccagggtgtggctgccctgccggcacctggctccggtcaccacacgtcactgtatggcgtcaccggcgcacgtcactacggatgagaaggtcctgggcgcctgtggagtgacctcgtccagaccgccgcagacccgatcggcaagttcttggaggtgcaggaaggttctccaaggagtaggaccagaaagggatgagagcgcgagcgcggttaatgtcgaggctgctaagtga

SEQ ID NO: 17355 - DNA, 2208 bp, Homo sapiens
  SIMILAR (808)..(1734): 701254mologous to multiple sclerosis associated retrovirus polyprotein,accession number AF009668,Smith-Waterman Score=1130.
atggctgccttgtcagagcgctttcatgccaaggagccagcaggatctgacagctacccttggactagcagagttttgcaaagaaatgatggtgacagtttatttacggacgctcagattcgcggccgtataatggaggcagccctactaggaaaggcaagggtgcaggtttttgagaatgcatcggtaagggccattaaatccgaccttcctcagtcctccttgtggtctaggaggaaaactagtgtttctgcttctgtgtcagtgagcgcaactattctgatcagcagggtccgcggaccattaagaaaacaagcaaagaaatctccaaaggcccacaaaaaacccctggctattggttatgtcccctacaagcttagggggaggggaatttggcccaacccagaagggctaaggagaaataggaaaaagcccatgaattattcagtgatgtccaccataactcagggaaaggaagaaaatccttctgccttcctcaagtggctacaggaggccttaagaaaatatactcccctgtcaaccggctccatcaagggtcaattgatcctcaaagataagtttattacccaatcagctgcagatatcaggagaaagctccaaaagcaagccctgggccctgatctaaatctggaggtgttattaaatctggcaacctcggtgttccataatagggaccaagaagaacaggcccaaagggaaaagcgagatcagagaaaggctgcagcctttgtcatgacaattagagaaacaaacattggtggttcagagaggacagaaaatggagcaggagtacaaaaatcgaatggtcagtggagactagtgcaagatcttagactcatcaatgaggcagtaattcctctatatccaattgtacccaacccctataccctgctctctcaaatacaagaggaagcagaatggttcactgttctggacctcaaggatgccttcttctgtattcccctgcactctgactcccagtttctctttgcctttgaggattccacagaccacacgtcccaatttacatggatggtcttgccccaagggtttagggatagccctcatctgtttggtcaggcactggcccaagatctagaccacttctcaagtcgaggtactctggtccttcagtatgtggatgatttacttttggctaccaatttggatgcctcatgccagcaggctactctagatctcttaaactttctagctaatcaaggatacaaggcatctaaattgaaggcccaactctgcctacaacaagtcaaatatctaggcctaattttagccagaggaaccaagaccctcagcaaggaacaaatacagcctgtgctggcttatcctcaccctaagacattaaaactgttgcaggggttccttggaatcacaggcttttgccaactatggatcactagatacagtgagatagccaggcctctctatattctaatcaaggagacccagagggcaaatactcatctaatagaatgggaaccagaggcagaaacagccttcaaaaccttaaagcaggccctagtacaagctccagctttaagccttcccacaggacaaaacttctttttatacatcacagagagagcagggatagctcttggaatccttactcagactcgtgagacaaccccacaaccagtggcatacctaagtaaagaagttgatgtagtagcaaaagtctggcttcactgtttaagggatggggaaccaatcaagcatgactgccaacaaattatagtccagatttatgccgcccgagatgatctcttagaagtccccttagctaatcctgaccttaacctatatattgatggaagttcatttgtggagaatgggatacgaagggcaggttatgccatagttagtgatgtaactgtacttgaaaactctttggcagcagtgactctccaaaaccgccaaggcctagacctcctcactgctgagaaaggaggactctgcaccttctcagggaaagagtgttgtttttacactaaccagtcagggataagttcccctctggaggacactacaactgcagggccctttcttcaccccatccagcaggaagtagctagagctatcatcggccaattcccaacagcatttggggtgtcctgtttagaggggagattgagaggtgaagccagctggacttcctgggtcgagtag

SEQ ID NO: 17356 - DNA, 269 bp, Homo sapiens
  SIMILAR (267)..(70): 321254mologous to Mus musculus env precursor,accession number AF043690,Smith-Waterman Score=66.
cttaggctgtacacacactgtggaatttcttcaagggagctgccggccggcgcagaacccccaggagcacaggtctctccgggccgctgtcctgcgtaactgttctccagagcgccagccagccacgggccactgttctcagtcactgccatttcctttggtcccttgagtttgatggaagacatgtggctcccttgacaggcctctcccattcttcgtgggacagcctgtgggtcagcggctgtgaaagccaaagcagattgggacat

SEQ ID NO: 17357 - DNA, 1045 bp, Homo sapiens
  SIMILAR (992)..(903): 501254mologous to Leishmania major probable (hhv-6) u1102, variant a DNA, complete virion genome,accession number AL160493,Smith-Waterman Score=100.
tcactcaatacccacaaccatcgaaaatggattcttagtaccagacaatcccagtaatgaaggtttagtttccttgaaggaaactgtgtgtccgagacggtgcttccgcacctctgtaaggggccggggtcgggggctgccctcacgctccccagattggccgctgggttgcagcccgcggctttcacgcagctctctcattagtgggccacgaaggtcaagggcagccgccgcctccttgcctgcattctgggcgctgcatgactccgaaccggatgctggtgttggtgtctgtgctggggttcgggggtcgctggtgaccagctccagcctgcctgtgtactgtgatgggccggcttcccctctcacccggatgctggtgttggtgtctgtgatagaaacaggaccactgttctcagtcactgccatttcctttggtcccttgagtttgatggaagacatgtggctcccttgacaggcctctcccattcttcgtgggacagcctgtgggtcagcggctgtgaaagccaaagcagattgggacatggtggcaccctttctgtcatccccctggtccaggccggtgtgcagggcttgacagagccacccggcaggaccctttggtgttgcctgcaggccgcagcgagagggcagaggtccttgcggctcttctctagggtccgacgtagatccagacaggaaagtcagtggggcattctggacatgtcgtcgcaccaggccagcgaagtaacaaagcgacaatcggccttggtccttctcaaagttaggtttccttgtctgtgatctgagcagacccgccagcaccatccggaggtcaaaggcgaaggcgggctcagaaccactgttactttcatcagtgataggatgagcggagaggcagaacaagtgcatgcacacacagacacacatatgcaaacacagacactcaaactcgcactcatacatggacacattcacacactcatacacagccatccccttggacaccccagtggctctggtggcagccagctgatctgtgtct

SEQ ID NO: 17358 - DNA, 619 bp, Homo sapiens
  misc_feature (1)...(619): n = a,t,c or g
tttttttttttgacttactaccatctttataaaaatcgaatatacacaccaaacacatcaaccaactgtggaaactgtatcccanttaaactttgataagacaacacaaagaactaattagctaagatgtggctggagttgaaagcacttcccaatagtattttaattttaaaaggtccatatttacatggtatgctaaatgctcttgcatctcattttaaatgcatgatgaactcaagaacaaagataatggttgcagcagatcttccacgagggtttggctggtgtgggctgacttcacgtgagcagcataccaaacacctaagtaccattcctttctcattctgcttctttccttttctgtagtttccttcaaggaaactaaaccttcattactggggattgtctgggtactaagaatccattttcgatggttgtggggtattgagtgaggtcggactggtgttggactgttctaatcagcgctttaaggcggggcctgcatgactttgccaatcacctttcaagaacattctatgagaaagtctgcctatgtgcatgtgtagacagttagagaaacacgcacacccccagggcctgtgtcacactcaggtaacac

SEQ ID NO: 17359 - DNA, 2617 bp, Homo sapiens
  SIMILAR (450)..(2165): 981254mologous to Homo sapiens Kruppel-type zinc finger protein,accession number AB011414,Smith-Waterman Score=3254.
tttcgtgtctgctccacccacctgcgctcggctctgggttctgtagctgagagacgacctggaagttctgaggcagcctttgtgtggcgggaacacgcattggcagcgggagctgtcggtaggacctgggacaccgcggaagtcgggaaatggcctcagtggcctttagaggatgtggctgtgaacttcacccgagaagagtgggctttgctgggtccttgtcagaagaatctctacaaagatgtgatgcaggaaaccatcaggaacctggattgtgtaggaatgaaatggaaagaccagaacattgaagatcaatatagatatcccaggaaaaatctaagatgtcgtatgttagagagatttgttgaaagtaaagatggaactcaatgtggagaaacatctagccagattcaagatagtattgtgaccaagaacactcttcctgggagttaggtccatatgaaagccgtatgagtggagaagtcatcatgggtcattcatcccttaattgttacatcagagttggtgctgggcacaaaccacatgagtatcatgaatgtggagagaagccagatacgcataaacaacgtgggaaagccttcagttaccacaactcatttcaaacacatgagaggcttcacactggaaagaaaccatatgattgtaaagaatgtgggaagtccttcagttctttgggaaaccttcaaagacacatggcagtgcagcgtggagatggaccttataaatgtaagttgtgtgggaaagcgtttttttggcccagtttattacatatgcatgaaagaacgcacactggagagaaaccatatgaatgtaagcagtgttctaaagccttttctttttacagttcctatctaagacatgaaagaacacatactggggagaaaccgtatgaatgtaaacagtgttctaaagcctttcctttttacagttcctatctaagacatgaaagaacacatactggggagaaaccatataaatgtaagcagtgttctaaagccttccctgattccagttcttgtctaatacatgaaagaactcacactggagagaaaccctatacatgtaaacaatgtgggaaagccttcagtgtttccggttcccttcaaagacatgaaaccactcacagtgcagagaaaccctatgcatgtcagcaatgtgggaaagcgtttcatcatctgggaagctttcaaagacacatgataaggcacactggaaatggacctcataaatgtaagatatgtgggaaaggctttgattgtcctagttcactgcaaagtcatgaaagaactcacactggagagaaaccctatgaatgcaagcagtgtgggaaagcattatctcatcgctcaagctttcgaagtcatatgataatgcacactggagatggacctcataaatgcaaggtatgtgggaaagcctttgtttatcccagtgtatttcaaagacatgaaaggactcacactgcagagaaaccctataaatgtaaacaatgtggcaaagcctaccgtatttccagttcccttcgaaggcatgaaacaactcatactggagagaaaccctataaatgcacacttgggaaagcctttattgatttctgttcctttcaaaatcacaaaacaactcacactggagagaagccatatgagtgtaaggaatgtgggaaagcattcagtcgtttcagatacctttctcgacataaaaggactcacacaggagagaaaccttatgagtgtaaaacatgtaggaaagccttcggtcattatgataacttaaaggtacatgaaagaattcactctggagagaagccgtatgaatgtaaggaatgtgggaaagcattctcttggctcacttgctttctacgacatgaaagaattcacatgagagagaaatcctatgaatgtccacaatgtggtaaagccttcactcattcccgttttcttcaaggacatgaaaaaactcatactggagagaacccgtatgaatgtaaggaatgtgggaaagcatttgcttctctcagttccttgcatagacataaaaagactcactggaaaaaaactcacactggagagaacccatatgaatgtaaggaatgtgggaaagcatttgcttctctcagttccttgcatagacataaaaagactcactagcattctctctaaatgtatggaatgtgggaaagcatttattaattttatttcatttcagatacttgtacgaaacacattggagatagaccctgtgaatgtaagcacttggtaaagccttaagtagtttcagtttctttccagtacagtcatcccttgatacctgctgggtattggttccagcactccgtgagccatgtccagtcccttttataaaatgacatgtttgtatgtaacttacccacatcctcttgtatagtctcaattatgtctagattacttaaaatacctcatgcattataaaagctatgcaaatagttgttctattgtattgtttagggaatcatgataaggaaaagagtctatgtattttcagtatagatgcagtaattgtcagcctatcaacatagtgtagtcagccagaacattaaagtttctttgtttcaactccc

SEQ ID NO: 17360 - DNA, 1320 bp, Homo sapiens
  SIMILAR (10)..(132): 971254mologous to Homo sapiens Kruppel-type zinc finger protein,accession number AB011414,Smith-Waterman Score=211.
atggatcaggcctcagtggctttagaggatgtggctgtgaacttcacccgagaagagtgggctttgctgggtccttgtcagaagaatctctacaaagatgtgatgcatgaaaccatcaggaacctggattgtgcccaaggaaaccacaattatgccctcaagaagggcatcactggattcagccaatcccccaacgtgcattcagatccccagctttccagtgctcagcagcttctctcagtacaaagggctccttccacagattcagtagcctttgaggatgtggcggtgaacttcacccacgaagagtgggctttggtgggtccatcacagaagagtctggacagagatgtgatgtgggaaaccattacgaacctggactgtatagggacagttagtggtattgacgctcacctccgtggacaaaacgatacgcaggctatatggctccggctgcatctggttcacctcgatactcacaggcagacgctgaacgacttttatccatttgacggtcgcattatgcgctggaagcagggagaacgctctatctttgcccatattcaaaccaaccactctggcgaagagaaaaggaagactgctatctgcaaaccaagaagcaggcccttactagagacatacaatgcaggaacggggaaacacagcccgaacaaccgggaaaaaaggacgtcgggcaaggaatgcagcctgaggaaagcagaaataacagccggaggggaccaaacagaaaggcaacgaaagcgaaaggaaagaggagaggatgggagcaaccacaaagacgaaaagaagaaaccaacggaaaaaagccaaggcagtacaagccgcagacaagaacccctcaaacaccgagttgtggaaggaaagggctttattcagctgggctgggagcatcggcggactcacgtttccaaaaaccgagctccccgaccctcggcgtccgggtgcagtgacttgggctgcgaacctgtactggttccgccgcacaatctggggagaagcggggctgagggcgcggagctgcccaaagaggggcgccggggccggggccgcattcgcagctcatggacgggacaggacgcccggggttccggtttgccggcccaaccccaccctgctggcaaacggaccgaggaccgagtgcccagggggcgggacctggagccctatccaatcagagctatggggcggggtcgtgagaactgtcaatcaggcgcacggctggcagtagggtgccaggttcaaagagcccgcggcgtcttcacgcccctgcgctcagctctagactcagtcgctcgctga

SEQ ID NO: 17361 - DNA, 339 bp, Homo sapiens
  SIMILAR (79)..(186): 501254mologous to Homo sapiens HLM-2 protein,accession number M11348,Smith-Waterman Score=93.
atgagtggggaactagatataattaagacaaacaggacctttcggtcctttaaacttaatcgaaggacggatgcactggtgtctgcagcttttgctgatgcacaagcattccattctttaactcatcgtaatgccacaggccttagaaaaagatggtcacatacaaagagctgggaaaaaggaaggataattatatggggacaaggatttgcttgtgtctttccagatgtgtatgaccatggaatggcagactggagggacccatggatcccaaccatggaccgggttcccccagtacgaggcatgagccagttgaatctgaatgcaaagatggaatga

SEQ ID NO: 17362 - DNA, 353 bp, Homo sapiens
  SIMILAR (117)..(4): 631254mologous to Homo sapiens Human 5' EST secreted protein SEQ ID NO:469,accession number Y12438,Smith-Waterman Score=135.
gaactggctcatggctcatactgggggaacccggtccaaggttgggatccatgggtccctccagtctcccattccatggtcgtgcacatcttgagggcatccacacggttcgttcatctcactctgactgggatgaattctccagaatacatcttggggacatttttgccttgaggggaatgtttctcatcttctcttccagttctccactttccaggcacagaactgtgggcctcctgccgccactgacgtgcctcttcccacacccatccagagattctaaaacctgtgactccggaaggctgccggctcccccagcggaatgctcctggctttcgacggaatacctaaaa

SEQ ID NO: 17363 - DNA, 861 bp, Homo sapiens
  SIMILAR (279)..(7): 861254mologous to multiple sclerosis associated retrovirus polyprotein,accession number AF009668,Smith-Waterman Score=385.
tcaagtggcgtatgtttgagcaattacttgttgacagttatgttctatcttttcttcattgtctggaagaaatgtggctgggttaagagttgcacaagtgcgcagtcgcagcactggcccttcaagtaatagagcctgatatttaagtaaatggttgtctgacagccacaagtctcctttagcagttagtatgccattcacatcatggatgtccacacagtaagatccctgtattattttaactgcttcagatactaagcctgctactgctgccactacctgactgatataccagagatcaccaaactctcgggctgcagttatggtggcacttctctcatttggggttagtgtctgatttagcagtaacattatatctctccatgtcagatcaaaggattgccctaactcttgtaaaacatcaatatagccatcagggttatctgagaatttacctaggtctattttaatttgctttaagtcactttggaggtcccttcgtggtcgccaaaatgttaccgggtggtccttgctcacagaggtcccaagatggcggtgacccgcttccaagatggtggcaagccttgtgttctctgacctggggctcttggcctcacggattccgaggaatggaatcttgggccatgcggtaagtgttatagctccagataaatgctgaacctcagactccagagtgaaccggaagttgaagaggtaagacaggcagaccaacggactcttccgcagagaaagagagaagaggaggaacatctgaataccaagaggagtttgggagtggtcagagaggagtttggccactgtgcggcccaactccaggggaagattatcttcccactccat

SEQ ID NO: 17364 - DNA, 1719 bp, Homo sapiens
  SIMILAR (1078)..(1614): 541254mologous to Homo sapiens polymerase,accession number AF080231,Smith-Waterman Score=500.
atgtattgcccacaagagactcactttagctttaaggacatacagacgctgaaagtggatggcagcaaatccttccaaacttcaaaaattgaagaggagagaatacatccaacttactttactgggcagacattaaccttacaccaaaactccctcctccgtcttgcacccagcgaacccctccgcattgtgcagaggctggctcaagccttatactcctggagaagcattttctacctcctgataaatgttgaatctcccttgtattataggttctcagggatgaagctgggtgggctgtcctctatacgccccctgcggctggcctggggtgaaggtagcttcctgctgccactactgtccagtggcctgacttctcctgacaccctcacagtcaatgccgcctcacctcctccccctgcacttcctggaatgggctctgctgaacccagcccaactctgggactcacccctgagcgcaaaagcgacgttgggcatgctggtaaaggaccactagaatccagcagcccggactgctttcttggtggtcaagaaaggtgggaaaaggggtgcaagactgctacatcagtaagcataactaatccgataagcagagatgagaaacattcccctcaaggcaaaaatgtccccaagatgtattctggagaattcagcccagtcagagtgtgtgtacctttttccctctcagacttgaaacaaattaaaatagacctaggtgcattctcagataaccctgatgactatattgatgttttacaagaattaggacaatcctttgatctgacatggagagatgcaatgttactgctaaatcagacactaaccccaaatgagagaagtgccaccataactgcagcccgagagcttggcgatctctgctgccgccgtgaagacaaaagggcatgtagtcaaacaacaatctcctccacagcctttaggggtttgagtcaaactctgaagagaaccaattctgagtcgggaactgccaggcaagcttttaaggagccagacagcacgagggttccccagattgcaggccgcggcgacgctgttcccccaacctctgaacaggacagagaaaagtttgcgttcacaataccagctatcaataatgaaaggtcagctctccgatttcattggaaagtacttcctcaaggaatgctgaacagtcctaccatctgtcagtatcatgaaaatcaggctttgctccccagtagaaaagaatttcataattgcaagattattcattttatggatgatattttactagcagccccaacggagccagcacttttaagtttatatgcctttgtcataaagaatgctcagttaggaggtttaatcatagtacctgaaaaagtacgattgtcctctccttggaaatatcttggatacatattaacttcccggtcaataagacctcaaaaggttaaattaaatgctagcaacttatacaccttaaatgattatcaaaaattactgggtgatattatttggctttgccccaccctggacataactactgataagttacaaaacctgttttctatcttaaagggcaatacagccctagactctcccagatgcatgacaagagctcgggaaccgctgaacgtcagtagaagctatagcacaggtggaccaagtgagcggggtgccttggcccatggacgagtgagtccctggttggcaaagtag

SEQ ID NO: 17365 - DNA, 843 bp, Homo sapiens
  SIMILAR (2927)..(3670): 871254mologous to Homo sapiens putative p150,accession number U93564,Smith-Waterman Score=1128.
atgggctctgtcgggagccagtgccttgaggagcccagtgtggcaggcacaccagacccgggcatagtgatgagcgtcaccttcgacagtcaccagctggaggaggcggcggaggcggctcagggccagggcttagggcaggggcgtcccagctttcacggataccaggtgggctgtgtgacccccggtgaagccttgtggcatcggggagccatgggtggtcatggaggactggaggtagtgcctgtcacattggaggagccagtgcccaatgaccgctatcacgccatctactttgcgatgctgctgtctggcgtgggcttcctgctgccatacaacagcttcatcacggacgtggactacctgcatcacaagtacccagggacttccattgtgtttgacatgagcctcacctacatcttggtggcgctggcagccgtgctcctgaacaacgtcctggtggagagactgaccctgcacaccaggatcaccgcaagctacctcttagccttgggccctctcctttttatcagcatctgtgacgtgtggctgcagctcttctctcgggaccaggcctacgccatcaacctggctgctgtgggcaccgtggccttcggctgcacagtgcaaaaccagaatgagcaggtccttgtaggtggtccaggaaaggaggcaggggacaaggccaaagaacagcagcaaagcagggagaggcctattccgtcccccactgttcagttcctatattatacaaggttagatccctttctctatgagcagaagaaccaaaccatctgcagcttcggaggagaaaatgtgctttcaattatgcacctggcctga

SEQ ID NO: 17366 - DNA, 1285 bp, Homo sapiens
  SIMILAR (497)..(949): 951254mologous to Cloning vector pZC320 SopA,accession number U26464,Smith-Waterman Score=740.
atgcgcacgggggccccgcgggactgggcggaaccccggggccagaacccggaatatggcgacataccttattggcgacgttcatggttgttacgatgaactgatcgcattgctgcataaagtagaatttacccctgggaaagataccctctggctgacgggcgatctggtcgcgcgcgggccgggttcgctggatgttctgcgctatgtgaaatccttaggcgacagcgtacgtctggtgctgggcaatcacgatctgcatctgctggcggtatttgccgggatcagccgcaataaaccgaaagatcgcctgacaccgctgctggaagcgccggatgccgacgagctgcttaactggctgcggcgccagcctctgctgcaaatcgacgaagagaaaaagctggtgatggcccacgcagggatcacgccgcagtgggatctgcagaccgccaaagaatcttcatattcatgcagatgcgcactgtgcggcggtgtctatcttgagaaaaagtatgatgtcacttatgcaataaagcccatttgttggacgcgtctcctcataattccgtcctgtctggctctgcaccgtattgaaactgagttaatgggcaaatttgatgaaggtaaactgcccaccgatccacacctgatgctccgactggccattgaaactgttgctcatgactatgatgtcatagttattgacagcgcgcctaacctgggtatcggcacgattaatgtcgtatgtgctgctgatgtgctgattgttcccacgcctgctgagttgtttgactacacctccgcactgcagtttttcgatatgcttcgtgatctgctcaagaacgttgatcttaaagggttcgagcctgatgtacgtattttgcttaccaaatacagcaatagtaatggctctcagtccccgtggatggaggagcaaattcgggatgctggggaaagggtacattcggccttttcgttaaattgggggaagccattagtgtttgaaaaggaccgcccctatagtgtttcggtgttcatagggttgttcctgcccatggcagaaaaaaccggcccccttaaaggtaaccccggcggagaatttctattgttcctaaggcaaattcaattggtttggttaccggctgcaggcatcatgacagaacactactttcctataaccgctacacaggctcttgagattaataatgcgatctctacgataatggagattttcccgactgtttcgttcgcttctcagtggataacagcaagcttctctgtttaa

SEQ ID NO: 17367 - DNA, 461 bp, Homo sapiens
  SIMILAR (1)..(1038): 911254mologous to Mus musculus myosin containing PDZ domain,accession number AB026497,Smith-Waterman Score=1598.
tcagaattcggcacgagcggcacgaggtgtctgcagctctggcagaggactgtgtccactagacacgctgaagggactgggtacgtgttttccttcaggaccagagctgagaggagctgggatcgcggcggcaatggaacgggcctcagaaaggcgcacggccagcgcgctttttgcggggttccgggccttgggacttttcagcaacgacattccacacgtggtgcggttcagcgcgctcaagcgccggttctatgtaacaacctgcgtgggcaagagtttccacacctatgacgtgagtgacttcttttgttagcttcccaggaaaaccaccctccttggcctctaactctgtcctggagcagtccggttctcccttcccatttaccacgggcttcccttctttaacccctccctgtcctattaatatttcgccatccggtcacgtccacgtgctgatt

SEQ ID NO: 17368 - DNA, 2454 bp, Homo sapiens
  SIMILAR (220)..(609): 991254mologous to Homo sapiens bA122O1.1 (A novel protein (ortholog of the mouse vesicular inhibitory amino acid transporter, VIAAT)),accession number AL133519,Smith-Waterman Score=682.
atgtgttgcactgagggcagtctccggaaacgcgattcgcagcgggcgccggaagcggtgttgtgtctgcagctctggcagaggactgttccactagacacgctgaagggactgggtacgtgttttccttcaggaccagagctgagaggagctgggatcgcggcggcaatggaacgggcctcagaaaggcgcacggccagcgcgctttttgcggggttccgggccttgggacttttcagcaacgacattccacacgtggtgcggttcagcgcgctcaagcgccggttctatgtaacaacctgcgtgggcaagagtttccacacctatgacgttcagaaacttagtctggttgcagtaagtaattctgttccacaggatatctgctgtatggcagctgatggcagattagtctttgctgcttatggaaatgttttctctgcatttgcccgtaataaagaggcaccagccgtggatgttgttgctattggtcttatgtcaggtcaagttatcattcacaacattaaatttaatgaaacattaatgaagtttcgtcaagactggggacccattacttcaatttcatttcgcacagatggtcatccagtaatggcagctggaagcccatgtggccatattggactctgggatctagaagacaaaaaattaatcaaccaaatgagaaatgcacactctacagcaattgccggactgacatttctccatagagagccacttcttgtcacaaatggcgctgacaatgctcttaggatatggatatttgatggtcctacaggtgaaggccgacttttgagattcagaatgggtcatagtgctcctcttaccaatatcagatattatggacagaatggacagcagattctaagtgcaagattaataaataaaaagagagttaaacgtaaaggacttcagaataccatgtcagtgagacttccacccatcacaaagtttgcagcagaggaagctcgtgaaagtgactgggatggtatcattgcttgccatcaaggtaagctatcttgctcaacctggaattatcagaaatctacaataggcgcttactttctcaagccaaaagagttgaagaaagatgacataactgcaacagcagtggatataacttcttgtggaaactttgctgtaattggcctctcatcaggaactgtagatgtatataacatgcagtctggcatacatcgaggaagttttggcaaggatcaagctcacaagggatctgttagaggtgtcgcagtggatggattaaaccagttgacagttacaactggtagtgaaggattactcaaattctggaactttaaaaacaaaattttaatccattctgtgagcctcagttcatctccaaatatcatgttgctacatagggacagtggcattctgggactcgccttggatgacttctccattagtgttctggacatagaaactaggaagattgtcagagagttttctggacaccaaggccaaataaatgacatgatcccactgcggcgtgatccctgcgtgggccatcaccagctttttctcttcgtcgatttgcagcagaggctggcgccgcagccagttaagcagctcgtcggcatccggcgcttccagcagcggtgtcaggcgatctttcggtttattgcggctgatcccggcaaataccgccagcagatgcagatcgtgattgcccagcaccagacgggtaaattctactttatgcagcaatgcgatcagttcatcgtaacaaccatgaacgtcgccaataaggtatgtcgccatattcttttaatgaatgagtgtgggaacggcgagtcggaatacgggaatgtcgatgctgaaaggacgccattttcatcgatcatttcgtacagttggtcgtataccggcatggcctctatctgttatatgaccggcgaaattaaaaaccccggaaaaaccatgccacgagcgctgattggttcctgtctgctggttctggtgctctacaccctgctggcgctggtgatttccggcctgatgcccttcgacaaactcgccaattctgaaacgccgatttccgacgccctgacctggatccccgcactcggcagcaccgctgggatctttgttgccatcacggcgatgatcgtcattcttggttcgctttccagctgcgtgatgtaccagccgcggctggaatacgcgatggcgaaagacaacctgttctttaaatgcttcggccatgtgcatccgaaatacaacacgccggatgtctccatcatcctgcaaggggcgctggggatcttcttcatcttcgtttccgatctcaccagcctgctgggttatttcttaacagccaaagactggaaactggtgttccatcgtaaactgatcggcgtttatcttgggcaatttgcggtggcttctgtcatgtacagtgcgttacgcccagcgtaa

SEQ ID NO: 17369 - DNA, 3544 bp, Homo sapiens
  SIMILAR (580)..(1206): 771254mologous to Homo sapiens p40,accession number U93567,Smith-Waterman Score=833.
ctcgtggggaaaaggcagggagggggtggtgtccccagccggtttggggggtgcgttgcccggagacggaaagtttgggagcccgagcaggctcggctgcagcctcggggagggggtccagcgggtggcggccctggggatggggaaggagcaggagctgctggaggcggcccgcaccgggcacctcccggcggtggagaagctgctgtccgggaagcggctctcctcaggctttgggggcggcggcggcggtggctctgggggcggcggcggcggcagcggcggcggcggcggcggcctcggctcttccagccaccccctctccagtctgctcagcatgtggagagggccaaatgtgaactgtgttgacagcactggctacacacccctgcaccatgctgctttgaatggccataaggatgtggtcgaggttcttctgaggaacgatgcgctgaccaacgtggctgactcaaaaggctgctaccctctgcatttggcagcctggaaaggagatgcccagatagtgcggttgctcatccatcaagggccttcacacaccagagtcaatgaacagaacaatgacaacgagacagccctgcattgtgcagcgcagtatggccacacagaggtggtgaaggtgctcttagaggagctgacggaccccaccatgcgcaacaacaaattcgagacccctttggacctggcagcactgtacgggcgactggaggtggtgaaaatgctccttaatgcacaccccaacctcctgagctgcaacactaagaagcacacccctctgcacttggcagcaaggaatggccacaaagccgtggtccaggtcctcctcgatgctggcatggacagcaactaccagacggagatgggcagtgctttgcatgaggctgctttgtttggcaagaccgatgtggtgcaaatcctgctggctgcaggaactgacgtcaacataaaagataaccatggactgactgccctagacactgttcgggaactgccttctcaaaagagccagcaaatagcagcattaattgaagatcacatgactggaaaaagaagtacaaaagaagtagataaaacccccccaccccagccacctctcatctccagtatggactccatatcacagaagtctcagggtgacgtggagaaagcagtgactgaactgattatagattttgatgcaaatgctgaagaagagggtccctacgaagctctgtataatgccatctcctgccattcgttggacagcatggccagcgggcgatcatctgaccaagactccacgaacaaggaggctgaggcagcaggagtgaaacctgctggagtgaggcctagggaacgtccaccacctccagcaaagccaccgcccgatgaagaggaagaagaccacatagataagaagtattttcccttgacagcttctgaggttctgtccatgagacctaggattcatgggagtgcagcccgggaagaagacgaacacccttatgaactgttgttaacagcagagacaaagaaagtggtgttggtggatggaaaaacaaaagaccacaggcggagcagcagcagccggagccaggactctgcggaggggcaggacgggcaggtcccagagcagttctcaggcctcctccacggctcctccccggtgtgcgaggtggggcaggaccctttccagctgctctgtaccgctggccagagccatccagacgggtccccccagcagggcgcctgccacaaggccagcatgcagctggaggagacgggtgtgcatgctcctggagcctcccagcccagtgccctggaccagagcaagagagtgggctacctcacaggcctgcccaccaccaacagccgctcgcaccctgaaactttgactcacacagcatctccgcaccctggtggtgctgaggaaggagaccggagtggggccaggagccgagcgcctcccactagcaaacccaaagctgaactcaaactcagccgcagcttgtccaagtctgactctgatctcctgacctgctcacccacagaggacgctaccatggggagtcggagtgagtccttatccaactgcagcattgggaagaaaaggctagagaagtcaccctccttcgcctcggagtgggatgagattgagaaaatcatgagttctattggagaagggattgacttttctcaggaacggcagaagatctcaggttcacggacgctggagcagagtgtcggggagtggctggagtcgattgggctgcagcagtatgagagcaagttgcttctgaatggctttgacgatgtccacttcctggggtctaatgtgatggaagagcaggacctgcgggacatcggcatcagcgacccacagcaccggcggaagctgctccaggcggcacgctccctacccaaggtgaaggctctgggttatgacgggaacagcccccctagcgtgccctcctggctggactccctggggctgcaggactacgtccattccttcttgtcaagtggttacagctccattgacaccgtgaagaacctctgggagctagagctcgtcaatgtcctgaaggtccagctgctcggccatcgcaagcgcatcatcgcctccctcgcagacagaccgtacgaggagccgccccagaagccccccagattctcccagctgaggtgccaagatttgctctcccagacgtcatccccactgagtcagaatgattcctgcactgggcggtcggcagatctgctgctgcctccaggggacacaggcaggaggcgccatgacagtctccatgaccctgcggcaccctcccgagcggagcgcttcaggatccaggaggagcaccgtgaggccaagctgaccctgcggcccccaagcctggcagccccctacgccccagtgcagagttggcaacaccagccagagaaactcatcttcgagtcctgtggttatgaagccaattatctgggctccatgctgatcaaagatctgcgagggacagaatccacgcaagacgcctgtgccaagatgcggaaatctacggagcacatgaagaagatccccaccatcatcctgtccatcacatacaaaggtgtcaagttcatcgatgcctccaacaagaacgtcattgcagagcacgagatccggaacatttcctgtgcggcccaggacccggaggacctctgtacctttgcctacatcaccaaggacctgcagaccagccaccactattgccatgtgttcagcaccgtggatgtgaacctgacctacgagatcatcctgacgctggggcaggccttcgaagtggcctatcagttggccctgcaggcccagaagtccagggcgacgggcgcctctgcagctgagatgattgaaacaaaatcttccaaaccggtgcctaagcctcgggtcggcgtgaggaaatccgcactggaaccacctgatatggaccaagatgcccaatcccatgccagtgtctcctgggttgtggaccccaaaccagactctaagcggagcctcagcaccaactga

SEQ ID NO: 17370 - DNA, 1156 bp, Homo sapiens
  SIMILAR (736)..(1155): 661254mologous to Homo sapiens similar to human ankyrin 1(S08275),accession number D86982,Smith-Waterman Score=464.
atgtggggtattggttcgaggacccccatctataacaaaatccttgtatactcaagtcctgaggtcagctgtgagaaacccaagtatgtgaaaagtcagacctctacacacacaggttttgaatcccacaaacgctatattttttatctgcgtttggttggaaaaaatctgcatgtcagtgccatgggcttggggaagagccaggagagaaggaagaaggctttgaagagccagccccagcagcctgctgacagttttccttctctccccactgtggaaggactgactaccagtggagaggtggcagcaggcttttggctaagtggagaggctctctcttcctgtgtagtttgtggagaggcagcgttgactcaagtctctgcccatagaatggctttcctcaagtcctatgtggcagatgacatcaagggtgaggggaaggagagtctggttgggccctggctgaggagaaaagctcttttttcatttgctgctgagcaccagagccagtccctgattgggggcttgagcttgcttcctgtcatcagttacagaatattagatagtgtgcaactttggggcttggctgtggggaatgccaagaatagttacaagataagcagtggatttaaaaacagagtgtattttgcactgtctgatgagtacattgtgtctccgaagttgagattccacatagtgagccttggaaaacaactgctgctctgcgaccctggcatgtggagagggccaaatgtgaactgtgttgacagcactggctacacacccctgcaccatgctgctttgaatggccataaggatgtggtcgaggttcttctgaggaacgatgcgctgaccaacgtggctgactcaaaaggctgctaccctctgcatttggcagcctggaaaggagatgcccagatagtgcggttgctcatccatcaagggccttcacacaccagagtcaatgaacagaatgctcttgagatcaaagaactcaaaaagtacggcccctttgacccttatatcaatgccaagaacaatgacaacgagacagccctgcattgtgcagcgcagtatggccacacagaggaggtgaaggtgctcttagaggagctgacggaccccaccatgcgcagcaacaaattcgagacccctt

SEQ ID NO: 17371 - DNA, 1179 bp, Homo sapiens
  SIMILAR (877)..(1137): 711254mologous to Homo sapiens PRO2221,accession number AF116695,Smith-Waterman Score=301.
atgtttggtgtaccacaaaacttaacacaacctgaggaatgtgaacacaacatcccatacccagataagcacccattggcttttagcctctctgatgggcacataaagaccatgggctctaaatgtgatggagcacacgtaacatcagtggtactgaccatcaaccagcatgttgtagtgttagttttaaagaacagtgagttcagagtttcctctctgtggtctcagcagcagcagcagcagcggcagcagcagcaaccctctctcagtcatgcatccatccatgactgcatgcagacagacatccatccacctgcccctcactctttcttccttggaaaatttcatataggcctatggcttcatcttaaagctcaatgtggatatctgatcagcaaagcctcttccaccctttgtgcgagttgtaacaaacgtccccttcctccagatgcacaatgctcgcatcaggatcttcagcttggcagcaaactgagctggatttcagcccctgctcagcctgcacaacctcagacagttgccctgctgggctatactaaaattttattcaaagtttctgaccaccattcagattattatcgaaaaaatcataagccatttcctaacaaatgtacccccaagcccccaagtgatataggagttaagaaggaattccttaggcagacagcaaggccatgggagtccttggtattaaagaaaagtttaaaagaaatatttgttccacttaaagttcttaattacaagcaaaagaggttaaaaatgacaaacttaagtaaaagaagaattattagaatacatcatggactcagaattaatagaaaccttcagagcttcagagggccagaaaaaatattagataaacataaaaagcaggaacccagaggcatggatcacagctcctcgccagcaacagaacaaggctggatggagaatgactttgacgagttgacagaattaggcttcagaaggtcggtaaaaacaaatttctctgagctaaaggaggatattcaaacccaccgcaaggaagctaaaaaccttgaaaaaagattagacaaaaggctaactagagtaaccagtgtagagaaaaccttaaatgacctgaaggagctgaaaaccatgacacgagaactacgtgacacacacagaagcttcagtagctga

SEQ ID NO: 17372 - DNA, 257 bp, Homo sapiens
  SIMILAR (162)..(221): 501254mologous to Homo sapiens Human immunogenic prostate tumour protein sequence SEQ ID NO:376,accession number Y82015,Smith -Waterman Score=47.
gaagaggcttgcactgttattctgctggaacatggcaccaatccaaaccttaaggatatctaccgcaacactgctctccattatgctgtgtatagtgagagcacctcactggcagaaaaactgcatttccatggtgcaaatattgaagcactggacaaggtattgtcaatatccttcttaagcaaaatattgatgtcttcactaaagacgtgtggacgagatgcagaagattacactatttctcatcatttgacaaa

SEQ ID NO: 17373 - DNA, 1356 bp, Homo sapiens
  SIMILAR (742)..(1113): 651254mologous to Cloning vector pEH1 lac repressor,accession number AJ007659,Smith-Waterman Score=363.
gcaatatttaaaataaaatcttagacaattatttcaaaataatttgcatttgcattcagggaatggttgagcttccaaatataaaaaattgacccttacctgtgtcaatgttaaaacaaatattttggaaagaaagttgattgatctataccttgtccagtgcttcaatatttgcaccatggaaatgcagtttttctgccagtgaggtgctctcactatacacagcataatggagagcagtgttgcggtagatatccttaaggtttggattggtgccatgttccagcagaataacagtgcaagcctctcctggttagcagaaaatgccagattgatatctgtgacaaagaaaatagaacgcctttgatacaggctgtccattgccaggaagaggcttgtgccgttattctgctggaacatggcgccaatccaaaccttaaggatatctaccgcaacactgctctccattatgccacgtatagtgagagcacctcactggcagaaaaactgctttcccatgatgcagatattgaagcactggacaaggcccgctactggggtgactaccaactaacggggcacccagagaatgagaaaacatggacatccaccagtgaaatttccctaaaggaggattttgccgatttcggaaccaccatcaaacaggattttcgcctgctggggcaaaccagcgtggaccgcttgctgcaactctctcagggccaggcggtgaagggcaatcagctgttgcccgtctcactggtgaaaagaaaaaccaccctggcgcccaatacgcaaaccgcctctccccgcgcgttggccgattcattaatgcagctggcacgacaggtttcccgactggaaagcgggcaggattttgccgatttcggaaccaccatcaaacaggattttcgcctgctggggcaaaccagcgtggaccgcttgctgcaactctctcagggccaggcggtgaagggcaatcagctgttgcccgtctcactggtgaaaagaaaaaccaccctggcgcccaatacgcaaaccgcctctccccgcgcgttggccgattcattaatgcagctggcacgacaggtttcccgactggaaagcgggcaggattttgccgatttcggaaccaccatcaaacaggattttcgcctgctggggcaaaccagcgtggaccgcttgctgcaactctctcagggccaggcggtgaagggcaatcagctgttgcccgtctcactggtgaaaagaaaaaccaccctggcgcccaatacgcaaaccgcctctccccgcgcgttggccgattcattaatgcagctggcacgacaggtttcccgactggaaagcgggcagtga

SEQ ID NO: 17374 - DNA, 2280 bp, Homo sapiens
  SIMILAR (1092)..(1400): 841254mologous to Homo sapiens hypothetical protein,accession number AL136793,Smith-Waterman Score=440.
tcaggacagtgccgcctgcatccctgcagctccagctccagctccagccatggctgaaagatgcacaggtacagcttgggtcactgcttcagagggtgcaagctgcaagccttggtggcttccacatagtgttaagccagcaggtgcacaggcttgggagcctttgtctagactcaagagtatgtaaggaaaaacctcagtgtccagctgggcagaagcttttccaagaggcagagcctcatgggaaacctttactgtggctttgcaggcttcagcccccatggctgctcccatgggctgggctggtgtggagtgcctgtagcctttccatactgagggtgcgagctgttggtgggcttatgaatctggggtctggaggatggtggcctcctgtgtgggagctccaagcccatattttccttctgcactgccatagtggaagtttcccaagaggctctgcctctgcaggaggcttctgcctggcaacagtgggtggtggtatgggcggtggttccttcaccattggcctggtccgtggggcttcgtctgtgggaccagacaatggggtcatgatcggtggaacctgcaggacctggtcagtgggggctgctgagtactgctgggagatgtcaggggaaatgcatgttatcgaggagcctgtggacagctggggtggcccagtcgtgttcaatggcccagtcaaaagtggacaaagcaggtgtttggatggacctgggagatcttgctcagagattctgacaggacaaagaccctggggcctaggagagaagaatggtatccggggccagccccatggccctgctgctgtgtgcagcctcaggatactgctgcctgcatcccagcagccgcagctcctgctccgaccttggctgaaagatgcacaggacactgctgcctgcatccctgcagctccctttccagctccagccatggatgaaagatgcacaggtacagcttgcatcactgcttcagaggatgcaagctccaagccttggtggcttccacacagtgttaagccagcaggtgcacagagcacaaaactagaggcttgggagcctttgtctagactccagagtataactgctctacatttggcctgtgccagtggccatgtgaaagtggtcactctcctggttagcagaaaatgccagattgatatctgtgacaaagaaaatagaatgcttttgatacaggctgtccattgccaggaagaggcttgcgccgttattctgctggaacatggcaccaatccaaaccttaaggatatctaccgcaacactgctctccagtatgctgtgtatagtgagagcacctcactggcagaaaaactgcttttccatggtgcaaatattgaagcactggacaagctgtccactccccatcggaggccgagagcagccagccgtgctccctggtccagctcaccaagccccgcagctctcctcctccacggacgggaaagcctgcgctgcgccaccagagtcactcgcctccgccctgtcctcagaggagtagctcccaggctgctgcctccaggacacaggttcctcttcaggggtggggcgctgccccttcccaagtggctcaatttctggcggaacggcctcggggctgtagcccccccaggagctgtccctgtcagcctcctggcagccgtgggccggccggctcccagggcttttctggtcccaggtcccacgtctggggtaggggctggtggagccggtgagctcttttacgactcgccgtaggcggccgggctgccgggtcccctgcaatcgccttcccctggtgaagacactttgggttttgtggtggttgtggtggttgtggtggttgattgttgttatgagatggagtctcactcttcctgcccagttttgtcaaatgatgagaaatagtgtaatcttctgcatctcgtccacacatgtcttgagcgaagacatcaatattttgcttaagaaggatactgacaatacctggtgagtcatagtatacagcaagcatgagagctgaccgtctcagcctatcaacggcatgtgtacttgctttctttttcaataaaaattccaccattttctctttcttgcaaattatagcgaataaaagtggggtattactgtccttgtccagtgcttcaatgtgtgcaccatgggaaagcagtttttctgccagtgaggtgctctcactatacacagcataatggagagcagtgttgccgtagatatccttaaggtttggattggcgccatgtttcag

SEQ ID NO: 17375 - DNA, 457 bp, Homo sapiens
  SIMILAR (51)..(332): 341254mologous to Homo sapiens Human bcl2 proto-oncogene mutant protein fragment 14,accession number Y21166,Smith-Waterman Score=86.
caaaaaggccattggaaacaaggatgccaagtttgtggaggaacggagaaagcagctccagaattacctgcgcagcgtcatgaacaaagtcatccagatggtccccgagttcgctgccagccccaagaaggagaccctcatccagctgatgcccttcttcgtcgacatcaccccgcccggagagcctgtgaacagccggcccaaagcagcttcccgctttcccaaactgtcccggggtcagccccgggagacccgcaacgtggagccccagagcggtgacctctgacctcgacaaaaccgcagccacgggccctgtgcgtggcaccagctgcgtccaccccagccactgccgctggcccctcacctcagcgtgacaaccacgtcccactggtgatcctgagagcacacgattcccaacagttacacaacaccccgattaaactaatcagtcttcaaa

SEQ ID NO: 17376 - DNA, 630 bp, Homo sapiens
  SIMILAR (245)..(96): 331254mologous to Human adenovirus type 5 protein pVII,accession number M73260,Smith-Waterman Score=66.
gatgccaagtttgtggaggaacggagaaagcagctccagaattacctgcgcagcgtcatgaacaaagggatgcagatggtccccgagttcgctgccagccccaagaaggagaccctcatccagctgatgcccttcttcgtgtaagtactgctcccatggacatgggccgccagccctgccagcattttttttctcggtcgttttggaaggtcagggagcacagcggctctccgtgatgccctgatcgccatgggacccaggcgaactccaggggctgttccaggtgccaaagtggaggttgggtctcagcgctttggagcttctaaagggatgggaagagagcaggcctgcaaatgagcattgttgacttgaggctcacaaagaaaccttggggctctgtgattttgtactttcacacatttcgatcaagggaagattaattttctgtacagcccacgggtgctccaaaactgaaacaaattgtgtcagtgtttctcaagcttgggtaatgaacccaaggaaagttctcccagactcctaccagtattgacttaaattatttttatatgagttttacttaaaaatgaacattaatattatttaaatgccttcttctctcttgaaaaaagt

SEQ ID NO: 17377 - DNA, 557 bp, Homo sapiens
  SIMILAR (120)..(230): 371254mologous to Methanosarcina thermophila ferredoxin,accession number M83188,Smith-Waterman Score=72.
cctcattctcccctatggaagaccttgtgtagcccttcatcaggcgtgtgttgtggctttgtcacactgttttgtaatgatcgctttgcatgtcttttccagctgactccgccaccatctcctgcctggatgactgcagcagcatccttgctggcctctctgcttcctgcattgcctcctctgaatcttcaggatgccaagtttgtggaggaacggagaaagcagctccagaattacctgcgcacggtcatgaacaaagtcatccagatggtccccgagttcgctgccagccccaagaaggagaccctcatccagctgatgcccttcttcgtgatgggattacaggtcggaatgtacggattgtttcattttggggtaatgatggatcagccacagccaagccttacccgtgctgacgaatctccatgtgatcgtgtcctttctccatgtgctgcccacagaaagcagcgagactgctgtctcagctggaaagctgagcctgagtgatttctggttaaataaaaataaaaaataaaaatctcctgcctaaggaaata

SEQ ID NO: 17378 - DNA, 744 bp, Homo sapiens
  SIMILAR (59)..(3): 941254mologous to Homo sapiens Human secreted protein sequence encoded by gene 31 SEQ ID NO:97,accession number Y91376,Smith-Waterman Score=94.
atgaggcccactgagaagtcagcatgtcccactagcagcaggtacacgtggcagagcatgtgcacgttagcagtgacatcagcctcatctgagagcttgtcggatgtgcagatttcaggccccatcccagacctgctgcatgagaatctgcatgttcacaggcccccagccgccaccatctcctgcctggatgactgcagcagcatccttgctggcctctctgcttcctgcattgcctcctctgaatcttcaggtgacctccgaagtcacctcctcccaggtatttgttctctcaacaaatgtgtatggagcctcttgggatctccaggcactgtgataggctccggcgataaagggatgaaccagacagataaggtgcctgccttggtggaattaccatctagcaagggaggtgaggaagacgtaccaaagcgaagatgttttgtgtttcctcaggatgccaagtttgtggaggaacggagaaagcagctccagaattacctgcgcagcgtcatgaacaaagtcatccagatggtccccgagttcgctgccagccccaagaaggagaccctcatccagctgatgcccttcttcgtgtcagggagcacagcggctctccgtgatgccctgatcgccatgggacccaggcgaactccaggggctgttccaggtgccaaagtggaggttgggtctcagcgctttggagcttctaaagggatgggaagagagcaggcctgcaaatga

SEQ ID NO: 17379 - DNA, 996 bp, Homo sapiens
  SIMILAR (417)..(310): 551254mologous to Homo sapiens Human secreted protein sequence SEQ ID NO:195,accession number Y87156,Smith-Waterman Score =102.
atgacatcatactggagtaagtcagttggtagtgatgacagcgggggagccagaagcaggcagggtctgccctcctgggtgccgctgcagctgcccgacctgcagctgcagacctggttgtcccactccatccacagagcaggcaggagccggggacaagttggagacctgccccttccgagttggtggagcaggagctcgctgggtgcagctgtgactgccctcccagggctggaagacagagatccaccaggctctcaattgaaagccctggagggctacaccctaagaacagaagtgaatcggagcctgcctgggagacacttcccagtaggggctgagagacacctcattaaggagagctcttgctggcatctggtgggtgcccctctgggacaaagcttccagaggaaggatcaggcagcaatatttgctgttctgcagcctccactggtgatacccaggcgaacagggtctggagtggacctccagcaaactccaacagatctgaaactgagggacctgactgttagaaggaaaaccaagaaacagaaaggaatagcatcaacatcaacaaaaaggacatccacaccaaaaccaacatcaagaccaaaggtagataaaagaccaaaggtagataaaaccacaaagatggggagaaaccagagcagaaaggctaaaaattccaagaaccagaaagcctcttctcctccaaaggatcacaactcctcgccagtaagggaacaaaactggacggagaatgagtttgatgcattgacagaagtagggttcagaaggtgggtaataacaaacttctccgagcgaaaggagcatgttctgacccattgcaaggaagctaagaaccttgaaaaaaggttagaggcatggctaactagaataagaataactagtgtagagaaaaacataaattacctgagggagctgaaaaaaacagcacgagaacttcatgaagcatacacaagcttcaatagctga

SEQ ID NO: 17380 - DNA, 725 bp, Homo sapiens
  SIMILAR (720)..(439): 371254mologous to porcine adenovirus 3 163R*,accession number AF247039,Smith-Waterman Score=124.
  misc_feature (1)...(725): n = a,t,c or g
ttttttccgctggtcattgagccccagnagnatgttgtgccagtganctgtggactcatacacatacatggggagtcagggcttctcatccacagacatgccgttcacaccatgtattttttccaggtcctgtgctgccttcgagtcttaggatgcagggaactgggcgaagggagagatgagaaggctctggcaatccattcagacatggaccccanagttttgtggggcaaccttgtgacaggtcagtgagtgtccaccttgttcatgctgcagggatgggagcaagggatcagacatgtcacagtgcgaggaagctcttgaagattctcctcattcctggagccctcactttctgaagcagacagctgctgtgcttcaagggctcatcagcttggtcccaaatgatgtcttcagtaggtggcgaaatgttaaaactgggagctatgtgaatgaatgcgctcgccggagaactttgcgtccttttccgcctcctcttccccgcgtcttcccggctcgcagccccctcccggcagccggcgaggtgggcagttcgtgggtcaccgaaagctcgcggaggggacgcgcatcacatggcagctcgttcccagccccccgagtgcgccgggaagggggaggggaaggggcgaggggaggccggggggaaagcgagagcggggcggcggcgggagtgggcaggcggggtggcgagggcggcggccgca

SEQ ID NO: 17381 - DNA, 2403 bp, Homo sapiens
  SIMILAR (985)..(1761): 911254mologous to Homo sapiens putative transcription factor,accession number AJ271878,Smith-Waterman Score=1216.
accccgcctgcccactcccgccgccgccccgctctcgctttccccccggcttcccctcgccccttcccctcccccttcccggcgcactcggggggctgggaacgagctgccatgtgatgcgcgtcccctccgcgagctttcggtgacccacgaactgcccacctcgccggctgccgggagggggctgcgagccgggaagacgcggggaagaggaggcggaaaaggacgcaaagttctccggcgagcgcgttcattcacatagctcccagttttaacatttcgccacctactgaagacatcatttgggaccaagctgatgagcccttgaagcacagcagataagagtgttgctgttgatcatctttgcctgggaagttgaatgataaagccagaagaaagcatgccttcctgatcattgcagctgtctgcttcagaaagtgagggctccaggaatgaggagaatcttcaagaacttcctcgcactgtgacatgtctgatcccttgctcccatccctgcagcatgaacaaggtggacactcactgacctgtcacaaggttgccccacaaaactttggggtccatgtctgaatggattgccagagccttctcatctctcccttcgcccagttccctgcatcctaagactcgaaggcagcacaggacctggtaaaaatacatggtgtgaacgggaatgtctgtggatgagaagcctgactccccccatgtatgtgtatgagtccacagtccactgcaccaacatcctcctgggcctcaatgaccagcggaaaaaggatattctctgtgacgtgactttgatcgtggagaggaaggagttccgggcccaccgggctgtgctggccgcatgcagtgaatatttttggcaggcgctggttggacagacaaaaaatgatttggtggtcagcttgcctgaggaggtcacagccaggggctttgggccgctgttacagtttgcctacactgccaaggctgttactcagcagagaaaacatccgcgaggtcatccgctgtgctgagttcctgcgcatgcacaacctggaggactcctgcttcagcttcctgcagacccagctcctgaacagtgaggatggcctgtttgtgtgccggaaggatgctgcgtgccagcgcccacacgaggactgcgagaactctgcaggagaggaggaggatgaagaggaggagacgatggattcagagacggccaagatggcttgccccagggaccagatgcttccagagcccatcagctttgaggccgccgccatccccgtagcagagaaggaagaagccctgctgcccgagcctgacgtgcccacagacaccaaggagagctcagaaaaggacgcgttaacgcagtaccccagatacaagaaataccagcttgcatgtaccaagaatgtctataatgcatcatcacacagtacctcaggttttgcaagcacattccgggaagataactctagcaacagcctcaagccggggcttgccagggggcagattaaaagtgagccgcccagtgaagagaatgaggaagagagcatcacgctctgcctgtctggagatgagcctgacgccaaggacagagcgggggatgtcgagatggaccggaaacagcccagccctgcccctacccccacggccccagctggcctctgcctggagagatccaggagcggaattatggacagccccacgtggccagaaggaggtgtccaacttcaccatggggtcgccctcagggggcctgggttggaggctctctgtaaacaggagggagagctggaccggaggagcgtgatcttctcctccagcgcttgtgaccaagtgagcacctcggtgcattcttattctgggggagccagattccttgccacagaacatcaggaaccaggcctgatgggagatggaatgtacaaccaagtgcggccccaaattaaatgtgagcagtcttatggaaccaactccagtgacgaatccggatcgttctcggaagcagacagtgagtcgtgtcctgtgcaggacaggggccaggagacaggaagcacatctgacctcaggctgagcacaaagctccagtcctgctctggacccatgtttaaggggccaactgctactgttgctgccactgagagctggggtactgtcttgcaaaatatcccactaggctgtgctgggactggggaagaggtgacatataccaatcctcctcctcgaggcagagccgctcttgtccctagatctcctctgacggtgtacagctcctccctgcccgagcatcagacctccctcaagcagtgtgcccaggcaggccctggtgtctgcctgctcgtccacaaccattggcagctgttggaaggggctttcagttgccttgcttctcactga

SEQ ID NO: 17382 - DNA, 1092 bp, Homo sapiens
  SIMILAR (574)..(816): 1001254mologous to Homo sapiens putative transcription factor,accession number AJ271878,Smith-Waterman Score=423.
atggggccttactatggaagaataaaatttagacaaaagaatttagacttgaccaggaagatgctgagagcatttcatgagaattcttcaagaattgctgaggttctatggacttcagagaatgtatttgacatggggacaacttgggcccttagtagatgcttcttgatggagccctggtgtctgcctgctcgtccacaaccattggcagctgttggaaggggctttcagttgccttgcttctcactgaactgctttaacaccagtttcctaagagctcagctacacagaaaaggtgggaaacaggtccagggtcacaaaccagtcagcggtaggtttggagactcagtggccgagtcgaagccccttgttgttcaggcagatgccgtgcagagggagctagagagctgcctaagaagggagtacacccctgaaaatttacctttgcttctgttgcagatcaagccaaaatgtgatccatggcaaaagaagcttttgactaaattaaaagaacggagaagaacagatgcattattgcaactccaagcaaagtttttgaagggtgtgaacggcatgtctgtggatgagaagcctgactcccccatgtatgtgtatgagtccacagtccactgcaccaacatcctcctgggcctcaatgaccagcggaaaaaggatattctctgtgacgtgactttgatcgtggagaggaaggagttccgggcccaccgggctgtgctggccgcatgcagtgaatatttttggcaggcgctggttggacagacaaaaaatgatttggtggtcagcttgcctgaggagtcacatttgacccatctacactcccttggcagccaaccgctgtgctcctcaagggggccagcacagccaggcctgagagttcctcctaggagcctgaaacttccgaacacaaactgccactcctccccccaactccccatccaccttaggccaaacccagatctgccgtccagcgactgtccagttgtgcaattccacccccaaatcccaattcctgatgagccacgccattaccagcacattagagccactcacagagcccagcatagtctctaa

SEQ ID NO: 17383 - DNA, 400 bp, Homo sapiens
  SIMILAR (191)..(925): 531254mologous to Homo sapiens BC85722_1,accession number AC006486,Smith-Waterman Score=570.
  misc_feature (1)...(400): n = a,t,c or g
acccttataaagaggtggattgccgctgcagcctccatgggccagcctaggaacagtgaatcttcttgctttcttaactgagaggcttgtagcctggggcaagttctcagccttactcactggctgcctggaaatacacttgagctgtcgtnnnnnnnnnnnnnnnnnnnnnnnnnnnnnnnnnnnntggnnnnnnnnnnnnnnnnnnnnnnnnnnnnnnnnnnnnnnnnnnnnnnnnnnnnnnnnnnnnnccaccagagtaggtgctggtatccacagctgagagacctgaagatggatcacatcacaggactctttgcagacactccccagcctggagcctggtaactccactgagtggctaggtccagaagaaaaatagtcactgcagttcagctct

SEQ ID NO: 17384 - DNA, 714 bp, Homo sapiens
  SIMILAR (179)..(487): 1001254mologous to Homo sapiens hnRNPcore protein A1,accession number X79536,Smith-Waterman Score=538.
atgtcgctgctacctgaacacctttgtatggaagtctgcattcctcaagatttacagaattcacggaatggatcagagaaacagcccagagctgctgtttgtattctatcagtgagattcactggagaaaaccagaggtcaagcggatgtactcttgaaagtccgatcaacacaaaaccagtgcaccgaacaaaaatacaaccaaagaccctcacagagtccacttcactcccctgctacctccaccagagcaggtcctggtttccatggctgagagacctgaagatggatcacatcacagaactctttgcagacactccccagtaccagcccagagccaggatcacaccagcccacaagcaatggatccaaaccaagacaaaaatctctaaattgccagaaaaagaattcagaaggttgatgattaagccaatcaaggagataccagagaaaggtgaactccaacttaaagaaatcaaaaacatgacacaggatatgaaaggaatattcttcagtgaaatggatagcataagtaaaaaacagtcacaacttctggaaatcgaggacacccttatagaaatgcaaaatgcactggaaagtctcagcaatagaatcaaacaagcagaagaaaaaacttcagagcttgaagacaaggcttttgaattaactcaatccatcaaagacagagaaaaaaagaattcaaaaaaaaaatga

SEQ ID NO: 17385 - DNA, 1251 bp, Homo sapiens
  SIMILAR (382)..(762): 921254mologous to Homo sapiens hnRNPcore protein A1,accession number X79536,Smith-Waterman Score=648.
atgactggcgtactcctaacagattctcagaaggaaggcactgagagtggatggagggaagacacagaagctggaatgaagtgggagaaaactggactcattcctggtctctggtggctccgggggaatgggttgcacagtgaattaaaagatgctgttgaaaaaaaattggaggcctttccccttggcacagaggtaggaactgacatatatgcagatgatgaaacagtcagaaaccttcaagaacaattgcagctagccaatcaagaaaaaactcaggctgtggaactctggcagactgtttctcaggagttggacagactacacaagctttaccaggaacatatgactgaggcccagattcatgtatttgaaagtcaaaaacaaaaggatcagctatttgattttcaacaactgaccaaacaacttcatgttactaatgagaacatggaagtgagtgggctttccacgaatccaaaagagattgagtgttttggcctaagcctgcaattattgcagccatttcagaacattgcagccatttcagaacattgcagaagccatttcagaaccattcctaggcttagattcctaagcctaggaatgctgcagctcttagatcctcctacatacacagacttgctagacttcgctcagggttctcctggttatctctacccacatggctcagaggcacctgaaaagcagcaggctccaaagcaagccaaattagagctgagagttgctgtagcaaaagtggaagagttaactaatgtgactgaagatctgcagggacagatgaaaaagaaggagaaggatgtggtgtctgcccatggaagagaggaagcatcagataggcgtttacagcagttacagtctagtataaaacaattagaaataagattatgtgtgacaatccaagaagccaaccaattaagaaccgaaaatacacatctggaaaaacagaccagagagctacaagcaaagtgcaatgaattagaaaatgagagatatgaggctattgtaagagccagaaatagcatgcaactcttagaagaagctaaccttcaaaaaagtcaggctctacttgaggagaagcaaaaagaagaagacatagagaaaatgaaagagacagtttctcggtttgtacaagatgctaccataagaaccaagaaagaagtgttcctgttgatttcctgtagccagcctttccctgccattacagctattcactcaggaagtatttattga

SEQ ID NO: 17386 - DNA, 259 bp, Homo sapiens
  SIMILAR (141)..(257): 781254mologous to Mus famulus reverse transcriptase,accession number AJ233597,Smith-Waterman Score=153.
agagaaccatggcactggccagttgatcatggtgttcctggaaagtaaaagagataggctggtgactaaattcttttttgctctctgtaagctgaaaatttttgacgtgcagaaaactggatgatggagagtaacatggaaagtttaaccaggtggtgactccaattgcagctgttgtaccagatgtggtttcattacttgagctattccctggtacttggtatgcagttattgatctggcaaatgcctttatttccat

SEQ ID NO: 17387 - DNA, 506 bp, Homo sapiens
  SIMILAR (440)..(502): 901254mologous to Mus famulus reverse transcriptase,accession number AJ233597,Smith-Waterman Score=90.
aatttttaggatgagtttcctgttttggttctttggtttctggcattggttctctcatctgattaggtttaatgatgctaataactctgtttccattaataaagagggcactgatagatagtccgtggtgtactctgtcaatagagatatataaatattaccattggatactcctaatcaaccacttataagaagcaaagattttggtgactgtgtatatgatgcttttgaacatgattggcaaagtaacaaatgtaaagagattggcttctattgtcatcgaacaaagaatgagctcagggtttgaattcccaggtcaaatgctgcatacatgatctcaaagctgctaatttcaaagtcgcagggctggtgagtctcactatactcccattcaacttacttgacgtgcagaaaactggatgatggagagtaacatggaaagtttaaccaggtggtgactccaattgcagctgttgtaccagatgtggtttcattacttgagctat

SEQ ID NO: 17388 - DNA, 227 bp, Homo sapiens; identical to SEQ ID NO: 4494
  SIMILAR (185)..(610): 881254mologous to Homo sapiens heterogeneous ribonuclear particle protein A1; similar to P49312 (PID:g1350822),accession number AC004957,Smith-Waterman Score=633.

SEQ ID NO: 17389 - DNA, 236 bp, Homo sapiens
  SIMILAR (163)..(2): 771254mologous to Mus musculus Pro-Pol-dUTPase polyprotein,accession number Y12713,Smith-Waterman Score=208.
ctatgggaccctgccaaaggctccaaacagcatcccaatctgccactgatacttcaaacaccattggatctgctgggtcatatggcccaagtggcagagcagcttgcatagcagcctggaccagttgcagagccttcttccaaatgagaaatgtgttgccccaaaatccaaacaggcccactaggcattgtgcctctttcttggtcgtaggaggcgccaaatgcaccaaactcatc

SEQ ID NO: 17390 - DNA, 323 bp, Homo sapiens; identical to SEQ ID NO: 16411
  SIMILAR (147)..(22): 881254mologous to Mus musculus Pro-Pol-dUTPase polyprotein,accession number Y12713,Smith-Waterman Score=200.

SEQ ID NO: 17391 - DNA, 1557 bp, Homo sapiens
  SIMILAR (674)..(1261): 441254mologous to Homo sapiens protein A1-alpha (AA 1- 320),accession number X06747,Smith-Waterman Score=274.
atggcttcccctgaggcagttgccagtcaagataatgatggtttttctcagaagccacccccaacacctctgtttgcctctagatctgtaaatagactgaagtcccagcggacccctagaggtgaggttgaaagtgtgaccgatggggagaagacagatggatcttggagaatgacagtggattactgtaagcttaaccaagtggtgactccaattgcagctgctgtaccagatgtagtttcattgcttgagcaaattaacacatctcctgatatcacactggtccattacattgatgacattatgctgaatggatcaagtgagcaagaagtaacaaacacactggacttattggtgagacatttgtgtgccacaggatgggaaataaatccaactaaaattcagggatcttctacctcagtaaaatttctaggggtccagtggtgtggggactgtcgagatgttccttctaaggtgaaggataagttgctgcatttggcccctcctactaccaagaaagaggcacaacacctaacgggcctatttggatttcggaggaaatacattccttatttgggtgtgttactctgtcccatttatcaagtgacccgaaaggctgccagttttcagtggcgtccagaacaggagaaggctctgcaacaggtccaggctgctatgcaagctgctctgccacttgggccatatgacccagcaggtccaatggtgcttgagatagcagtggcagatacagaggctgtttggggccattgcactcagcctctttccccagccacccctgtcattgcccaatgggcccatgaacaaagtggccatgatggcagggatggaggttatgcatgggatcagcaacatggacttccactcatgaaggctgacctggctatggccaccaatgagtgcccaatttgccagcagcagagaccaacactgagcccgcaatatgacaccattcctcaggagatcagccagctacctggtggcaggttgattatattggacctcttgcatcatggaaagggcagagacatttactctggatatgggtttgcctatcctgcatgcaatgtttctgccaagactaccatccgtggactcacggaatgccttatccaccattatggtattccacacagctttgcctctgaccaaggcattcactttaccactaaagaagtgtggcagtgggttcatgctcatggaattcactggtcttaccatgttccccatcatcctgaagcagccgggttgacagaacagtggaacgaccttttgaaatcacaactacaatgccgactagccaggaatcacgggtccaggaatcaaggggtggaagtggaagtggcaccactcaccatcacccctagtgatccactagcaacatttttgcttcctgtttctatggcattacattctgctggtctagaggtcttagttccagagggagaaacgctgccaccaggagacaaaacaattccattaaactataagttaagattgccacctggacactttgggctcctcctacctctaagttaa

SEQ ID NO: 17392 - DNA, 1120 bp, Homo sapiens
  SIMILAR (395)..(1120): 741254mologous to Mus musculus Pro-Pol-dUTPase polyprotein,accession number Y12713,Smith-Waterman Score=1011.
cccttctaaggtgaaggagaagttgctgcatttggcccctcctacaatcaagaaagaggcacaacgcctagtgggccaattaggattctggaggcaacacattcctcatctgggtgcgttactctggctcatttatcaagcgacccaaaaggctgccagttttgagtggggtccagaacaggagaaggctctgcaacaggtccaggttgctgtgcaagctgctctaccacttgggccatacgacccagcagatccaatggtgcttgaggtgtcagtggcagatagggatgctgtttggagcctctggcaggctcccataggtgaatcacagcagaggcctctaggattttggagtaaggccctgccatcttctacagataattactcttcttcagatgtgcaattatatactgattcatgggctgttgccagtagtttggctggatagtcagggacttggaagaagcatgattggaaaattggtgacaaagaaatttggggaagaggtatgtggatggacctctctgagtggtcaaaaactggaaagatatttgtatcccatgtgaatgctcaccaactggtgacctcagcagaggaggattttaataatcaagtggataggatgacccgttctgtggacaccactcagcctctttccccagccacccctgttgtcgcccaatgggcccatgaacaaagtggccatggtggcaggaatgaaggttatgcatggactcagcaacatggacttccactcaccaaagctgacctgactacagccactgctgagtgcccaatttgccagcagcagagaccaacactgagacctcgatatggcaccacttctcagggtgatcagccagctacctgctggcaggttgattacattgaacctcttccatcatggaaaaggcagaggtttctcctcactggaataaacactcactctggatatgggtttgcctatcctccatgcaatgcttctgccaagactaccatccatggactcatagcatgccttatccactgtcatggtattccacacagcattgcctctctttacagagagagaggcactcactttacagataaagaagtgcagcagtgggcgcatgctcat

SEQ ID NO: 17393 - DNA, 1911 bp, Homo sapiens; identical to SEQ ID NO: 5198
  SIMILAR (982)..(1761): 771254mologous to Mus musculus Pro-Pol-dUTPase polyprotein,accession number Y12713,Smith-Waterman Score=1036.

SEQ ID NO: 17394 - DNA, 1416 bp, Homo sapiens
  SIMILAR (1)..(2013): 1001254mologous to Homo sapiens RIP protein kinase,accession number U50062,Smith-Waterman Score=3545.
gaggaattacggaggttgagctggtccggaatccctaagccagtgcgtccaatgacgtggaagctcctctcaggttaccttcccgccaatgtagaccggagaccagccactctccagagaaaacaaaaagaatattttgcatttattgagcactattacgattctaggaacgacgaagttcaccaggacacatacaggcagatccacatagacatccctcgcatgagccctgaagcgttgatcctgcagcccaaggtgacggagatttttgaaaggatcttgttcatatgggcgatccgccacccagccagtggatacgttcagggtataaatgatctcgtcactcctttctttgtggtcttcatttgtgaatacatagaggcagaggaggtggacacggtggacgtctccggcgtgcccgcagaggtgctgtgcaacatcgaggccgacacctactggtgcatgagcaagctgctggatggcattcaggacaactacacctttgcccaacctgggattcaaatgaaagtgaaaatgttagaagaactcgtgagccggattgatgagcaagtgcaccggcacctggaccaacacgaagtgagatacctgcagtttgccttccgctggatgaacaacctgctgatgagggaggtgcccctgcgttgtaccatccgcctgtgggacacctaccagtctgaaccggacggcttttctcatttccacttgtacgtgtgcgctgcttttctcgtgagatggaggaaggaaatactagaagaaaaagattttcaagagctgctgctcttcctccagaacctgcccacagcccactgggatgatgaggacatcagcctgttgctggccgaggcctaccgcctcaagtttgcttttgccgacgcccccaatcactacaagaaatgagcccaggcccacccgcagctggcctcactgtcccgggtggcgcgccccacctgcctggctggtggtaggcccctgtgagctggtccgggctgctaaaaggccttgtgaggtggccccaccctccaggggagctggtgaagatgggccacagacctggtctagggctgacaaagacagggacagcctttgttttttgagataccaaaaagagccaggggagggccccgggttcggcggccagaggcaggtcaggggtcccctctccctctccctgcaatgtccttgccaaatgactgcctcctgctgcccctagtccggggcagcctaggaggccgaccctctttggagtcctgctgtttgggtgccagggccggaacgaggtagtggccatctcatacctactctgaaatgcaaaacttctattctgttgagtgaaagaataaaatgtagccaaaatctaaaaaaaaagaattccaccacactggcggccgcaaggag

SEQ ID NO: 17395 - DNA, 678 bp, Homo sapiens
  SIMILAR (389)..(496): 971254mologous to Homo sapiens dJ67C13.1 (novel protein similar to yeast YOR070C),accession number Z80896,Smith-Waterman Score=183.
tgggccggttggtgaaagcagaacatgcttgcacacggaggtgcgtcacccaggaccgcagggtggagcagctttgtgcttctgggaccaaacgggaaatgagctggaggacccgtggcagcaggaaaatggcgttgaacaggagccagaggacttccgcaggtgtcagtcacggatggctctgtcagggtttgaaagggaccccaagagcagcacagaggaactcggtcagtggtctgagtgcggcacaattgatggcgtcaccagcgtcagagaggcatgtgagagcggccagcaggccccaggtggcagcatctccacccgcctgtgcccacctcgtttccacagcgctggcttcatcacgtccctccctgacacctgcccaggtgcggtggaggtggacacggtggacgtctccggcgtgcccgcagaggtgctgtgcaacatcgaggccgacacctactggtgcatgagcaagctgctggatggcattcaggtgagcgcagaggcggaagactttggggtgagtcagcatcacccctctgtccccaagaagctcagagcctggtgggatgtgttcttccacgtgttggtcagggctgagcctgagcgcagtgttaatagtaagatgagtgacctttcctgccgtatccagggcgtcctgaagtgaaacagcct

SEQ ID NO: 17396 - DNA, 1335 bp, Homo sapiens
  SIMILAR (355)..(999): 511254mologous to Rattus norvegicus calpain isoform Rt88',accession number AF173834,Smith-Waterman Score=572.
atggcggtatctcaaagcgatggctctgagacccacaacggtagctcttgggcacctgcggcagcccaagtgttcatgaaatatggactaggtgctgaggtcagcaccgccccaggcgccagcagcccagttctagctcttgtttttaacgcaggctgcttttgccagcagctgcatttacagtctggactcaggaaagcagaaaacaaactggcctgcaaagccactcctggggccatcatttctcccagaggcttttgccacaagatccctgatctcccaccaggtcctcaagcacttgaatggaagctggcgccaaggtactctaggagggcgtctccacagcaaccccaacaggactttgaggccctgctggcagagtgcctgaggaatggctgcctctttgaagacaccagcttcccggccaccctgagctccatcggcagtggctccctgctgcagaagctgccaccccgcctgcagtggaagaggcccccggagctgcacagcaatccccagttttattttgccaaggccaaaaggctggatctgtgccaggggatagtaggagactgctggttcttggctgctttgcaagctctggccttgcaccaggacatcctgagccgggttgttcccctgaatcagagtttcactgagaagtatgctggcatcttccggttctggttctggcactatgggaactgggttcctgtggtgatcgatgaccgtctgcctgtgaatgaggctggccagctggtctttgtctcctccacctataagaacttgttctggggagcacttctggaaaaggcctatgccaagctctctggttcctatgaagacttgcagtcaggacaggtgtctgaagcccttgtagacttcactggaggggtgacaatgaccatcaacctggcagaagcccatggcaacctctgggacatcctcatcgaagccacctacaacagaaccctcattggctgccagacccactcaggggagaagattctggagaatgggctggtggaaggccatgcctatactctcacaggaatcaggaaggtgacctgcaaacatagacctgaatatctcgtcaagctacggaacccctggggaaaggtggaatggaaaggagactggagtgacaggctaatcataggcgatctgctggtgtttggcgctggacgtgtcagcacaggcccagcaagtggggtcctaagggcagcaacctacaaagcctccagccttgcccggctgtgccggtcacacaccagagctggtaacagtgttagtacattcattaccaccaattcacaggtggctgccagctcctga

SEQ ID NO: 17397 - DNA, 926 bp, Homo sapiens
  SIMILAR (337)..(408): 1001254mologous to Mus musculus GRB2-associated binding protein 1,accession number AJ250669,Smith-Waterman Score=132.
ttagagagtagaatttgaacatgtctcagtatcactgtccactatgagctgatgcttttttaatgcctgtaaggcagttactgtcaaataaaccctggacgcagaattctgggtctgaactggctctaccactctctcaaagggctttgaacagcccctttcttcctgccgcgagccccggggtgggggaggcggcgggggaggagcgcgaggggacgggacagcgggatccctcccaggagccaagccgccaagcgcctcgttcctctgctgctccccgccctcttcggcggccgcgagagcggacccaccctccggcttgacctgcgacctcccatgagcggtggtgaagtggtctgctccggatggctccgcaagtcccccccggagaaaaagttgaagcgttatgtaagtagagctgcgggcaccactccgcgggcctcggcgtccacacccctccccagtcggctcgccggcggctgcagctggccgcgcgcggggctggttcttaaacgaatgccggtctctttccccttggcccctacccctggcgggctcgggacagggtgccttgcactccctcacgcccaggcatccacttggccggacaactttcttcctccaggttccagacagcctgctttgcgggcctgttcgccccataaaaggacctagacgtccagctaaactcctgctgcatgctttttttcttccttaggaaggatggggtgcgatggagagaggagccttcttcctgctttattcctgcatctgattattgggctgatgtgtgctaaagctcccgcaccgggaaaactgccgaggttttagggctcactagccctttctttggtgggggctccctctcctccgcccctcgagatgggttgcgggaagcgggctgtggaggtgaggagttggtagta

SEQ ID NO: 17398 - DNA, 828 bp, Homo sapiens
  SIMILAR (391)..(615): 781254mologous to Homo sapiens p40,accession number U93567,Smith-Waterman Score=321.
atgagggactgtgccatgatgaatggtgcattccagcccagacactatgcttttcccacggtcttcacaaccagcagactgggagactccctctggtgcctacgccaccaggaccatgggtttcaagcacaaatctgggcagccatttgggcagacactgagctagttgcaggagttttttcttcataccccagtggggtcaacagacacctcatacaggagagctctggctggcatctagggggtgccccactgggacgaagcttccagaagaaagagcaggcagcaatctttgctgttaggcaacctctgctcatgataaccaggcaaacaggatctggagtggacctccagcaaactccagcagacctgcagaagagggactttactggtagaaggaaaactaacaaacagaaaggaatagcaccaacatcaacaaaaattacgtccacatggaaacctcatccaaaggattgcaactcctcaccagcaagggaacaaaactggatggagaatgagtttgacaaattgacagaagtaggcttcagaaggtggacaataacaaactcctccaagctaaaggagcgtgttctaacccaatgcaaggaagcaacgaaccttgcaaaaaggttagagaaattgctaactagaataaccagtttagaaaagaacaaaaatgacctgatggagctgaaaaacacagcacaagaacttcgtgaagcatacaccagtatcagcggccgaatcaatcaagcagaacaaaggacatcagagattgaagatcaacttaatgaaataaagcgtgaagacaaaattagagaaaaatga

SEQ ID NO: 17399 - DNA, 447 bp, Homo sapiens
  SIMILAR (386)..(421): 751254mologous to Homo sapiens Human secreted protein, SEQ ID NO: 6477,accession number G02396,Smith-Waterman Score=56.
gtaataactgagtatagaagccactagctgcctctaggaacagagaaagtttgcctgaacttcactccgattcggatttgctcgattctttgcctggccttgtagtgttgtgatctgattcttaaaggcgtgattccagctgaaaacaaaatgtaattctatttggtatagcagtgactcactgggcagacactggtccccagatcctgttctactttcttgtctaaagcgtattccaaatcgggtaactagcattttctggtacaggtcctgcagagcctgcctggatgtccagacttcagctggacccagcttagaatctgtcatgtcagccttcaggacttctgcctgccggaggtactgcgcgctctgcaggctcatcgtgccgccgccgccgccgcgtcttcccgcgaagcctccgtgggtctctcaggctcctcggagcgg

SEQ ID NO: 17400 - DNA, 1365 bp, Homo sapiens
  SIMILAR (188)..(643): 261254mologous to Caenorhabditis elegans SMG-7,accession number AF089729,Smith-Waterman Score=97.
  misc_feature (1)...(1365): n = a,t,c or g
cagcacccgcggtgccgcggggccgctccgaggagcctgagagacccacggaggcttcgcgggaagacgcggcggcggcggcggaggatgagcctagcagagcgcgcagaacctccggcaggcagaagtcctgaaggctgacatgaatgatactaagctgggtccagctgaagtctggacatccaggcaggctctgcaggacctgtaccagaaaatgctagttaccgatttggaatacgctttagacaagaaagtagaacaggatctctggaatcacgcctttaagaatcagatcacaacactacaaggccaggcaaagaatcgagcaaatccgaatcggagtgaagttcaggcaaacctttctctgttcctagaggcagctagtggcttctatactcagttattacaagaactgtgtacagtatttaatgtagatttaccatgccgtgtgaagtcttcccaattgggaattatcagcaataaacagacgcataccagcgccatagtgaagccacagtctagctcctgttcctatatctgccagcactgcctcgtccaccttggagacattgctcgatacagaaaccagaccagccaggcagagtcctactataggcatgcagctcagcttgtcccctccaatgaatgtcttaaaccattctaccttatgagaaattggatgttcttgcagatagtcattgtgggagaaaacgtttcatttatgtcccattatgaggaccgaaaacttgaaatcagaggagcatctgaaatcaagtaatattaggtaggatgaaaattacaagggatttctacatgtttttattccttttggagatgtgtattattcatactctgtgaatactaataaaattagaaacttcctgaaacatttgattttggccaagatcgggatggggcatgctaaagttttattatttatgtgacttcttgagaaccttggcttatgtttatactttgtcttgagcatttttatcttgtggtccaaggaagcttttgaaaattttactgaagtaaatttttaaaaattttgttttatatgaggtctctgaatatttatgataaacgtagggacacatgatttatacctcatcctttagaatgaaagtttctgtggtttttttacatacttagtaaatcatgtgagtgcaggtaacatcagcttgcagttctgtatgtcagcgtggatgcaatcaagcctcccaagtgcctgtagaaataggtgtatgatagtatgctagagaagccctcttggtacatgtgaattagtaactattgctacagcaggcttataatgnccagaaaatgccaaggatgcttggatcctccaaagatgccagcttttaa

SEQ ID NO: 17401 - DNA, 1101 bp, Homo sapiens
  SIMILAR (7)..(699): 991254mologous to Escherichia coli UhpB protein,accession number M17102,Smith-Waterman Score=1241.
atgcactgcttttttatcttctctgccgcatggttttgcctgtggagtatcagcctgcatctggttgagcgccctgatatggcggtgctgttatttccgtttggtctgcgtctggggctaatgctgcaatgcccgcgcggatactggcccgtattgctgggcgcggagtggctgctgatttactggctaacgcaggcggtcggtttaacccattttccgttattgatgatcggtagtttactgacgttactgcccgtagcgctgatctcgcgctatcgccatcagcgtgactggcgcaccttgctgttacagggggcggcgttaacggcggcggcgttgttgcagtcgctgccctggcttaggcacggcaaagagtcgtggaatgcgctgttgctgactttaactggcggcctgacgctggccccgatatgtctggtgttctggcactatctcgccaataacacctggctgccgctcggtccgtcactggtttctcagccaatcaactggcgcgggcgacatctggtctggtacttgctgctgtttgttatcagtctctggctccagttgggattgccggacgaactgtcgcgctttacgccattctgtctggcgctgccgattatcgcgctggcctggcactatggttggcaaggggcgctgattgcgacgttgatgaacgccatcgcgctgatcgccatcaaagctggcgcgatctcccgtggacttattgctccggtgattgtgacagtcgacacggagcccagggccagaaagcacgcgctccgccgaaacatgaccaatttccgcacgcaatatttcgaggataatggcctcttcttcactattcggcgcaaaatcaacgtgaccgccttcgcctggcaagcttacccaacgcttatcgacatggaccagatgcgcaaccccaagccccgttccggcaccgtaaaccgcaataggcttaccttcgaccggttctgcgccaccaaactgaatcagatgctcttttttcagcatcgggatcgccatcgatacagcggtaaaatcgttaataatttccagatggctaaaaccgagattctttttcatttcggcaattga

SEQ ID NO: 17402 - DNA, 2775 bp, Homo sapiens
  SIMILAR (3287)..(3994): 981254mologous to Cloning vector pSacBII SacB,accession number U09128,Smith-Waterman Score=1257.
atgcttcttctgcgggagcacacggacacgcgacacgaccacccgcgcacacccacaagagccacaagaagacgaagacacacagaaaagaaacgacgaaagaaaaaaagacccgctacgcacgtgctcatgaccgccacgcttataccggtgagtcggctgctggcaactgaccagccccagctctttcatgagtctgccagcaagccagcgccccatctggtatcctctctgggttgccattgtggcgatgcttcttgctccggcagagccgtggctgatgccatgcagttcaagacggtttttccagtatttgtagctgctgcgatgaaccccgaacacatggcagagagtggccacaggataacgcgccctgagtttcccgattatcgagaactgttcagggagtctgacatcaagagcgcggttgtagattcaatctgtcaatgcaacacccctttcaattatctctttcggtgttttgaacttcagtgtctttctcgacacggacatagcgcatatggtgttatgcagaggcggcattcacctatgcaggagacaagaatcgccagcttaccgttacagcgataccgctggcatgaagattccgtgcgtaaccgctggttcagcgtgatggtggggccgtctgtgcgcgtgaatgaatggttcagcgcgtatgcgatggcgggtatggcttacagccgtgtgtcgactttctccggggattatctccgccagccccttgtatctggctttcacgaagccgaactgacgcttgatgatgcgaaacgggtgctccaccctggcacggatgctggctttcatgtattcgatgttgatggccgttttgttcttgcgcggattctgcttcaaggtttttaccttgccgggacgctcggcgatcaggcagtccacattcaactcggccagctcctcgcgctgaggcgctccttggtagccggcatcgctgaaacaaatgcgactctccatgaggcgattacccggcgaagatggcatgtcgtgggcccggtggtaccaggctcgggtacgccacctgggatcgacccatgggggctaagacgagggcggattgactatgacagagagaccgaaagaagggcactccttgagaacggggcccagcagtgggtccccagacggggtaataaccggtctgcacgcaatatgcgaaaaaagcgcaatgcacagggacaaatagtgtcgagaccgaataacgacgatgtcgcactcctagcaggcatcccccgcaaggcacagcaattgggcacatacattcctgctcaaaccgtggcgataaaaaagggccaccgaagtgaccctttttcagaacttttgcgaattacgcgtaaccgtagctcatcaggcgctgataacgacgattttttaaatcttcagtgcttaacacgtcgagatcggccagatccgccagcagttgcgctttcaacgatgccgccatcgcttccgggttacgaagatcagaaatttcctgagcactggggctttgatgtcgcttccattgagaaagccctggcgcacaacgagcgcaatgaaaaccgtattcgcggtgcttcaacgatttctcaacagacagccaaaaatctctttttatgggatgggcgtagctgggttcgaaaagggctggaagccggattaacgctggggatagaaacggtctggagcaaaaagcgtatcctgacggtttacctgaatatcgccgaatttggcgacggtgtgtttggcgtcgaagctgcggcacaacgttatttccacaaacccgcgagcaaacttacccggtcggaagctgcattactggcagctgtattacctaatccacttcgtttcaaagtctcctcgccatcgggctacgtgcgtagccgtcaggcgtggattttacggcagatgtatcagttaggcgaggatattctgcggcttcagcgacatcgtcgagatacggttatactgccaataaaggttcagctggttcaggaactgggcagtgtgaacggttcatgggaaggattgggaaaaaatccggccagtcccgacgccaaggaacacggcatcgtaatcactcagcagatcgtccagctgtacgtcgcggcccacttcggtattgagtttgaattcaatacccatgccggtgaagatttcacggcgacgcgtcattacctctttttccagcttgaaggccggaataccgaaggtcagcagcccgccaatttctggatgacggtcgaagacaacggcttttacgccgttacgcgtcaggacatccgcacacgccagacctgccgggcctgcgccgataatcgccacttttttaccggtctgtttcacaccagacatatccggacgccagcccatctcgaacgctttatcgttgatatagcgctcaatgttgccgatggtcaccgcgccaaactcatcgttcagagtgcaggaaccttcgcacagacggtcttgcgggcagactcgtccgcaaacttccggcagggtgttggtctggtgcgacagttccgccgcttcaaaaatacgcccctcgttggcgagcttcagccagttcgggatgtagttgtgtaccgggcatttccactcgcagtatgggttgccgcacgacaggcagcggtcagcctgcgctttggcctggccttcggaaaacggctcgtaaatttcaacaaactcaattttgcggatcttcagcggtttctttggcggatcaacgcgctgcaggtcgataaattgataacattctga

SEQ ID NO: 17403 - DNA, 1184 bp, Homo sapiens
  SIMILAR (370)..(1032): 931254mologous to Rattus rattus ribosomal protein S2,accession number X57432,Smith-Waterman Score=1051.
atgaataatgacaataccgattacggggcggcgttaacggcggcggcgttgttgcagcgctgccctggctttggcacggcaaagagtcgtggaatgcgctgttgctactttaactggcggcctgacgctggccccgatatgtctggtgttctggcctatctcgccaataacacctggctgccgctcgcgggcattgttcagcggctggcggcagataacgccagcgtgaagcagaggggcagctcatcgaacaactatcgctgggcgtttacgacgcgtgaccatctggctgggtaccgcggtataactcaacggacaagtttagccgacgatccaaaatctggtaagaggtccaacgaggaattggccgtaagaaccgttaattccatgcgtgtatatgtcccaatgtccatgcacagccaaatgggaaggaatcggggatcaagtgggtcacatatgatcggcctggacccacgaagtacagaacaagagaccagaaggataaaaaatgcattagggaggcactacatagtattagctccttctgatgccattctatttcaggaaggagtgtccgttaactcaggctacctcaggaaaaaccgtcctgaaaaaccagacggcagacgggctgtattacgcagtcaggtacttgagctacatggcatcagccacggttcggccggagcaagaagcatcgccacaatggcaacccggagaggctaccagagggacgctggcttgctggcaggctcatgaaagagctggggctgacaatgcacgagttaatgtcgccatgaaccagacccggatcaatcatcttgccgttcgtcggttaaccgagctttccggcggtcagcgccagcgcgcatttctggcaatggtcctggcccagaatacgcccgttgtattacttgatgagccaaccacctatcttgatatcaatcaccaggtggacctgatgcggttgatgggcgaactccggactcaggggaaaacggtggtcgctgtgctgcacgaccttaatcaggctagccggtactgcgatcaactggtggtgccggcgactaccttatgaggggacgcaagcccgccgaatttataaatttgaacgaaccggagcaaatgcggccggagcagttgctattattacagttataccagcggaatcctacacggattga

SEQ ID NO: 17404 - DNA, 396 bp, Homo sapiens
  SIMILAR (165)..(1): 831254mologous to Escherichia coli yehO,accession number U00007,Smith-Waterman Score=203.
  misc_feature (1)...(396): n = a,t,c or g
taatgagcagcttgagtcttaagtttttgaatacaccgatggaaggtgacaaagattctttgcttggccaaactttagtcagactcctcaaccttctcgtaggtttatctgtgcatttccttggaaaatccagttagaaccctctaccctcaatatctgatcaggttcctcatcctctaccatccaaggtgatgtctgatcaccttgacctattttcagcaagaaacccctnnnnnnnnnnnnnnnnnnnnnnnnnnnnnnnnnnnnnnnnnnnnnnnnnnnnnnnnnnnnnnnnnnnnnnnnnnnnnnnnnnnnnnnnnnnnnnnnnnnnnnnnnnnnnnnnnnnnnnnnnattcagaatccccattgccatggntgctatacctatcctggagg

SEQ ID NO: 17405 - DNA, 381 bp, Homo sapiens
  SIMILAR (379)..(248): 931254mologous to Homo sapiens Alzheimer's disease protein encoded by DNA from plasmid pGCS1984,accession number W21586,Smith- Waterman Score=194.
  misc_feature (1)...(381): n = a,t,c or g
ntagcaaccatggcaatgggattctcaatnnnnnnnnnnnnnnnnnnnnnnnnnnnnnnnnnnnnnnnnnnnnnnnnnnnnnnnnnnnnnnnnnnnnnnnnnnnnnnnnnnnnnnnnnnnnnnnnnnnnnnnnnnnnnnnnnnnnnnnnnaggggtttcttgctgaaaataggtcaaggtgatcagacatcaccttggatggtagaggatgaggaacctgatcagatattgagggtagagggttctaactggattttccaaggaaatgcacagataaacctacgagaaggttgaggagtctgactaaagtttggccccgcaaagaatctttgtccccttccatcggtgaattcaaaaacttaagactcaagctgctcatta

SEQ ID NO: 17406 - DNA, 412 bp, Homo sapiens
  SIMILAR (228)..(347): 521254mologous to Homo sapiens DNA topoisomerase II binding protein,accession number AB019397,Smith-Waterman Score=105.
gaaaaggcctggctctgggatcacggaagccacgtcctctcggcgtcaaaggcccacccgccggctccagggccagttaccaggacaggaaaagagggtcctgaaggccacagaaggcatcgcgaaccccagttggggctggggaggagctgtgtccccactccgcgcctcacttacctcgttgagacacaaaataaacaaccattataacactgagaactggaaactccccataaaagacagcccacctgatcccttcgcctcaagcccccagtatgccctttccactcgccaaccccccctggggctccgcaccctagagaaaagatgtggaacccacagatacaaggaactaactgtatatgggtttgtggtccctgaagactttggtgaaaacagggaaaggttatga

SEQ ID NO: 17407 - DNA, 777 bp, Homo sapiens
  SIMILAR (336)..(208): 951254mologous to Homo sapiens Alzheimer's disease protein encoded by DNA from plasmid pGCS1984,accession number W21586,Smith- Waterman Score=193.
ttattcagatggctggttgttcactgggagctcaactagggccattgactgaaatgtctccacctggcttcttcgtgtggcttgagcttcccacaatatagcaatacagcagctgggctttgagcaggagtatcctaagagcaagtgttctgggctgcttacatagccttctctgctagaaaagatccctgatgtctggcagcatgagatgagaaggttgaggagtctgactaaagtttggccaagcaaagaatctttgtcaccttccatcggtgtattcaaaaacttaagactcaagctgctcattactatctttaggctctccacgtttgacatttccgctcttctgctgcagctgccgatggcgtcacttccaccggaaaaggcaagcgcggccgcgcggttggcgcgaaagtcggttcccgttctgggcaatttccgggttctccagcgtttgctttggggtaggggcggcgccgagtcgggggagggggctgtgcgccgggctggcgcccgaccccagccaccgccctgcggccagcgcgtcccccgactcgccgcccggagaccccgaggctccaacgaggtaagtgaggcgcggagtggggacacagctcctccccagccccaactggggttcgcgatgccttctgtggccttcaggaccctcttttcctgtcctggtaactggcccttggctttgtccaagttccagggtttcttagaaatgccgttgacgaattcacgggcagagccagaatgtctgtctttaggcat

SEQ ID NO: 17408 - DNA, 622 bp, Homo sapiens
  SIMILAR (158)..(301): 681254mologous to Homo sapiens Alzheimer's disease protein encoded by DNA from plasmid pGCS1984,accession number W21586,Smith- Waterman Score=122.
taaaaaaattttttcttattttataaaatctagccactatactaatgaggatcattttattattcactgctgagattgagaaaatgactttggatttactaatgtaaaagtataatgccatgtcccttgattgtttttgtttttcttttctttttagagcctaaagatagtaatgaggcagcttgagtcttaagttttttaatacaccgatgggaaggtgacaaagattctttgcttggcccaaactttagtcagactcctcaaccttctcgtaggtttatctgtgcatttccttgggaaaatcccagttaggaaccctcttacccctcaatatctgatccagggttcctcatcctcttaccatccaagggtgatgtctggattcaccttggacctattttcagcaagaaacccctttactcctgaagttccttcttagtaattttttatccagtgaccccaagctttttgttccttggctataaattcccacttgcccatgctgtatttagagttgagcccactctctctctcctaattcagaattcccattgccatggttgctatacctatcctgatggtccggaataaaatctgtcttactgtgctttaaaaaaaaaaa

SEQ ID NO: 17409 - DNA, 2664 bp, Homo sapiens
  SIMILAR (420)..(2261): 1001254mologous to Homo sapiens helix-loop-helix protein,accession number M80627,Smith-Waterman Score=3191.
tcaaacatcctcctttagctcggagaactttgttattaccaaccttctgaagcctacttctgtcaactcatcaaactcattctctgtccagttttcttcccttgctggtgaggagttgtgttcctgcaggtctgttggaggttgccggaggtccactccagacgctgtttgcctgggtatcaccagcagaggctgcagaacagcaaatattgctgcctgatccttcctctggaagcttcgtcccagaggggcacccacctctatgaggtgtctgttggcccctactgggaggtgtctcccagtcaggctacacctccatgggctgcactcactgtccaaccagtcccagtgagatgaaccaggtacctgttgcgggaagtcagggaccccgaatggagggaccggtaaaatgactggcaaaagtactgagtcataagcaatattcagggagagaaagaagctctcttgctccaacattgtcatatatcccctgttgtttcctgactttttaatggtcgccattctgactggtgtgagatggtatctcattgtggttttgatttgcatttctctgatggccagtgatgctgagcattttttcatgtgtcttttggctgcataaatgtcttcttttgagaagtgtctgttcatatcctttgcccactttttgatggggttgtttgtttttttcttgtagatttgtttgagttcattgtagattctggatattagccctttgtcagatgagtagattgcaaaaattttctcccattctgtaggttgtctgttcactctgatggtggtttcttttactgtgcagaagctctttagtttaattagatcccatttgtcaattttggcttttgttgccattgcttttggtgttttagacatgaagtccttgcccatgcctatgtcctgaatggtattgcctaggttttcttctagggtttttacgtttttaggtctaacatgtaagtctttaatccatcttgaattaatttttgtataaggtgtaaggaagggatccagtttcagctttccacatggcttgggcagtatggctattttcacaatattgattcctcctatccatgagcatggaatgttcttccatttgtttgtatcctcttttatttcttcgagcagtggtttgtagttctccttgaagaggtccttcacgtcccttgtaagttggattcctaggtcttttattctctttgaagcaattgtgaatgggagttcactcatgatttggctctctgtttgtctgttcttggtgtataggaatgcttgtgatttttgcacattgattttgtatcctgagactttgctgaagttgcctatcagcttaaggagattttgggctgagaggatgggattttctagatatacaatcatgtcatctgcaaacagggacaatttgagttcctcttttcctgattgaataccctttatttccttctcctgcctgattgctctggccagaacttccaacactatgttgaataggagtggtgagagagggcatccctgtcttgtgcctgttttcaaagggaatgcttccagtttttgcccattcagtatgatattggctatgggtttgtcatagatagctcttattattttgagatacgtcccatcaatacctaatttattgagagtttttagcatgaagcgttgttgacttttgtcaaaggccttttctgcatctggtcctggactttttttggttggtaagctattaattattgcctcaatttcagagcctgttattcgtctattcagagattcaacttcttcctgatttagtcttaggagggtgtatgtgttgaggaatttatccatttcttctagattttctagtgtatttgcgtagaagtgtatatagtattctctgatggtagtttgtatttctatgggattggtggtgagatcccctttatcattttttattgtgtgtatttgattcttctctccttccttctttattagtcttgctagcggtctatcaattttgttgatcttttcaaaaaaccagctcctggattcattgattttttgaagggttttttgtgtctctatttccttcagttctgctctgatcttagttatttcttgccttctgctcgcttttgaatgtgtttgatcttgcttctctggttcttttaattgtgatgttagggtgtcaattttagatctttcctgctttctgttgtgggtatttagtgctataaatttccctctacacactgctttgaatgtgtcccagagattctggtatgttgtgtttttgttctcattggtttcaaagaacatctttatttctgccttcatttcgttatgtacccagtagtcattcaggagcaggttgttcagtttccatgtagttgagcggttttgagtgagtttcttaatcctgagttctagtttggttgcactgtggtctgagagacagtttcttataatttctgttcttttacatttgcttaggagtgctttactactaactaagtggtcaattttggaataagtgagatgtggtgctgagaagaatgtatattctgttgatttgggatggagagttctgtagatatctattaggtccacctggtgcagcgctgagttcaattcctggatatccttgttaactttctgtctcat

SEQ ID NO: 17410 - DNA, 1182 bp, Homo sapiens
  SIMILAR (299)..(754): 981254mologous to Escherichia coli f404,accession number L10328,Smith-Waterman Score=775.
tcaggcctctcttctgcaggtctgctgcggttgctggacgtccaatccagaccctgttctcctgggtatcaccagtggaggctgtagaacagcaaatattgctgcctgctccttcctctggaagctttgtcccagaggggcaccaacctgatgccagctggagctgtcttgtatgaagtgtccttcgacccctgttgggaggtctctcccagtcggatgcacaaggtcagggacccagctgaggtggcattcggtcccttggcagagctggtgcactgtgctgggagaatccctcttgtcaggattagttgttctcttcagagccagcaggccagaatgatgaaatccgctgaagctgctcccacagctaccccttcccccagatgctctgtcccagggagatggtagttttgtctgtaagcacccgactggggctgttacctttccttcagggatgcccttgggcagtatgaccattttcaaaatattgattcttcctatccatgagcatggaatgttcttctctttgtctgtgtcctcttttgtttcattgagcagtggtttgtagttctccttgaagaggtccttcacatcccctgtaagctggattcctaggtattttattcctatttggctctctgttagtctgttattggtgtataagaatgctcgtgatttttgcacattgattttgtattctgagactttgctgaagttgcttatcagcttaaggagattttgggctgagtcaatggggttttctaaatatacaatcatgtcatctgccaacagggacaatttgacttcctcttttcctaattgaatacacgttatttctttctcctgcctgattgccctggccagaacttccaacactctggtagaattcggctgtgaatccatctggtcctggacttttttggttggtaagctattaattattgcctcaatttcagagcctgttattggtctattcagggattcaagttcttcctggtttagtcttaggagggtgtatgtgtccaggaatttatcaatttcttctagattttctagtttatttgcatggaggtgtttatagtattctctgatggtagcttgtatttctgtgggatcggtggtaatatctcctttatcattttttattccatctatttggtttttctctcttttcttcttcat

SEQ ID NO: 17411 - DNA, 627 bp, Homo sapiens
  SIMILAR (624)..(454): 841254mologous to Homo sapiens Human secreted protein, SEQ ID NO: 7284,accession number G03203,Smith-Waterman Score=250.
tcaggcctctcttctgcaggtctgctgcggttgctggacgtccaatccagaccctgttctcctgggtatcaccagtggaggctgtagaacagcaaatattgctgcctgctccttcctctggaagctttgtcccagaggggcaccaacctgatgccagctggagctgtcttgtatgaagtgtccttcgacccctgttgggaggtctctcccagtcggatgcacaaggtcagggacccagctgaggtggcattcggtcccttggcagagctggtgcactgtgctgggagaatccctcttgtcaggattagttgttctcttcagagccagcaggccagaatgatgaaatccgctgaagctgctcccacagctaccccttcccccagatgctctgtcccagggagatggtagttttgtctgtaagcacccgactggggctgttacctttccttcagggatgcccttgggcagtatgaccattttcaaaatattgattcttcctatccatgagcatggaatgttcttctctttgtctgtgtcctcttttgtttcattgagcagtggtttgtagttctccttgaagaggtccttcacatcccctgtaagctggattcctaggtattttattcc

SEQ ID NO: 17412 - DNA, 832 bp, Homo sapiens
  SIMILAR (813)..(595): 1001254mologous to synthetic construct lac repressor,accession number A14595,Smith-Waterman Score=349.
tcaggcctctcttctgcaggtctgctgcggttgctggacgtccaatccagaccctgttctcctgggtatcaccagtggaggctgtagaacagcaaatattgctgcctgctccttcctctggaagctttgtcccagaggggcaccaacctgatgccagctggagctgtcttgtatgaagtgtccttcgacccctgttgggaggtctctcccagtcggatgcacaaggtcagggacccagctgaggtggcattcggtcccttggcagagctggtgcactgtgctgggagaatccctcttgtcaggattagttgttctcttcagagccagcaggccagaatgatgaaatccgctgaagctgctcccacagctaccccttcccccagatgctctgtcccagggagatggtagttttgtctgtaagcacccgactggggctgttacctttccttcaggatgccctacccacaccctgcaggcatgagcaagctttgggacccctgctgccccactggcgtgcacccatgtgggggatgaccacaagcccactggagtacctttgctagcagcgtctgttagtgttgtcaccaatgggtgcccgctttccagtcgggaaacctgtcgtgccagctgcattaatgaatcggccaacgcgcggggagaggcggtttgcgtattgggcgccagggtggtttttcttttcaccagtgagacgggcaacagctgattgcccttcaccgcctggccctgagagagttgcagcaagcggtccacgctggtttgccccagcaggcgaaaatcctgtttgatggtggttccgaaatcggcaaaatcc

SEQ ID NO: 17413 - DNA, 477 bp, Homo sapiens
  SIMILAR (440)..(475): 911254mologous to Homo sapiens Human secreted protein sequence SEQ ID NO:103,accession number Y87064,Smith-Waterman Score =53.
atgggagtgggcacaaagtgtgaagagctttctatggcttgtgaatacccaccagaaagcattattgtagaaaaatcacggaactacaaagtagactggtcagagcaagcaggctacccagaacaggtggtaaccagcccagatccagactttatcttctcaaagtcatccctctgccctctgcccaaggaatttgatgtggacatgcagtttctccaagggcaatattttaaaaatatttttactaaaatatctccaatagtggctacaggtgatagtgaagaatcttttggagaaaagtcaggcccctcttctgcagctctgctggagtttgctgagagtccactccagaccctgtttgcctgtgtatcaccagcagaagctgcagaacagcaaagattgctgcctgctccttcctttggaagctttgtccaagaggggcacccgtcagatgccagccagagctctcctgtatga

SEQ ID NO: 17414 - DNA, 2424 bp, Homo sapiens
  SIMILAR (171)..(37): 801254mologous to Homo sapiens Human secreted protein sequence SEQ ID NO:103,accession number Y87064,Smith-Waterman Score =183.
tcatacaggagagctccgactggcatctggcaggtgcccgtctgggacaaagcttccagaggaaggagcaggcagcaatctttgctgttctgcaacctctgctggtgatacccagacaaacagggtctggagtggacctccagcaaactccagcagacctgcagcagaggggtctgacggaacggagaccgagacaagggcagaaacactacccattaaagtcgacgaacccactgaacgaaccaaagaactccacgggggaacccctaggttgcaggtagtttttaagaaactttgtctttttctgaaattctgaactgttttgtgttcttggctattagtaggcatgtgaatttctgactccgttttttcttttatctcctcacaatttcttatagttatttcatctccactgatgttattagttaattcctcatctggtttgtgagaaatttccttcttttctctttgactaagttttgagatgttggccaattctttactcatattgtcagtggaatgagaatctatattgtgtatagtctcactttctagatggttttgtctccttttttcaactttagttgtttctattacttgagaatgagcaactatggataaaggctcatttgaataaattattttttggtctctgtcaatgtaattcctctcagtgtcacaattctttgccatcttttccacaatatgtgtatctgtttgattcattaaaaaagttggtgctctgggaatataatcctgtggctttttgaatagctccacatgattagtcaactttgaagcctcatgtgtcaaaagtgttctcatacaagccagggaattttgctcaggattgccatttgagtgatcaaaagaaggtccaaatatgcattgttcataatttgcaacatgttcagaaataactgcattatctgaataagaaaaattaacagcttcctgttctggaagtgtggttaggctgactgcttttaactcattttcctgtgaaagatgatcttcagaaagtaaaaactgttggaaacccatttcttttttatttgttaaattctccttaaaattatagtgttttttgccacctgtagaacacaacacctttttagatgttatagccttctcagaggtagagcaatcatcatcatcatcattatcagaattttcctttacaaaggataggaaagaattttcccatttgttaaatctctcatcttttgggaccaagttactgttttcatgagatttataaagtacatggtgttgttcctggagagtgtgaggctgcttatctgtagtaacaactggtaacttgatttctttatgtaataaaagctctgggaaagaaacagcttcagtttggtcaacagattctaattccaagcattgaacttcttgactatctgataaatccaggttctggatgtgtttctctttggaaactgaacaagcctcagtactgctatctaatccatttctcaggcttgacagagttaagctggaaggttcacacaattcttctggaaggtcattatgagtttctggaatatgctgctgataggtaaccaatctgtttattctcctggaaggagagacagctagtatctttcttggattacagtctacatcatctacttgggtccttttatgttgtgtttttcttcttcctataccttttggtacgtttgtgttgggatctttgacgttatggagattgccctttctgagtcctgtagagtatatctggtcaagagttgattgtttatgcttggatttaccaaattttgtgtttttgggatctttttggtaatattcatatacatcttctttatttataaataaactcgctttgcttcctttattgacttttacatgttccagcttctgtctgttggaattttcattataaacatgccaaatgtgacttttagaactgaactttggtttactagttactttatgtgcagtaaagcagcggtccccaacctttttggcaccagggaccagtttcatggaagataatttttcccaggatggcggttgggggtatggtttcaggatgaaactgttccatctcaggtcatcaggcattagagtcttataaggagtgtgcaaccttgatccctcacatgtgcagttaacagtagggtttgcactcctatgagaatctgatgctgctgcttctgcggtgcagcctggttcataacaggccacggatgggtactggtccgtggtccagggattggggacctctttctcaagcagaaggccttctgcacctttctcaccatagccaccacagctgtcaatgtgctgggtctgacatgaaaccacatgtgagaatcttaggttttcttttaagtagacacctcctatctgctcttggaacacatcacttgtatcttcatccaccat

SEQ ID NO: 17415 - DNA, 1014 bp, Homo sapiens
  SIMILAR (763)..(1008): 851254mologous to Homo sapiens putative p150,accession number U93570,Smith-Waterman Score=361.
atgagcagactctatgagcagagaatggccctcagctggcagcaagcaagaaagcagggatctcagtcgtacagctgcaaggaacagtatggaaagatagaccaacaaccacaaccatgttctgtccaggaaactttgcattcagtcaaaagtgttacaaagttcagctggaagttttcttctccctgtggtcttttcccagttcctctggcatccctccccaaggatccgcgtgagacagaaatggctttcctggggactgagagagcccacagggctctttttgctgcttcttctaccccgtactttgttcggctctctaaattcttctcagctccaggcaaaagccaagatactcatttatgtagacatcagacctggggacttatgattgaaatgggaaatgcagaatgttggaatcatattcatttcatgtcaactacatgtgaagagaaacagaagtcctttaaaggggtcaacagacacctcatgcaggagagctccggctggcatctggcaggtgcccctctgggacgaagcttccagaggaaggaacaggcagcagtctttgctgttctgcagcctctgctggtgatacccaggcaaacagggtctggagtggacctccaggaaactccagcagacctgcagcagagggtcctgactgttagaaggacgactaacaaacaaaaaggaatagcatcaacatcaacaaaaaggacatccacacagaaaccccatccgaaggacaccaacatcaaagaccaaagatggattaaagacttaaacgtaagacctaaaaccataaaagccctagaagaaaatctaggtgataccattcaggacataggcatgggcaaagacttcatgactaaaacaccaaaagcaatggcaacaaaagccaaaattgacaaacgggatctaattaaactaaagagctcctgcacagcaaaagaaaatatcatcagaatcaacaggcaacctacagaatgggagaaaatttttgcaatctag

SEQ ID NO: 17416 - DNA, 1005 bp, Homo sapiens
  SIMILAR (4)..(129): 731254mologous to Homo sapiens Human secreted protein sequence encoded by gene 11 SEQ ID NO:72,accession number B24447,Smith-Waterman Score=150.
tcataccccagtggtgcctggaatgccagccagacagaaccgttcactcccctggaaagggggctgaaaccagggagccaagtggtctagctcagcagatcccacccccatggagcccagcaagctaagatcccctgcattgaaattctcgctgccagcacagcagtctgaagtcaacctgggacactcgagcatggtggggggaggggcatttgccattactgaggtttgagtaggcagttttcccctcacagtgtaaacaaaaccacctggagtttgaactgggtggagcccactgcagctcagcaaagccactgtagccaggctgcctctctggattcctcctctctgggcagggcatctaggagagctctggctggcatctggagagtacccctctgggctgaagcttccagaagaaggaacaggcagcaatcttcgctgttctgcagcctccgctggtgatacccaggcaaacagggtctggagtggacctgcagcaaacttcagcagacctgcagcagaggggcctgccttccacgctctgagaggccccagtgtgcattgttcccctctatgtgtccatgagttctcatcgtttagctcacttataagtgagaacatgcagtatttggttttctgctctggcgttagatttctaaggataatggtcatcagctctatccatatcctctgcttggtccctaaaaggacacgggttctggggaggctctctttaacttgctttaggttcttaagaggtcccaaggagcccagaattaccataccacacagctcagcccctccactcgggcatgtgatagctattcccctaccctgaagcttcatgaagccctcaccagaagcagatgctcccatgactggaagcttcctgaagtccccgtcagaagcagatactggtgccacacttcctgtacagtcagttgttcccattccactctctattctcccaatccttgaagtaggtggagtcttgttcaccat

SEQ ID NO: 17417 - DNA, 1527 bp, Homo sapiens
  SIMILAR (185)..(340): 1001254mologous to Homo sapiens glucocorticoid-induced TNFR- related protein ligand,accession number AF125303,Smith-Waterman Score=281.
atgggaaaggactccataaagatgcctaatgataaggcaaaaagaagggagagaaccaaaagagaatcatatcctagaaaccaagataagaagcagtctcaagaaatttttgtgaaggaaactgaagctcagagaactcaagtaacatgcctaaggccacagagcagctctcatttctccaaaaatgtgtttgagccacttggaaaatatgcctttaagccattcaagaactcaaggagctcagagatcatcctggaagctgtggctcttttgctcaatagttatgttgctatttctttgctccttcagttggctaatctttatttttctccaattagaggaccattaccctcaaaatggcaaatggcatcttctgaacctccttgcgtgaataaggtgtctgactggaagctggagatacttcagaatggcttatatttaatttatggccaagtggctcccaatgcaaactacaatgatgtagctccttttgaggtgcggctgtataaaaacaaagacatgatacaaactctaacaaacaaatctaaaatccaaaatgtaggagggacttatgaattgcatgttggggacaccatagacttgatattcaactctgagcatcaggttctaaaaaataatacatactgggatatggtggtgttagaagataaagaacaatctgagaactattggaatagaggtacaagtggcataaaatggaatgtacgctatctggaaatttctcttggttttatcttcctcaggatgcagggtgctttaaaaagccttatcaaaggagtcattccgaaccctcacgtagagctttgtgagaccttactgttggatttttgtgtggatgtcatttttgttgatgttgatgctattcctttccctttgttagttttccttctaacaggaccttcttctgcaggtctgctaaagtttgctgaaggtccactccagaccctgtttgcctgggtatcaccagcagaggctgcagaacagcaaagattgctgcctgttcttccttctggaagctttgttccagtggggcaccaaatggcagagtttttcaaagtgaggctcgtggatgttgtattagattcaccaaagatgcttggaaaaaaaaaggtatttgttgtagcaaataattgctgtcttagttcatttatgctcctggtaccaatttctgtcttagttcatttgtgctgctgtgacagaatattacagactgtgtaccttataaagaacggaaatttatttctcatagtcttgggatctggaaaacccaagattaaggtgctggcatctgttgtgggtcttcttgctacatcctcacttgcagaagagagtacactcacccctttccaggtggttcagcacagagagagaggcttcatatgttttggagaaagtaagcgaaaagaacaagggtctctcctggtaacccagataattattccagattttatccaagacaaccaaggtggtacctctacgagtctggaaaaagcacagcattattga

SEQ ID NO: 17418 - DNA, 1143 bp, Homo sapiens
  SIMILAR (315)..(701): 601254mologous to Homo sapiens Human secreted protein sequence SEQ ID NO:195,accession number Y87156,Smith-Waterman Score =364.
tcagctattgatacctgtgtatgcttctcgaagttcttgtgctgtgtttttcacctccatcaggtcatttatgttcttctctgaactggttattctaattagcaattcatctaaccttttttcaaggttcttagcttccttgcattgggttagaacatgctcctttagctcggaggagtttgttattacccaccttctgaagcctacttctgtcaattcatcaaactcactctccgtccagttttgttcccttgctggcaagaagttgtgatcctttgtaggagaataggcattctggtttttggagttttcagcctttttgcactggtttctccccatcttcgtggatttatctacctttgatctttgaagtcggtgatcttcggaggacgtctctgagaggacatcctttttgttgatgttgatattattcctttccctctgtttcaggtctactggagtttgttggaggtccactccagaccctgtttgcctgggtatcaccagcagaggctgcataacagcaaagattgctgcctgttccttcctctggaagctttgtccaaaaggggcacctgccaggtgccagccagagctctcctgtgtgaggtgatagatgcatggtcggcccctactgggaggtgtctcccagtcaggatacacgggggtcagggacccacttgaggaggcagtctgtcccgtatcagagttggaacgctgtactggaagatccgctgctctcttcagagcgaccttcccccaggtgctctgtcccaggaaggtggggattttatctgcaagtccctgacgggctgctgcctttttttcagagatgcgcaagacctctgcgtaggagggtttgggtgactcagactgctgatcgaggaaaatgggtgctccgaatgcctgatgatctgcctggtcatggagcagagagggccttgctgcaccatgatctatgtttagctctctttctgccgactcctctgctgactgcaagctccctgagggcaaggtccaaccagcatctagcacaggactcacagcacgagcctctaaagatttgtacttctgctgttgtttttcaatttcagcaagagcctcctgatctagcagccaagactccccctgacctttggccat

SEQ ID NO: 17419 - DNA, 867 bp, Homo sapiens
  SIMILAR (413)..(375): 611254mologous to Homo sapiens Human secreted protein sequence SEQ ID NO:103,accession number Y87064,Smith-Waterman Score =40.
atgagggaccgtgctgtaagggatggtgctgtccagcccagatactatgcttttcccacggtcttcataacctgcagaccaggagattcccttaggtgcctacaccaccagggccctaggtttcaagcacaaaactggtcagccatttgggcagacatcaagctagctgcaggagttttttcccataccccagtggtgcctggaatgcaggagagctccagctggcatctggtgggtgcccctctgggacaaagcttccagaggaaggagcaggcagcaatctttgctgttctgcagcctccactggtgatacccaggcaaacagggtctggaatggacctccagcaaactccagcagacctgcaggagaggaggctgactgttagaaggaaaactaacaaacataaagcaataacattaacatcaacaaaaaggatgtccacgcaaaaaccccatccgaaggtcaccaatatcaaagatcaaagatgtgaagctggtgtcagggagaggtgggagaggaggtgcagatccaaacggagctcagacctgcattcaggaaaccccggttcactgtcgaaagggaaggacagaaatgcccgggaaattcacaccttcagaagaggcatttcttctccaactgtacccctgggaagtttatacattgattggttcagagataaacatgtgactcaatttgggccaatgagagtcaagcataggaattttgtttacgctcatgaggaagagaaacactctatttctgtgggacgtggagctaggcggagtgagtctggagctaccaggggtgaccacagagaaaggctgtctgagaataaagccaacagagtgaagcagaatgcagaggtg

SEQ ID NO: 17420 - DNA, 1002 bp, Homo sapiens
  SIMILAR (121)..(255): 641254mologous to Homo sapiens mitochondrial citrate transport protein,accession number X96924,Smith-Waterman Score=131.
atggcgtcccgggccggcaccgcggcctcggctccctgctctgcggctcttgtctccagggcggcgttgggttctgaatgttccagttccacagcagccagacgcgggatgcccagggacggcctgacggcagcgctggctgcgggcgctggcgtggccgaggccatggtggtcgtatgttccatggacaccatcaaggtgaagttcatccacggccagaccttcccagacctccagtgcagaggagtctcccaccagctggtaccgaggggacaaccccagcaagcccatggacccgctggtcgctggggtcttcggagccattgtgggcgcagccagtgtcttgggaaacgctcctctggatgggatcgagaccggatgcggggcctggagcagcacaaacgcggaacacaccggcctatggctgcagatcctgaggaaggaggggctcaaggacctctagaacggcactgtcccccgcctgggccgctggaccgcgtctccctggatgtgaccagggataagggtaacagtatttatcctctaccaggaggtggagaagctgcacaacagtgtggaggatggactaagcccagagggaggagagccccagctggcatcaggccagtgccccctctgggacgaagcttccagaagaaggagcaggcagcaatctttgctgttctgcagcctctgctggtgacacccaggcaaacagggtctggagtggacctccagcaaactgcagcagacctgcagaagaggggcctgactgttagaagaaaaactcacaaacagaaagcaacaacatcaaaatcaacaaaaaggacccccacgcaaaaacccaagccaaaggtcatcagcctcaaagatcaaaggcctgccttacgagagcttctgaaggaagcactaaatatggaaaggaaaaaactggtaccagccactgcaaaaacacaccaaaatgtaaagaccagcgacactatgaggaactgcatcaactaa

SEQ ID NO: 17421 - DNA, 1581 bp, Homo sapiens
  SIMILAR (667)..(1353): 821254mologous to Homo sapiens p40,accession number U93569,Smith-Waterman Score=961.
atggccaaaaaggaacagcttctgtctgcagctcccagcaagaccaatgcagaaggccaggagattccctcaggtgtctacaccaccagggccttaggtttcaagcacaaaactgggcagccatttgggcagacaccgagctacccacaggagtttattttgtacaccaatgacacgtggaatgccagcaagacagaaccgttcactcccctggaaaggggattgaagccagggagccaagagagctctggctggcatctggtgggcacccctctgggaagaagcttccagaggaaggagcaggcagcaatctttgctgttctgcagcctccactggtgatacccaggcaaacaggatctggagtggacctccagcaaactccaacagacctgcagaagagggtcctgactgttagaaggaaaactaacagcatcaacatcaacaaaaaggatgaccatgcaaaaaccacatccaaaggtcaccaacagcaaagaccaaaggtagataaatccacaaagatgaggaaaaaccagtgcaaaaaggccacaaattccaaaaaccagaatgtgtcttctcctccaaaggatcacaactcctcaacagcaaaggaacaaaactggatggagaatgagtttgacaaattgacagaagtaggattcagaagtagccaattcgatcaagtggaagaaaggatatcagatattgaagataaacttaatgaaataaagcatgaagacaaaattagagaaaaaagaatgaaaaagaaggaacaaagcctccaagaaatatgggaatatgtgaaaagaccaaacctacgtttgattggtgtacctgaaagtgacggggagaatggaaccaagttggaaaatacacttcaggatactatacaggagaacttccccaatctagcaagacaggccaacattcaaattcaggaaatacagagaacaccacaaagatactcctcgagaagagcaaccccaagacacataattggtagattcaccaaggttgaaatgaaggaaaaacggttaagggcagtcagagagaaaagtagggttacccacaaagggaagctcatcagactaacagcagatctctctgcagaaaccctacaaggcagaagagagtgggggtcaatattaaacattcttaaagaaatgaattttcaacccagaatttcatatccagccaaactgagcttcataagtgaaggagaaataaaatgctttacagacaagcaaatgttgagggatttcgccaataccaggcctgccttacaggagctcctgaaggaagcactaaatatagaaaggaaaaaccggtaccggccactgcaaaagcaaatcaaaaaccactctgggttccaagcacagattttgaatcaggtgtgtgtgaaatacaaacagggctttagtcgggaagaaaaagatgaagctcgagccttaacaagcaaaatgaacatgttaataaaagccacgcacagtctcaagtccgtactgtacgacatctatttaattgttggacctcatcaactagatcccatcaatggactacttcttaaatccatccactcctag

SEQ ID NO: 17422 - DNA, 1326 bp, Homo sapiens
  SIMILAR (877)..(1317): 691254mologous to Mus musculus zinc finger protein ZFP113,accession number AF167320,Smith-Waterman Score=555.
atgaacattaaagatacttctgcaaaacccaagagagaaaagcgaggaatccaagaacaacccatagagaatccaactgccgaaacgtatgcacgccccaaaaaacgaggaacaactgacaaggattttgacaatgctatcaccagaaacactgctaattttgaagaggacagagacaggatgaaaagaagaaaagctgtccaacttctggtattacaaaagcaggaaacgaggtcccactcccatggagcccagcaagctaagaaccactggcttgaaattctcactgagggcacagcagtctggagttggactgggatgattgagtttggtgggaagcggggcgatggccattactgtggctttagggtcggcagacgcctcatacaggagagctctggctggcatcaggcccgtgcccctctgggacaaagcttccagaggaaggagcaggcagcaatctttgctgttctgcagtctccactggtgatacccaggagaacagggtctggagtagatcttcagcaaactgcagcacacctgcagaagaggggcttgactgttagaagaaaaacaaacaaacagaaagcagtaacatcaacatcaacaaaaaggatgcccacgcaaaaactccatccaaaggaacgcagttcctcaccagcaacggaacaaagctggatggagaatgattttgacgagctgagagaagaaggcttcagacgatcaaattactctgagctacgggaggacattcaaaccaaaggcaaagaagttgaaaactttcaaaaaaatttagaagaatgtataactagaataaccaatacagagaagtgcttaaaggagctgatggagctgaaaaccaaggctcgagaactacagagaccttatgcatgtaaagaatgcggcaaagccttcagtttgagctcagaccttgttagacatcagagaaaacatagtggtgaaaaaccctatgaatgttgtgaatgtggaaaagccttcaggggcagttcagagctcatcaggcatcggagaatccacactggagagaagccttatgaatgtggagaatataaaagttatgaatgtattgcatgtggtaaggcttttggtaggagttctacccttattgaaaatcaaagaattcacactggagagaaaccttatgaatgtaatgaatgtggaaaatccttcaatcagagctcagccctcacccagcaccagagaattcacactggagagaagccttatgaatgtagtgaatgtagaaaaacatttaggcataggtcaggccttatgcagcatcagagaacacacaccagagtttaa

SEQ ID NO: 17423 - DNA, 2562 bp, Homo sapiens
  SIMILAR (1929)..(1165): 991254mologous to Escherichia coli Cell division protein FtsK,accession number D90726,Smith-Waterman Score=1347.
atggctggcaagccggagtacgataaaactatctccacgtcgattgtgctcaatgcgctgaacgcgctcggcgtcagcgccgaagcgtccggacgtaacgatctggtggtgaaaaccgtcgaaggcgaccgcaaagtctcaggctcggcctatcgcgaaaccaaagatcgcggcttccaccacggcaccttgctactcaatgccgacctcagccgcctggcaaactatctcaatccggataaaaagaaactggcggcgaaaggcattacgtcggtacgttcccgcgtgaccaacctcaccgagctgttgccggggatcacccatgagcaggtttgcgaggccataaccgaggcctttttcgcccattatggcgagcgcgtggaagcggaaatcatctccccgaacaaaacgccagacttgccaaacttcgccgaaacctttgcccgccagagtagctgggaatggaacttcggtcaggctccggcattctcgcatctgctggatgaacgctttacctggggcggcgtggaactgcatttcgacgttgaaaaaggccatatcacccgcgcccaggtgtttaccgacagcctcaaccccgcgccgctggaagccctcgccggacgactgcaaggctgccttttctctctctacaatagcgatctcaatactgtcatcgacaacgtgctgcgtatttttccgttgctgttgtcgtggatctccttctggttgctgtacagcattgttcctaccatccgcgtacctaaccgcgacgcgattgtcggcgcgtttgtcgccgcactcctgttcgaagcaggaaagaaaggtttcgcgctttatatcaccatgttcccgtcatatcagctcatttatggtgtgctggcggtgatccccattctctttgtttgggtctactggacatgcgtcaccgtggagggagaagtgacgggcgaaattggcgcgggacttttggtgttattgggtgtcgaaaaggatgacgacgaacagaaagcaaaccgtctgtgcgagcgtgtgctcggctaccgcatctttagcgatgccgaaggcaagatgaatctcaacgtgcaacaggcgggcggcagtgtgctggtggtttcccagtttaccctcgccgcagataccgaacgggggatgcgcccaagtttctccaaaggagtaattgacgacatcggctttaatacggaaatcagccagacgcgcttccaccaggcgagccatttgttcaagcgcaaaggtatctaccggctccacttcgctcggcggcggtgtcagcaaatccagagaaggcagcggcgtcgtcggtttatgcaacggacggctgtcgccattacgcatcaacagcggatgaagcagggtatcctgcggttgtggcgcaactggctgttgtggctgctgatactgctgctgcggcgcaaccggttgttgcggctgctgatattgctgctgtggcgcaaccggttgttgcggctgctgatattgtggctgcggcgcaaccggctgttgtggctgctgatactgcggctgcggcggaactggttgttgcggctgctgatattgctgctgcggtgcaaccggttgttgcggctgctgtacaggttcaacaattggcgtaaacaacggttcgtgtggaccatcatccagcaacgctttcattggcgaaaattcaaaatcatccagcgagaacggattcgccccagccggttgttcgccggaataacgttgttgttgagtttgcgcaaactgacgagccagttcagcctctgccgcagcatctgcatcttctgcgtttacgggcacatcatgttgatactgttcgccatagcgttgctgctgtgtctgggcgaactgacgtgccagttcatcctgctgcatcgcatcgatttcatcatcgttgtactgatcgccagaatcccgcggcagtacgctgaagcggcggaaaaggcaaaagggcattgcggaccaactccatcccgtaatcccgccgggggcgcaaaagagtgtcgcataggcactaacccgctgatcgtcgccattccgtccacgccgatcaccatggtcgatatgtcgatgtcgatgttctcttacggcatgttagaagttaaccgtctggcaggtcgtcagctcccggtcgatggtggctttgatgatgagggcaatttgaccaaagaacctggcgttatcgagaagaatcgccgcattttgccgatgggctactggaaaggttctggcatgtcgattgtgctggatatgatcgctactctcctttccgacggcgcatccgttgccgaagtcacccaggacaacagcgacgaatacggcatttcacaaatttttattgccattgaagtggacaagcttatcgacggtcccacccgcgatgccaagctgcaacgcatcatggattacgttactagtgccgagcgtgctgacgaaaatcaggccattcgcttacccggccatgaatttactaccctgctggccgaaaaccgccgtaacggcatcactgttgatgacagcgtgtgggccaaaatccaggcgttatga

SEQ ID NO: 17424 - DNA, 1401 bp, Homo sapiens
  SIMILAR (1399)..(983): 1001254mologous to Homo sapiens Hb2E,accession number AF235097,Smith-Waterman Score=747.
atgaaatttattcctggtgaagagggtgtgaacactgttgaaatgacaacaaagtgtttggaatattccgtaagcttaattggtaaagtagcagtagaacttgggggaagactgactacaatttttaaagagattctaagcagcaaagatgtgcagggattccctcacgcaggtggactgcactgggttagatgccgactgggagtcagtggatcccaggtgtacatctttgcgccagtgagcaccaaggaagcaggctctgggatgaagtttcgtgagcagagagtttattgggaagtgccctggagaatagcacctgtggaggaaaacaggcttgggcagaaggagaaaatgagttgcaatgcgtgcctgccagcttccgctgatctcaccagggctttgacattggaatggcccatcaaagtcgccctgtgttgggcccagatggcctggcctttattctcttttcctgcttcattggtcactggatgtgggctgcccggaaggatgcacctgcactatggttatgaatttctggaggatgaatccaggttcctgaggcatctccgaaagaaaggcagcagccctagtcaggggcttataaataaaactcccatttccctgggacagaacacctgggggaaagggcggctgtggtccaccttcagcaaacttaaatattcccgcctgctggctctgaagagagcagtgaatctcccagcacagggcttgagctctgctaaaggacagactgccccctcaagtgggtccctgacccccattcctcctaacggggagacatttccaagcagggatcgacagacacttcacacaggagagctctggctgtcatctggtgagtggctatctgggacaaagctttcagaggaaggaacaggcatcaatctttgctgttctgcagcctctgctggtgatacccaggcaaacagggtctggagtggaactccaacaaactccagcagacctgaagtgtcatctggggccatggacggagaggggtgggggctaccagtggacccactgactcctggacatcaggatgctctgccatggcaaaggtgttatcatccatgttcttcgtcttcagttcctcctcggcaggcctgcgcctcaccggcttcatgcagctcttcagctgcctggcctcagcctccacgggaccctggcactcgggctgtggctccagctgcggcagctgctgctgctggggcagcccttcggcatcagtgggtgtgggagcgggtgcgatccggagcaggactgtgtagttgcggccgtggttgttggcccagaaagtgccctcaggggtctcatagcgcaccacgaagtcgaggcgcgccccatcgcccgcgccctcagcaaagggcagctggaaggcaa

SEQ ID NO: 17425 - DNA, 1173 bp, Homo sapiens
  SIMILAR (586)..(1170): 961254mologous to Homo sapiens prosomal P27K protein,accession number X59417,Smith-Waterman Score=979.
tcacatagtcccacattttttagaggctttgtttgtttgtttgttttttattctttttcctctaatcttgtcttcacactttatttcattctgttgatcttcaatctctgatatcctttcttccacttgattgattcgactattgatacctgtgtatgcttcacgaagttcttgtgctgtgtttttcagctccatcaggtcatttatgttctcctctaaactggctattctttgatctttgatgctgatgacctttggatggggtttttgcgtgggcatcctttttgttgatgttattgctttctgtttgttagttttccttctaacagtcaggcccctcttctccaggtctgctggagtttgctggaggtccactccagaccttgttcacctgggtatcaccagcgaaggctgcagaacagcaaagactgctgcctgctccttcctctggaagctttgtcccagagcggcactcatcagatgccagctggagctctgctctatgaaatgtctgtcaatccctgctgggaggaacaccaaactgatcaactatttacacacgaaagcaccttcatcagaagcaaaactcagaagaaagtacctgacaaattattggattccagcacagtgactcccttattcaagataactgaaaacattggttgtgttatgaccggaatgacagctgacagcagatcccaggtacagagggcacgctatgaggcagctaactggaaatacaagtatggctatgaaattcctgtggacatgctgtgtaaaagaattgccgatatttctcaggtctacacacggaatgctgaaatgaggcctcttggttgttgtatgattttaattggtatagatgaagagcaaggccctcaggtatgtaagtgtgatcctgcaggttactattgtgggtgtaaagccactgcagtgggagttaaacaaactgagtcaaccagcttcctagaaaaaaaagtgaagaagaaatttgactggacatttgaacagactttggaaactgcaattacatgcctgtctactgttctatcaattgatttcaaaccttcagaaatagaagttggagtagtgacagttgaaaatcctaaattcaggattcttacagaagcagagattgatgctcatcttgttgctctagcagagagagactaa

SEQ ID NO: 17426 - DNA, 4227 bp, Homo sapiens
  SIMILAR (631)..(1233): 521254mologous to Homo sapiens p40,accession number U93567,Smith-Waterman Score=496.
atggacccagtccttatggatcatagtccaggaaagaggaaacaccggataggagagctcaaggttaccactgactatttcctaacagtacacatgggctccaaaaatcatgttttcacccaaaccagctcttccctggaaaaactatctttctcaccaactgagctgaaggggatgggagtagccccagacaaaaaggtggcaaactcacactgttcttccccaaattccagtgctgctgataagtctgatgacattctggttgccattttttctgtgaacaaaagtgcctgcctgccagctctggagagagcagcagatctcccagcacagaggactggtcaaagaactaccgaagaaaacattcctttggggccaccagtgaatgaaaatgtgagtctagctatctcaggcagatacctctcagcaggggttgacagacacctcatacaggagatctctggctggcatttgctgggtgcccctctgggacgaagcttccagaggaaggaaaaggaagcaatctttgctgttctgcagcctccgctggtgatacccaggcaaacagggtctggagtggaccaccagcaaactccagcagacctgcagcagagaggccttactgttagaaggaaaactaaccaacagaaaggaatagcatcaacatcaacaaaaaggatgtccacacaaaaaccccatctgaaggtcaccaacatcaaagcacgggaacaaaactggacagagaatgagtttgacaaattgacagaagcaggcttcagaaggtgggtaataacaaactcctctaagctaaagcagcttgttctaacccaatacaaggaagctaagaaccttgaaaaaaggttagacgaattgctaactagaataaccagtttggagaaggacataaatgacctgatggagctgaaaaacacagcacgagaacgttgtgaagcatacacaagtatcgatagccgaatcaatcaagcaaaagaaaggacatcagacactgcagatcaacttaatgaaataaagtgtgaaggcaaggttagagaaaaaagaatgaaaaggaacgaacaaagcctccaagaaatacgcgaatatgtgaaaagaccaaacctacatttgattggtgtatgtgaaagtgacggggacaatggaaccaagttggaaaacactcttcgggatattatccaggagaatgtccccaacaaaatcagcagggaggtgaagcttatagagctgtaaaatggactgaagcaaactggacacctgactagagaccaggacatcctggcctagtttcaggttgtgcggcactttcctctgacttgtagctacctgcacactccatttattcgtgtctgcgataatacagacagcttcagctattggctcatccaggactggatgctggtcaacagtgctgaggttaagaaatcctgctctagggtgaacagccactgtggaatgggagaacacagttggcttatactgctttaagagtgtagcacaaagccagggccttaagtcagcaggtgatgaatcctgccagtactgggtccttcccttcaaggcagcgggttcctttgtgcccaggctgtgtcttttttcaaggttcttagcttccttgcattgggttagaacatgcttctttagctcagaggagtttgttattacccaccttctgaagcctacttctgtcaattcatcaaactcaattctccatccagttttgttcccttgctggtgaggagctgtgatcgttggtgaccttcggatggggtctctgagtggacgtcctttttgttgatgttgatgtggctgttttctgcttgttaattttccttctaacaggcctgtctgctgcaggtctgctgtggtttgttggaggtccactacagaccctgtttgcctgggtatcaccagcggaggctgtagaacagcaaagattgctgcctgttccttcctctggaagcttcgtcccagaggggcacccaccagattccagccagagctctcctgtatgaggttctgtcggcccctactgggaggtgtctcccagtcaggatacacaggggtcagggatccacttgaggaggcagtctgacccttagcagagctcaaacgtgcccgctttccagtcgggaaacctgtcgtgccagctgcattaatgaatcggccaacgcgcggggagaggcggtttgcgtattgggcgccagggtggtttttcttttcaccagtgagacgggcaacagctgattgcccttcaccgcctggccctgagagagttgcagcaagcggtccacgctggtattgccccagcaggcgaaaatcctgtttgatggtggttccgaaatcggcaaaatccattaattgcgttgcgctcactgcccgctttccagtcgggaaacctgtcgtgccagctgcattaatgaatcggccaacgcgcggggagaggcggtttgcgtattgggcgccagggtggtttttcttttcaccagtgagacgggcaacagctgattgcccttcaccgcctggccctgagagagttgcagcaagcggtacacgctggtttgccccagcaggcgaaaatgctgtttgatggtggttgcgaaatcggcaaaatctagacactaaatctgctggtgccttgatcctgaacttcccatcctccaaatttctgttacttataagccactcagtgtatggtattttgttactgcagtccagatgaactaagacaggtgtccccatcccctgggctgtagacgtgtaacccgttaggaactgagctccctcccggacgggtcggctggcggtacgggggctgcccctcacctctctcccagatggggcagctgccgggcggagacgctcctcacttcccatacggggtggaaaatcagcagggaggtgaagcttatagagctgtaaaatggactggagcaaactggacacctgactagagaccaggacatcctggcctagtttcatgttgtccgtcactttcctctgacttgtagctacctgcacactccatttatccgtgtctgcgataatacagacagcttcagctattggctcatccaggactggatgcttgggatttgcagcctcttgaccccgaaccccatctaccaacaatgacagtccacaggaacttgcagtgttccgtaagtgttccttaagacaaatgctgctctgatcggcaggagagaggccacacggcgtgtcaatgtcaaaattatatttatgtagcatctgctgccagccacggaccttctcttggcagaggcagcttctcttcctaggaacctcaggtgatttaccaccgtgacccagatctagcatggctgaagcgcaggcttcgtcgtcactgtctcccagggcgctatctgagctttcatttcggggaatgtctccttcagtcctgaagttggccctcttgttgtcatccccacaagggatattcgtaaaaagcacgaggccaggggcccgctggacacacctgtgggctgggccccagtaaagctgaacctgggttgccattcttgaggaccagggcttaaattccccaaaacccaaatcctcatttctcagtggccgttgaacaaggtaatttttaccgaggattttggacaggaagttagaagaagggctttttcccagctgtgcccaaagaggattatacggatgtgttttggccagcatgttcactgactgggaggtacgtttctctgagaaggctttgatgggagggtgatccacaggcatgacagttgggacccaggccaggtggtaggttaacaccgcagtcagtaaggcagcaaaaaactggtttttatttatctgttctatcagaagtgtaaactccttgagaaagcgctggcagagctggtttttttccaaagtgccggacatcatagtaagccatacaggttcagctatccttggaacagaatataagttccagatagttcctcttgggatttgcaggctcttgaccccgaacccatctaccaacaatgacagtccacaggaacttgcagtggttccgtagtgttccctgaggtgggaggatcccttctgttttggagatcggagctgccctgagtccaacatccaactggccttccgcctggggtggcagagccagactctgcttgcagatttgccaacaagcactgtggtggaattccaatgtggtggaattcgccactggaccat

SEQ ID NO: 17427 - DNA, 1085 bp, Homo sapiens
  SIMILAR (612)..(16): 551254mologous to Homo sapiens p40,accession number U93570,Smith-Waterman Score=524.
ttatcttagtagtgtttgtatttcctgaatttgaatgttggcctgtcttgctagattggggaagttctcctggatgatatcctgaagagtgttttccagctcggttacattctcctcatcactttcaggtacaccaatcaatcgtaggtttggtcttttcacatagtcccatatttcttggaggctttgtcctttccttatcattcttttttctgtaatcttgtcttcaagctttatttcattaagttgatcttcaatctctgatatcctttcttccgcttgatcaattcgactattgatacttgtgtatgcttcatgaagttctcgtgctgtgtttttcagcaccatcaggtcatttatcttcttctctaaactggttattctagttagcccttcctgtaaccttttatcaaggttcttagcttccttccattgggttagaacatgctcctttagctcaaaggagtttgttattattacccaccttctgcctacttctgtcaattcgtcatactcttctctgttcagttttgtgcactttggataggttttttgcatgggcgtgctttttgttaatgttgatgttattgctttctgtttgttagttttccttctaacagtcaggctcctcttctgcaggtctgctggagtttgctggaggtccactccagaccctgtttgcctggttatcaccagcggaggctgcagaacagcaaagattgctgtctgttccttcctctatggaatttctaggcggctttgtttacactgtgagggtgaaaccatctactcaggcgtcagcaatggcagacgcccttccccccaccaagctggagcatcccaggtcgagctcagactgctgtggtagcagcgagaatttcaagccagtggatcttagcttgctgggttccgtgggggtaggacccaccgagccagaccacttggatccctggcttcagccccctttccaggggagtgaacggttctgtcttgctggcgttccaggtgccactggggccctggtgcatgatattccactcgctgtgtccatgtgttctcattgttcaactcccacttatgagtga

SEQ ID NO: 17428 - DNA, 3512 bp, Homo sapiens
  SIMILAR (1)..(2592): 981254mologous to Homo sapiens putative p150,accession number U93563,Smith-Waterman Score=4438.
atgaaggcagaaataaagatgttctttgaaaccaacgagaacaaagacaccacataccagaatctctgggacgcattcaaagcagtgtgtagagggaaatttatagcactaaatgcctacaagagaaagcaggaaagatccaaaattgacaccctaacatcacaattaaaagaactagaaaagcaagagcaaacacattcaaaagctagcagaaggcaagaaataactaaaatcagagcagaactgaaggaaatagagacacaaaaaacccttcaaaaaatcaatgaatccaggagctggttttttgaaaggatcaacaaaattgatagaccgctagcaagactaataaagaaaaaaagagagaagaatcaaatagacacaataaaaaatgataaaggggatatcaccactgatcccacagaaatacaaactaccatcagagaatactacaaacacctctacgcaaataaactagaaaatctagaagaaatggatacattcctcgacacatacactctcccaagactaaaccaggaagaagttgaatctctgaatagaccaataacaggctctgaaattgtggcaataatcaatagtttaccaaccaaaaagagtccaggaccagatggattcacagccgaattctaccagaggtacaaggaggaactggtaccattccttctgaaactattccaatcaatagaaaaagagggaatcctccctaactcattttatgaggccagcgtcattctgataccaaagccgggcagagacacaaccaaaaaagagaattttagaccaatatccttgatgaacattgatgcaaaaatcctcaataaaatactggcaaaccgaatccagcagcacatcaaaaagcttatccaccatgatcaagtgggcttcatccctgggatgcaaggctggttcaatatacgcaaatcaataaatgtaatccagcatataaacagagccaaagacaaaaaccacatgattatctcaatagatgcagaaaaagcctttgacaaaattcaacaacccttcatgctaaaaactctcaataaattaggtattggtgggacgtatttcaaaataataagagctatctatgacaaacccacagccaatatcatactgaatgggcaaaaactggaagcattccctttgaaaactggcacaagacagggatgccctctctcaccactcctattcaacatagtgttggaagttctggccagggcaatcaggcaggagaaggaaataaagggcattcaattaggaaaagaggaagtcaaattgtccctgtttgcagacgacatgattgtttatctagaaaaccccatcgtctcagcccaaaatctccttaagctgataagcaacttcagcaaagtctcaggatacaaaatcaatgtacaaaaatcacaagcattcttatacaccaacaacagacaaacagagagccaaatcatgagtgaactcccattcacaattgcttcaaagagaataaaatacctaggaatccaacttacaagggatgtgaaggaactcttcaaggagaactacaaaccactgctcaaggaaataaaagaggacacaaacaaatggaagaacattccatgctcatgggtaggaagaatcaatatcgtgaaaatggccatactgcccaaggtaatttacagattcaatgccatccccatcaagctaccaatgactttcttcacagaattggaaaaaactactttaaagttcatatggaaccaaaaaagagcccgcatcgccaagtcaatcctaagccaaaagaacaaagctggaggcatcacactacctgacttcaaactatactacaaggctacagtaaccaaaacagcatggtactggtaccaaaacagagatatagatcaatggaacagaacagagccctcagaaataatgccgcatatctgcaactatctgatctttgacaaacctgagaaaaacaagcaatggggaaaggattccctatttaataaatggtgctgggaaaactggctagccatatgtagaaagctgaaactggatcccttccttacaccttatacaaaaatcaattcaagatggattaaagatttaaacgttagacctaaaaccataaaaaccctagaagaaaacctaggcattaccattcaggacataggcgtgggcaaggacttcatgtccaaaacaccaaaagcaatggcaacaaaagccaaaattgacaaatgggatctaattaaactcaagagcttctgcacagcaaaagaaactaccatcagagtgaacaggcaacctacaacatgggagaaaattttcgcaacctactcatctgacaaagggctaatatccagaatctacaatgaactcaaacaaatttacaagaaaaaaacaaagaaccccatcaaaaagtgggcgaaggacatgaacagacatttctcaaaagaagacatttatgcagccaaaaaacacatgaagaaatgctcatcatcactggccatcagagaaatgcaaatcaaaaccactatgagatatcatctcacaccagttagaatggcaatcattaaaaagtcaggaaacaacaggaaacatgagtctgtgatgaaagatataagtgaatccaaattcaagtttaattttggaaaccatatgagcacctgggggaaggggaggtttttggcagagcttcagcaggctgaaacatccctgcctgatggctctgaagagaacagagatctcccagcacagcatttgagctctgataagggacagactgcctccttaagtgggtccctgatcccggtgtatcgtgaatgtgagacacctcccagtaggggccgacagacacctcatacaggagagctctggctggcatctggtgggtgcccctgtgggacaaagcttccagaggaaggaacaggcagcaatctttgctattctgcagccttcgctggtgatacccaggcaaacagggtctggagtggacctccagcaaactccaacacgcctgcagaagaggggcctgactgaagcaaaccatatttggtttctacatcataaagtttataatccttaatgtctggagatataggggaaggtagattttcccagttaccaagaacattggctaaactggcaaaaactggttctgtacaaaatgccaagcaatccctggattcttctaaaggatgctggacagtaagaagtcgagggtgtcgaagccgagttaactgttggactcctcgttttagagaatcaatgatttgatccttttcaaatttttgatacttgtcaatcagttttttatcaaagacaaaaactgccacttcctgctttgttgacttttttgtgccattaaaaatcttccaagctagcccattgccaccactggcaatgtgtcgaccaacatcaaattctctagtgacaggatttcccattacagcactagtgacatcagctgttacttttgtaacagtactcttcaatttattaagcatggactccat

SEQ ID NO: 17429 - DNA, 2153 bp, Homo sapiens
  SIMILAR (1255)..(2151): 991254mologous to Escherichia coli PriA,accession number D00616,Smith-Waterman Score=1529.
atgccggcaccgcggcgtgtcggcacgtgcttagcggcaagccgtcgaaactgtcacgggatccgtggtgctcgcgttgggctagatttcgttctcgtcgtggttcgtagtgagatgatcccagagcgtgtggatgatggtccacacgaaccgttgtttacgccaattgttgaacctgtacagcagccgcaacaaccggttgcaccgcagcagcaatatcagcagccgcaacaaccagttccgccgcagccgcagtatcagcagccacaacagccggttgcgccgcagccacaatatcagcagccgcaacaaccggttgcgccacagcagcaatatcagcagccgcaacaaccggttgcgccgcagcagcagtatcagcagccacaacagccagttgcgccacaaccgcaggataccctgcttcatccgctgttgatgcgtaatggcgacagccgtccgttgcataaaccgacgacgccgctgccttctctggatttgctgacaccgccgccgagcgaagtggagccggtagatacctttgcgcttgaacaaatggctcgcctggtggaagcgcgtctggctgatttccgtattaaagccgatgtcgtcaattactctccggggccggttatcactcgctttgaattgaacctggcaccgggcgtaaaagcggcgcgcatttctaacttgtcacgggacattgcccgttcactttcgacggtggcggtgcgtgtcgttgaagttattcctggcaaaccctatgtagttaggctcgaccttcaaagatgggaagggcggggtccagttacctggattaaacacacgatgtggacccggactggcttatctcgccgcgtggacctactgggtggtgcatattccctatctggcacaaaaaccccaggcaattctgattgcgctcggttgggcgatgaaaggcgacggttcgctaatctaagaatattcagtcgtaccgttactggggttaacgctggtgctgtttatcttctttatgtgggttgcatcacgcggtatgaaatcgctgaaaatcgtcggttctgtggcagggattgctatgtctgttatgtcactcctgtatttggcgatggcgaggaaggagcaggcagcaatttttgctgttctgcagcctccgctggtgatataggtaaacagggtctggagacgcaaatggatccgcattttttacggccaatgtgtatcttaaccccccgaatttcaagtcaggatgatgatatgcccgttgcccacgttgccttgcccgttccgcttcctcgtacctttgactatctgctgccagaaggcatgacggttaaagatgggtgtcgcgtgcgcgtgccgtttgccaaacagcaggagcgcatcgggattgtggtatcagttagcgatgccagcgaactgccgctcaatgagctaaaagcggtagtcgaagtgctggatagtgagccggtgtttactcactccgtctggcgattgctgctatgggcggcagattactatcatcatccgattggcgatgtgctgtttcatgccttgccgattttactacgccaggggcggcctgcggcgaacgcgccgatgtggtactggtttgccactgaacaaggccaggcggtggatctgaacagcttgaaacgctcccccaagcaacaacaggcgctggcggcgttacggcaaggcaaaatctggcgcgaccaggtcgccacgctcgaatttaatgatgccgcgttgcaggcgctacgcaaaaaaggtctgtgtgatttagcaagtgaaacaccagagtttagcgactggcgaacgaactatgccgtttctggtgagcggttgcgattgaataccgaacaggccaccgccgttggcgcaattcatagcgcggcagatactttttctgcctggctgctggcgggcgttaccggttccggtaaaacggaggtttatctcagcgtactggaaaacgtgctcgctcagggcaaacaggcgctggtgatggtgccggaaatcggcctgacaccgcaaactatcgcccgttttcgtgaacgttttaatgcccccgtggaagttctgcattccggcctgaacgacagcgagcgtctttcggcgtggctgaaagcgaaaaatggtgaggcggcgattgt

SEQ ID NO: 17430 - DNA, 2475 bp, Homo sapiens
  SIMILAR (56)..(3): 881254mologous to Homo sapiens putative p150,accession number U93565,Smith-Waterman Score=87.
ctataaattactttgggcagtatggccattttcacggtattgattcttcctatccatccatggaatgtttttccatttatttgtgtcctctcttatttccttgaacagcggtttgtagttattcttgaagaggtccttcacatcccttgtaagtttgattcctaggtattttattctctttgtagcaattgtgaatgggagttcactcatgatttggttctctatttgtgttttattggtgtatgggaatgcttgtgatttttgcacattgattttgtatcctgagactttggtgaagttgcttatcagctgaaggagatttttggctgagatgatggggttttctaaatgtacaatcatgtcatcttcaagcaaagacaatttgacttcctggcttcctatttgaatacgctttgtttctcttgcctgattgccctggccagaacttccaatactttggtctttgatgttggtgacttttggatggggtttctgtgtggatgtggcttttgttgatgttgatgctattcctttctgtttgttagtttttcttctaacagtcaggcccctctgctgcaggcctgctggaatgtgctggaggtccactccagaccttgtttgcctgggtatcaccagcagaggctgcagaacagcaaatattgctgcctgatccttcctctggaagcttcgtcccagaggggcacccacctgttgcgatggtcgcactggactctcttgggaacagttggcatcttttgcccactggattcctttttctatccctgctctcctttttatgttgctttcactgcaagttctctgaacaatattttgaagctgtgacctgttgtttcctgactttttaatgattgccattctaactggtgtgagatggtatctcattgtggttttgatttgcatttctctgatggctagtgatgatgagcattttttcatgtgctttttggctgcataaatgtcttcttttgagaagtatctgttcatgtcctttgtccactttttgatggggttgtttgtttttttcttgtaaatttgtttgagttcattgtagattctggatattagccctttgtcagatgagtaggttgcaaaaattttctcccattttgtaggttgcctgttcactctgattgtagtttcttttgctgtacagaagctctttagtttaattagatcccatttgtcaattttgtcttttgttgccattgcttttggtgttttagacatgaagtccttgcccatgcctatgttctgaatggtattgcctaggttttcttctagggtttttatggttttaggtctaacgtttaagtctttaatccatcttgaattgatttttgtataaggtgtaaggaagggatccagtttcagctttctacatatggctagccagttttcccagcaccatttattaaatagggaatcctttccccattgcttgtttttctcaggtttgtcaaagatcagatagttgtagatatgcggcgttatttctgagggctctgttctgttccattgatctatatctctgttttggtaccagtaccatgctgttttggttactgtagccttgtagtatagtttgaagtcaggtagtgtgatgcctccagctttgttcttttggcttaggattgacttggcgatgcgggctcttttttcattccatatgaactttaaagtagttttttccaattctgtgaagaaaggcattggtagcttgatggggatggcattgaatctgtaaaataccttgggcagtatggccattttcacgatattgattcttcctacccatgagcatggaatgttcttccatttgtttgtatcctcttttatttccttgagcagtggtttgtagttctccttgaagaggtccttcacatcccttgtaagttggattcctaggtattttattctctttgaagcaattgtgaatgggagttcactcatgatttggctctctgtttgtctgttgttggtgtataagaatgcttgtgatttttgtacattgattttgtatcctgagactttgctgaagttgcttatcagcttaaggagattttgggctgagacaatggggttttctagatatacaatcatgtcatctgcaaacagggacaatttgacttcctcttttcctaattgaataccctttatttccttctcctgcctaattgccctggccagaacttccaacacccaaaaggttattgtgacgatgaacagagacaacacatgctcaagtgtctgccattgtgcccaagatgtaggaggacttcgaaagagtttaccatatcgtttcagtgtctttccattgggagcatcaattgggttaagctcctttctagctgtcaggggtatggagagggagcaactggtctcattgtcttcctgtgtattgagaagtgaacttccgccacttactccctttatcagccccaaaaccgcatgcat

SEQ ID NO: 17431 - DNA, 701 bp, Homo sapiens
  SIMILAR (76)..(687): 371254mologous to Schizosaccharomyces pombe phosphate- phosphoenolpyruvate translocator precursor,accession number AL035536,Smith-Waterman Score=297.
gggccgcggtggggcccgcgcgtacatcgggctccggacccagtccgcattccgtcgtccggcccgctgctgccgccgcgcttctacccgcgctacgtgctaccgctcgccttcggcaagtacttcgcgtccgtgtcagcgcacgtcagcatctggaaggtgcccgtgtcctatgcacacaccgtcaaggccaccatgcccatctgggtggtcctcctgtcccggatcattatgaaggagaagcagagcaccaaggtatacttgtcactcatccccatcatcagcggtgtcctgctggccaccgtcaccgagttgtcttttgacatgtggggactcgtcagcgccctcgccgccacgctgtgcttctcgcttcagaacattttctccaaaaaggtcttgcgagattcacggatccaccatctccggctgctcaacatcctgggctgccacgccgtcttctttatgatccccacctgggttctggtggacctctcggctttcctggtcagcagcgacttgacctacgtctaccagtggccctggacgctcctgctcctggctgtcagcggcttctgtaactttgcccagaatgttatcgccttcagcatcctcaacctcgctagccccctgagctactcggtcgccaatgccaccaaaagaatcatggtcatcacggtgtccctgatcatgctgcgcaaccc

SEQ ID NO: 17432 - DNA, 630 bp, Homo sapiens
  SIMILAR (58)..(237): 981254mologous to Homo sapiens DAN26,accession number Y08265,Smith-Waterman Score=312.
atgcgcccaaacccgaagcggcgggcccggccgccgcccccgaggccgggcgcggaacctaccgaccaggagcttcgaaatgtcatcgacaagctcgcccagttcgtggctcgcaatgggcccgagtttgagaagatgactatggagaagcagaaggacaaccccaaattctcgtttcttttcggaggcgaattctacagttactacaagtgcaagctggcgctggagcagcagcagcgccgtcccatcgagcgcttcctttctcggattccagtccgggctctgccacaaacctctttctttcgggtcgtttattctttgaagtggagcagctcggtccacacgatccctgttccgctgttcccacggccctgcacagagcggctgctgggtgccactgtaatggagaacaacgaggtcttgcgagattcacggatccaccatctccggctgctcaacatcctgggctgccacgccgtcttctttatgatccccacctgggttctggtggacctctcggctttcctggtcagcagcgacttgggtgacaggatccgtattccaaacctcagcatcatgcaatactctcatgtaacaaatatgcacatgtactctctgtatctacaataa

SEQ ID NO: 17433 - DNA, 1147 bp, Homo sapiens
  SIMILAR (665)..(1009): 561254mologous to Homo sapiens KRAB zinc finger protein HFB101S,accession number AB029149,Smith-Waterman Score=309.
ccagagttccggtggagaagcccagcctgaggctggggagcaggtgggcgtccctgttgattcctccatggcaaatgtgaatccttgggcttcccagtagccccaggtggaacgtactcttggacactgtataaaacggttgcgtgtctgaatgccgtcgttttgccccgcggccccatcgtacatgcgcatccccgcaggcgccaccgtctccactttccgcagcagcgtccctgacgctgcgcgacccgttgccaaggcgactggaaccgcggcccgagatctgcgcgagaagtacgagcgaaagcagctgctgctgtttgtgactctagaggatcccacctgccattgggctaaccaaaaaggaatgaattggctcagcttgatgaaatgtgatttgcgagccagcgaatgtgaagaaatcgcctctctcctcatcagtggcgggagtctgagaaaactgaccttatccagcaatccgctgaggagcgacgggatgaacatactgtgtgatgccttgcttcatcccaactgcactcttatatcactggtgatgtcatgcagaagtgaaaacatatttagggaaatggacgtacagttgatactcaggtatgtcaggctccgattacgagccaaagccttgaacggcccgcggaccccaaccccgagtgagcaggacgcagaggctgggccagcgagccgcagggacaccgaagccgagcgtctgcgcttccggcagttccagtaccacgtggcgagcgggccgcacctcgcggtgggccagctgtggacgctgtgccgccagtggctgaggcccgaggcgcgctccaaggagcagatgctggaggtgctggtgctggagcagttcctgggcgcgctgcccagcaagatgcggacctgggtgcagtcacagggcccccgaagctgcagggaggccgccagcctggtggaggacctcacacagatgtgccagcaggaaggactggctgcccacccttcccatgacacagctatcagaggcataccaaggttggctgcctcatgggagacagcaagtgccatggaggccacagctgatgccagacaaaagagaacacacacagagaaggaggcatggctgcttgaagctccccacgagctggcctga

SEQ ID NO: 17434 - DNA, 1577 bp, Homo sapiens
  SIMILAR (793)..(1347): 451254mologous to Homo sapiens KRAB zinc finger protein HFB101S,accession number AB029149,Smith-Waterman Score=335.
atgcgcatccccgcagccgccaccgtctccactttccgcagcagcgtccctgacgctgcgcgacccgttgccaaggcgactggaaccgcggcccgaggtaactggagggcacggcgggggcggggcgctcatcccaggcggcttctgattggcctcggccgcctcgtgcgtcacagccccgcccctgcccgggagtcccgcagcggtgacttgtcaccgacgcccggcgtgatccagcggaccaatggcggccgcccgcggcgcgcagcgtgcggggatggggtcccgcccgcggcgttgggcgcgctcgccagcccaggggtcgccatgaccgagcggcccaggcccgagcgaagcccgcgcgcggcccatcttcctcctgaacagccgcccccgacccatcccccacccaatcaccccaccatcctccccccaaccagccgtccacagccgtcgtcgctgcccctcccctgtattcccagtgcgctgcccttgcacacttccccagctcgtttattatggaactcctccgtgtggcatcctaagctcccaacgccctccccactacctcagcccaggaccctggaggatgctgaggggctacagcccccctccctagagtctccagggcccctgattgctgattctgtccgcctgccacaccggctctgtccggagccactgggactcgggatccagtccacacacacccctcagaggggcactgtggccagagaaatgcttccacggcccaaagcccctgcctcccccagacgcccccagaccccaaccccgagtgagcaggacgcagaccctgggccagcaagccccagggacaccgaagcccagcgtctgcgcttccggcagttccagtaccacgtggcgagcgggccgcacctggcgctgggccagctctggacgctgtgccgccagtggctgaggcccgaggcgcgctccaaggagcagatgctggagctgctggtgctggagcagttcctgggcgcgctgcccagcaagatgcggacctgggtgcagtcacagggcccccgaagctgcagggaggccgccagcctggtggaggacctcacacagatgtgccagcaggaagttctggtatctctggactcggtcgaaccccaggactggagtttcggtgaggaggaagatgggaagagtccaaggtcccagaaagaaccatcgcagtgtctatctccctctcatttagtcattcaacacacattgactgacgagctgcgggaacaagaatgcctgccccgtggtgtggccagcactgcccaatgaagttcctacagggatgtaaagattctctacccatgcaaccacctacgtgtggctaggagcacctgaaataggaactgaattttaaatttaaattccatttaaatggaagcagccaggtgggctacataataatggatgacaccaccaccagcagcaggtctacccatggtgttatctttgctgtcttcctgactttcctaccaggtccaagctgggggtggaggccaggaagagggcaagggagactggagactctgaaaagagagggaaagtgg

SEQ ID NO: 17435 - DNA, 1529 bp, Homo sapiens
  SIMILAR (175)..(3531): 1001254mologous to Homo sapiens ankyrin-like protein,accession number Y10601,Smith-Waterman Score=5877.
atgccacacttcacttttgcacaatgtattccaaacacacatcaggtaggcaattcaattgcaattggccttgcaacagggcattggcaccagcacaggcacaagcatcaaggggcatcaccaagtcacagtatccaagccagcacaggttcaaccctggtgtcagtatcaaatagcaacacaaagtcgtattccagcatatcatcatcatcatacaaaacccaaccatatttcattgtaccatcaaaaattattcgcagcacttggtacagcacttgctacaaaaagggcaacatcattgcccaacttaaaacccacagcaaacattatccaaaatcggcacaacaacaccaccagagtgcatccttaaccaccatactgcagcactctaaaggtggcacagctggctccaagccccacttgggctacacgggccctgccaaatatcaagcccgtgacggccggacccaaagcactacaaatggccccctcgacaacctggacacgaacaagctagaaagactccaggggggttaccccccgggacaccgtgacccagggaaaaacacaacaggcagctggcggttgccagggaagagcccccgctttgactgtccaggggatgtggtggtcagggccagcttctccatcttccacctgtacaacatcaccctgtttgatttcactgctccaccagctggcttggagtcttcaagcgtttccacctggggctactgggaagcccaaggattcacatttgccatggaggagatcaacagggacgcccacctgctccccagcctcaggctgggcttctccatccggaactctgggaggagcccatccccagctacacgtctgggcccagcgctctcggagctgctttggagaaacatgcttggcgttgtctatgccaatggccaggctcctgggactctacaggtttctccagcatccggcatcagcggcaaagcccttctgcccatccccgcaatagaatttggggctcgggctgcagatctcagtgcccatgccagacctcagcccaggaccctggaggatgctgaggggctacagcccccctccctagagtctccaggagtctccagtctcccttgccctcttcctggtctccacccccagcttggacctggtaggaaagtcaggaagacagcaaagataacaccatgggtagacctgctgctggtggtggtgtcatccattattatgtagcccacctggctgcttccatttaaatggaatttaaatttaaaattcagttcctatttcaggtgctcctagccacacgtaggtggttgcatgggtagagaatctttacatccctgtaggaacttcattgggcagtgctggccacaccacggggcaggcattcttgttcccgcagctcgtcagtcaatgtgtgttgaatgactgaggctgggtgatgtcagaaaattgtaggtgccccggctctgcagtctgaagttgaaggccttagcatgcctcgtgccgaattcagcagacgtcag

SEQ ID NO: 17436 - DNA, 552 bp, Homo sapiens
  SIMILAR (370)..(1038): 971254mologous to Homo sapiens ankyrin-like protein,accession number Y10601,Smith-Waterman Score=1141.
atgaatactgccaatgttgagaagccttatgtacagaaatatcaaacagcctttgttctggtaatgaaacatcggcagtgccagctagcctcacacttggtgcaaaattatcgcagttccaactatgggcctgggaacaaaatccaagacccaggaaccacctgcccctcattcaatacaataacacaaggctctaaaaagccctaccctgattttgtggcaaggctccgagatgctgctcaaaactcaattaccgatgaaaatgcccgtaaggtcatagtggagttgatggcatatggaaatgccaatcctgagtgtcaatcagccactaagccattaaaagggaaggttcccacaggatcagatgtaatctcagaccagaaggctgtgggtgtacaggcagccaagaggagaaacagaactgacaccggcctaggccgatctgcaagaaaaagcgggaaaggagtgacccggatgcttccgaagcacgcgagcatgattttggatggaggtgggccggcgacttcgcctagctgctgccggttcctgtaa

SEQ ID NO: 17437 - DNA, 513 bp, Homo sapiens
  SIMILAR (226)..(405): 881254mologous to Human endogenous retrovirus K gag protein,accession number Y10392,Smith-Waterman Score=270.
atgttcagtgatgtgtccatagacttctctcaggaggagtgggactgcctggaccctgttcagagggacttatacagagatgtgatgttggagaactacggcaatctggtttcaatgggactttacactcctaagcctcaagtgatctccttattggaacaagggaaagagccctggatggttggcagagagcttacaagaggcctgtgttcagacaaggcgctaaaggagccctaccctgattttgcggcaagcctccaagatgctgctcaaaagtcaattaccaatgagaatgcccgtaaggtcatagtggagttgatggcatacgaaaatgccaatcctgagtgtcaatcagccattaaaccattaaaaggaaaggtcccagtgggatcagatgtaatctcaagaggttttcagggacaacaacccccactgtcacaagtgcttcagggaatgggccagttaccacaatacagcaactgtccccggccacaagcggcagtgcagcagtag

SEQ ID NO: 17438 - DNA, 828 bp, Homo sapiens
  SIMILAR (466)..(723): 411254mologous to Homo sapiens TATA-binding protein associated factor 30 kDa subunit,accession number U13991,Smith- Waterman Score=126.
gcatataagtagactaaagtcccagcggccccctagaggtgagtttgagagtgtgccccatgaggagacttggtggattgatggggtacaagaacaggtccgaagaaatagggctgccaatcctccagttaacatagatgcagatcaactattaggaataggtcaaaattggagtactattagtcaacaagcattaatgcaaaatgaggccattgagcaagttagagctatctgccttagagcctgggaaaaaatccaagacccaggaagtacctgcccctcatttaatacagtaagacaaggttcaaaagagccctatcctgattttgtggcaaggctccaagatgttgctcaaaagtcaattgccgatgaaaaagcccgtaaggtcatagtggagttgatggcatatgaaaacaccaatcctgagtgtcaatcagccattaagccattaaaaggaaaggttcctgcaggatcagatgtaatctcagaatatgtaaaagcctgtgatggaatcggaggagctatgcataaagctatgcttatggctcaagcaataacaggagttgttttaggaggacaagttagaacatttggaggaaaatgttataattgtggtcaaattggtcatttaaaaaagaattgcccagtcttaaataaacagaatataactattcaagctactacaacaacagttagcctgcagaatacatatcttctgttcccttcaaccatgtctatatggaagacacacctggatcaggtgcagtgcctacctcctacaagcaagtctggaggcccatcccctaaggttcctgatactgtggctca

SEQ ID NO: 17439 - DNA, 423 bp, Homo sapiens; identical to SEQ ID NO: 6805
  SIMILAR (127)..(372): 801254mologous to Human endogenous retrovirus K gag protein,accession number Y10392,Smith-Waterman Score=308.

SEQ ID NO: 17440 - DNA, 1950 bp, Homo sapiens
  SIMILAR (352)..(912): 991254mologous to Escherichia coli Flagella basal body p-ring formation protein FlgA precursor,accession number D90743,Smith- Waterman Score=935.
atggtagctcatgcttatcatcccagcgacccaggaggccaagaaaagaaaaaccaactttctgaggaggaattcaagctggctgaagaaatttgcataagtaacaaggagccgaatgttaatagtcaagacaatggggaaaatgtctctagggcatgtcaaagaccttcttggcagcccctcctatcacaggcccagaggtcttggagagaaaaatggtttcctgggccagacccagggcccaactgctctgtgcaacctcgggacttggttccatgcatcccagtggatccagcaccagccacggctaaaaggagccctcaaggagaacttctgctatggcagtgtggaaggaaaatgtggagttgtagcccctgcacagggtccccactggggcattgcctagtggagctggtgaaggtacgctcgagcgtggtcattgaggacaagtcaatgagagattcccaagtacgtctacagtcagccttgcgaaaattttgcccatggtttctagaacagggaactttatatctaaaagactgggaaaaaattggcaaagaattaaaacaagcaagtagggagggtaaaatcatcccacttacagtatggaatgactgggtcattattaaagtagctttagaaccgtttcaaacagaagaagatagtgtttcagtttctgatgcccctgaaagctgtttaatagattgtaaagaagaggcagagataaaatcccggaaaggaacggaaagtttacattgtgagtatgtagcagagccggtaatggctcagtcaatgcaaaatgttgactataatcaattacaggaggtgatatatcctgaaacgttaaaattagaagaaaaaggtccagaattagcagggccatcagagtctaaaccacgagggccaactcctcttccagcagttcagatgcctgtaacattacaacctcaaatgcaggttaggcaagtacaaaccccaagagaatatcaaatagagaaagatagagtctctgtcacggcaatgccaatccaaatacagtatccacaatatcagccggtagaaaataagacccaactgccagtagcctatcaatactggctgccagccgaacttaagtgtcggccacccccggaaaatcagtatggacagccaggaatgttcccagccccacaggacagggcgccataccctcagccacccactatgagacttaatcctacagcaccacctagtgagcagggtagtgtattacataaaattattgatgaggcaagaaaacaaagagatattgaggcatggcaattcccagtaatattagaaccaataccacctggagaaggggcccaagagggagagcctcccctagctgaggccagatatgagtctttttctataaaaatgctaaaagatatgaaagagggagtaaaacaggcctcggaaaaaatccaagacccaggaaccgcctgcccctcattcaatacaataagacaaggctctaaagagccctaccctgattttgtggcaaggctccaagatgttgctcaaaagtcaattaccgatgagaatgcttgtaaggtcatagtggagttgatggcatatgaaaacgccaatcctgagtgtcaatcagccattaagccattaaaaggtggaacgagagacttgagaaaacaaagagacacagagacaaagtacagagaaagaaaagtgggcccaggggaccagcgctcagcatacggaggacccgtgccagcactggtctccgagttccctcagtatttattgatcattacctctaccatctcggagagggggatgtggcaggacaacagggtaatagtggagagagggtcagcagcaaaacatgtgaacaaatgtctctgcatcataaacaagataacaggggcagagaaagaacagaactacagctcctgtggcatcacctggagatga

SEQ ID NO: 17441 - DNA, 399 bp, Homo sapiens
  SIMILAR (4)..(291): 761254mologous to Homo sapiens reverse transcriptase homolog= pol {retroviral element},accession number S61070,Smith-Waterman Score=384.
ccactaaaagtcaatatttatcctgactctaaatatgccttccatattctgcaccaccatgagagaggtttcctcactacacaagggtcctctatcattaatgcctctttaataaaaacgcttctcaaagctgctttacttccaaaggaagctagagtcattcactgcaaaggccatcaaagggcatcagatcccatcgctcaggacaatgctcatactgataagatagctaaaaaagcagctagcattccaacttatacccctcactttcagtttttctccttctcatctggccactcccacctattcccccgccgaaacttccacttatcaatctcttcccacacaaggcaaatggttcttagacaaagaaacatatttccttccagcctcacaggc

SEQ ID NO: 17442 - DNA, 2385 bp, Homo sapiens; identical to SEQ ID NO: 860
  SIMILAR (1722)..(1886): 501254mologous to Homo sapiens Human secreted protein, SEQ ID NO: 5210,accession number G01129,Smith-Waterman Score=123.

SEQ ID NO: 17443 - DNA, 2544 bp, Homo sapiens
  SIMILAR (103)..(3564): 991254mologous to Homo sapiens cysteine-rich fibroblast growth factor receptor,accession number U28811,Smith-Waterman Score =6082.
atggcccctgaacagggcagagtatccattcttcagacactcttcatagaataccatggttattctatatttgtcgttaagggtgatctgccagattgcgaagctgaccaactcctgcagatgattagggtccaacagatgcatcgaccaaaacttattggagaagaattagcacaactaaaagagcaaagagtccataaaacagacctggaacgagtgttagaagcaaatgatggctcaggaatgttagacgaagatgaggaggatttgcagagggctctggcactaagtcgccaagaaattgacatggaagatgaggaagcagatctccgcagggctattcagctaagtatgcaaggtagttccagaaacatatctcaagatatgacacagacatcaggtacaaatcttacttcagaagagcttcggaagagacgagaagcctactttgaaaaacagcagcaaaagcagcaacagcagcagcagcagcagcagcagggggacctatcaggacagagttcacatccatgtgaaaggccagccaccagttcaggagcacttgggagtgatctagcgttgttgctcacacaaagcctgtttggtagtctcttcacatggacgcgtgtgacatttggtgctgaagacccgggacaggaggactccttcaggagacgggtcccctgtccttgccctcactccgtgaggagatccacctacgacctcgggtcctcagaccaaccagcccaaggaacatctcatgaatttcaaatcgggctgctcctcaccaggctgagccaggtcccaattcttcctcagcctccggtcccccaccctataatccttttatcaccccctcctcacaccgtgtctggcttacagtttctttctgtgactagccctcccctacctgcccaacaatttcttcttaaagaggtggctggagctgaaggcatagccaaggttatccccacctgcccagttcccttattaggccaagacattttaaccaaattatctgcttccctgattattcctggactacagccacatctcattgccacccttcttcccaacccaaagcctccttcgcctcttcctctcgtatcccccaaccttaacccacaagtatgggacacctccactccctccctggcaaccgatcaaacacccattactatcccattaaaacctaatcacccttacctggctcaatgccactattccatcccacaactggctttaagaggactgaagcctgttatcactcgcctgctacagcatgggcttctaaaacctataaactcttcttacaattctcccattttacctgttcaaaaaccggacaagtcttacaggttacctcaggatctggatcttatcaaccaaattgttttgcctatccaccctgtggctagcccccacattattcctgataccacacctgacccccatgactgtatctctctaatccacctggcattcactccatttccccatacttccttctttcctattcctcaccctgatcacacttggtttattgatggcagttccacctggcctaatcgccattcaccagcaaaggtgggctatgctatagtagtatcttccacatctatccttgaagctaccgctctgcccccctccactacctctcagcaagctgaactcattgccttaactcgagccctcgctcttgcaaaaggactacatgtcaatatttatactgactctaaatatgccttccatatcctgcaccacaatgctgttatatgggcagaaagaggtttcctcagtacgcaaaggtcctccatcattattgcctccttaataaaaactcttctcaaggccgctttacttccaaaggaagctggagtcattcactgcaagggccatcaaaaggcatcagatcccatcgctcagggcaatgcttatgctgataagtccgataacggactggcctttactagtcaaatcacccaagcagtttctcaggctcttggtattcagtggaaccttcataccccttaccgtcctcaatcttcaggaaaggactggacagtatttttacctcttgcccttcacagaattagagcccgtcctcgagaagctacagggtacagtccatttgaacttttatatggacgcactttcttgctcagccccaacctcgttccagacaccagccctctaggcgactatcttccagtcctctggcaggctagacaggaaatccaccaggctgctaatcttctcttgtctactccagattcccaactatatgaagacaccctagctggacgatcagttcttattaagaacctgacccctcaaactctacaacctcgatggactggaccctacttagtcatctatagtaccccaactgccgtccgcctgcaggatcctccccactgggttcaccgttccagaataaagctgtgcccatcggacaaccagcctaatctctcttcttcctcctggaagtcacaagtactccccactacttcccttaaagtcactctcatttctgaagaacagtaa

SEQ ID NO: 17444 - DNA, 355 bp, Homo sapiens
  SIMILAR (232)..(354): 801254mologous to Homo sapiens reverse transcriptase homolog= pol {retroviral element},accession number S61070,Smith-Waterman Score=177.
ctatactcagtctttgttgagtctcccacagttaccattgttcctggcctggacttcaatctggcctcccacgttattccagataccacacctgacccgcatgactgtatctctctgatccacctaacattcaccccatttccccatattttcttctttcctgttcctcaccctgatcacatttggtttattgatggcagttccaccaggcctaatcactactcaccagcaaaggaagctggagtcattcactgcaagggccatcaaaaggcatcagatcccattgctctaggcaatgcttatgctgataatgtggctaaagaagcatctagtgttccaacttctgtccctcaca

SEQ ID NO: 17445 - DNA, 471 bp, Homo sapiens
  SIMILAR (103)..(141): 761254mologous to Homo sapiens calbindin D28K,accession number S46006,Smith-Waterman Score=45.
  misc_feature (1)...(471): n = a,t,c or g
ttctcacgtnnnnnnnnnnnnnnnnnnnnnnnnnnnnnnnnnnnnnnnnnnnnnnnnnnnnnnnnnnnnnnnnnnnnnnnnnnnnnnnnnnnngggacatgcatgaaatttggtgccgtgactcagatcgggggacctcctttgggagatcaatcccctgtcctcctgatctttactccatgagaaagatccacctacaacctcaagtcctcagactgaccagcccaagaaacatctcaccaatttcaaatccggaccctactgaaaatcagactgttcaactcacctggcagccactcccagagcccctggaactctggcccaaggctctctgactgactccttcccagatcttctcagcttagcagctgaagactgatgctgcccaatcaccttggaagcctacaggaccatcacagatgctttgggtaactcttacagtggagggtaagtctgtcccccacgcgtccg

SEQ ID NO: 17446 - DNA, 450 bp, Homo sapiens
  SIMILAR (166)..(237): 501254mologous to Homo sapiens reverse transcriptase homolog= pol {retroviral element},accession number S61070,Smith-Waterman Score=56.
  misc_feature (1)...(450): n = a,t,c or g
atggatagatatngactgntcttgggcctctccctttttccctttctccttgctgcctacattgccaagggaagcgactatgtggtcaccatgaggaagcaagaaggaggaaaaatgtcagcattccaagaaaggaagctggaatcattcactgcaaaggccatcaaaaggatagatcccattgctcagggcaatgcttatgctgataagacaaaattcctcgatttggccttcccacctctcagactgtcctttacttgtcaaatcacccaagcagtttctcaggctcttggtattcaatggaaccttcatacccttaccatcctcaatcttcagaaaagaattcgggcctgtcctcaggatgctactggatacagcccatttgagctcctgtatggatgctcatttttattaggccccagtctcattccagacaccagcccaacttga

SEQ ID NO: 17447 - DNA, 337 bp, Homo sapiens
  SIMILAR (1)..(297): 351254mologous to Fowlpox virus gag,accession number AF006065,Smith-Waterman Score=162.
gcagcttacaaagctgttaattatgacaagctgaaagaaactacccaaggtaaagatgaaaacccagcccagtacatggcccacttagcagtgacccttagacgctttactgccctagacccagaagggccagagggccgccttattcttaatatgcattttatcacccagtccactcccaacattaggaaaaaacttcaaaaattaaattccggccctcaaaccccacaacaggatctaattaacctcgccttccagctgaagactgacattgcccgatcacctcggaagcctacaggaccatcacagatgctctgggtaactctcacaatggaag

SEQ ID NO: 17448 - DNA, 801 bp, Homo sapiens
  SIMILAR (247)..(531): 841254mologous to Homo sapiens reverse transcriptase homolog= pol {retroviral element},accession number S61070,Smith-Waterman Score=409.
atgacctcgggtcctcagaccagccagcccaaggaacatctcaccaatttcaaatcggatgaacaggaaagagtttcttctctagcccaatctcacactgacaaccaccggcttcatgagccaggcctccaggaaggcattagagcagttccccgagaagatccccaatggaactatcaggcagattcccccagaggccccctggaccatcatagacgccgagcttcaggtaactcacagtggaggcaagccaaactcattgccttaactcgggccctcactcttgcaaagggactacgcatcaatatttatactgactctaaatatgccttccgtatcctgcaccaccatgctgttatatgggctgaaagaggtttcctccctacgcaagggtcctccatcattaatgccactttaataaaaactcttctcaaggccgctttacttccaaaggaagctggagtcattcactgcaagggccatcaaaaggcatcagatcccatcactcagggcaacgcttatgctgataagggaactaaaaagtggaagaaggaggcagaagagggagaaccagagagatggcagcctgagaaggacttgcctgagaaggactcggccgacattgctggctttgaagatggagaaatgagactgagccaaggaatgcaggtggcctctggtgctgcaaaagacaaggaaatggattctcccacagaccctccagaaggaatgcagacctgccaacactatgattttagtccagtgagacccattttggaatgctggcctccagaaccctaa

SEQ ID NO: 17449 - DNA, 1059 bp, Homo sapiens
  SIMILAR (613)..(765): 881254mologous to Homo sapiens reverse transcriptase homolog= pol {retroviral element},accession number S61070,Smith-Waterman Score=226.
ggccggcgtccgacggggacccttccctgctgtagatgccaccagggaggagtgtctcgtccgtccgtgctgagtgctgtggtatcgtggatgcagtagccatcatgccactctgaaggggtacagcctggaaatgacagagctgaaagaggggaaggacttgggctcctgggagtcaatcactcaattaaccgtaccaggaggcaccgttccccaggtttcttgctggggaggttttgcaggcttgagctcctccctgatcaagaaaagcaacctgaacagttaaaagttaaggtctcttcagagaggaaagcagaggtcaccccagcaggagatagtaccatttcttttgtggaaaggaaacagggaaagggacaatatgacagggaggagtcatcagtggagggaaataaagctggagagttaagtaggaagagattgtggaataccaggaaggccatgggcagtgccagctccagaaaggaagggactgtgacctatttgttttggtattatggagcccctcagagtgccagggccatacagctgaagactgacactgcccaatcacctcggaagcctacaggaccatcacagatgctttgggtaactcttacagtggaagggtcctccatcattaatgcctctttaataaaaactcttctcaaggctgctttacttccaaaggaagctggagtcattcactgcaagggccatcaaaaggcatcagatcccatcgctcagggcaacgcttatgctgataaggatccatcttgttgcagctctgagactgctgggtcccaccccttcaagattcctagccaatcaggctccacttctctccctttaaccagtcctttcactgcattcggttcttgcggtcctttcttaagcggctcgcagggtcccgagcccctcagctccccgggcctcggtggcccagggcccagctcagccgactgggcagtcgatgtaggtcctgagaagagcggcggcggcggcggcggcggcggcgaaggaaaagcgacactgaagcgaaggctcgcggtttcggcctaa

SEQ ID NO: 17450 - DNA, 1479 bp, Homo sapiens
  SIMILAR (549)..(1058): 391254mologous to Feline leukemia virus gag-pol precursor polyprotein gPr80,accession number M18247,Smith-Waterman Score=297.
ttatccccacctgcccagttcccttattaggccaagacattttaaccaaattatctgcttccctgattattcctggactacagccacatctcattgccacccttcttcccaacccaaagcctccttcgcctcttcctctcgtatcccccaaccttaacccacaagtatgggacacctccactccctccctggcaaccgatcaaacacccattactatcccattaaaacctaatcacccttacctggctcaatgccactattccatcccacaactggctttaagaggactgaagcctgttatcactcgcctgctacagcatgggcttctaaaacctataaactcttcttacaattctcccattttacctgttcaaaaaccggacaagtcttacaggttacctcaggatctggatcttatcaaccaaattgttttgcctatccaccctgtggctagcccccacattattcctgataccacacctgacccccatgactgtatctctctaatccacctggcattcactccatttccccatacttccttctttcctattcctcaccctgatcacacttggtttattgatggcagttccacctggcctaatcgccattcaccagcaaaggtgggctatgctatagtagtatcttccacatctatccttgaagctaccgctctgcccccctccactacctctcagcaagctgaactcattgccttaactcgagccctcgctcttgcaaaaggactacatgtcaatatttatactgactctaaatatgccttccatatcctgcaccacaatgctgttatatgggcagaaagaggtttcctcagtacgcaaaggtcctccatcattattgcctccttaataaaaactcttctcaaggccgctttacttccaaaggaagctggagtcattcactgcaagggccatcaaaaaggcatcagatcccatcgctcaggacaatgcttatgctgataagttagctaaaaaagcagctagcgttccaacttctgtccctcacgggatttctcaggccccccctcccctccctacgcatcaagctcggtactggcaaattgactttactcacatgcctcgagtcaggaaactaaaatacctcttggtctgggtagacaccttcactggatgggtagaggcctttcccacagggtctaagaaggccactgcggtcatttcttcccttttgtcagacataattcctcagtttagccttcccacctctatacactccgatagcagactggcctttattagtcaaatcacccaagcagtttctcaggctcttggtattcagtggaaccttcatatctcttaccgtcctcaatcttcaggaaaggtagaacagactaatggtcttttaaaaacacacctcaccaagctcagcctccaacttaaaaaggactggacagtacttttacctcttgcccttctcagaattagagcctgtccttga

SEQ ID NO: 17451 - DNA, 597 bp, Homo sapiens
  SIMILAR (7)..(153): 791254mologous to Homo sapiens Human secreted protein, SEQ ID NO: 5210,accession number G01129,Smith-Waterman Score=216.
atgcatgaaatttggtgccatgagtcggatcgggggacctcccttgggagggcaatcccctgtcctcctgttctttgctccatgagaaagatccacctacgacctcaggtcctcagaccgaccagcccaaggaacatctcaccaattttaaatcgggctgctcctcgccaggcccagctaggtcccaattcttcctcagcctccgctcctccaccctataatccttttatcacctcccctcctcacacctggtctgccttacagtttcgtttcgtgactagccctcccccacctgcccagcaattgactcttaaaaaggtggctggagctaaaggcacagtcaaggaacatttctgccatgatttgccagccagctccatgcagtcaaactacccagtgcacgactctggacacctcactactggaccatccctcttcaagcccacacttaatatagaatacagcacaggacatgctccataccatgtaagaagtgcctgtttcccctttgccttctgccacgattgtcagtttcctgaggcctccccagaagcagaagctgctgctatactttctgtacagcctgcagaaccgtga

SEQ ID NO: 17452 - DNA, 1155 bp, Homo sapiens
  SIMILAR (1003)..(1149): 561254mologous to Homo sapiens RPB11b1beta protein,accession number AJ277740,Smith-Waterman Score=119.
atggctgctggttggaggccacagtgccaccttctcaaggctcagaaactgggaagccttccttccttctgcattcaaacccttaaaatgcacaacccaccccccgtggctgactcagcacaatgggaaaaggaaaaacggagagacaaaggagacacgttttatccgtggacccaaaactccggcgccggaaaagtagaacggactaaaggtcttttaaaaacacacctcaccaagctcagctaccaacttaaaaaggactggacaatacttttacgactttcctttctcagaagtcagacctgtcctcagaatgctacaagcatgtgcctgatgactgaatcctgcccacccaaatgtcaagagcctaccagagatggcttattctcctccactctcctcagtgcatgtgggcgcgactgtgcgtgcgcagccgagggtggtggcggccggcaccccacgccaagggtggtggtggccggcaccccaccctcggccgccgcctccgcgtgtcaggccccgccctgccaggtcgcgctgccctccttctacccagtccttaaaacccggaggagcgggatggcgcgctttgactctggagtgggagtgggagcgagcgcttctgcgactccagttgtcagtctgtctgccgaggcgctgccggcgacctcttcagatggattattacaggtagcgggtggcgtggtaggtactttaaaggaaatcaagcgccaccgcctcgatgcccgcagcgttgtccccagattgcaggaaccgttacgcgccttgcggggaggggaagggtttggcgctgggttacagcgaggtggaaacacgccccttctcttctcccagggagagtgggttggggatgggaagggcgtcttcgccatttctcagagagaacatttctgccatgatttgccagccagctccatgcagtcaaactacccagtgcacgactctggacacctcactactggaccatccctcttcaagcccacacttaatatagaatacagcacaggacatgctccataccatgtaagaagtgcctgtttcccctttgccttctgccacgattgtcagtttcctgaggcctccccagaagcagaagctgctgctatactttctgtacagcctgcagaaccgtga

SEQ ID NO: 17453 - DNA, 1033 bp, Homo sapiens
  SIMILAR (348)..(139): 641254mologous to Homo sapiens calbindin D28K,accession number S46006,Smith-Waterman Score=213.
ctgtgcagtccttttagggtccaaggactcagaggcaaccagcgcctttggctcatttgtcaaaggagggtaaatttttgaaaagcagaagtcacttgtagcattccgaggacaggcctgaattctgagaagggaaagtggtaaaagtattgtccaggcctttttaagttggtggctgagcttggtgaggtgtgtttttaaaagacctttagtccgttctacttttctggatttgaaattggtgagatgtttcttgggctggttggtctgaggacctgaggtcgtaggtggatctttctcatggagcaaagagcaggaggacaggggattgatctcccaagggaggtccccccaatccgagtcatggtaccaaatttcatacgcgtccgtgtgaagagaccaccaaacaggctttgtgtgaggaacacggctgtttatttcacctgggtgcaggcgggctgagtccgaaaagagagtcagcaaagggagatggggtggggccgttttataggattagggaaggtaatggaaaattacagtcaaagggggtttgttctctggtgtctggaatgagactggggcctaataaaaaggagcgtctatacaggagcttaaatgggatgtaccttgtagcattctgaggacaggcctgatttctgagaagggaaagtggtaaaagtattgtccagtcctttttaagctggtggctgagcttggtgaggtgtgtttttaaaagaccctttagtccgttctacttttcttgaagaaggaggaccgtaagggatataaatggtttcactgaatactaagagcctgaaaaactgcttggctgatttgactaataaaggctcgtctgttatcagactgtattgaggtgggaaggctaaactgaggaattatgtctgacagaatggaagaaatgactgcggtggccttctcagaccctgcaggaaaggcctctacctattttgagggcctctaaaagtattaaagcagcggcagccactgcacctcgtgccgaattcgtgcaggc

SEQ ID NO: 17454 - DNA, 426 bp, Homo sapiens
  SIMILAR (196)..(423): 961254mologous to Homo sapiens ferritin heavy subunit,accession number M12937,Smith-Waterman Score=380.
atgagccaagcttgtaattgcgggaagcttctagtcttctgtgagtgtcagcttgcctcttgttcccaccttcaacccctgccaccccaagagttttggtttggatcaggactaggtttctataaactgcaacgtgagctgctaggtgatcacaggccgcgcagccaccgccgccgcctctccttagtcgccgccttgacgaccgcgtccacctcgcaggtgcgccagaactaccaccaggactcagaggcggccatcaaccgccagatcaacctggagctctacgcctcctacgtttacctgtccatgtcttactactttgaccacgatgatgtggctttgaagaactttgccaaatactttcttcaccaatctcatgaggagagggaacatgctgaggaactgatgaagctgcagaaccaatga

SEQ ID NO: 17455 - DNA, 856 bp, Homo sapiens
  SIMILAR (393)..(4): 981254mologous to Homo sapiens DNA polymerase beta,accession number D29013,Smith-Waterman Score=690.
tcattcgctccggtccttgggttcccggtatttccactggatgtaatcaaagatgtctttttcactatccactggcaggggttctcctgcaactccagtgactcccaagggacggatggtgtactcattgattgtgaaacccttttctagggcatgagccctcatattcttattgaaaatatcactcccagtgaaatagagaacaccacagtaatactgatctttgggtatcaacctgatatcaattcttctgtgtggatattctttttcatcatttttactgggaagctggcaaacacccatgaactttgtctcaccctttgacagggtatctgtgataaaatgaaccttttgtaactgctccacaacctgatgtaacagttttggcttttccagtttacgtaattttccagttgctaaaaactcatcaatcttttcagcaatttttgttcctactccaggcaatttcttagcttcagctccactctttattttgtgtgggtattttgctataacagatgctgcttttccaaatagaggatgatagttcatataacaaacagagatatcaattgtcagattgcttatgcccgtatagagggggatatgatagtctgcgcagcatatgcacacgaactgccaaaatatggtgtgaaggttggcctgacaaattatgctgcaacatattgtactggcctgctgctggcccacaggcttctcaataggtttggcatggacaagatctgctatttggatgcaggccttgccagaactaccactggcaataaagtttttggtgacctggatggaggcttgtctatccctcaaagtaccaaatgattccctggttatgatt

SEQ ID NO: 17456 - DNA, 1172 bp, Homo sapiens
  SIMILAR (789)..(1229): 291254mologous to Arabidopsis thaliana extensin protein- like,accession number AP000735,Smith-Waterman Score=150.
  misc_feature (1)...(1172): n = a,t,c or g
cgggccccctttgcattgcactcgcgctgcaggaattcggcacgaggcgccgctgggcctgcaggtctctgtcgagcagcggacgccggtctctgttccgcaggatggggagtgttaaagctgttaagaataaggcctactttaagagataccaagtgaaatttagaagacgacgagagggtaaaacgtgattattatgctcggaaacgcgttggtgatacaagataaaaataaatacaacacacccaaataccaggatgatagttctgtgtgacaaacagagatattcatttgtcagatgctttatgcccccgtatagagggggatatgatagtctgcgcagcgtattgcacaccgaacttgccaaaaatatgggtgtgaagggttggcctgacaaattatggctgcagcatatttgtactggcctgctgctgggcccgcaggcttcttccataggttttggcatggacaagatctatgaaggccaagttggagttgactggtgatgaatacaatgtggaaagcattgatggtcagccagggtgccttccacctgcttatttgggatgcaggcccttgcccngaacctacccactggccattaaagttttttggtgcccctgaagggaagctgtggatgggaggcttgtctatcccttcacagtacccaaaccgattcccttggttatgattctgaaaagcaaaggaattttaatgcagaaagtacatcggaaggcacattcatggggccagaattgttgcagatttacatggcgctactttattggaagaagatggaagatgcttacaagaaaacagttctcatcaatacataaaagaacagcgtaacttccagacatgatgggaggagatgtattaagaaagctcatgctgctatacgagagaatccagttctatggaaaagaaggcccaaggaaagaagtttaaaaagaagaggtggaaccgtcccaaaatgtccccttgctcaggaagaaggatcgggtagctcaaaagaaggcaagcttcctccagagctccaggagcgggctgctggagagcttaaccccagccattttcccatgattttttcagatatcgctaactaaacttatgaacagcaactaaaaaaaaaaaaaaaaagtcgacgcggccgcaatttagtagtagtaggc

SEQ ID NO: 17457 - DNA, 4969 bp, Homo sapiens
  SIMILAR (1138)..(1776): 901254mologous to Homo sapiens cell cycle protein p38-2G4 homolog,accession number U59435,Smith-Waterman Score=988.
acggaggacatcagcagtgtctcgaggccttcttttcatgtctttcgttcagccactcctgcagcctccagtccacctcctcacagcacgcgtgcgtgtccctgggtacttgcagatagatggagtaaagattaaggaacacaatggcaagttaatgaactgttttaagaccaaaatgacttactacagctttatgaaatgtgtaggcctccctgcacaactgaccattggtttcagtggcccaagcagggaaactggcagtgaccctcgagcagcaaggaggggagaggaccctcagtccaaggacagaggagatggactgtctgaacaaaccgaggctcagagaagtggagtgcattgcccgaggtcacagttagtgggagagctggccgggcagtcccctcgcactatccctgcggctctccgtgtctgcctttacctcctatgcatcacgtcctataatcacacttcaaaggatgagtcctctaaggatgaagaggaagaaatcaaactggagataaatatgctaaagaaatactctcatcacagaaacattgcaacatattatggtgctttcatcaaaaagagccctccaggacatgatgaccaactctggcttgttatggagttctgtggggctgggtccattacagaccttgtgaagaacaccaaagggaacacactcaaagaagactggatcgcttacatctccagagaaatcctgaggggactggcacatcttcacattcatcatgtgattcaccgggatatcaagggccagaatgtgttgctgactgagaatgcagaggtgaaacttgaccaccaccaccatccaattgggtgggatgcagaagtcactgaaaaatcagcagaagttccaagtgctttaggttctctgaaagcactgaaggttgtggttcattcaaaaggccctctgctggtcactgttggagaagctggggaggcagccagatccaggcctcacagaagcttccagactgttgactttggtgtgagtgctcagctggacaggactgtggggcggagaaatacgttcataggcactccctactggatggctcctgaggtcatcgcctgtgatgagaacccagatgccacctatgattacagaagtgatctttggtcttgtggcattacagccattgagatggcagaaggtgctccccctctctgtgacatgcatccaatgagagcactgtttctcattcccagaaaccctcctccccggctgaagtcaaaaaaatggtcgaagaagttttttagttttatagaagggtgcctggtgaagaattacatgcagcggccctctacagagcagcttttgaaacatccttttataagggatcagccaaatgaaaggcaagttagaatccagcttaaggatcatatagatcgtaccaggaagaagagaggcgagaaagatgaaactgagtatgagtacagtgggagtgaggaagaagaggaggaagtgcctgaacaggaaggagagccaagttccattgtgaacgtgcctggtgagtctactcttcgccgagatttcctgagactgcagcaggagaacaaggaacgttccgaggctcttcggagacaacagttactacaggagcaacagctccgggagcaggaagaatataaaaggcaactgctggcagagagacagaagcggattgagcagcagaaagaacagaggcgacggctagaagagaagctgctggaggatgtgttccagcaaagtaagaaagaagatgacaaggattcccgggaagtttgtggacagaaatataggatgactggaaaacagtcagtctccaaaaataaagaaagaatacctgatttcttcaactgtgttgaaaggagtgttatgcaacaaaggagagagcgggaagctagaaggcagcaggaacgtgaacagcgaaggagagaacaagaagaaaagaggcgtctagaggagttggagagaaggcgcaaagaagaagaggagaggagacgggcagaagaagaaaagaggagagttgaaagagaacaggagtatatcaggcgacagctagaagaggagcagcggcacttggaagtccttcagcagcagctgctccaggagcaggccatgttactggagtgccgatggcgggagatggaggagcaccggcaggcagagaggctccagaggcagttgcaacaagaacaagcatatctcctgtctctacagcatgaccataggaggccgcacccgcagcactcgcagcagccgccaccaccgcagcaggaaaggagcaagccaagcttccatgctcccgagcccaaagcccactacgagcctgctgaccgagcgcgagaggtggaagatagatttaggaaaactaaccacagctcccctgaagcccagtctaagcagacaggcagagtattggagccaccagtgccttcccgatcagagtctttttccaatggcaactccgagtctgtgcatcccgccctgcagagaccagcggagccacaggacccatgtccaccttcccgcagtgaggtgctcagtcagagctctgactctaagtcagaggcgcctgaccctacccaaaaggcttggtctagatcagacagtgacgaggtgcctccaagggttcctgtgagaacaacatctcgctcccctgttctgtcccgtcgagattccccactgcagggcagtgggcagcagaatagccaggcaggacagagaaactccaccagcagtattgagcccaggcttctgtgggagagagtggagaagctggtgcccagacctggcagtggcagctcctcagggtccagcaactcaggatcccagcccgggtctcaccctgggtctcagagtggctccggggaacgcttcagagtgagatcatcatccaagtctgaaggctctccatctcagcgcctggaaaatgcagtgaaaaaacctgaagataaaaaggaagttttcagacccctcaagcctgctgatctgaccgcactggccaaagagcttcgagcagtggaagatgtacggccacctcacaaagtaacggactactcctcatccagtgaggagtcggggacgacggatgaggaggacgacgatgtggagcaggaaggggctgacgagtccacctcaggaccagaggacaccagagcagcgtcatctctgaatttgagcaatggtgaaacggaatctgtgaaaaccatgattgtccatgatgatgtagaaagtgagccggccatgaccccatccaaggagggcactctaatcgtccgccagagtacagttgaccaaaagcgtgccagccatcatgagagcaatggctttgccggtcgcattcacctcttgccagatctcttacagcaaagccattcctcctccacttcctccacctcctcctccccatcctccagccagccgacacccaccatgtccccacagacaccccaggacaagctcactgctaatgagactcagtccgctagtagcacactccagaaacacaaatcttcctcctcctttacaccttttatagaccccagattactacagatttctccatctagcggaacaacagtgacatctgtggtgggattttcctgtgatgggatgagaccagaagccataaggcaagatcctacccggaaaggctcagtggtcaatgtgaatcctaccaacactaggccacagagtgacaccccggagattcgtaaatacaagaagaggtttaactctgagattctgtgtgctgccttatggggagtgaatttgctagtgggtacagagagtggcctgatgctgctggacagaagtggccaagggaaggtctatcctcttatcaaccgaagacgatttcaacaaatggacgtacttgagggcttgaatgtcttggtgacaatatctggcaaaaaggataagttacgtgtctactatttgtcctggttaagaaataaaatacttcacaatgatccagaagttgagaagaagcagggatggacaaccgtaggggatttggaaggatgtgtacattataaagttgtaaaatatgaaagaatcaaatttctggtgattgctttgaagagttctgtggaagtctatgcgtgggcaccaaagccatatcacaaatttatggcctttaagtcatttggagaattggtacataagccattactggtggatctcactgttgaggaaggccagaggttgaaagtgatctatggatcctgtgctggattccatgctgttgatgtggattcaggatcagtctatgacatttatctaccaacacatatccagtgtagcatcaaaccccatgcaatcatcatcctccccaatacagatggaatggagcttctggtgtgctatgaagatgagggggtttatgtaaacacatatggaaggatcaccaaggatgtagttctacagtggggagagatgcctacatcagtagcatatattcgatccaatcagacaatgggctggggagagaaggccatagagatccgatctgtggaaactggtcacttggatggtgtgttcatgcacaaaagggctcaaagactaaaattcttgtgtgaacgcaatgacaaggtgttctttgcctctgttcggtctggtggcagcagtcagctccagaattccttgtctctgaatgactctgtcttgtgggtgtctgacagtggcgacgatgaacatgccgttggttttattggcagtgggcacaaggaggcttttcataagatgaaacatgccacagtgaacacactcgtgtacatatcaagagaagaaggaaaggcacaggtggagaacagtaaaaggcctggtaggcatgatcgccgtcgggcaaatctggggccatgctctcagtgttggcacctcgccttagtctccagggctgcccgtgctgcatcatcatcaattaggcatattaataaaccacttcgtgtttcatcctag

SEQ ID NO: 17458 - DNA, 284 bp, Homo sapiens
  SIMILAR (462)..(656): 731254mologous to Saimiriine herpesvirus 2 DHFR (dihydrofolate reductase) (EC 1.5.1.3),accession number M19237,Smith-Waterman Score=251.
cttagaggactcatcctttgaagtgtgattataggacgtgatgcataggaggtaaaggcagacacggagagccgcagggatagtgcgaggggactgcccggccagctctcccactaactgtgacctcgggcaatgcactccacttctctgagcctcggtttgttcagacagtccatctcctctgtccttggactgagggtcctctcccctccttgctgctcgagggtcactgccagtttccctgcttgggccactgaaaccaatggtcagttgtgcagggaggc

SEQ ID NO: 17459 - DNA, 4266 bp, Homo sapiens
  SIMILAR (1)..(843): 941254mologous to Escherichia coli Rhs core protein with extension,accession number U16247,Smith-Waterman Score=1437.
caagtctataagggtcgacatgttaaaacgggtcagttggcagccatcaaagttatggatgtcactgaggatgaagaggaagaaatcaaactggagataaatatgctaaagaaatactctcatcacagaaacattgcaacatattatggtgctttcatcaaaaagagccctccaggacatgatgaccaactctggcttgttatggagttctgtggggctgggtccattacagaccttgtgaagaacaccaaagggaacacactcaaagaagactggatcgcttacatctccagagaaatcctgaggggactggcacatcttcacattcatcatgtgattcaccgggatatcaagggccagaatgtgttgctgactgagaatgcagaggtgaaacttgttgactttggtgtgagtgctcagctggacaggactgtggggcggagaaatacgttcataggcactccctactggatggctcctgaggtcatcgcctgtgatgagaacccagatgccacctatgattacagaagtgatctttggtcttgtggcattacagccattgagatggcagaaggtgctccccctctctgtgacatgcatccaatgagagcactgtttctcattcccagaaaccctcctccccggctgaagtcaaaaaaatggtcgaagaagttttttagttttatagaagggtgcctggtgaagaattacatgcagcggccctctacagagcagcttttgaaacatccttttataagggatcagccaaatgaaaggcaagttagaatccagcttaaggatcatatagatcgtaccaggaagaagagaggcgagaaagatgaaactgagtatgagtacagtgggagtgaggaagaagaggaggaagtgcctgaacaggaaggagagccaagttccattgtgaacgtgcctggtgagtctactcttcgccgagatttcctgagactgcagcaggagaacaaggaacgttccgaggctcttcggagacaacagttactacaggagcaacagctccgggagcaggaagaatataaaaggcaactgctggcagagagacagaagcggattgagcagcagaaagaacagaggcgacggctagaagagcaacaaaggagagagcgggaagctagaaggcagcaggaacgtgaacagcgaaggagagaacaagaagaaaagaggcgtctagaggagttggagagaaggcgcaaagaagaagaggagaggagacgggcagaagaagaaaagaggagagttgaaagagaacaggagtatatcaggcgacagctagaagaggagcagcggcacttggaagtccttcagcagcagctgctccaggagcaggccatgttactgcatgaccataggaggccgcacccgcagcactcgcagcagccgccaccaccgcagcaggaaaggagcaagccaagcttccatgctcccgagcccaaagcccactacgagcctgctgaccgagcgcgagaggtggaagatagatttaggaaaactaaccacagctcccctgaagcccagtctaagcagacaggcagagtattggagccaccagtgccttcccgatcagagtctttttccaatggcaactccgagtctgtgcatcccgccctgcagagaccagcggagccacaggttcctgtgagaacaacatctcgctcccctgttctgtcccgtcgagattccccactgcagggcagtgggcagcagaatagccaggcaggacagagaaactccaccagcagtattgagcccaggcttctgtgggagagagtggagaagctggtgcccagacctggcagtggcagctcctcagggtccagcaactcaggatcccagcccgggtctcaccctgggtctcagagtggctccggggaacgcttcagagtgagatcatcatccaagtctgaaggctctccatctcagcgcctggaaaatgcagtgaaaaaacctgaagataaaaaggaagttttcagacccctcaagcctgctggcgaagtggatctgaccgcactggccaaagagcttcgagcagtggaagatgtacggccacctcacaaagtaacggactactcctcatccagtgaggagtcggggacgacggatgaggaggacgacgatgtggagcaggaaggggctgacgagtccacctcaggaccagaggacaccagagcagcgtcatctctgaatttgagcaatggtgaaacggaatctgtgaaaaccatgattgtccatgatgatgtagaaagtgagccggccatgaccccatccaaggagggcactctaatcgtccgccagactcagtccgctagtagcacactccagaaacacaaatcttcctcctcctttacaccttttatagaccccagattactacagatttctccatctagcggaacaacagtgacatctgtggtgggattttcctgtgatgggatgagaccagaagccataaggcaagatcctacccggaaaggctcagtggtcaatgtgaatcctaccaacactaggccacagagtgacaccccggagattcgtaaatacaagaagaggtttaactctgagattctgtgtgctgccttatggggagtgaatttgctagtgggtacagagagtggcctgatgctgctggacagaagtggccaagggaaggtctatcctcttatcaaccgaagacgatttcaacaaatggacgtacttgagggcttgaatgtcttggtgacaatatctggcaaaaaggataagttacgtgtctactatttgtcctggttaagaaataaaatacttcacaatgatccagaagttgagaagaagcagggatggacaaccgtaggggatttggaaggatgtgtacattataaagttgtaaaatatgaaagaatcaaatttctggtgattgctttgaagagttctgtggaagtctatgcgtgggcaccaaagccatatcacaaatttatggcctttaagtcatttggagaattggtacataagccattactggtggatctcactgttgaggaaggccagaggttgaaagtgatctatggatcctgtgctggattccatgctgttgatgtggattcaggatcagtctatgacatttatctaccaacacatatccagtgtagcatcaaaccccatgcaatcatcatcctccccaatacagatggaatggagcttctggtgtgctatgaagatgagggggtttatgtaaacacatatggaaggatcaccaaggatgtagttctacagtggggagagatgcctacatcagtagcatatattcgatccaatcagacaatgggctggggagagaaggccatagagatccgatctgtggaaactggtcacttggatggtgtgttcatgcacaaaagggctcaaagactaaaattcttgtgtgaacgcaatgacaaggtgttctttgcctctgttcggtctggtggcagcagtcaggtttatttcatgaccttaggcaggacttctcttctgagctggtagaagcagtgtgatccagggattactggcctccagagtcttcaagatcctgagaacttggaattccttgtaactggagctcggagctgcaccgagggcaaccaggacagctgtgtgtgcagacctcatgtgttgggttctctcccctccttcctgttcctcttatataccagtttatccccattctttttttttttcttactccaaaataaatcaaggctgcaatgcagctggtgctgttcagattctaccatcaggtgctataagtgtttgggattgagcatcatactggaaagcaaacacctttcctccagctccagaattccttgtctctgaatgactctgtcttgtgggtgtctgacagtggcgacgatgaacatgccgttggttttattggcagtgggcacaaggaggtgagaagtggtggtaaaaggagcggagtgctgaagcagagagcagatttaatatagtaacattaacagtgtatttaattgacatttcttttttgtaatgtgacgatatgtggacaaagaagaagatgcaggtttaagaagttaatatttataaaatgtgaaagacacagttactaggataacttttttgtgggtggggcttgggagatggggtggggtgggttaaggggtcccattttgtttctttggatttggggtgggggtcctggccaagaactcagtcatttttctgtgtaccaggttgcctaaatcatgtgcagatggttct

SEQ ID NO: 17460 - DNA, 3775 bp, Homo sapiens
  SIMILAR (2)..(3772): 1001254mologous to Homo sapiens nik-like; similar to U88984 (PID:g1872546),accession number AC005035,Smith-Waterman Score=6557.
ggatgaagaggaagaaatcaaactggagataaatatgctaaagaaatactctcatcacagaaacattgcaacatattatggtgctttcatcaaaaagagccctccaggacatgatgaccaactctggcttgttatggagttctgtggggctgggtccattacagaccttgtgaagaacaccaaagggaacacactcaaagaagactggatcgcttacatctccagagaaatcctgaggggactggcacatcttcacattcatcatgtgattcaccgggatatcaagggccagaatgtgttgctgactgagaatgcagaggtgaaacttgttgactttggtgtgagtgctcagctggacaggactgtggggcggagaaatacgttcataggcactccctactggatggctcctgaggtcatcgcctgtgatgagaacccagatgccacctatgattacagaagtgatctttggtcttgtggcattacagccattgagatggcagaaggtgctccccccctctgtgacatgcatccaatgagagcactgtttctcattcccagaaaccctcctccccggctgaagtcaaaaaaatggtcgaagaagttttttagttttatagaagggtgcctggtgaagaattacatgcagcggccctctacagagcagcttttgaaacatccttttataagggatcagccaaatgaaaggcaagttagaatccagcttaaggatcatatagatcgtaccaggaagaagagaggcgagaaagatgaaactgagtatgagtacagtgggagtgaggaagaagaggaggaagtgcctgaacaggaaggagagccaagttccattgtgaacgtgcctggtgagtctactcttcgccgagatttcctgagactgcagcaggagaacaaggaacgttccgaggctcttcggagacaacagttactacaggagcaacagctccgggagcaggaagaatataaaaggcaactgctggcagagagacagaagcggattgagcagcagaaagaacagaggcgacggctagaagagcaacaaaggagagagcgggaagctagaaggcagcaggaacgtgaacagcgaaggagagaacaagaagaaaagaggcgtctagaggagttggagagaaggcgcaaagaagaagaggagaggagacgggcagaagaagaaaagaggagagttgaaagagaacaggagtatatcaggcgacagctagaagaggagcagcggcacttggaagtccttcagcagcagctgctccaggagcaggccatgttactggagtgccgatggcgggagatggaggagcaccggcaggcagagaggctccagaggcagttgcaacaagaacaagcatatctcctgtctctacagcatgaccataggaggccgcacccgcagcactcgcagcagccgccaccaccgcagcaggaaaggagcaagccaagcttccatgctcccgagcccaaagcccactacgagcctgctgaccgagcgcgagaggtagaagatagatttaggaaaactaaccacagctcccctgaagcccagtctaagcagacaggcagagtattggagccaccagtgccttcccgatcagagtctttttccaatggcaactccgagtctgtgcatcccgccctgcagagaccagcggagccacaggtacagtggtcccacctggcatctctcaagaacaatgtttcccctgtctcgcgatcccattccttcagtgacccttctcccaaatttgcacaccaccatcttcgttctcaggacccatgtccaccttcccgcagtgaggtgctcagtcagagctctgactctaagtcagaggcgcctgaccctacccaaaaggcttggtctagatcagacagtgacgaggtgcctccaagggtacctgtgagaacaacatctcgctcccctgttctgtcccgtcgagattccccactgcagggcagtgggcagcagaatagccaggcaggacagagaaactccaccagcagtattgagcccaggcttctgtgggagagagtggagaagctggtgcccagacctggcagtggcagctcctcagggtccagcaactcaggatcccagcccgggtctcaccctgggtctcagagtggctccggggaacgcttcagagtgagaagttcatccaagtctgaaggctctccatctcagcgcctggaaaatgcagtgaaaaaacctgaagataaaaaggaagttttcagacccctcaagcctgctgatctgaccgcactggccaaagagcttcgagcagtggaagatgtacggccacctcacaaagtaacggactactcctcatccagtgaggagtcggggacgacggatgaggaggacgacgatgtggagcaggaaggggctgacgagtccacctcaggaccagaggacaccagagcagcgtcatctctgaatttgagcaatggtgaaacggaatctgtgaaaaccatgattgtccatgatgatgtagaaagtgagccggccatgaccccatccaaggagggcactctaatcgtccgccagactcagtccgctagtagcacactccagaaacacaaatcttcctcctcctttacaccttttatagaccccagattactacagatttctccatctagcggaacaacagtgacatctgtggtgggattttcctgtgatgggatgagaccagaagccataaggcaagatcctacccggaaaggctcagtggtcaatgtgaatcctaccaacactaggccacagagtgacaccccggagattcgtaaatacaagaagaggtttaactctgagattctgtgtgctgccttatggggtgtgaatttgctagtgggtacagagagtggcctgatgctgctggacagaagtggccaagggaaggtctatcctcttatcaaccgaagacgatttcaacaaatggacgtacttgagggcttgaatgtcttggtgacaatatctggtaaaaaggataagttacgtgtctactatttgtcctggttaagaaataaaatacttcacaatgatccagaagttgagaagaagcagggatggacaaccgtaggggatttggaaggatgtgtacattataaagttgtaaaatatgaaagaatcaaatttctggtgattgctttgaagagttctgtggaagtctatgcgtgggcaccaaagccatatcacaaatttatggcctttaagtcatttggagaattggtacataagccattactggtggatctcactgttgaggaaggccagaggttgaaagtgatctatggatcctgtgctggattccatgctgttgatgtggattcaggatcagtctatgacatttatctaccaacacatatccagtgtagcatcaaaccccatgcaatcatcatcctccccaatacagatggaatggagcttctggtgtgctatgaagatgagggggtttatgtaaacacatatggaaggatcaccaaggatgtagttctacagtggggagagatgcctacatcagtagcatatattcgatccaatcagacaatgggctggggagagaaggccatagagatccgatctgtggaaactggtcacttggatggtgtgttcatgcacaaaagggctcaaagactaaaattcttgtgtgaacgcaatgacaaggtattctttgcctctgttcggtctggtggcagcagtcaggtttatttcatgaccttaggcaggacttctcttctgagctggtag

SEQ ID NO: 17461 - DNA, 3864 bp, Homo sapiens
  SIMILAR (80)..(3574): 1001254mologous to Homo sapiens HPK/GCK-like kinase HGK,accession number AF096300,Smith-Waterman Score=6056.
aattcgaggatccgggtaccatggcacagagcgacagagacatttattgttatttgttttttggtggcaaaaagggaaaatggcgaacgactcccctgcaaaaagtctggtggacatcgacctctcctccctgcgggatcctgctgggatttttgagctggtggaagtggttggaaatggcacctatggacaagtctataagggtcgacatgttaaaacgggtcagttggcagccatcaaagttatggatgtcactgaggatgaagaggaagaaatcaaactggagataaatatgctaaagaaatactctcatcacagaaacattgcaacatattatggtgctttcatcaaaaagagccctccaggacatgatgaccaactctggcttgttatggagttctgtggggctgggtccattacagaccttgtgaagaacaccaaagggaacacactcaaagaagactggatcgcttacatctccagagaaatcctgaggggactggcacatcttcacattcatcatgtgattcaccgggatatcaagggccagaatgtgttgctgactgagaatgcagaggtgaaacttgttgactttggtgtgagtgctcagctggacaggactgtggggcggagaaatacgttcataggcactccctactggatggctcctgaggtcatcgcctgtgatgagaacccagatgccacctatgattacagaagtgatctttggtcttgtggcattacagccattgagatggcagaaggtgctccccctctctgtgacatgcatccaatgagagcactgtttctcattcccagaaaccctcctccccggctgaagtcaaaaaaatggtcgaagaagttttttagttttatagaagggtgcctggtgaagaattacatgcagcggccctctacagagcagcttttgaaacatccttttataagggatcagccaaatgaaaggcaagttagaatccagcttaaggatcatatagatcgtaccaggaagaagagaggcgagaaagatgaaactgagtatgagtacagtgggagtgaggaagaagaggaggaagtgcctgaacaggaaggagagccaagttccattgtgaacgtgcctggtgagtctactcttcgccgagatttcctgagactgcagcaggagaacaaggaacgttccgaggctcttcggagacaacagttactacaggagcaacagctccgggagcaggaagaatataaaaggcaactgctggcagagagacagaagcggattgagcagcagaaagaacagaggcgacggctagaagagcaacaaaggagagagcgggaggctagaaggcagcaggaacgtgaacagcgaaggagagaacaagaagaaaagaggcgtctagaggagttggagagaaggcgcaaagaagaagaggagaggagacgggcagaagaagaaaagaggagagttgaaagagaacaggagtatatcaggcgacagctagaagaggagcagcggcacttggaagtccttcagcagcagctgctccaggagcaggccatgttactgcatgaccataggaggccgcacccgcagcactcgcagcagccgccaccaccgcagcaggaaaggagcaagccaagcttccatgctcccgagcccaaagcccactacgagcctgctgaccgagcgcgagaggttcctgtgagaacaacatctcgctcccctgttctgtcccgtcgagattccccactgcagggcagtgggcagcagaatagccaggcaggacagagaaactccaccagtattgagcccaggcttctgtgggagagagtggagaagctggtgcccagacctggcagtggcagctcctcagggtccagcaactcaggatcccagcccgggtctcaccctgggtctcagagtggctccggggaacgcttcagagtgagatcatcatccaagtctgaaggctctccatctcagcgcctggaaaatgcagtgaaaaaacctgaagataaaaaggaagttttcagacccctcaagcctgctggcgaagtggatctgaccgcactggccaaagagcttcgagcagtggaagatgtacggccacctcacaaagtaacggactactcctcatccagtgaggagtcggggacgacggatgaggaggacgacgatgtggagcaggaaggggctgacgagtccacctcaggaccagaggacaccagagcagcgtcatctctgaatttgagcaatggtgaaacggaatctgtgaaaaccatgattgtccatgatgatgtagaaagtgagccggccatgaccccatccaaggagggcactctaatcgtccgccagactcagtccgctagtagcacactccagaaacacaaatcttcctcctcctttacaccttttatagaccccagattactacagatttctccatctagcggaacaacagtgacatctgtggtgggattttcctgtgatgggatgagaccagaagccataaggcaagatcctacccggaaaggctcagtggtcaatgtgaatcctaccaacactaggccacagagtgacaccccggagattcgtaaatacaagaagaggtttaactctgagattctgtgtgctgccttatggggagtgaatttgctagtgggtacagagagtggcctgatgctgctggacagaagtggccaagggaaggtctatcctcttatcaaccgaagacgatttcaacaaatggacgtacttgagggcttgaatgtcttggtgacaatatctggcaaaaaggataagttacgtgtctactatttgtcctggttaagaaataaaatacttcacaatgatccagaagttgagaagaagcagggatggacaaccgtaggggatttggaaggatgtgtacattataaagttgtaaaatatgaaagaatcaaatttctggtgattgctttgaagagttctgtggaagtctatgcgtgggcaccaaagccatatcacaaatttatggcctttaagtcatttggagaattggtacataagccattactggtggatctcactgttgaggaaggccagaggttgaaagtgatctatggatcctgtgctggattccatgctgttgatgtggattcaggatcagtctatgacatttatctaccaacacatgtaagaaagaacccacactctatgatccagtgtagcatcaaaccccatgcaatcatcatcctccccaatacagatggaatggagcttctggtgtgctatgaagatgagggggtttatgtaaacacatatggaaggatcaccaaggatgtagttctacagtggggagagatgcctacatcagtagcatatattcgatccaatcagacaatgggctggggagagaaggccatagagatccgatctgtggaaactggtcacttggatggtgtgttcatgcacaaaagggctcaaagactaaaattcttgtgtgaacgcaatgacaaggtgttctttgcctctgttcggtctggtggcagcagtcaggtttatttcatgaccttaggcaggacttctcttctgagctggtagaagcagtgtgatccagggattactggcctccagagtcttcaagatcctgagaacttggaattccttgtaactggagctcggagctgcaccgagggcaaccaggacagctgtgtgtgcagacctcatgtgttgggttctctcccctccttcctgttcctcttatataccagtttatccccattctttttttttttcttactccaaaataaatcaaggctgcaatgcagctggtgctgttcagattccaaaaaaaaaaaaaaaccatggtacccggatcctcgaattcc

SEQ ID NO: 17462 - DNA, 859 bp, Homo sapiens
  SIMILAR (300)..(500): 531254mologous to Homo sapiens Extended human secreted protein sequence, SEQ ID NO. 503,accession number Y36118,Smith- Waterman Score=184.
acggaggacatcagcagtgtctcgaggccttcttttcatgtctttcgttcagccactcctgcagcctccagtccacctcctcacagcacgcgtgcgtgtccctgggtacttgcagatagatggagtaaagattaaggaacacaatggcaagttaatgaactgttttaagaccaaaatgacttactacagctttatgaaatgtgtaggcctccctgcacaactgaccattggtttcagtggcccaagcagggaaactggcagtgaccctcgagcagcaaggaggggagaggaccctcagtccaaggacagaggagatggactgtcttgttatggagttctgtggggctgggtccattacagaccttgtgaagaacaccaaagggaacacactcaaagaagactggatcgcttacatctccagagaaatcctgaggggaaaggatgtcaggaaggcactgagcaaaaggctgttacagctgaccttgagaggtcagccaatccattagctgcatggggcccagagagggtgaagttctttcatgagatcatgcagcaagttagtgtcaagtctagaattagaacttgggtgtctttgaccctgacagcgggagatgagcagtggccattaggtgtgatggtggttgtaggagcagccacaggcactctgaaattgaaggagaagagaagaggcaggggaagtgtagctggttggcttgtcagctccctgaggctctcaccttgtcacaccaaagggcaaaatgtatggagcgtgcatgggacagtagaaagaatggaggattcagggccagacaaacccatcaagccttactctcagaggaactgctctgtgtgcaggtag

SEQ ID NO: 17463 - DNA, 2623 bp, Homo sapiens
  SIMILAR (56)..(2527): 991254mologous to Homo sapiens Human GEF containing NEK-like kinase substrate sGNK,accession number Y95293,Smith-Waterman Score= 4092.
tttcgtgcccggcctgcgagagcctcagtgggagccggctcagccctcggccaccatgtcggcgccgtcggaggaggaggagtacgcgcggctggtgatggaggcgcagccggagtggctgcgcgccgaggtgaagcggctgtcccacgagctggccgagaccacgcgtgagaagatccaggcggccgagtacgggctggcggtgctcgaggagaagcaccagctcaagctgcagttcgaggagctcgaggtggactatgaggctatccgcagcgagatggagcagctcaaggaggcctttggacaagcacacacaaaccacaagaaggtggctgctgacggagagagccgggaggagagcctgatccaggagtcggcctccaaggagcagtactacgtgcggaaggtgctagagctgcagacggagctgaagcagttgcgcaatgtcctcaccaacacgcagtcggagaatgagcgcctggcctctgtggcccaggagctgaaggagatcaaccagaatgtggagatccagcgtggccgcctgcgggatgacatcaaggagtacaaattccgggaagctcgtctgctgcaggactactcggaactggaggaggagaacatcagcctgcagaagcaagtgtctgtgctcagacagaaccaggtggagtttgagggcctcaagcatgagatcaagcgtctggaggaggagaccgagtacctcaacagccagctggaggatgccatccgcctcaaggagatctcagagcggcagctggaggaggcgctggagaccctgaagacggagcgcgaacagaagaacagcctgcgcaaggagctgtcacactacatgagcatcaatgactccttctacaccagccacctgcatgtctcgctggatggcctcaagttcagtgacgatgctgccgagcccaacaacgatgccgaggccctggtcaatggctttgagcacggcggcctggccaagctgccactggacaacaagacctccacgcccaagaaggagggcctcgcaccgccctcccccagcctcgtctccgacctactcagtgagctcaacatctctgagatccagaagctgaagcagcagctgatgcagatggagcgggaaaaggcgggcctgctggcaacgctgcaggacacacagaagcagctggagcacacgcggggctccctgtcagaacagcaggagaaggtgacccgcctcacagagaatctgagtgccctgcggcgcctgcaggccagcaaggagcggcagacagccctggacaacgagaaggaccgtgacagccatgaggatggggactactacgaggtggacatcaacgggcctgagatcttggcctgcaagtaccatgtggctgtggctgaggctggcgagctccgcgagcagctcaaggcactgcgcagcacgcacgaggctcgtgaggcccagcacgccgaggagaagggccgctatgaggctgagggccaggcactcacggagaaggtctccctgctagagaaggccagccgccaggaccgcgagctgctggcccggctggagaaggagctaaagaaggtgagcgacgtcgccggcgagacacagggcagcctgagtgtggcccaggatgagctggtgaccttcagtgaggagctggccaatctctaccaccacgtgtgcatgtgcaacaatgagacacccaaccgtgtcatgctggactactaccgcgagggccagggcggggccggccgcaccagtcccgggggccgcaccagccccgaggcgcgtggccggcgctcacccatcctcctacccaaggggctgctggctcctgaggcgggccgagcagatggtgggacgggggacagcagcccctcgcctggctcctcactgccatcacccctgagtgacccacgccgggagcccatgaacatctacaacctgatcgctatcatccgtgaccagatcaagcacctgcaggcagccgtggaccgcaccacggagctgtcacgccagcgcattgcctctcaggagctgggccccgccgtggacaaggacaaggaagcgcttatggaggagatcctcaagctgaagtcgctgctcagcaccaagcgggagcagatcaccacgctgcgcactgtgctcaaggccaacaagcagacggccgaggtggcccttgccaacctgaagagcaagtatgagaatgagaaggccatggttaccgagaccatgatgaagctgcgcaatgagctcaaggccctcaaggaggacgcagccaccttctcctcgctgcgtgctatgtttgccaccaggtgtgacgagtacattacacagctggatgagatgcagcggcagctggcggctgctgaggacgagaagaagacgctgaactcgctgctgcgcatggccatccagcagaagctggcgctgacccagcggctggagctgctcgagctggaccatgagcagacccggcgtggccgtgccaaagccgccccgaagaccaagccagccacaccgagcgtaagtcacacctgtgcctgtgccagcgacagggccgagggcaccgggctggccaaccaggtgttctgcagcgagaagcacagcatttactgtgattag

SEQ ID NO: 17464 - DNA, 1660 bp, Homo sapiens
  SIMILAR (584)..(802): 971254mologous to Homo sapiens Human GEF containing NEK-like kinase substrate sGNK,accession number Y95293,Smith-Waterman Score= 350.
ctgaactcgctgaggaattcggcacgaggggctgcgcctgggcatggaagaggggaagatggacgagaatgaatgggggtaccacggagagggcaataagagcctggtggtggcccacgcgcagcgctgcgtcgtgctgcggtttctgaagtttcctccaaataggaagaagacctcggaagagatatttcaacacctgcagaacatagtggactttgggaaaaatgtcatgaaggagtttttgggggagaactatgttcattatggggaggtcgttcagctacctttagagtttgtgaaacagctttgtttaaagatacaatctgaaagaccagagtctcgctgtgacaaggacctggatactctcagtggttacgctatgtgccttcctaatttaaccagactccaaacctaccgctttgcagagcaccggccgattctgtgtgtagagattaaggtgacctgtcgaggggcagatggtgtgggtaaaggggaaagggtggaggagagaagggccacagccatcccctactgtgctcagcaggacacccttctcttcgtgttccctggacagagcctctataggcaggcctttggacaagcacacacaaaccacaagaaggtggctgctgacggagagagccgggaggagagcctgatccaggagtcggcctccaaggagcagtactacgtgcggaaggtgctagagctgcagacggagctgaagcagttgcgcaatgtcctcaccaacacgcagtcggagaatgagcgcctggcctctgtggcccaggagctgaaggagaagatagaaacagaggggaaacttcctaacactttctatgaagccagcattgtcctattaccaaaaccagacaaagacattaacagaaaagaaaaggacaaaccagtatttctaatgaacaaagatgcaaaagtcctcaacaaaatattagcaaatcaaatccaaaaatgtgtaaaaagaattatgctctatgaccaaggggaatttatcccaggtctgggacatggagagcacaagatgatcttggaacaatttgcatcagacatcaaggaagtaataacaataataacaaattacgatgttttgaagacatggagccagcttggaggagctcccacgggccaaatctgctaccatttgagcatcaaagcaagtattcccatgaaatgtacgatgagtacaccctattctacagaagcaaaagctgaggctcagagacgccaagaggtttgctggggtctcgcgactaagcggtcccaacacccagacaccctggctacccggggactgccggtcactaccgggcgccgaaaagccgccggctccttccgccagctacacatccggcgccgaggccggaagcttctcttccggctcccaagaccgcgttccggaaatgagtcgctctaccagtacctaagatggccgccggcccatccaccgtcgcgatcggtcggctggttcccagcgaggcgggcggcccccagctcgcgtccccgagtcctagcccgcgaggcgccagggctgcgcctgggcatggaagaggggaagatggacgagaatgaatgggggtaccacggagagggcaataagagcctggtggtggcccacgcgcagaatttgaaggctttcacctga

SEQ ID NO: 17465 - DNA, 3657 bp, Homo sapiens; identical to SEQ ID NO: 6045
  SIMILAR (163)..(1932): 951254mologous to Homo sapiens putative p150,accession number U93563,Smith-Waterman Score=2945.

SEQ ID NO: 17466 - DNA, 3570 bp, Homo sapiens; identical to SEQ ID NO: 2157
  SIMILAR (790)..(2313): 951254mologous to Homo sapiens putative p150,accession number U93572,Smith-Waterman Score=2493.

SEQ ID NO: 17467 - DNA, 3666 bp, Homo sapiens; identical to SEQ ID NO: 2174
  SIMILAR (736)..(3006): 961254mologous to Homo sapiens putative p150,accession number U93563,Smith-Waterman Score=3773.

SEQ ID NO: 17468 - DNA, 3441 bp, Homo sapiens; identical to SEQ ID NO: 3973
  SIMILAR (574)..(1962): 951254mologous to Homo sapiens putative p150,accession number U93563,Smith-Waterman Score=2340.

SEQ ID NO: 17469 - DNA, 3354 bp, Homo sapiens; identical to SEQ ID NO: 2158
  SIMILAR (337)..(1851): 941254mologous to Homo sapiens putative p150,accession number U93563,Smith-Waterman Score=2435.

SEQ ID NO: 17470 - DNA, 3300 bp, Homo sapiens; identical to SEQ ID NO: 3975
  SIMILAR (277)..(2088): 971254mologous to Homo sapiens putative p150,accession number U93563,Smith-Waterman Score=3088.

SEQ ID NO: 17471 - DNA, 4989 bp, Homo sapiens; identical to SEQ ID NO: 6054
  SIMILAR (566)..(2005): 991254mologous to Homo sapiens multifunctional calcium/calmodulin-dependent protein kinase II delta2 isoform,accession number AF071569,Smith-Waterman Score=2549.

SEQ ID NO: 17472 - DNA, 3543 bp, Homo sapiens; identical to SEQ ID NO: 3976
  SIMILAR (325)..(942): 971254mologous to Escherichia coli elongation factor Tu,accession number J01717,Smith-Waterman Score=1006.

SEQ ID NO: 17473 - DNA, 3693 bp, Homo sapiens; identical to SEQ ID NO: 3978
  SIMILAR (553)..(819): 1001254mologous to Escherichia coli dihydropicolinate reductase,accession number M10611,Smith-Waterman Score=439.

SEQ ID NO: 17474 - DNA, 3357 bp, Homo sapiens; identical to SEQ ID NO: 6062
  SIMILAR (1)..(1755): 911254mologous to Homo sapiens putative p150,accession number U93563,Smith-Waterman Score=2724.

SEQ ID NO: 17475 - DNA, 3045 bp, Homo sapiens; identical to SEQ ID NO: 6847
  SIMILAR (832)..(2844): 941254mologous to Homo sapiens putative p150,accession number U93569,Smith-Waterman Score=3249.

SEQ ID NO: 17476 - DNA, 3384 bp, Homo sapiens; identical to SEQ ID NO: 6067
  SIMILAR (1)..(3129): 981254mologous to Homo sapiens unknown,accession number AF148856,Smith-Waterman Score=5357.

SEQ ID NO: 17477 - DNA, 3264 bp, Homo sapiens
  SIMILAR (1)..(3036): 941254mologous to Homo sapiens putative p150,accession number U93563,Smith-Waterman Score=4979.
atgggagactttaacaccccactgtcaacattagacagatcaatgagacagaaagtcaacaaggatacccaggaattgaactcagctctgcaccaagcagacctaatagacatctacagaactctccaccccaaatcaacagaatatacatttttttcagcaccacaccacacctattccaaaactgaccacatagttggaagtaaagctctcctcagcaaatgtaaaagaacagaaattataacaaactgtctctcagaccacagtgcaatcaaactagaactcaggattaagaatctcactcaaaaccgctcaactacatggaaactgaacaaccagctcctgaatgattactgggcgcataacgaaatgaaggcagaaataaagatgttctttgaaaccaacgagaacaaagacacaacataccagaatctctgggacacattcaaagcagtgtgtagagggaaatttatagcactaaatgcccacaagagaaagcaggaaagatccaaaattgacaccctaacatcacaattaaaagaactagaaaagcaagagcaaacacattcaaaagctagcagaaggcaagaaataactaaaatcagagcagaactgaaggaaatagagacacaaaaaatccttcaaaaaattaatgaatccaggagctggttttttgaaaggatcaacaaaattgatagaccgctagcaagactaataaagaaaaaaagagagaagaatcaaatagacgcaataaaaaatgataaaggggatatcaccaccgatcccacagaaatacaaaataccatcagagaatactataaacacctctacacaaataaattagaaaatctagaagaaatggataaattcctggacacatacactctcccaagattaaaccaggaagaagttgaatctctgaatagaccaataacaggacctgaaattgtggcaataatcaatagcttaccaaccaaaaagagtccaggaccagatggattcacagccaaattctaccagaggtacaaggaggaactggtaccattccttctgaaattattccaatcaatagaaaaagagggaatcctccctaactctttttatgaggccagcatcattctgataccaaagccaggcagagacacaacaaaaaaagagaattttagaccaatatccttgatgaacattgatgcaaaaatcctcaataaaatactggcaaaacgaatccagcagcacatcaaaaagcttatccaccatgatcaagtgggcttcatccctgggatgcaaggctggttcaatatacacaaatcaataaatgtaatccagcatataaacagacccaaagacaaaaaccacatgattatctcaatagatgcagaaaaagcctttgacaaaattcaacaacccttcatgctaaaaactctcaataaattaggtattgatgggacgtatttcaaaataataagtgctatctatgacaaacccacagccaatatcatactgaatgggcaaaaagtggaagcattccctttgaaaactggcacaagacagggatgccctctctcaccactcctattcaacatagtgttggaagttctggccagggcaattaggcaggagaaggaaataaagggtattcaattaggaaaagaggaagttaaattgtccctgtttgcagacgacatgattgtatatctagaaaaccccatcgtctcagcccaaaatctccttaagctgataagcaacttcagcaaagtctcaggatacaaaatcaatgtacaaaaatcacaagcattcttatacaccaacaacagacaaacagagagccaaatcatgagtgaactcccattcacaattgcttcaaagagaataaaatacctaggaatccaacttacaagggatgtgaaggacctcttcaaggagaactacaaaccactgctcaaggaaataaaagaggatacaaacaaatggaagaacattccatgctcatgggtaggaagaatcaatatcgtgaaaatggccatactgcccaaggtaatttacagattcaatgccatccccatcaagctaccaatgactttcttcacagaattggaaaaaactactttaaagttcatatggaacgccctcatcaccaagtcaatcctaagccaaaagaacaaagctggaggcatcacactacctgacttcaaactatactacaaggctacagtaaccaaaacagcatggtactggtaccaaaacagagatatagatcaatggaacagaacagagccctcagaaataacgccgcatatctacaactatctgatctttgacaaacctgagaaaaacaagcaatggggaaaggattccctattgaataaatggtgctgggaaaactggctagccatatgtagaaagctgaaactggatcccttccttacaccttatacaaaaatcaattcaagatggattaaagacttaaacgttagacctaaaaccataaaaaccctagaagaaaacctaggcattaccattcaggacataggcatgggcaaggacttcatgtctaaaacaccaaaagcaatggcaacaaaagccaaaattgacaaatgggatctaattaaactaaagagcttctgcacagcaaaacaaactaccatcagagtgaacaggcaacctacaaaatgggagaaaattttcgcaacctactcatctgacaaagggctaatatccagaatctacaatgaactcaaacaaatttataagaaaaaaacaaacaaccccatcaaaaagtgggcgaaggacatgaacagacacttctcaaaagaagacatttatgcagccaaaaaacacatgaaaaaatgctcatcatcactggccatcagagaaatgcaaatcaaaaccacaatgagataccatctcacaccagttagaatggcaatcattaaaaagtcaggaaacaacagaacttgggaatataacatactttgttctcttgtgcctctcctgtgttccctcttgtggctgcacctgactgaccatcacctaaaagaggacagaacaaaacacttgacagctagtgataaccttgaaaaaacagaactcagcagatggaaggagagagccctactgtatgagcatcgtgtgctgagacctgctattgactcccagcacagctgtgcccccagaagaatccagggtcatctggtatgcggaagtgatctcactggtttcatggatgatgtggctgtcatcctgattgatgtctcccctttctga

SEQ ID NO: 17478 - DNA, 3783 bp, Homo sapiens; identical to SEQ ID NO: 6069
  SIMILAR (1)..(3156): 951254mologous to Homo sapiens putative p150,accession number U93565,Smith-Waterman Score=5296.

SEQ ID NO: 17479 - DNA, 3168 bp, Homo sapiens
  SIMILAR (1)..(2958): 971254mologous to Homo sapiens unknown,accession number AF148856,Smith-Waterman Score=5040.
atgggagactttaacaccccactgtcaacattagacagatcaacgagacagaaagtcaacaaggatacccaggaattgaactcagctctgcaccaagcagacctaatagacatctacagaactctccaccccaaatcaacagaatatacatttttttcagcaccacaacacacctattccaaaattgaccacatacttggaagtaaagctctcctcagcaaatgtaaaagaacagaaattataacaaactatctctcagaccacagtgcaataaaattagaactcaggattaagaatctcactcaaaaccgctcaactacatggaaactgaacaacttgctcctgaatgactactgggtacataacgaaatgaaggcagaaataaagatgttctttgaaaccaatgagaacaaagacacaacataccagaatctctgggacacattcaaagcagtgtgcagagggaaatttatagcactaaatgcccacaagagaaagcaggaaagatctaaaattgacaccctaacatcacaattaaaagaactagaaaagcaagagcaaacacattcaaaagctagcagaaggcaagaaataactaaaatcagagcagaactgaaggaaatagagacacaaaaaacccttcaaaaaattaatgaatccaggagctggttctttgaaaggatcaacaaaattgatagaccactagcaagactaatgaagaaaaaaagagagaagaatcaaatagatgcaataaaaaatgataaaggggatatcaccaccaatcccacagaaatacaaactaccatcagagaatactataaacacctctacgcaaataaactagaacatctagaagaaatggataaattcctcaacacatacactctcccaagacaaaaccaggaagaagttgaatctctgaatagaccaataacaggatctgaaattgtggcaataatcaatagcttactgaccaaaaagagtccaggaccagatggattcacagccgaattctaccagaggtacaaggaggaactggtaccattccttctgaaactattccaatcaatagaaaaagagggaatcctccctaactcattttatgaggccagcatcatcctgataccaaagccaggcacagacacaaccaaaaaagagaattttagacaaatatccttgatgaacattgatgtaaaaatcctcaataaaatactggcaaacagaatccagcagcacatcaaaaagcttatccaccatgatcaagtgggcttcatccctgggatgcaaggctggttcaatatacgcaaatcaataaatgtaatccagcatataaacagagccaaagacaaaaaccacatgattatctcaatagatgcagaaaaagcctttgacaaaattcaacaacccttcatgctaaaaactctcaataaattaggtattgatggtacgtatttcaaaataataagagctatctatgacaaacccacagccaatatcatactgaatgggcaaaaactggaagcattccctttgaaaactggcacaagacagggatgccctctctcaccgctcctattcaacatagtgttggaagttctggccagggcaatcaggcaggagaaggaaataaagggtattcaattaggaaaagaggaagtcaaattgtccctgtttgcagacgacatgattgtttatctagaaaaccccattgtctcagcccaaaatctccttaagctgataagcaacttcagcaaagtctcaggatacaaaatcaatgtacaaaaatcacaagcattcttatacaccaacaacagacaaacagagagccaaatcatgggtgaactcccattcacaattgcttcaaagagaataaaatacctaggaatccaacttacaagggatgtgaaggacctcttcaaggagaactacaaaccactgctcaaggaaataaaagaggacacaaacaaatggaagaacattccatgctcatgggtaggaagaatcaatatcgtgaaaatggccatactgcccaaggtaatttacagattcaatgccatccccatcaagctaccaatgactttcttcacagaattggaaaaaactactttaaagttcatatggaaccaaaaaagagcccgcatcaccaagtcaatcctaagccaaaagaacaaagctggaggcatcacactacctgacttcaaactatactacaaggctacagtaaccaaaacagcatggtactggtaccaaaacagagatatagatcaatggaacagaacagagccctcagaaataatgccgcatatctacaactatctgatctttgacaaacctgagaaaaacaagcaatggggaaaggattccctatttaataaatggtgctgggaaaactggctagccatatgtagaaagctgaaactggatcccttccttacaccttatacaaaaatcaattcaagatggattaaagatttaaacgttagacctaaaaccataaaaaccctagaagaaaacctaggcattaccattcaggacataggcgtgggcaaggacttcatgtccaaaacaccaaaagcaatggcaacaaaagacaaaattgacaaatgggatctaattaagctaaagagcttctgcacagcaaaagaaactaccatcagagtgaacaggcaacctacaacatgggagaaaattttcgcaacctactcatctgacaaagggctaatatccagaatctacaatgaactcaaacaaatttacaagaaaaaaacaaacaaccccatcagaaagtgggcgaaggacatgaacagacacttctcaaaagaagacatttatgcagccaaaaaacacatgaagaaatgctcatcatcactggccatcagagaaatgcaaatcaaaaccactatgagatatcatctcacaccagttagaatggcaatcattaaaaagtcaggaaacaacagtcaggtggaacattcaggaggccctgagctaaacattgccagcagcaaggtcacaactgccagaacagccaaggccactcctgctcagcacagagaaggcagccaagcagatttcttggagcagctgccaagagagtctgcccagtgtgatggagaaagagccccacgtgtggagcacctgccagggaaccttgccttcttatcctag

SEQ ID NO: 17480 - DNA, 3897 bp, Homo sapiens; identical to SEQ ID NO: 6071
  SIMILAR (1)..(2748): 971254mologous to Homo sapiens unknown,accession number AF149422,Smith-Waterman Score=4641.

SEQ ID NO: 17481 - DNA, 3348 bp, Homo sapiens; identical to SEQ ID NO: 6075
  SIMILAR (1)..(2973): 951254mologous to Homo sapiens putative p150,accession number U93563,Smith-Waterman Score=4940.

SEQ ID NO: 17482 - DNA, 3984 bp, Homo sapiens; identical to SEQ ID NO: 3989
  SIMILAR (535)..(3468): 981254mologous to Homo sapiens unknown,accession number AF149422,Smith-Waterman Score=5036.

SEQ ID NO: 17483 - DNA, 3432 bp, Homo sapiens; identical to SEQ ID NO: 3990
  SIMILAR (1)..(2961): 961254mologous to Homo sapiens putative p150,accession number U93567,Smith-Waterman Score=4958.

SEQ ID NO: 17484 - DNA, 3924 bp, Homo sapiens; identical to SEQ ID NO: 6077
  SIMILAR (712)..(3510): 981254mologous to Homo sapiens putative p150,accession number U93563,Smith-Waterman Score=4809.

SEQ ID NO: 17485 - DNA, 4797 bp, Homo sapiens
  SIMILAR (1885)..(3477): 931254mologous to Homo sapiens putative p150,accession number U93563,Smith-Waterman Score=2600.
atggggaaaaaacagaacagaaaaactggaaactctaaaaagcagagcgcctctcctcctccaaaggaacacagttccttaccagcaacggaacaaagctggatggagaaagactttgacgagctgagagaagaaggctacagacgatcaaattactctgagctatgggaggacattcaaaccaaaggcaaagaagttgaaaactttgaaaaaaatttagaagaatgtataactagaataaccaatacagagaggtgcttaaaggagctgatggagctgaaaaccaaggctcgagacctacgtgaagaatgcagaagcctcaggagccgatgcgatcaactggaagaaagggcccgccctaaaagagctcctgaaggaagagctaaacatggaaaggaacaaccggtaccagccgctgcaaaatcatgccaaaatgtaaagaccatcaagactaggaagaaactgcatcaactaatgagcaaaataaccagacacagactggcaaattggataaagagtcaagacccatcagtgtgctatattccggaaacccatctcacgtgcagagacacacataggctcaaaataaaaggatggaggaagatctaccaagccaatggaaaacaaaaacaggcaggggttgcaatccacatctctgataaaacagactttaaaccaacaaagatcaaaagagacaaagaaggccattacataatggtaaagggatcaattcaacaagaaaagctaactatcctaaatgtatatgcacccaacacaggagcacccagattcataatgcaagtcctgagtgacctacaaagagacttagactcccacacattaataatgggagactttaacaccccactgtcaacattagacagattaacgagacagaaagtcaacaaggatacccaggaattgaactcagctctgcaccaagtggacctaatagacatctatagaactctccaacccaaatcaacagaatatacattgttttcagcaccacaccacacctattccaaaattgaccacatacttggaagtaaagctctcctcagcaaatgtaaaagaacagaaattataacaaactatctctcagaccacagtgcaatcaaactagaactcaggattaagaaactcactcaaatccgctcaactgcatggaaactgaacaacctgctcctgaatgactactgggtacataacgaaatgaaggcagaaataaagatgttctttaaaaacaatgagaataaagacgcaacatgccagaatctctgggacacattcaaagcagtgtgtagagggaaattcttagcactaaatgcccacaagagaaagcaggaaagatccaaaatcaacaccctaacatcacaattaaaagaactagaaaagcaagagcaaacacattccaaagctagtagaaggcaagaaataactaaaatcagagcagaactgaaggaaatagagacacaaaaaacccttcaaaaaattaatgaatccaggagctggttttttgaaaggatcaacaaaattgatagaccactagcaagactaataaagaaaaaaagagagaagaatcaaatagacacaataaaaaatgataaaggggatatcaccaccgatcccacagaaatacaaactaccgtcagagaatactacaaacacctctacgcaaataaactagaaaatctagaagaaatggataaattcctcgacacatacacactcccaagactaaaccaggaagaatttgaatctctgaatagaccagtaacaggatctgaaattgtggcaataatcaatagcttaccaacgaaaaagagtccaggaccagatggattcacagccgaattctaccggaggtacaaggaggaactgcatataaacagagccaaagacaaaaaccacatgattatctcaatagatgcagaaaaagcctttgacaaaattcaacaacccttcatgctaaaaactctcaataaattaggtactgctgggacgtatttcaaaataataagagctatctatgacaaacccacagccaatatcatactgaatgggcaaaaactggaagcattccctttgaaaactggcacaagacagggatgccctctctcaccactcctattcaatatagtgttggaagttctggccagggcaattaggcaggagaaggaaataaagggtattcaattaggaaaagaggaagtcaaattgtccctctttgctgatgacatgattgtatatctagaaaaactcattgtctcagcccaaaatctccttaagctgataagcaacttcagcaaagtctcaggatacaaaattaatgtacaaaaatcacaagcattcttatacaccaataacagacaaacagagagccaaatcatgagtgaactcccattcacaattgcttcaaagagaataaaatacctaggaatccaacttacaaggaatgtgaaggacctcttcaaggagaactacaaaccactgctcaaggaaataaaagaggatacaaacaaatggaagaacattccatgctcatgggtaggaagaatcaatatcgtgaaaatggccatactgcccaagggaatttacagattcaatgccattcccatcaagctaccaaagactttcttcacagaattggaaaaaactactttaaagttcatatggaaccaaaaaagagcccacatcaccaagtcaatcctaagccaaaagaacaaagctggaggcatcacactgcctgccttcaaactatactacaaggctacagtaaccaaaacagcatggtactggtaccaaaacagagatatagatcaatggaacagaacagagccctcagaaataacgccacatatctacaactatctgatctttgacaaacctgagagaaacaagcaatggggaaaggattccctatttaataaatggtgctgggaaaactggctagccatatgtaggagaaagctgaaactggatcccttccttacaccttatacaaaaattaattcaagatggattaaagacttaaatgttagacctaaaaccataaaaaccctagaagaaaacctaggcaataccattcaggacataggcatgggcaaggacttcatgtctacaacaccaaaagcaatggcaacaaaagccaaaattgacaaatgggatctaattaaactaaagagcttctgcacagcaaaagaaactaccatcacagtgaacaggcaacctacagaatgggagaaaatttttacaatctacccatctgacaaagggctaatatccagaatctacaaagaactcaaacaaatttacaagaaaagaacaaacaaccccatcaacaagtgggtgaaggatatgaacagacacttctcaaaagaagacatttatacagccaaaaggcacatgaaaaaatgctcatcatcactggccatcagagaaatgcaaatcaaaaccacataccatgctggaccagatggatttacagccgaattctaccagaggtacaaggaggaactggtaccattccttctgaaactattccaatcaatagaaaaagagggaatcctccctaactcattttatgaggccagcatcatcctgataccaaagcctggtagagacacaaccaaaaaagagaattttagaccaatatccttgatgaacattgatgcaaaaatcctcaataaaatactggcaaaacgaatccagcagcacatcaaaaagcttatccaccatgatcaagtgggtttcatccctgggatgcaaggctggttcaatatatgcaaatcaataaacgtaatccagcatataaacagaaccaaagacaaaaaccacatgattatctcaatagatgcagaaaaggcctttgacaaaattcaacaactcttcatgctaaaaactctcaataaattaggtattgatgggacgtatctcaaaataataagagctatctatgacaaacccacagccaatatcatactgaatgggcaaaaactggaagcattccctttgaaaactggcacaagacagggatgccctctctcaccactcctattcaacatagtgtgggaagttctggccagggcaatgaggcaggagaaggaaataaagggtattcaattaggaaaagaggaagtcaaattgtccctgtttgcagacgacatgattgtgtatctagaaaaccccattgtctcagcccaaaatctccttaagctgataagcaacttcagcaaagtctcaggatacaaaatcaatgtacaaaaatcacaagcattcttatacaccaataacagacaaacagagagccaaatcatgagtgaactcccattcacaactgcttcaaagagaataaaatacctaggaatccaacttacaagggatgagaaggacctcttcaaggagaactacaaaccactgctcaatgaaataagaggatacaaacaaatggaagaacattccatgctcacgggtaggaagaatcaatatcgtgaaaatgctcatactgcccaagctaaggcgaaccacaggccagccacatccaaaaaggtttacctgattacggcaatgaagccactgtccagtcctattcctgaaggtttggggctagaaaacagaacaggaaaggaaatcaagagtagagaatggaccaccatgttaagattggctgtagctgctgaactaacctttagagattggaaggagcggtctcggaggactttggacacacatgaaacaaaggggattcccttaagtaaaagcagagcaggcattctggtgattgacattagatag

SEQ ID NO: 17486 - DNA, 8143 bp, Homo sapiens
  SIMILAR (3349)..(6474): 981254mologous to Homo sapiens unknown,accession number AF149422,Smith-Waterman Score=5360.
atggtaaagggatcaattcaacaagaggagctaactatcctaaatatttatgcacccaatacaggagcacccagattcataaagcaagtcctgagtgacctacaaagagacttagactcccacacattaataatggaagactttaacaccccactgtcaacattagacagatcaacgagacagaaagtcaacaagaatacccaggaattgaactcagctctgcaccaagcagacctaatagacatctacagaactctccaccccaaatcaacagaatatacatttttttcagcaccacaccacacctattccaaaattgaccacatagttggaagtaaagctctcctcagcaaatgtaaaagaacagaaattataacaaactatctctcagaccacagtgcaatcaaactagaactcaggattaagaatctcactcaaagccgctcaactacatggaaactgaacaacctgctcctgaatgactactgggtacataacgaaatgaaggcagaaataaagatgttctttgaaaccaacgagaacaaagacaccacataccagaatctctgggacgcattcaaagcagtgtgtagagggaaatttatagcactaaatgcctacaagagaaagcaggaaagatccaaaattgacaccctaacatcacaattaaaagaactagaaaagcaagagcaaacacattcaaaagctagcagaaggcaagaaataactaaaatcagagcagaactgaaggaaatagagacacaaaaaacccttcaaaaaatcaatgaatccaggagctggttttttgaaaggatcaacaaaattgatagaccgctagcaagactaataaagaaaaaaagagagaagaatcaaatagacacaataaaaaatgataaaggggatatcaccaccgatcccacagaaatacaaactaccatcagagaatcctacaaacacctctacgcaaataaactagaaaatctagaagaaatggatacattcctggacacatacactctcccaagactaaaccaggaagaagttgaatctctgaatagaccaataacaggctctgaaattgtggcaataatcaatagtttaccaaccaaaaagagtccaggaccagatggattcacagccgaattctaccagaggtacaaagaggagctgcatataaacagaaccaaagacaaaaaccacatgattatctcaatagatgcagaaaaggcctttgacaaaattcaacaacgcttcatgctaaaaactctcaataaattagtgttggaagttctggccagggcaatcaggcaggagaaggaaataaagggtgttcaattaggaaaagaggaagtcaaattgtccctgtttgcagatgacatgattgtatatctagaaaaccccatcgtctcagcccaaaatctcctcaatctgataagcaacttcagcaaagtctcaggatacaaaatcaatgtacaaaaatcacaagcattcttatacaccaataacagacaaacagagagccaaatcatgagtgaactcccattcacaattgcttcaaagagaataaaatacctaggaatccaacttacaagggatgtgaaggacctcttcaaggagaactacaaaccactgctcaatgaaagaaaagaggatacaaacaaatggaagaacattccatgctcatgggtagaaagaatcaatatcgtgaaaatggccatactgcccaaggtcatttatagattcaatgccatccccatcaagctaccaatgactttcttcacagaattggaaaaaactactttaaagttcatatggaaccaaaaaagagcccgcatcgccaagtcaatcctaagccaaaagaacaaagctggaggcatcacgctacctgacttcaaactatactacaaggctacagtaaccaaaacagcatggtactcgtaccaaaacagagatatagaccaatggaacagaacagagccctcagaaatactgccacgtatctacaactatctgatctttgacaaacctgagaaaaacaagcaatggggaaaggattccctatttaataaatggtgctgggaaaactggctagccatatgtagaaagctgaaactggatcccttccttaaaccttatacaaaaattaagtcaggatggattaaagacttaaatgttagacctaaaaccataaaaaccctagaagaaaacctaggcattaccattcaggacataggcatgggcaaggacttcatgtctaaaacaccaaaagcaatggcaacaaaagcaaaaattgacaaatgggatctaattaaactaaagagcttctgcacagcaaaagaaactaccatcagagtgaaccggcaacctacagaaagggagaaaatttttgcaacctactcatctgacaaagggctaatatccagaatctacaaagaactcaaacaaatttacaagaaaagaacaaacaacctcatcaaaaagtgggtgaaggatatgaacagacacttctcaaaagaagacgtttatgcagccaaaaaacacatgaaaaaatgctcatcatcactggccatcagagaaatgcaaatcaaaaccacaatgagataccatctcacaccagttagaatggcaatcattaaaaagtcaggaaacaacaggagagacagaacagctgaggaaacagcagaacggtggaaaatttttgaaagtgttttgagcccacccaacctgaggagagcattcaaagaaaaacaggaagaagaagtcggcttcagaaggtgggttataacaaactcctccaagctaaaacagcatgttttaacccaatgcaaggaagctaagaaccttgaaaaaaggttagaggaatttctaactagaataaccagtttagagaagaacataaatgacctaatggacctgaaaaacacagcacgagaacttcttgacgcctacacaagtatcaatagccaaattaatcaagcggaagaaaggttatcagagactgaagatcaacttaatcaaataaagcatgaggacaagattagagggaaaaaaatgaaaaggaacaaacaaagcctccaagaaatatgggactatgtgaaaaggccaaatctacgtctgattggtgtagctgaaagtgacagggagaatggagccaagttagaaaacactcttcagtatattatccaggagaacttccccaacctagcaagacaggccaacactcaaattcaggaaacacagagaccaccacaaagatactccttgagaaaagcaaccccaagacacataattgtcagattcaccaaagttgaaatgaagcaaaaaatgttaagggcagccagagagaaagactttaaaccaacaaagatcaaaagagacaaagaaggccattacataatggtaaagggatcaattcaacaagaggagctaactatcctaaatatatatgcacccaatacaggagcacccagattcataaagcaagtcctgagtgacctacaaagagacttagactcccacacattaataatgggagactttaacaccccactgtcaacattagacagatcaacaagacagaaagtcaacaaggatacccaggaattgaactcagctctgcaccaagcagacctaatagacatctacagaactctccaccccaaatcaacagaatatacatttttttcagcaccacaccacacctattccaaaattgaccacatagttggaagtaaagctctcctcagcaaatgtaaaagaacacaaattataacaaactatctctcagaccacagtgcaatcaaactagaactcaggattaagaatctcactcaaagccgctcaactacatggaaactgaacaacctgctcctgaatgtctactgggtacataacgaaatgaaggcagaaataaagatgttctttgaaaccaatgagaacaaagacacaacataccagaatctctgggacacattcaaagcagtgtgtagagggaaatttatagcactaaatgcccacaagagaaagcaggaaagatccaaaattgacaccctaacatcacaattaaaagaactagagaagcaagagcaaacacattcaaaagctagcagaaggcaagaaataactaaaatcagagcagaactgaaggaaatagagacacaaaaaacccttcaaaaactcaatgaatccaggagctggttttttgaaaggatcaacaaaattgatagaccgctagcaagactaataaagaaaaaaagagagaagaatcaaatagacacaataaaaaatgataaaggggatatcaccaccgatcccacagaaatacaaactaccatcagagaatactacaaacacctctacgcatataaactagaaaatctagaagaaatggatacattcctcgacacatacactctcccaagactaaaccaggaagaagttgaatctctgaatagaccaataacaggatctgaaattgtggcaataatcaatagcttaccaaccaaaaagagtccaggaccagatggattcacagccaaattctaccagaggtacaaggaggagctggtaccattccttctgaaactattccaatcaatagaaaaagagggaatcctccctaactcattttatgatgccagcatcattctgataccaaagccgggcagagacacaaccaaaaaagagaattttagaccaatatccttgatgaatattgatgcaaaaatcctcaataaaatactggcaaaccgaatccagcagcacatcaaaaagcttatccaccatgatcaagtgggcttcatccctgggatgcaaggctggttcaatatacgcaaatcaataaatgtaatccagcatataaacagagccaaagacaaaaaccacatgattatctcaatagatgcagaaaaagcctttgacaaaattcaacaacccttcatgctaaaaactctcaataaattaggtattgatgggacgtatttcaaaataataagagctatctatgacaaacccacagccaatatcatactgaatgggcaaagactggaagcattccctttgaaaactggcacaagacagggatgccctctctcaccactcctattcaacatagtgttggaagttctggccagggcaatcaggcaggagaaggaaataaagggtattcaattaggaaaagaggaagtcaaattgtccctgtttgcagacgacatgattgtttatctagaaaaccccatcgtctcagcccaaaatctccttaagctgataagcaacttcagcaaagtctcaggatacaaaatcaatgtacaaaaatcacaagcattcctatacaccaacaacagacaaacagagagccaaatcatgagtgaactcccattcacaattgcttcaaagagaataaaatacctaggaatccaacttacaagggatgtgaagaacctcttcaaggagaactacaaaccactgctcaaggaaataaaagaggatacaaacaaatggaagaacattccatgctcatgggtaggaagaatcaatatcgtgaaaatggccatactgcccaaggtaatttacagattcaatgccatccccatcaagctaccaatgactttcttcacagaattggaaaaaactactttaaagttcatatggaaccaaaaaagagcccgcattgccaagtcaatcctaagccaaaagaacaaagctggaggcatcacactacctgacttcaaactatactacaaggctacagtaaccaaaacagcatggtactggtaccaaaacagagatatagatcaatggaacagaacagagccctcagaaataatgccacatatctacaactatctgatctttgacaaacctgagaaaaacaagcaatggggaaaggattccctatttaataaatggtgctgggaaaactggctagccatatgtagaaagctgaaactggatcccttccttacaccttatacaaaaatcaattcaagatggattaaagatttaaacgttagacctaaaaccataaaaaccctagaagaaaacctaggcattaccattcaggacataggcgtgggcaaggacttcatgtccaaaacaccaaaagcaatggcaacaaaagccaaaattgacaaatgggatctaattaaactcaagagcttctgcacagcaaaagaaactaccatcagagtgaacaggcaacctacaacatgggagaaaattttcgcaacctactcatctgacaaagggctaatatccagaatctacaatgaactcaaacaaatttacaagaaaaaaacaaacaaccccatcaaaaagtgggcgaaggacatgaacagacacttctcaaaagaagacatttatgcagccaaaaaacacatgaagaaatgctcatcatcactggccatcagagaaatgcaaatcaaaaccactatgagatatcatctcacaccagttagaatggcaatcatgaaaaaagtcaggaaacaacagggacatggatgaagctggaagccgtcactctcagcaaactaacataggaacagaaaaccaaacaccgcatgttctcactcataagtgggagttgaacaatgagaacacacagatgcagagaggggaacaacacaccctggagcctgttggaggagaaggtgaattaagaaaagataatcactcaaccaaaaatgaccagtacgataataggcattttcaactggctgtaggaaatggccttatggctaagaccttcatggtcagtttcttctataaagccagtgcctacgttgtacccacaggagaattgccagatttagatataattcagttaaaacaatttggaaacgcattgtcacatctaacagtaggaacctcagtcactcaaatacaaaatttaaatacaatgggaataattggatcccaagatagcagggaccaactggccacactcaaatgtcaaggtaaaggggacccaaaatatcaatgtgatcctccagttaaagtaggtgctaatggaggtcagataattaatgaagttttagctcaggtccaacttacagtgggtccaaagacaaatggatattggagaatgacagtggattatcataagcttaaccaagatgtgactccaattgtagctgctgtaccagatgtggtttcattgcttgaggttatatcaactcttcaaaaagacttctattgctttttccttctgcaaaatatcacactggtccattatattgatggcattatgctgactgaatccagtgagcaagaagtagcagacacactggacttattgactagtatacgtggactcatggaatgccttatccaccatcatggtatcccacacagcattgcctctgaccaaggccctcactttatggctaaagaattgtgggagtgggctcatgctcatggaattcactggtcttaccatattccccatcatcctgaagcagctggattgatagaatggcggaatgaccttttgaagtcacaattacaacaccaactaggtgacaatgctttgcagggctggggcaaagttctccagaaggccatgtatgctctgaatcagcatccaatatatgttactgtttttcccattgccaggattcataagtcctggaatcaaggggtggaagtagaagtggcatcactcaccatcacccctagtgatccactagcaaaatttttgctttccgttcccacaacattacattctcctggcctagaggtcttagttccagctggaggaatgctgccaccaggagacacaacaatcccattgaactggaagttaatattgccacctggacactttgggctcctcctacctttaagtcaacaggctaagaaggcagttacagtgttggctagggtgattgacccagactatcaggatgaaatcagtctactactccacaatggaggtaaggaagagtatgcatggaattcaggagatccattaggtgtctcttggtattaccatgccctgtcattaaggtcaatgagaactacaacagtgcaatccaggcaggattacaaatggcccagatacctcaggaatgaagatttgggtcatgttaccagggaaaaaaaacacaacctgctgaggtgcttgctgaaggctaagggaatatag

SEQ ID NO: 17487 - DNA, 2523 bp, Homo sapiens
  SIMILAR (837)..(896): 851254mologous to Homo sapiens putative p150,accession number U93563,Smith-Waterman Score=89.
atgagggcagcagcacagagctgcagggatgtcatgaatggtgaggctggaaaggatcgcagctccttgccagcaacggaacaaaactggatggagaatgactttcacaagctgacagaagtaggcttccgaaggttggtaataacaaacttctccgagctaaagaaacatgttctaacccatcgcaaggaagctaaaaaccttgaaaaaaggttagacgaatggctaactagaataaacagtgtagagaagaccttaaatgacctgatggagctgaaaaccacaccaattcgattaagtggaagaaaggctatcgtggttgaagatcaaattaatgaaataaaacgagaagacaagattagagaaaaaagagtaaaaagaaacgaaaaaagcctccaagaaatatgggactatgtaaaaaaaccaaatctacatttgattggtgtacctgaaagtgacggggagaatggaaccaagttagaaaacactcttcaggatattatccaggagaacttctccaacctagcaaggcaggccaatattcaaattcaggaaatatggagaccaccacaaagatattcctcaagaagagcaactccaagacacataattgtcagattaaccaaggttgaaatgaaggaaaaaatgttaaaggcagccagagagaaagaaatacaaactaccatcagagaatactataaaccgctctacacaaataaactagaaaatctagaagaaatggataaatttccggacacatacaccctcccaagactaaaccaggaggaagttgaatctcttaatagaccaataacaggttttgaaattgaggcaataatagcctaccaaccaaataaagtccaggagcagagggattcaccgctgaattctaccagagtgttggaagttctggccagggcaatcaggcaagagaaagaaataaagggtattcaactaggaaaagaggaactcaaattgtccctgtttgcagatggcatgactgtatatttagaaaactccatggtctcagccccaaatctccttaagctgataagcaacttcagcaaagtctcaggatacaaaatcaatgtgcaaaaatcacaagcattcctatacaccaataacagacatacagagagccaaatcatgagtgaactcccattcacaattgctacaaagagaataaaatacctaggaatacaacttacaagggatgtgaaagaccttttcaaggagaactacaaaccactgctcaatgaaataaaagaagacacaaacaaatggaagaacattccatgctcatggataggaagaatcaatatcgtgaaaatggccatactgcccaaggtcatttatagattcaatgccatccccatcaagctaccaattactttcttcacagaattggaaaaaactactttaaacttcatatggaaccaaataagagcctgcatagccaagacaatcctaagcaaaaaggaacaaagctggaggtatcacactacctgacttcaaactatactacaaggctacagtaaccaaaacagcattgtacttgtaccaaaacagagatgtagatcaatggaacagaacagagccctcagaaataatgccacatatatctacaactatctaatctttgacaaacctgagaaaaacaagcaatggggaaaggataccctatttaataaatggtgctgggaaaactggctagccatatgtagaaagctgaaactggatcccttccttacaccttatacaaaaattaattcaagatggattaaagacttaaatgttagacctaaaaccataaaaaccctagaagaaaacctaggcaataccattcaggacataggcatgggcaaggacttcatgtctaaaacaccaaaagcaacggcaacaaaagccaaaattgacaaatgggatctaattcaactaaagagcttctgcacagcaaaagaaaccaccatcagagtgaacaggcaacctacagaatgggagaaaatttttggtatctactcatctgacaaaggtctaatatcaagaatctacaatgaactccaacaaatttacaagaaaaaaacaaacaaccccatcaaaaagtgggtgaaggacatgaacagatacttctcaaaagaagacatttatgcagccaaaagacacatgaaaaaatgctcatcatcactggccatcagagaaatgcaaatcaaaaccacaatgagatactatctcacaccactcagaatggcgatcattaaaaagttcggaaacaacagacaggagacagtaagagaaatggcctgtctcctcagcggcacaatggactttagacatcgcgcctgttttgtactctccaagccggacttctctactcgctggcctggcgctgatgcccagaggccccctgtgcttgtggttgtggccttagacagttccctgccctttcctcaggcatcagggcagaggcctccgagcctggaggatgtggacggaggggccggtgccctcgtggctccctgctag

SEQ ID NO: 17488 - DNA, 1230 bp, Homo sapiens
  SIMILAR (607)..(1083): 251254mologous to Homo sapiens Gag-Pro-Pol protein,accession number AF164613,Smith-Waterman Score=138.
  misc_feature (1)...(1230): n = a,t,c or g
atggccttacttgcttacagatccattttttacctttctgctgctctgctctgtgtggtgggaaggctaacttctgtaagcatccgtctaagtttggctcaaaggacatacagatggaaactggagattgtgagaaaaggagaaggtgagatagcaaggcaacaagaggttctaatggcaagaggaatgtccttccccaaatggcataagattttggtaaagtcatttctgctagaatataggccttttctatggagaaagtcggtaagaaaaacaaacaagcaaacactaattgtatcacagttgctgctaagtgcaccgaatgcagtcctaactgataaagtggtttttcacgtatcagtggaagaaaattgtgcccacatgcttcagagaatcagtagtgagtgtgagacaaatcttaccattatagaagagcgggaaaacataaaaataagaattagaacaaactactttaaacttcatatggaaccaaaagagagctgtatagccaaggcaatcctaagcaaaaagaacaaagctggaggcatcatgctacctgactttagactatactacaaggctacagtaaccaaaacagcaagcttagacacctgctatcaggaaatgtttgagctggagcagcagtccccaaactctttggcaccagcaaccaagttcatggaagacaatttttccacagacgtggacgtggagggggtgggtgaactttttcacactgatgatgaggaggaaggagagtatagcaaagtaacagaagaggttacagagcaggtttatttaccagctaaggctaaagcagcaaaggaaggaaaggttcattcatacccttctgcaccccctccttattattttgaagaaaaagaacctccagatctttcttttctggaagtcactgggncaggaattcagcaagctagacaagagggtgatttagaggcttggcagttccctgttagaatacaacccccagatcaacaaggaaatattatagctacatttgagccttttccttgtaaattactcaaagaatttaaacaagctataaatcagtatggaccagatgggtctagtaatggtaaagcttattctggatcaaaaggtaaagttttccagatgccttatacttcagctcaaaaaggggagcttgtagctgtaattgaggtattgactgctcttgaactgccaagtaacgggagttcgggttcttaa

SEQ ID NO: 17489 - DNA, 2776 bp, Homo sapiens
  SIMILAR (8)..(1807): 521254mologous to Homo sapiens vascular Rab-GAP/TBC- containing protein,accession number AB024057,Smith-Waterman Score= 1641.
gaacttatgtagcctcattatcccgctccgtgaggtgacaattgtggaaaaggcagacagctccagtgtgctccccagtcccttatccatcagcacccgaaacaggatgaccttcctatttgccaacttgaaagatagagactttctagtgcagaggatctcagatttcctgcaacagactacttccaaaatatattctgacaaggagtttgcaggaagttacaacagttcagatgatgaggtgtactctcgacccagcagcctcgtctcctccagcccccagagaagcacgagctctgatgctgatggagagcgccagtttaacctaaatggcaacagcgtccccacagccacacagaccctgatgaccatgtatcggcggcggtctcccgaggagttcaacccgaaattggccaaagagtttctgaaagagcaagcctggaagattcactttgctgagtatgggcaagggatctgcatgtaccgcacagagaaaacgcgggagctggtgttgaagggcatcccggagagcatgcgtggggagctctggctgctgctgtcaggtgccatcaatgagaaggccacacatcctgggtactatgaagacctagtggagaagtccatggggaagtataatctcgccacggaggagattgagagggatttacaccgctcccttccagaacacccagcttttcagaatgaaatgggcattgctgcactaaggagagtcttaacagcttatgcttttcgaaatcccaacatagggtattgccaggccatgaatattgtcacttcagtgctgctgctttatgccaaagaggaggaagctttctggctgcttgtggctttgtgtgagcgcatgctcccagattactacaacaccagagttgtgggtgcactggtggaccaaggtgtctttgaggagctagcacgagactacgtcccacagctgtacgactgcatgcaagacctgggcgtgatttccaccatctccctgtcttggttcctcacactatttctcagtgtgatgccttttgagagtgcagttgtggttgttgactgtttcttctatgaaggaattaaagtgatattccagttggccctagctgtgctggatgcaaatgtggacaaactgttgaactgcaaggatgatggggaggccatgaccgttttgggaaggtatttagacagtgtgaccaataaagacagcacactgcctcccattcctcacctccactccttgctcagcgatgatgtggaaccttaccctgaggtagacatctttagactcatcagaacttcctacgagaaattcggaactatccgggcagatttgattgaacagatgagattcaaacagagactgaaagtgatccagacgctggaggatactacgaaacgcaacgtggtacgaaccattgtgacagaaacttcctttaccattgatgagctggaagaactttatgctcttttcaaggcagaacatctcaccagctgctactggggcgggagcagcaacgcgctggaccggcatgaccccagcctgccctacctggaacagtatcgcattgacttcgagcagttcaagggaatgtttgctcttctctttccttgggcatgtggaactcactctgacgttctggcctcccgcttgttccagttattagatgaaaatggagactctttgattaacttccgggagtttgtctctgggctaagtgctgcatgccatggggacctcacagagaagctcaaactcctgtacaaaatgcacgtcttgcctgagccatcctctgatcaagatgaaccagattctgcttttgaagcaactcagtacttctttgaagatattaccccagaatgtacacatgttgttggattggatagcagaagcaaacagggtgcagatgatggctttgttacggtgagcctaaagccagacaaagggaagagagcaaattcccaagaaaatcgtaattatttgagactgtggactccagaaaataaatctaagtcaaagaatgcaaaggatttacccaaattaaatcaggggcagttcattgaactgtgtaagacaatgtataacatgttcagcgaagaccccaatgagcaggagctgtaccatgccacggcagcagtgaccagcctcctgctggagattggggaggtcggcaagttgttcgtggcccagcctgcaaaggagggcgggagcggaggcagtgggccgtcctgccaccagggcatcccaggcgtgctcttccccaagaaagggccaggccagccttacgtggtggagtctgttgagcccctgccggccagcctggcccccgacagcgaggaacactcccttggaggacaaatggaggacatcaagctggaggactcctcgccccgggacaacggggcctgctcctccatgctgatctctgacgacgacaccaaggacgacagctccatgtcctcatactcggtgctgagtgccggctcccacgaggaggacaagctgcactgcgaggacatcggagaggacacggtcctggtgcggagcggccagggcacggcggcactgccccggagcaccagcctggaccgggactgggccatcaccttcgagcagttcctggcctccctcttaactgagcctgccctggtcaagtactttgacaagcccgtgtgcatgatggccaggattaccagtgcaaaaaacatccggatgatgggcaagcccctcacctcggccagtgactatgaaatctcggccatgtccggctga

SEQ ID NO: 17490 - DNA, 3745 bp, Homo sapiens
  SIMILAR (406)..(852): 891254mologous to Homo sapiens p40,accession number U93569,Smith-Waterman Score=674.
atggcgattgtattaggcggcaaaaaaaagttggtgtctgagaaaaatcagtgtgctgcatgccatggggacctcacagagaagctcaaactcctgtacaaaatgcacgtcttgcctgagccatcctctgatcaagatgaaccagattctgcttttgaagcaactcagtacttctttgaagatattaccccagaatgtacacatgcaaccaaaaagagccttggaccagatgaattcacagctgaattctaccagacatacaaagaagagctggcactaatcctactgatactataccaaataattgaggagaagaaactcctcctcaactcattctacaaagccaccatgactctgatactaaaatatgtcaaagacacaactaaaaaagaaaaatacaggccaatatccctgctgaacacagatgcaaaaatcctcaaccaaatccagaaacacgacaaaaaattaattggccataatcaaaaattcggaactatccgggcagatttgattgaacagatgagattcaaacagagactgaaagtgatccagacgctggaggatactacgaaacgcaacgtggtacgaaccattgtgacagaaacttcctttaccattgatgagctggaagaactttatgctcttttcaagtccctgcatttttctgacgaggaaaccgaacccagaaagatggaggcactccgggtgtccaggctggttggtggtgcgcttggtgcagcatcagcattatcaacagagtggacagtggcacccctgccagcctgcatccggcacttgaggtgtaagttggagatccgtaaggcaggagaaaacaatgatgcaattcagatcaggtttttaagggatgctgaggaccagaagaaacgttctcagggcatgggggcagggccaggattctggggggagctaaacgaagtggaagtagcagctggaggcagcaagagcatggacagcgaaagcaaagaaattgagacaaggccaacagctgatttccatttacgtcttcttgggctgatccctaatggtggccctcaggctgccagacatcctatcacaggacaaagccgcagttcccttcctctgcctggaaagacaatccttttaatttatatcagtgcctatattaccaggtctttcaacttagaacaaggaacaagtagctcagataaagcaatgagctggaatatgacaatcaccaatcaaaatcacagaacacctgtagagagcatagtgcgctcagcagaatactcaggctttgtcagtgatcatttctataaaagtttagagaatcaaggatcaggaaatgaagaaaccatcaagtgttatgagcacttggggccccacaaaccaccaggtgccatcaatgagaaggccacacatcctgggtactatgaagacctagtggagaagtccatggggaagtataatctcgccacggaggagattgagagggatttacaccgctcccttccagaacacccagcttttcagaatgaaatgggcattgctgcactaaggagagtcttaacagcttatgcttttcgaaatcccaacatagggtattgccagggcatcattgcagaatacaacaaaatcaatgatgtaaaggaagatgatgacacggagaagtttaaagaagccattgtgaaatttcataggctgtttgggatgccagaggaagagaaactcgtcaactattactcttgcagctattggaaggggaaggtcccccgtcagggttggatgtacctcagcattaaccacctttgcttttattcttttcttatgggaagggaagcgaaactggtcatccggtgggtagacatcactcagcttgagaagaatgccaccctgcttctgcctgatgtgatcaaagtgagcacacggtccagtgagcatttcttctctgtattcctcaacatcaacgagaccttcaagttaatggagcagcttgccaacatagccatgaggcaactcttagacaatgagggatttgaacaagatcgatccctgcccaaactcaaaaggaaatctcctaaaaaagtgtctgctctaaaacgctcccaccccaccagcctgcctccccactccctgctgtccaccccgggtatcacccgcaaggaagagacccccgacaacgtggtcgagaagaaggacttggagttgtataaggaagcccccagcactttccaggccttgttctcagatcccccccccagcaaaaaaccacaatacgggaggccctaccctttcctggggcagcccacagtggccgccgatgcggatggcctggcccctgatgtgctgctcccagctgatgggaccaagcgcctgacactctcgcccgaagacaagctcatcctcctgtccccctccaagatcccagagccgctgcgggaggacccggaggaagagccgctggctgaacaggaggcgaaggtggaggtggatgatgtggacgagcgccccgcagagctgccgcctctggagttgccgctgccactgcccgccatggaaaccatggctaccccgagccctgcaggcggatgcagaggtggcccgttggaggcccaggcgctgagtgccaccgggcagggctgcaccgagccctctgagtgcccagactttgcggaggggcctgaagcatgcgtggattccccgggccggacagaaccctgcacggccgcattggacctgggggtgcagctgacacccgagacgctagtggaggccaaggaggagccagtggaggtgcctgtggcggttcctgcggcagaggcagcgccggaggaaggcctggcccaggcggccctgagcgagccccagcccagcctagaaatgtcagactgtgacgtgcccgccggggagggagagtgcccgagactggagccccgggaggccgtgcctgtgcccggcagcacctgctacctggaagaggcaagctctgagcagttcctgcccggcctggaagacccactggctggcatggaggtggccatggagctgccccaggccaggcctctgccctccccaggtgctactggagtccaggccttggagaagcaggaagctgccgagagccttgtcttggagcagagctttctgcacggcatcaccctgctgagcgagatcgcagagctggagctggagaggaggagcaagaaggtgggaggtgcggagcgggccctggtggctcggccctcactggagagcctgctggcagccggcagccacatgctgagggaggtgctggatgggcccgtggtgggacccgctcaagaacctgcggctcccacgggagctgaagcccaacaacaagtacagctggatgcgcaagaaggaggaaagaatgtatgccatgaagtcctccctggaggacatggacgtcctggaactggacttcagaatgtggcgggccgaggtccagcaccagtacaaggagaagcagcatgagctgagggggaagaactgcaacagtagcggaaagctgagcagcaaatctctgccgacatcagatgactatgagctgggagcaggaataaggaagagacacaaagggcccaaggaggaacacaatgcccttattggaacagggaaagccagggagaggaaccagacttgggatgaacacgaggcttcgtctaagttcataagtcagctgaagattaagaagaagaagatggacagcgaccaggagcagttggcaagcaagctcgacaaatga

SEQ ID NO: 17491 - DNA, 903 bp, Homo sapiens
  SIMILAR (217)..(513): 641254mologous to Mus musculus Pro-Pol-dUTPase polyprotein,accession number Y12713,Smith-Waterman Score=324.
atgattagacccaaaaatgctaaggactctacttctaatagtatggagaacactgatagtacttggagtaaactgtttggagagttatgcaaaataaatgaatttgatactcctgattcaccactcctgagaggcaaggagtttaatgactctatacttaatacttttgaccatatgtggagaaccagggaacacaatgaagctgtttggttgcttctaagttcagtggacaaagtgatgaaagaaaatgatgaactcagggattctgtgtcccagcttcagaggcagatacctgcgcagaagatagatggatcttggcgaatgacagtgaattattgtaatcttaaccaagtggtgactccaatttcagctgctgtaccagatgcagtttcattgcttgagcaaatgaacacatctcctcgtatctggtatgcagccattgacttggcaaatgccttttattccattcctgtccataaggcccaccagaagcaatttgccttcagctggcaagtcactatgcaacctgaactgtgtatcataaactgggtgctttctgatccatcaagccataaagtgggtcatgcacagcagcattccatcatcaaatggaagtggtatatacgtgatcgggctcaagcaggtcctgaaggcacaacaaagaatcatgggtccagggatcaagaggtgaaagtggaagtggcaccactcaccatcacccctagtgatccactagcaaaacttttgcttcatgttcccacgacatcacgttctgctggcctagagatcttagttccagagggaggaacactgccaccaggagacatgacaatgattccactaaactggaagattgccacctggacactttggggtcctcctacctttaagtcagcaggctaa

SEQ ID NO: 17492 - DNA, 1293 bp, Homo sapiens
  SIMILAR (751)..(1059): 611254mologous to Mus musculus Pro-Pol-dUTPase polyprotein,accession number Y12713,Smith-Waterman Score=327.
atgagcatacaagtcctgaaggtatttcaacaccagttcacacgtaatggatcaagaaccctggggcagattcagaaaacttcaatagaagaccgagttctgccatgcatgtatgcacgtaacctagaagttagagttctagcacccgcttttccaaaaacttcagagaagttgctgttcgtgtcgggaatctctagaggcgattcgaacggcaatcaacttccgggcgagtttttttctgggcacgtatttctgcccgcggataaaatgcccacattatctcgcgccgttatctcgggcggaagtatccgcgacgctatgtggtgcatacggggctccgagtttgatagccgcattcttcgcggctatggtgtccccacatttgtcgcgactgtatctccctttgttctctgccgttgccgacagagtgttgttcatggtgtttctagccttggtgctcatagttatgccgactcgtttctgctcaagagttgtcctgcatacagtcggggtttctggagttggctgcttaatatgattagacccaaaaatgctaaggactctacttctaatagtatggagaacactgatagtacttggagtaaactgtttggagagttatgcaaaataaatgaatttgatactcctgattcaccactcctgagaggcaaggagtttaatgactctatacttaatacttttgaccatatgtggagaaccagggaacacaatgaagctgtttggttgcttctaagttcagtggacaaagtgatgaaagaaaatgatgaactcagggattctgtgtcccagcttcagaggcagatacctgcgcagaagatagatggatcttggcgaatgacagtgaattattgtaatcttaaccaagtggtgactccaatttcagctgctgtaccagatgcagtttcattgcttgagcaaatgaacacatctcctcgtatctggtatgcagccattgacttggcaaatgccttttattccattcctgtccataaggcccaccagaagcaatttgccttcagctggcaagcaaagaatcatgggtccagggatcaagaggtgaaagtggaagtggcaccactcaccatcacccctagtgatccactagcaaaacttttgcttcatgttcccacgacatcacgttctgctggcctagagatcttagttccagagggaggaacactgccaccaggagacatgacaatgattccactaaactggaagattgccacctggacactttggggtcctcctacctttaagtcagcaggctaa

SEQ ID NO: 17493 - DNA, 4204 bp, Homo sapiens
  SIMILAR (162)..(3830): 1001254mologous to Homo sapiens phosphorylase kinase,accession number X73874,Smith-Waterman Score=6325.
gccgccgggcgccaggcctgagcggtgggagggctctgcggggcctggtgttcaggcgtcccaccacgagggtggagcagcgttggatacttgttccttagggaccgaagctccggtggcacccgggctatttctcagaggacaattagtaacgtgtcgccatgaggagccggagtaactccggggtccggctggacggctacgctcgactggtgcaacagaccatcctgtgccatcagaatccagtgactggcttgcttccagccagctatgatcagaaagatgcttgggtccgagataatgtgtacagcatcttggctgtgtggggtttgggcctggcctatcggaagaatgcagaccgggatgaggataaggcaaaggcctatgaattggagcagagtgtagtgaagctgatgagaggactactgcactgcatgatcagacaggtggataaagtagaatccttcaaatatagtcagagtactaaggatagcctccatgcaaagtacaacaccaaaacctgtgccactgtagtgggtgatgatcaatggggacacctgcagttggatgctacctctgtgtacctgctcttcttagcccaaatgactgcctcaggactccatatcatccacagcctagatgaagtcaatttcatacagaaccttgtgttttacattgaagctgcatataaaactgctgacttcgggatatgggaacgtggagacaagaccaaccaagggatctcagagttgaatgccagttcagttggaatggcaaaggcagccctggaagcattagatgaactggatctgtttggtgtgaaaggtgggcctcaatcagttatccatgtcctggctgatgaagtacagcactgccagtctatcctaaattcactactgccccgtgcttcaacatcaaaagaggttgatgctagtctactctcagtggtttccttccctgcctttgcagtagaggatagccagttggtggagctcacaaaacaggaaatcatcaccaagcttcagggtcgttatggttgctgtcgctttctacgagatggatataaaactcctaaagaggatcccaatcgtctgtactatgaaccagctgagctgaagctatttgaaaacattgagtgtgaatggccattgttctggacatactttattcttgatggggtcttcagtggcaatgcagaacaggttcaagaatataaagaggctcttgaagcagtcctcatcaagggcaaaaatggagtcccacttctgccagagctgtacagtgttcctcctgacagggtcgatgaagaatatcagaatcctcacactgtggaccgagtccccatggggaaattgcctcacatgtggggtcagtctctatacattttaggaagcttgatggcagagggatttttagcccctggagaaattgatcccctgaatcgcaggttttctactgtaccgaagcccgatgttgtggttcaagtctccattctagctgaaacagaagaaatcaagaccattttgaaggacaagggaatttacgtggagaccattgctgaggtataccccatcagagtacaaccagctcgtattctcagccacatttattccagcctaggatgcaacaatagaatgaaactcagtggacgaccctacagacacatgggagtgcttggaacttcaaaactctatgacattcggaaaactatctttactttcactccacagtttatagaccagcaacagttctacctggctctggacaacaagatgatagtggaaatgcttagaacagacctctcctacctctgtagccgctggcggatgacaggccagcccaccatcaccttccccatctcatacagcatgcttgatgaagatggaacaagcttgaattcaagtatcctggcagcactccgaaaaatgcaagatgggtattttggtggggcaagggttcaaacaggtaaattgtcagagtttttgacaacatcttgttgcacacacttgagcttcatggaccctggacctgagggtaagctgtacagtgaagattatgatgacaactatgattacctggaatctggcaactggatgaatgattatgattcaaccagtcatgctcgctgtggtgatgaagttgctcgttatttagatcaccttttggcgcacactgctccccatcctaaactagcccctacctcacagaagggagggctagatcggttccaagctgctgtgcaaacaacctgcgacttaatgtccttggtgaccaaggccaaggaactgcatgtacagaatgttcacatgtatcttcctacgaagttatttcaggcttcccggccttcattcaacttacttgattcacctcatccccgacaggagaaccaggttccctctgttcgtgtagaaatacatcttcctagagaccagtctggggaggtggactttaaagcactggttttacagttgaaggagacctcaagcttacaggaacaagctgatatcctctatatgctgtatactatgaaaggacctgactggaacactgaattgtataatgaacggagtgctacagtgagagagcttcttaccgagctgtatggcaaagtgggagaaattcgtcactggggcctgatccgatacatttctgggatcttaaggaagaaagtggaagcacttgatgaggcctgcacagaccttctctcccaccagaaacatttgacagtaggacttcctccagaacctcgagaaaagactatctctgcacctctgccctatgaggcgctcactcagctgatagatgaagccagtgaaggggatatgagcatttcaatccttacacaggaaataatggtatatctagccatgtatatgcgaacccagcctggcctctttgctgaaatgtttcgacttcgaattggtctgatcatacaagttatggcaacagaactggcccactcccttcgatgctcagctgaggaagccacagagggcctgatgaatctcagtccttcggccatgaagaatctcctgcatcacattctcagcggcaaggagtttggagtggaacgaagcgttcgtcccactgattcaaatgtcagtcctgctatttctatccacgagattggtgctgttggagcaaccaaaacagaacgaactgggatcatgcagttaaaaagtgagataaagcaggtggaatttcgtagactgtcaatctcagctgagagtcagtcacctggaacctctatgactccaagtagtgggtcctttcctagtgcatatgatcagcagtcatctaaagatagtcgtcaaggtcaatggcaacgccgaagaaggctggatggggcactgaatagagttccagttggattttatcagaaagtatggaaagttttgcagaagtgtcacggactttctgttgaagggtttgtccttccttcctctaccactagagagatgactccaggtgagattaaattctctgttcatgtggagtctgtcctgaatcgtgtacctcagccagagtaccgtcagctgctggttgaagccatccttgtcctcaccatgctggcagatattgaaattcatagcatcggaagcatcattgctgtggaaaaaatagtgcatattgccaatgacttgttccttcaagaacagaaaacccttggcgcagatgataccatgttggcaaaggatcccgcatctggcatctgtactcttctgtatgacagtgcacccagtggcaggtttggcaccatgacctacctctccaaggcagccgccacctacgtgcaggagttcctgccccacagcatctgtgccatgcaatgagggctttggttcctggcttctgggagccttttgacagctggtccctgcctcggttgattgtgcatggaactaaaatgttattgcctaatcactccaaccctgcccctttctgtcccatccttcccaagaagagagaactttttcgataaactaactactgtagaagaagtgaacacttacctggaggctcaccttgcagaaccagtgacaatcttatgagtataatgaacactcagccaggcctgtcatgattggctttatttctttcatcattcataaaagtttgcatgtgtttttattctctagatctgttaccaatatagttttctaactcctgtttggggagcaagtgttaataataacttattcct

SEQ ID NO: 17494 - DNA, 1186 bp, Homo sapiens
  SIMILAR (308)..(760): 1001254mologous to Homo sapiens phosphorylase kinase,accession number X73874,Smith-Waterman Score=785.
cgcgtctcccgcaaggtggaggcggcgcagcggtcgttgacctgttggcggcggccgggcgggaggctgtgggccgcggcggtctcccggggttgaggggaggatgcaggagtcacacgcggaggccggactggactaagggggcaggagcggcgcctggggcgctgcggcggggctctagaccgcgggaagccagtgctagcgctggcgcgtggtgggcccctgaggccgccggagtccggagagggaccgaaggctccggtggcacccgggctatttctcagaggacaattagtaacgtgtcgccatgaggagccggagtaactccggggtccggctggacggctacgctcgactggtgcaacagaccatcctgtgccatcagaatccagtgactggcttgcttccagccagctatgatcagaaagatgcttgggtccgagataatgtgtacagcatcttggctgtgtggggtttgggcctggcctatcggaagaatgcagaccgggatgaggataaggcaaaggcctatgaattggagcagagtgtagtgaagctgatgagaggactactgcactgcatgatcagacaggtggataaagtagaatccttcaaatatagtcagagtactaaggatagcctccatgcaaagtacaacaccaaaacctgtgccactgtagtgggtgatgatcaatggggacacctgcagttggatgctacctctgtgtacctgctcttcttagcccaaatgactgcctcagcatggcagaagcaatattcaaggcgggtacaaccaagagcacaatctccccagctagttcccagtttagggacactgtatctctctgagggaggactccatatcatccacagcctagatgaagtcaatttcatacagaaccttgtgttttacattgaagctgcatataaaactgctgacttcgggatatgggaacgtggagacaagaccaaccaagggatctcagagttgaatgccagttcagttggaatggcaaagagtttctacccgccagaagccctcaccagatggggccccttgacattggactttatcagcatgatgaacgggagccaggtgctattcctcaagacaatggaggaaagaccccaaggcatttcagagatcttagatgctgccttttccatcacaggtccaaaggcctag

SEQ ID NO: 17495 - DNA, 732 bp, Homo sapiens; identical to SEQ ID NO: 3724
  SIMILAR (409)..(729): 681254mologous to Homo sapiens mariner transposase,accession number U49974,Smith-Waterman Score=387.

SEQ ID NO: 17496 - DNA, 2235 bp, Homo sapiens
  SIMILAR (415)..(2232): 681254mologous to Homo sapiens gonadotropin inducible transcription repressor-4,accession number AB021644,Smith-Waterman Score=2360.
atgcagccgggaccccgggcgtcctgtcccgttcctgcgcggcgactgcggccccggcgccctctctgggcagctccgagcccgcagccccgggtctccccagattgtgcggctgtaaccaacacagcctggctcgcagttcctgtgaacccggtcctccggacggctcccgctgccaatgcgggttcccgcgggacacaggctgccacggaacttccaggtcgtctcttagctacagagccgagcaccgagcgcccagcgcaggaattgcctaaaaatgttgtaaaatacatcaaaagcctgcaaccacctggtaaaacggattatgattatgacataccatctctgatggttaatactgagtgtcaacttgattggattgaaggatacaaagtattgatcctgggtgcctctgactcagtggtctttgaggatgtggctgtgaacttcacccaggaggagtgggctttgctgggtccctctcagaagaaactctacagagatgtgatgcaagaaacctttgttaacttggcctctataggggaaaactgggaggagaagaacattgaagatcacaaaaatcaggggagaaagctaagaagtcatatggtagagaggctctgtgaaaggaaagaaggtagtcagtttggagaaaccatcagtcagactccaaatcctaaaccaaacaagaaaacttttactagagtaaaaccatatgaatgtagtgtgtgtggaaaggactatatgtgtcattcatctcttaataggcacatgagatctcatactgaacatagatcatatgaatatcacaaatatggagagaaatcatatgaatgtaaggaatgtgggaaaagattcagctttcgaagttcatttcgaatacatgaaagaactcacactggagagaaaccctataaatgtaaacagtgtggtaaggctttcagttggcccagttcctttcaaatacatgaaagaactcatactggagagaaaccttatgaatgtaaggaatgtgggaaggccttcatttatcacacaacctttcgaggacacatgagaatgcacacaggggagaaaccctataaatgtaaagaatgcgggaaaacgttcagtcatcccagttcttttcgaaatcatgaaagaactcacactgcagagaaaccctataaatgtaaacaatgtgggaaagctttcagatattaccaaacttttcaaatacatgaaaggactcacactggggaaaaaccctatcagtccttcagttttcctagttcctttagaaaacatgaaagaattcatacaggagagaaaccctatgattgtaaggaatgtgggaaagcattcatttctcttccaagctatcgaagacatatgataatgcacactggaaatggaccttataaatgcaaggaatgtgggaaagcctttgattgtcctagttcttttcaaatccatgaacgaactcacactggagagaaaccctatgaatgtaaacagtgtggtaaagccttcagttgttccagttcctttcgaatgcatgaaagaactcacactggagagaaaccccatgaatgtaaacaatgtggtaaagccttcagttgttccagttctgttcgaatacatgaaaggactcacactggagagaaaccctatgaatgtaaacagtgtggtaaagccttcagttgttccagttcctttcgaatgcatgaaagaattcacactggagagaaaccctatgaatgtaaacagtgtggtaaagcctttagtttttctagttcctttcggatgcatgaaaggactcacactggagagaaaccctatgaatgtaaacaatgtggtaaagccttcagttgttccagttcctttcgaatgcatgaaaggactcacactggggagaaaccctatgaatgtaaacagtgtggtaaggcgtttagttgttccagttccattcgaatacatgaaaggactcacactggagagaaaccttatgagtgtaaacaatgtggtaaggccttcagttgttctagttctgttcgaatgcatgaaaggactcacactggagtgaaaccctatgaatgtaaacaatgtgacaaagccttcagttgctcacgttcctttcgaatccatgaacgaactcacactggagagaaaccctatgcatgtcaacaatgtggtaaagccttcaagtgttcccgttcctttcgaatacatgaaagagttcatagtggagagtaa

SEQ ID NO: 17497 - DNA, 411 bp, Homo sapiens
  SIMILAR (411)..(283): 831254mologous to Macaca fascicularis hypothetical protein,accession number AB047968,Smith-Waterman Score=192.
tcaggagctggcaggcccgaagatgcactgggtagacccagtgggggccttcagtgtgttggtgtctaattccttggccgtcctttccagatcaatgaccaggcttctgagctgtgttactgccctggagatgtcaaggattctggccgcttctgctggcatgtgctccagctggcccagccactgctgcagagcctgcagtttcttctcctgctgagccttgagccgctgaagttctgcaatgtcctttctgagcttcctgctccggcgattgagtcgttcgagtgagaacatgtggtgtttggttttctgatcttgtgttagtttgctgagaatgatggtttccatcttcatccacgtccctgtaaaggacgtgaactcatctgtttttatggctgcatagtattccat

SEQ ID NO: 17498 - DNA, 627 bp, Homo sapiens
  SIMILAR (193)..(564): 281254mologous to Homo sapiens RING finger protein,accession number Y07829,Smith-Waterman Score=149.
atgatccctttgcagaaggacaaccaggaggagggtgtctgccccatctgccaggagagcctgaaggaggccgtgagcaccaactgcggacatctcttctgtcgagtgtgcctgacacagcatgtggagaaggcctcagcctctggggtcttctgctgccccctctgccggaagccctgttctgaggaggtgctagggacaggctatatctgccccaaccaccagaagagggtgtgcaggttctgtgaggagagcagacttcttctatgtgtggaatgcctggtgtcccctgaacacatgtctcatcatgaactgaccattgaaaatgccctcagccactacaaggaacgactcaatcgccggagcaggaagctcagaaaggacattgcagaacttcagcggctcaaggctcagcaggagaagaaactgcaggctctgcagcagtggctgggccagctggagcacatgccagcagaagcggccagaatccttgacatctccagggcagtaacacagctcagaagcctggtcattgatctggaaaggacggccaaggaattagacaccaacacactgaaggcccccactgggtctacccagtgcatcttcgggcctgccagctcctga

SEQ ID NO: 17499 - DNA, 578 bp, Homo sapiens
  SIMILAR (1)..(42): 711254mologous to Mus musculus Pro-Pol-dUTPase polyprotein,accession number Y12713,Smith-Waterman Score=48.
agagaccttgatctcttttcgcttccacaagatatcacactgggtccattacgttgatggcattatgctgattggatccagtgagcaagaagtagcaagcacactggacttattggtgagacatttgcatgccagaggatgggaaataaatctgactaaaattcagggacttgctacctcagtaaaatttctaggagtccagtggtatggggcctgtagagatattccttctaaggtgaaggataagttgctgcatttggcccctcctacaaccaagaaagaggcacaacatctagctgccagttttgagtggggtccagaacagaagggtctgcaacaggtccaggttgctgtgcaagctgctctgccacttgggctgtatgacccagcagatccaatggtgcttgaggtgtcagtggcagatagggatgctgtttggagcctctggcaggcccccataggcgaatcacagtggaggcctctaggatttcagaacaaggccctgccatctgcagataactactctccttttgagagacagctcttggcctgttactgggctttggtggaaactgaag

SEQ ID NO: 17500 - DNA, 282 bp, Homo sapiens
  SIMILAR (192)..(281): 901254mologous to Mus musculus Pro-Pol-dUTPase polyprotein,accession number Y12713,Smith-Waterman Score=147.
cccatttatcgagtgagccgaaaggctgccaattttgagtggagtccagaacaggagaaggctctgcaacaggtccaggctgctgtgcaagctgcttggccacttgggccatacgacccagcagatccaatggtgcttgaggtgtcagtggcagatagggatgctgattggagctgttggcaggcctccatagccataaagtgggtcatgcacagcagcattccatcatcaaatggaagtggtatatacgtgattgggctcgagcagatcctgaaggcacaa

SEQ ID NO: 17501 - DNA, 338 bp, Homo sapiens
  SIMILAR (4)..(63): 421254mologous to Mus musculus Pro-Pol-dUTPase polyprotein,accession number Y12713,Smith-Waterman Score=35.
tccatttatctagtgacccaaaaggctgccattctgagtggggtccagaacaggagaaggctctgcaagaggtccaggctgctgtgcaagctgctctgatacttgagccatatgacccagcaggtccagtggtgcttgaggtgtcactggcagatagggatgctgtttggagcctttggcaggcccccataggtgaatcacagcaaaggcctctaggattttggagcaaggccctgccatcttctgcagccataaagcgtgtcatgcacagcagcattccatcatcaaatggaagtggtatatacatgatcgggctcgagcaggtccggaaggcacaa

SEQ ID NO: 17502 - DNA, 757 bp, Homo sapiens
  SIMILAR (220)..(555): 711254mologous to Mus musculus Pro-Pol-dUTPase polyprotein,accession number Y12713,Smith-Waterman Score=415.
atgtggagaaccaaggaacataatgaagctggttggttgctcctaagttcagtggacgaagtgatgaaagaaaatgatgaactcagggattctatctcccagcttcagaagcagatactgagtctcaaatctgctaagattgccctgactgagagtcttatctcctttagagaaagagctgaaattgtggaaaaacagacacaagctcttatcatgggaactgtgtactggggaaagggaaatgatcagacatttcagggactactggacactggctctgagctgacgttgattccaggggacccaaaacatcattgtggtcctccaggaccaaaagtaagggcttatggagatcaggtaattaacggagttttggctcaggtccaacttatagtgggtccagtgggcccctggactcatcctgtggtcatttccccagtgccagaatgcgtaattggcatagccatacttaacagctggcagaacccccacattggctccctgactgtccatttatctagtgacccaaaaggctgccattctgagtggggtccagaacaggagaaggctctgcaagaggtccaggctgctgtgcaagctgctctgatacttgagccatatgacccagcaggtccagtggtgcttgaggtgtcactggcagatagggatgctgtttggagcctttggcaggcccccataggtgaatcacagcaaaggcctctaggattttggagcaaggccctgccatcttctgcag

SEQ ID NO: 17503 - DNA, 1320 bp, Homo sapiens; identical to SEQ ID NO: 16412
  SIMILAR (316)..(465): 721254mologous to Mus musculus Pro-Pol-dUTPase polyprotein,accession number Y12713,Smith-Waterman Score=183.

SEQ ID NO: 17504 - DNA, 1119 bp, Homo sapiens
  SIMILAR (761)..(964): 731254mologous to Mus musculus Pro-Pol-dUTPase polyprotein,accession number Y12713,Smith-Waterman Score=267.
cctctgccagcgcctcttattggctgaacctaatgagaagccagggagcctgggaaatgtgatggctgtggcaagaatagaaattggaatctgtgagtattaccatgagaaaaccacagagaaagctctggacagccatggagtcttagctggatctacaataaaaggagtcagaagctttcagaggaatttggagctgaagttgccagcaacagagagggccacagctaacgcgatagagctgctcacagtgttagaccaggcctatgaaaactttgcaccgcagatcctccccagcactggcagccccacgtcccaggaaactgctcagttcaaggcaaaccagaacaaaccattggtcagaggaaaaggaagcccacatgaggccataagatatatttcagctgcccatcgagaatggaagccagcaatcctgacatcagccattaggtcattttgttctacctggctggtgttcacctccaagaactttcccaagcttgtgacccaacatggaagtacgatagcaggaaacgggcagagctcagatgagacccaagtccagggtgcagcctggaagtctgattccagaggaacaaagagacaaataccaacgtggattctggcagaggggaacaatgcaggtgcccaacttgacatcccaggcccaaccatccctgctcctaattgttccctgaaggtgccccagagctggagtaccacgcccagcatgccctcctcactagggaaggcctactggctcttggcctgttactgggccttggtggaaactgaacattggctatgggtcatcaagtcaccatgtaaacctgaactgcctgtcatgaactgggtgctttctgacccatctagccataaagtgggtggtgcacagcagcattccatcaacaaatggaagtggtatatacgtaatcgggctcgagcaggtcctgaaggcacaagttgattatgttggacctcttccatcatgcaaagagcagcagtttgttctcactggaatagatactttatctggatatggctttgcctatcctgcacacaatgcttctgccaagactaccatccatgggcacacagaatgccttatccaccatcatg

SEQ ID NO: 17505 - DNA, 1818 bp, Homo sapiens; identical to SEQ ID NO: 3697
  SIMILAR (394)..(906): 671254mologous to Mus musculus Pro-Pol-dUTPase polyprotein,accession number Y12713,Smith-Waterman Score=553.

SEQ ID NO: 17506 - DNA, 1950 bp, Homo sapiens; identical to SEQ ID NO: 16559
  SIMILAR (930)..(1448): 691254mologous to Homo sapiens cytokeratin 18,accession number X12881,Smith-Waterman Score=500.

SEQ ID NO: 17507 - DNA, 1158 bp, Homo sapiens
  SIMILAR (1)..(738): 631254mologous to Homo sapiens p40,accession number U93567,Smith-Waterman Score=785.
atggggagaaaccagcgcataaaggctgaaaattgcaaaaaccagaactcctcttctcctccaaaggatcacaattcctcgccagcaagggaacaaaagtggacgaagaatgagtttgacaaattgacagaagtaggcttcagaaggtgggtaataacaaactcctccaagctaaaggagcatgttctaacccaatgcaaggaagctaagaaccttgaaaaaaggttagacgacttgctatctggaacaaccagtttaaagaagaacataaatgacctgatggagctgaaaaacacagcacgagaacttcgtgaaccatacacaagtatcaatagccaaatcgatcaagcagaaaaaaggataacagagattgaagatcaacataatgaaataaagggtgaagacaagattagagaaaaaagaatgaaaaggaatgaacaaagccttcaagaaatatgggactatgtggaaagaccaaatctacatttgactagtgtacctgaaagtgatggggagaatggaaccaagtcggaaaacactctgcaggatattatccaggagaactttcacaacctaccaacacagaccaacattcaaattcaggaaatacagagaaaaccacaaagatactccttgagaagagcaaccccaagacacataaacgtcagattcaccaaggttgaaatgaaagaaaaaatgttaagggcagccagagaggaaggtcgggttacccacaaagaaatacaaactaccatcagacaatactataaacacctctatgcaaataaactagaaaatctagaagaaatggataaattcctggacacatacaccctcccaagactaaaccaggaagaagtcgaatccctgaatagaccattaacaagttctgaaattgaggcagcaattaatagactaccaaccaaaaaaagcccaggaccagacggattcacagccgaattctaccagaggtacaaagaggagctggtacccttccttctgaaactattccgatcaacagaaaaagacagaatctgccctaactcattttatgaggccagcatcatcctgataccaaaacctggcagagacataacaacaacaaaaaatgttcaggccaatatccctgatgaacatagatgcgaaaatcaacaataa

SEQ ID NO: 17508 - DNA, 1347 bp, Homo sapiens
  SIMILAR (1162)..(1287): 591254mologous to Homo sapiens Human secreted protein, SEQ ID NO: 6812,accession number G02731,Smith-Waterman Score=133.
atggtgcgaacccgggaggcagagcttgcagtgagccgagatggtgccactgcactccagcttgggcaacaggggtttgacactagcatcctgcccatctgcaaggactccctgggctggatgttcaacaagttggacatgaactatgacctcctgcttgacccttcagagatcaatgccatctacctggataagtacgagccctgtatcaagcctcttttcaactcgtgtgactccttcaaggatggcaagctttctaacaatgagtggtgctactgcttccagaagcctggagagctcatcgcgtttgggcctctaaaggttaagggccctgtaattttgactaatagccaaccatccccatcctctgctgctgaccctgcagcagatattctgacatgggccttcatacctcggtgtaatgaggagggctattacaaagccacacagtgccacggcagcacggggcagtgctggtgtgtggacaaatatgggaatgagttggctggctccaggaaacagggtgctgtgagctgtgaagaggagcaggaaacctcaggggattttggcagtggtgggtccgtggtcctgctggatgacctagaatatgaacgggagctgggaccaaaggacaaagaggggaagctgagggtgcacacccgagccgtgacagaggatgatgaggatgaggatgatgacaaagaggatgagatgggactatctagttgcaggaaaacaagctcagggcttccactgattctacaatatggtgagttatataatgatttcattatatattacaatgtaataacaatagaaatgaagtgcacaataagtgtaatgcacttgaatcatcctgaaaccatctccctcacccctatatccatggaaaaattgtcttccacgaaacccgtccctggtgccaaaaaggcaaacagggtctggagtggacatctggcaaactgcagcagacctgcagcagaggggcctattagaaggaaaactaacaaacagaaaggaatagtatcaacatcaacaaaaacgatgtccacaccaaaaccccatctgaaggtcaccaacatcaaacaccaaagcaagggaaaaaactggacagagaatgagtttgatgaattgacagaagtaggcttcagaaggtggataataacaaactcctcccagctaaaggagcatcttctaacccaatgcaaggaagctaagaaccttgaaaaaaggttagaggaattgctaactagaataaccagtttagagaagaacattaatgacccgatggagctgaaaaacacagcagaagaacctcacgaagcatacacaagtatcaatagctga

SEQ ID NO: 17509 - DNA, 716 bp, Homo sapiens; identical to SEQ ID NO: 12886
  SIMILAR (58)..(585): 971254mologous to Mus musculus early B-cell factor,accession number L12147,Smith-Waterman Score=896.

SEQ ID NO: 17510 - DNA, 591 bp, Homo sapiens; identical to SEQ ID NO: 12287
  SIMILAR (292)..(588): 621254mologous to Homo sapiens PRO2221,accession number AF116695,Smith-Waterman Score=292.

SEQ ID NO: 17511 - DNA, 1143 bp, Homo sapiens; identical to SEQ ID NO: 6970
  SIMILAR (342)..(256): 1001254mologous to Homo sapiens Natural killer cell stimulatory factor (NKSF),accession number R05171,Smith-Waterman Score=154.

SEQ ID NO: 17512 - DNA, 777 bp, Homo sapiens
  SIMILAR (1)..(225): 621254mologous to Homo sapiens PRO2221,accession number AF116695,Smith-Waterman Score=225.
atgaggaaaaatcagtgcaaaaaggctgaaaattccaaaaaccaggacagctcttctcctccaaaggatcacaactcttcgccagcaagggaacaaaactggatggagaatgagtttgacgaattgacagaagtaggcttcagaaggcaggtaataacaaactcctctgagctaaaggagcatgttctaacccaatgcaaggaagctaagaaccttgaaaaaagggacatggatgaagctggaaaccatgattctcagcaaactgacacaggaacagaaaaccaaacacgcatattctcactcccagcaattcctgcagaaagaaaacttcctggtttgggttacatgtctgtgcttgtgaaatcagtatatttcatcttcctggccacagtgattatgccaacccctggcactgggcactggtttggtcccagcagaatcacacagtcagagcaggttagggataaaaggaatatcttattgacacaggaattttctctcagcccctttgctggactcgcagcaggtgcatcctgtctacttggcctgccacactcagtcccttgtgggagggagaatgtgagagagcgagtgcaggagccagctggccactccagctcaatggatggcagtgtgttggcagctcagtcggcccctggccctgtcacatggagtggctactctctgccggtgagggcaaaaggtcagtgtgacagcctttctgtgtacctgcactcagtgggtcctgagctcttgtccagcatccaagaagaatga

SEQ ID NO: 17513 - DNA, 993 bp, Homo sapiens
  SIMILAR (454)..(990): 981254mologous to Homo sapiens Human secreted protein sequence clone mh703_1,accession number Y22499,Smith-Waterman Score =942.
atgctgaaaattccaaaaaacagaatgcctcttctcctccaaatgatgaaactcctctgggcacaaaactggacggagaatgagtttgatgaattgacagaagtaggcttcagaaggtggatagtaacaaactcctctaagctaaaggagcatgttctaacccaatgcaaggaagctaagaaccttgataaaaggttacaggaactgctaactagaataaccagtttagagaagaacataaatgacctgatggagctgaaaaacacagcaagagaacttcgtgaagcattcacaagtttttgtgttaactgtgaagcagtttcactaataaccagtctaagggaggattcccactggttggaggatagtaaaggtcatcgtatgccaggcaccaggaatagaagtgtgaatactttcacccaccgcatcctgggctgcagttttaccagttgcctgaatctgactcccatagtgaccctctctggccacatggaggcagtttcctcagttctgtggtcagatgctgaagaaatctgcagtgcatcttgggaccatacaattagagtgtgggatgttgagtctggcagtcttaagtcaactttgacaggaaataaagtgtttaattgtatttcctattctccactttgtaaacgtttagcatctggaagcacagataggcatatcagactgtgggatccccgaactaaagatggttctttggtgtcgctgtccctaacgtcacatactggttgggtgacatcagtaaaatggtctcctacccatgaacagcagctgatttcaggatctttagataacattgttaagctgtgggatacaagaagttgtaaggctcctctctatgatctggctgctcatgaagacaaagttctgagtgtagactggacagacacagggctacttctgagtggaggagcagacaataaattgtattcctacagatattcacctaccacttcccatgttggggcatga

SEQ ID NO: 17514 - DNA, 1386 bp, Homo sapiens
  SIMILAR (10)..(1371): 641254mologous to Homo sapiens putative p150,accession number U93565,Smith-Waterman Score=1338.
atgggaagaaaccagcataaaaaggctgaaaattccaaaaaccaaaacacctcttctcctccaaaggatcacaactccttgccagcaagggaacaaaattggacagagaatgagtttgatgaattgacagaagtaggcttcagaaggtgggtaataacaaactcctctgagctaaaggagcatgttctaacccaatgcaaggaagctaagaaccttgacaaaaggttaactagaataaccagtttagaaaagaacataaatgacccaatggagctgaaaaacacagcacgaaaacttcgtgaagcatacacaagtatcaatagccaaatcaatcaagcacacgcaaatgctgagagattttgtcaacagcaagcctgccttacaagagctcctgaaggaagcactaaacatggaaaggaacaactggtaccagccagtacaaaaacataccaaatggaagaagtcaaatccccagatagaacaataacaagttctgaaattgaggcagcaattaatagcctaccaaccaaaaaaagtccaggaccagatggattcacagccaaattctaccagaggtacaaagaggagctggtaccattccttctcaaactattccaaacaatagaaaaagagggaatcctccctaactcattttatgaggccagcatcatcctgatacgaaaacctaacagagacacaacaaaaccagaaaatttcaggccaatatctctgatgaacatctatgcaaaaatcctcaataaaatactggcaaaccaaatccagcagcacatcaaaaagcttatctaccacaaccaaatcagcttcatccttgggatgcaaggctggttcaacatatgcaaatcaataaacataatccatcacataaacagaaccaatgacaaaaacccacgattatctcaagcagatgcagaaaaggcctttgacaaaattcaacagcccttcatgctaaaaattctcaataaactaggtattgatggaatgtatctcaaaataataagagctatttatgacaaacccgcagccaatatcatactgaatgggcaaaagctggaagcattccctttgaaaactggcacaagacaaggatgccctctctcaccactcctattcaacattgtattggaagttctggccagggcaatcaggcaagagaaagaaataaagggtattcaaaaaggaagagaggaagtcaaattgtctctgtttgcagatgacatgattgtatatttagaaaaccccatcgtctcagcccaaaatctccttaagctgataaacaacttcagcaaagtttcaggatacaaaatcaacatgcaaaaatcacaagcattcctatatatcaataagagacagagagccaaatcatga

SEQ ID NO: 17515 - DNA, 993 bp, Homo sapiens
  SIMILAR (697)..(990): 591254mologous to Homo sapiens PRO2221,accession number AF116695,Smith-Waterman Score=290.
atgcttgcaggccagcagcgcgagttcccggtgggcgtgggctccgcggaccccgcactcggagccgccggctggccccagcggcctgggcaggctcgggacctgcagctcgccatgcctgagcctcccccaaccccgtgggctcctgtgcggctggagcctcgcctacgagcaccgccccctgctccaaggcgcccagtcccatcgaccacccaagggctgcggagtgcaggcgcagggcgcgggactggcaggcagctccacctgcagcccccgtgcgggatccactgggtgaagccagcagggctcctgagtctggtctgcagcttcactcctgaagccagcgagaccacgagctcaccaggaggaacaaacaactccagacgtcctgccttaagagctgtaacactcactgtgaaggtctgcggcttcactcctgagccagcgagaccaccgacccaccagaaggaagaaactctgaacacatccgaacatcagaaggaacaaactccggacacgccgcctttaagaactgtaacactcaccgcgagtgtccgcggcttcattcttgaagtcaaaggaaaacaaacagaaaggaatagcatcaatatcaacaaaaaggatgtccacacagaaaccccatccaaaggtcaacaacagcaaagaccaaaggtagataaatccatgaagataaggaaaaaccagtgcagaaaagctgaaaattccaaaaaccagaatgcctcttctcctccaaaggatcacaactcctcaccagcaagggaacaaaactggacagagaatgagtttgatgaattgacagaagtaggcttcagaaagtgggtaataacaaactcctctgagctaaaggagcatgttctaacccaatgcaaggaaactaagaacgttgaaaaaagtttagaggaattgctaactagtataaccagtttaaagaaaaacataaatgacctgatagagatgaaaaacacagcatga

SEQ ID NO: 17516 - DNA, 1515 bp, Homo sapiens; identical to SEQ ID NO: 15370
  SIMILAR (1048)..(1491): 481254mologous to Homo sapiens p40,accession number U93567,Smith-Waterman Score=349.

SEQ ID NO: 17517 - DNA, 477 bp, Homo sapiens; identical to SEQ ID NO: 15374
  SIMILAR (199)..(474): 541254mologous to Homo sapiens PRO2221,accession number AF116695,Smith-Waterman Score=234.

SEQ ID NO: 17518 - DNA, 771 bp, Homo sapiens
  SIMILAR (352)..(732): 471254mologous to Homo sapiens p40,accession number U93571,Smith-Waterman Score=296.
atgcccttcagcgatacagagcgtgtcatcacagggccaagcacaaaggtgcattcctacccaggaggcctgcaggctctcctcctgcagctcaggcttcactctctgatgtggcgctggagtgctgctgtggcaattggggttcatgtgagatgtgacctcctggctgttcaccctgtattgtgggctgtacctcagtggcaggagccaattgaaaagatgctgactctcatacctgggcctaggatcacagctacaatcattggtctgtaccagcatgaaggtatcagagcatattgtgactcacgtgtatattatataaagccctcgagtggtatagagagtgtcctaacaaggcccagcacacaggatcacaactcctcgccagcaagggaacaaaactggacagagaatgagtttgatgaattgacagaagtaggcttcaaaaagtgggtaataacaaactcctttgagctaaaggagcatgttctaacccaatggaaggaagctaagaaccttgaaaaaaggttagccaatttgctaactagaataaccagtttagagaacataaatgacctgatggagctgaaaaacacagcacaagaacttcatgaagcttacgcaagtatcaatagccgaatcaatcaatcagaagaaaggatatcagagattgaagatcaacttactgaaatagagcaagtagacaagattagagaaaaaagaataaaaaaaggaatgaacaaagcctctaagaaatatgggactatgtga

SEQ ID NO: 17519 - DNA, 814 bp, Homo sapiens
  SIMILAR (759)..(812): 611254mologous to Homo sapiens NAG13,accession number AF194537,Smith-Waterman Score=48.
aggaaggagcaggcagcaatctttgctgttctgcaacctccactggtgataaccaggcaaacagggtctggagtggacccccagaaaactccagcagacctgcaaaagaggtgccggacagttagaagaaaaactagccaacagaaagcagtagcatcaacattaacaaaaaggataaccacacaaaaactcaatgcaaaggatcacaactcctcaccaacaagggaacaaaactgtacagagaatgagtttgatgaattgacagaagtaggtttcagaaggtgggtaataacaaactcctctgagctaaaggagcatgttctaacccaatgcaaggaagctaagaactttgataaaaggttagaggaattgctaattcaaataaccagtttagagaagaacataagtgacctgatggagctgaaaaacacagcacgagaacgttggaagcatacacaagtatcaatagccaaatcgatcaagcagaaatggaccgctagccagactaataaagaagaaaagagagaagaatcaaatagcacaataaaaaatgataaaggggatatcacaactgatcccacagaaatacaaactaccatcagagaatactataaacatctctatgcaaataaactagaaaatttagaagaaatggacaaattcctggacacatacaccctcccaagactaaaccaggaagaagtcgaacccctgaatagaccaataacaagttctgaaattgaggcagtaattaatagcctaccaaaccaaaaaagtccaggacagacgaattcacagctgacttctaccagag

SEQ ID NO: 17520 - DNA, 1569 bp, Homo sapiens; identical to SEQ ID NO: 16679
  SIMILAR (643)..(1566): 491254mologous to Homo sapiens p40,accession number U93569,Smith-Waterman Score=616.

SEQ ID NO: 17521 - DNA, 1005 bp, Homo sapiens
  SIMILAR (508)..(933): 481254mologous to Homo sapiens p40,accession number U93567,Smith-Waterman Score=337.
atgaacagggtaccaccagcatttgctaaaattacctggaaggaagttgacacgaaagggtgctttgatgaatgtgaaatatattacaacaaaccacagtttcctattagacaagaagtgacaggttaccgtaatccagctctgaagagagcagcagatctagcagatctcccagcgcagagctcaacctatgctaagggacagactgcctcctcaagtgggtccctgacccccgtgcctcctgacaaggagacacctcccagcagaggtcgacagacaccttatacaaaacagctccagctggcatctggcaggtccccctctgggacgaatcttccagaggaaggagcaggcagcaatctttgctattctgtagcctccactggcgatatgcagacaaacagagtctggggtggatccccagcaaactccagcagacctgcagaagagaagcctgacagtcaccaacatcaaagaccaaaggtagctaaagccacggaggtgaggaaaaaccagcgcaataaggctgaaaattccaaaaaccagaatgcctcttctcctccagaagatcacaactcctcaccaacaagggaacaaaacaggacagagaatgagtttgatgaattgacagaagtaggcttcagaaggtgggtgataacaaactccactgagctaaaggagcatgttctaacccaatgcaaggaagctaagaaccttgataaaaggttagaggaattgctacctagaattaccagtttagagaagaacataaatgacctgatggagctgaaaaacacagcacaagaacttcgtgaagcatacacaagtatccatagccgaatcaatcaagcggaagaaaggatatcagagtttgaagctcaacttaatcaaataaagcatgaagacaagattagagcaaaaaaacataaaaaggaacgaacaaagcctccaagaaatatgagactacatgaaaagaacaaacatatgtttgattgctgtacctga

SEQ ID NO: 17522 - DNA, 2175 bp, Homo sapiens; identical to SEQ ID NO: 15375
  SIMILAR (841)..(2172): 761254mologous to Homo sapiens putative p150,accession number U93563,Smith-Waterman Score=1631.

SEQ ID NO: 17523 - DNA, 507 bp, Homo sapiens
  SIMILAR (73)..(315): 441254mologous to Homo sapiens PRO2221,accession number AF116695,Smith-Waterman Score=144.
atggctgaaaaagaacagttccagtctgcaactcccagtgagatcaactcagaaggaaggatgtctctgaaagaaagacagcagccccagtcagaagcttatggatcaaactcctatctccctgggacagagcacctgggagaaggggtggctgatcacaactcattgccaccaagggaacaaaattggagagagaatgagtttgaagaattgacagaagtaggcttcagaaggtgggtaataagaaactcctctgagctaaaggagcaagttctaacccaatgcaaggaagctaagaaccttgaaaaaaggttagtctggcctattgaaccatcttttactgctgtgaccttcaaaaatgaaagctgtggttttgccctgagaagaagaaaaggagatttgaaatatgactcagattcttccctgcaaaaggctgggacccttgaaaactatctacgtggaaaagtgagagaacaaggggacacaagcaaagctgcccagaagtaa

SEQ ID NO: 17524 - DNA, 1603 bp, Homo sapiens; identical to SEQ ID NO: 15148
  SIMILAR (349)..(732): 561254mologous to Homo sapiens p40,accession number U93572,Smith-Waterman Score=334.

SEQ ID NO: 17525 - DNA, 348 bp, Homo sapiens
aggtctgtaagcttgcaggatttttcaggcaccaaggaaggtgggtgacagagatcagtacttcagcatataatcccaaagcctgccaggggcattagaggattcagaatcaagaggctccatctggggccatgaattccttccgcaggctccatagagccagagaactcccctggaacgaacttgtatctttataccaatcccacagcagaaggcctaggaaacagaaaggttcccatattggcagaattcaaaattaccttatgaaaaccttttgagaaggctgagaaggactctaggattgctacaaaccctatgcttaatccgccttctccatctccacgtaac

SEQ ID NO: 17526 - DNA, 828 bp, Homo sapiens
atggaagagaaaagcaaacgaagaggtgttttgtggagtcttctgatccttgccttgaagtttggagatgagatcagcagctccaagagggcagaaactgtgctcctgtttgctagccctgacctcatacctggtattcagtatgcaggaagaaggtttaggaggtgggagctgcaagctaaatttgccagagaactctggctgcagcacatagtccagggcagtatcagtacccctacatcctctggaggatctggcagaagaatcccacctgatggcaaggagacacagatatcaggtcatttccctctcaagcagagctctgttttcttaattaacagagagggtttttccctgccaaataatgcaggctttatgagaggtgctcagggtgatgatagagttaaacgcagtgatttatccatatcccaaggacacaggttgtcaacctctggtttagcatgctgcggcaagcctgaacagccccgaagtcatgggcgctacacagttgaagcctctcagaccgtgcaaaaagtgtcccaagatcttcagaaggagggcactgagaatggatggaggcaagacatagaaatctgggaaccctgcatgggctaccctgcagcaggactcacttttgaacaacaacagctcagggggaatggctatgctgcctctgtcattgtggtgaacacccacagggaggtaggcacccctgcatctgctagcactgttacagctgccacaccttggcacctccagtgcagtggactccaaatgtcgcagagccagataacaaagctggggcccaatacaagtcccccagagtaa

SEQ ID NO: 17527 - DNA, 966 bp, Homo sapiens; identical to SEQ ID NO: 16501
  SIMILAR (234)..(767): 731254mologous to Homo sapiens hepatocellular carcinoma- associated antigen 112,accession number AF258340,Smith-Waterman Score=565.

SEQ ID NO: 17528 - DNA, 394 bp, Homo sapiens
  SIMILAR (2)..(343): 461254mologous to Mus musculus MUS MUSCULUS GENOMIC DNA CONTAINING N ALLELE OF FV1 GENE,accession number A67510,Smith- Waterman Score=233.
ggagtttagtgaccctatacatcatacctttgaccatatgtggagaactaaggaacataatgaagctggttggttgctcctaagttcagtggataaagtgatgaaagaaaatgatgaactcggggattctatctcccagcttcagaagcagatactgagcctcaaatctgccaagattgccctgagtgagagtctaatctcctgtagagaaagaactgaaattgtggaaaaatagacataagctcttatcatgttagtggctgacctgcaatgaaaggtgcatgcacagcctcaccatgcacagcctcgccaagtatctactgttaaagtgagggcattgattgttttgcaggaagtcacggacccttgatggagggatcggccacagctgagg

SEQ ID NO: 17529 - DNA, 1884 bp, Homo sapiens; identical to SEQ ID NO: 3396
  SIMILAR (127)..(74): 521254mologous to Homo sapiens Human opsonin 35 kDa protein P35 fragment (VI) residues 39-95,accession number R94182,Smith- Waterman Score=46.

SEQ ID NO: 17530 - DNA, 1181 bp, Homo sapiens
  SIMILAR (589)..(879): 881254mologous to Homo sapiens ribosomal protein S7,accession number Z25749,Smith-Waterman Score=434.
aacctaaatcacagccacagcagcttcatcagggacaatacagatcatcaaatactgagcaaaatggagtaaaagataataatcatctgagacatcctcctcgaaatgataccaggcagccaagaaatgaaaaaccgcctcgttttcaaagagactcccaaaattcaaagtcagttttagaaggcagtggattacctagaaatagaggttctgaaagaccaagtacttcttcagtatctgaagtatgggctgaagacagaatcaaatgtgatagaccgtattctagatatgacagaactaaagatacttcatatcctttaggttctcagcatagtgatggtgcttttaaaaaaagagataactctatgcaaagcagatcaggaaaaggtccctcctttgcagaggcaaaagaaaatccacttcctcaaggatctgtagattataataatcaaaaacgtggaaaaagagaaagccaaacatctattcctgattatttttatgacaggaaatcacaaacaataaataatgaagctttcagtggtataaaaattgaaaaacattttaatgtaaatactgattatcagaatccagttcgaagtaatagtttcattggtgttccaaatggagaagtagaaatgccactgaaaggaagacgaataggacctattaagccagcaggacctgtcacagctgtaccctgtgatgataaaatattttacaatagtgggcccaaacgaagatctgggccaattaagccagaaaaaatactagaatcatctattcctatggagtatgcaaaaatgtggaaacctggagatgaatgttttgcactttattgggaagacaacaaggctgcgcaactgttgggaagggcgatcggtgcgggcctcttcgctattacgccagctggcgaaagggggatgtgctgcaaggcgattaagttgggtacgccagggttttcccagtcacgacgttgtaaaacgacggccagtgccaagcttgcatgcctgcagaccaagacatttggaggaggtggtggtggtgctagaagtaatctcaatatgaatgctgctggtaaccgaaatagggaagttttacagaaagaaaagtcaaccaaatcagagggaaaacatgaaggtgtctatagagaactgggtacagaatatcccaaaacagcttaa

SEQ ID NO: 17531 - DNA, 447 bp, Homo sapiens
  SIMILAR (1)..(420): 921254mologous to Homo sapiens putative p150,accession number U93569,Smith-Waterman Score=687.
ttttttttttttttgttgttgctgccattgttattttacatgcattgaacgaatggccgagatctttggcgtcttacttactgatgggtagaggtaaccttctccattcatggctatatacaaccctgttttcactccctggatggcaacaacacgtagtcccactggtatgaggttgaagagtgctgtgaagataaacattgtctatcatgaatgggcaggaagaagcagggcagagtgtaattttttctttctgatttattttatttaagaaacatcatctttgccaagactttcgagaaattccaattaaagaacttagattttgctttataaggtaagaagtttctgctattggtaaaatgagtacttcagcttcaacctttaaatgtgagcagtcttgctgacagcattctgaagggctgatgcgacaataaacagaaccaa

SEQ ID NO: 17532 - DNA, 2322 bp, Homo sapiens
  SIMILAR (1518)..(1889): 681254mologous to Mus musculus Pro-Pol-dUTPase polyprotein,accession number Y12713,Smith-Waterman Score=418.
gtcaccctcgtcgactgaaagtgaaacctgattctgaaattttagttatagaaaatggaacagctttcccatttcaggtggaagttttagatgaatcagacaacataacagcacaaccaaaattgattgttcattgtaagagttgtaaagatgtggcacctgtggagaagactattaagttgcttcccagtagccatgttgcaagactacaaatattcagtgtagaaggacaaaaggcaattcagatcaaacatcaggatgaggttaattggatagcgggtgatattatgcataatcttatttttcaaatgtatgatgaaggagaaagagaaatcaatataacatcagctttagcagaaaaaattaaagttaattggactcctgagattaacaaagaacacttgctacagggtctgcttcctgatgtgcaagtaccaacatctgtaaaagatatgcgctattgccaggtttcattccaagatgatcatgtgtctttggaaagtgcgtttacagtaaggcgtggcctgtttaagagcttgtcagcatctgtggccttcacccaaaggtctgaaattgattccaagtgggatgtcacggccacttctcttgatgtacaggatctaaaagcaacactgagaacagtggatgggcagctacatgctgaagtgtggctggaggatgtggcacctgggaagagaaagcacagggtgaccaaagtccttgaagagggaggggtgccggtgctgcaaaccagtgaaagcccaggtcaagggaagagcaggagaaaggatggcagtgccttgagttttgtgatgcgtctcccacagtggaaggcatgcatgagctatatttcaaggggttgggcgcagcctgcagttggagatgatgtcatttttagccatgtgagtttgctcagaaggaagggactgggggcagaggggaatggggagatggtgtttaatgggaacagactttcagtttgggaaggtgaaacagttctggaggtggttagtggtgatgattacataacaacgagggtggccgattccctgaagggaggaagtgggtcctgggtctggggcttttccactttggctgcacttgacaacgacttggggacttttagaaagatgcttcctgcccttgaacattggactccaagtccttcagttttgagactcggactggctctccttgctcctcaagcttgcagacagcctattgtgggaccttgtggatcgtgcaaggagtttagtgactctatatataatacctttgatcatgtgtggagaaccaaggaacataatgaagctggttgtttgctcctaagttcagtggacaaagtgatgaaagaaaatgatgaactcagggattctgtctcccagcttcagaagcagatactgaccctcaaatattctaagattgccctgagtgagagtcttatctcctgtaaagaaagagctgaaattgtggaaaaacagacacaagctcgtatcatgcaagtggctgacctgcaacaaggaaatgatcagacatttcagggactactggacactggctctgagctgacgttgattccaggggacccaaaacatcattgtggtcctccaggaccaaaagtaagggcttatggagatcaggtaattaacggagttttggctcaggtccaacttatagtgggtccagtgggcccctggactcatcctgtggtcatttccccagtgccagaatgcgtaattggcatagccatacttaacagctggcagaacccccacattggctccctgactggtagggtgagggctattatggtgggaatcagctggcaaggccagcaatatacctttactgtcctacctcaaagatatatcaactttccagctttgtgtcataaaacagcaaaaagacacacagctaggaggtaaccacagattgcactagaagccaggatccagacaagcccctgcagacccaggaactacaactgccacaacatgaggccaaacccagactctagaccagactctgtgttctcagagtccagaagacaaagggtccaggattgccctaacagacccaggatccaggcccatcccagtagacccaaataccaggccagttccccatgcactgaggatccagtaccatccctgaagacccatgctcaaggtcagacaccatggacccaggaccctttcagactcaggctcaagggccaccccaagagcaagccagcccccatggacccaggcttcaggctagctcctgtgaatacagattccaggcccaaccccacccaggtaacacgtccacccacctgct

SEQ ID NO: 17533 - DNA, 1140 bp, Homo sapiens
  SIMILAR (760)..(1116): 381254mologous to Mus musculus MUS MUSCULUS GENOMIC DNA CONTAINING N ALLELE OF FV1 GENE,accession number A67510,Smith- Waterman Score=194.
atgaagagaggagccacaagccaaggaatgcaggcagcctctagagctggaaaggcccaggataactgtaagagcctcttccaagatgatgatgatgacgtggagaaaaaaatcaaatggttgctactagacttctctagagctacaagtatgctttcccaggtttctgctgcagccactgtttcatttaaagcactgcaactctattcagattatggaacaaaacgagaagatggggaaataatttgtctagatacagttagacagccataccaatttaattttgcaataaaacggatatcttctgcaactgaaagacaagtggtgaggcaaagcatctgtttaacagtaaacagagctaggcagcaccgaagggaggcaccaggtgccaacagaccacctgtggatacgccgtctagggctccccaaacaattgctgggggtggtctccccatttgctgtgcagcggtacagctgccactagcttctgaacagtgtgtggaagcactcttcaacctcataccagtgggactacgtgttgttgccatccagggagtgaaaacagggttgtatatagccatgaatggagaaggttacctctacccatcaaccaagacatttggaggaggtggtggtggtgctagaagtaatctcaatatgaatgctgctggtaaccgaaatagggaagttttacagaaagaaaagtcaaccaaatcagagggaaaacatgaaggtgtctatagagaactgatttgggatttttggagttggctgcttaatatgattagatccaaaactgctatggactctacttctaatagtgtggagaacactgatagtccttcacatgaactttttagagagttatgcaaaataaatgcatttactgtttttgattcatcactcatgagaggcaaggagtttagtgactctatacataatacctttgaccatatgtggagaaccaaggaacataatgaagctggttggttgcttctaagtttggtggacaaagtgatgaaagaaaatgatgaactcaggcatcctatctcctggcttcagaagcagatactgagcctcaaatctgctaagattgccctgagtaagagtcttattgttactggagggtccttgtcttag

SEQ ID NO: 17534 - DNA, 477 bp, Homo sapiens; identical to SEQ ID NO: 15374
  SIMILAR (199)..(474): 551254mologous to Homo sapiens PRO2221,accession number AF116695,Smith-Waterman Score=234.

SEQ ID NO: 17535 - DNA, 1071 bp, Homo sapiens
  SIMILAR (217)..(879): 391254mologous to Homo sapiens p40,accession number U93570,Smith-Waterman Score=349.
atggatggagatctccacaagggagtggctgtgttctggccaccagatgctgctggaggccacacctgctgcaggagcatggtctgcaggagcctgctaggaggagcacagtggaaatttcatagttttaggtgtaggatccgttttgaattaattttacatatgatacaagaaaggaatagcatcaacatcagccaaaaggacgtccacacagaaactccatctgaaactcaccatcatcaaagaccaaaggtagataaatccatgaagatgaggagaaaccagtgcaaaaaggctgaaaattccaaaaaccagaaagcctcttctcctccaaaggaacacaactcctggagagcaagggaacaaaactggacagagaatgagtttgacaaattgacggaagtaggcttcagaaggtgggtaataacaaactcctctgagctaaaggagcatattctaacccaatgcaaggaagctaagaaccttgaaaaaacattagaggaattgctaactagaataaccagtttagagaagaacataaatgacctgatgaagctgaaaaacacagcacgagaacttcgtgaagcatacacaagtatcaatagccgaattgatcaagcgaaagaaaggatgtcagagattgtagatcaactgaatgaaagaaatgacagggagaatggaaccaagttggaaaacactctgcaggatattacccaggacaacttcccctacctagcaaggcaggtcaacattcaaattcaggaaacacagagaatgccacaaagatactactcgagaagagtaaccccaagacacataattgtcagattcgccaaagttgaaatgaaggaaaaaatgttaagggcagccagagagaaagacacatcagtgaaacagaaagttaacaaggatatccaggaattgaactcagctctgcaccaagtggacctaatagccatctacagaactctccaccccaaatcaacggaatatacattcttctcagcaccacatcacacttattccaaaactgaccacatagttcattcgatactctgcgactctggttaa

SEQ ID NO: 17536 - DNA, 717 bp, Homo sapiens; identical to SEQ ID NO: 15372
  SIMILAR (451)..(678): 631254mologous to Homo sapiens PRO2221,accession number AF116695,Smith-Waterman Score=233.

SEQ ID NO: 17537 - DNA, 2303 bp, Homo sapiens
  SIMILAR (961)..(1533): 931254mologous to Escherichia coli NADH DEHYDROGENASE I CHAIN G (EC 1.6.5.3) (NADH-UBIQUINONE OXIDOREDUCTASE CHAIN 7) (NUO7) (FRAGMENT),accession number D90859,Smith-Waterman Score=917.
tcatgctgtgtttttcatctctatcaggtcatttatgtttttctttaaactggttatactagttagcaattcctctaaacttttttcaacgttcttagtttccttgcattgggttagaacatgctcctttagctcagaggagtttgttattacccactttctgaagcctacttctgtcaattcatcaaactcattctctgtccagttttgttcccttgctggtgaggagttgtgatcctttggaggagaagaggcattctggtttttggaattttcagcttttctgcactggtttttccttatcttcatggatttatctacctttggtctttgctgttgttgacctttggatggggtttctgtgtggacatcctttttgttgatattgatgctattcctttctgtttgttttcctttgacttcaagaatgaagccgcggacactcgcggtgagtgttacagttcttaaaggcggcgtgtccggagtttgttccttctgatgttcggatgtgttcagagtttcttccttctggtgggtcggtggtctcgctggctcaggagtgaagccgcagaccttcacagtgagtgttacagctcttaaggcaggagcgtctggagttgtttgttcctcctggtgagctcgtggtctcgctggcttcaggagtgaagctgcagaccttcgcgggcgggaaagcgtggctgttacaaacgcattctgacttgggggagcagaagttaactactttcataccaatctctctctctttaaaagtgatcttttggtgtaattggcctgaagcgaaaaccgcagcctatgatggtgaacaggccacgtgtgagcctgtgctcaaagccatgtttttggctgacacccacttgcttagggaattcctaggtcactggctggacaaattacgaagggaatggcaggtggagagagccttccagacagctctgtggttgctgcagccggaagtcgtcttcatcctggaggatgtctttgatgaagggaagtggagcacctctgaggcctgggtggatgatgtggagcagtttcggaaaatgttcagacacccaagtcatgtgcagctgaaggtagttgctggaaaccatgacactggcttccactatgagacgaacacatacgaagtagaacgttggaggaacagaaacaaccccagtttcattatgggtagcatcacacccacagactatgccctctccaagtgccacctaccacctgaggacgtggtcttgatcatctactgtggagtgaaattaccagatagaatagtagactctaaagcaggactcctgaaactacctgtgttgaagaatgtgatttccacccaactccaattcccatctatcatggaccaacttttggtctacaacttgttcaatgagacgagtccattggtcatgtgcctggatgtcatggcaatgtcaaatcgaggaaaccaccatctggctgcaacacgcctaaggaaggtattggatcacaactccttgccagcaagggaacaaaactggacggagaatgagtttgatgaattgacagaagtagtcttcagaaggtgggtaataacaagctcctctgagctaaaggagtgtatgttctaacccaatggaaggaagctaagaaccttgaaaaaaggttagatgaattgctaactagaataactagtttacagaagaatataaatgacctgatagagctgaaaaacacagcacaagaacttcatgaagcatacacaagtatcaatagccaaattgatcaagtggaagaaaggatatcagagattgaagatcaacttaatgaaataaagtgtgaagacaagattagagaaaaaagaatgaaaaggaacaaacaaaccctccaagaaacatgggactatgtgaaaagaccaaacccatgttggattggtgtacctgaaagtgatggggagaatggaaccaagttagaaaacactcttcaggatattatccatggagaacttccccaatctagcaaggcaggccaatattcaaattcaggaaatacagagaacgccacagagatactcctcgagaagagcaactccaagacacataattgtcagattcaccaaggttgaaatgaaggaaaaaatgttaagggcagctggagaaaaagaagatgaaactgacaacaatgagttcttcttgtggagccagaaagggaagagggccggaaccctgaacgaccacgtggaggaaagctgtccaccaaccaaaaatgcctgccttggaacacccattcattgctatgtgggcaagaaataa

SEQ ID NO: 17538 - DNA, 282 bp, Homo sapiens; identical to SEQ ID NO: 17500
  SIMILAR (192)..(281): 901254mologous to Mus musculus Pro-Pol-dUTPase polyprotein,accession number Y12713,Smith-Waterman Score=147.

SEQ ID NO: 17539 - DNA, 903 bp, Homo sapiens
  SIMILAR (27)..(524): 781254mologous to Mus musculus Pro-Pol-dUTPase polyprotein,accession number Y12713,Smith-Waterman Score=680.
atgtatatcaaccctccggctttgcggctttgtgtcatcatcttattcacagagatcttgatcacttttcacttccacaagatatgacgctggtcaactgcattgatgacattatgctgattggatccagtgagcaagaagtagcaaactcactggacttactggagagacatctgcatgacagaggatgggaaataaatctgactcaaattcaggaactttctaccttagtaaaatttctaggggtccagtggtgtggggcttgtccagatattccttctaaggtgaaggataagttactgcatttggcccctcctacagccaagaaagagacacaacacctagtgggcctatttggattttggaggcaacacattcctcatttgggtgtgtttctttggcccatttatcaagtgacccaaaaggctgctagttttgagtggggtccagaacaggagaaggccctacaacaggtccaggatgctgtgcaagctgctctgccacttgggccatatgacccagcatatgggtccacccatgttatcgcccaatgggcccataagcaaagtggccatggtggcagggatggatgtgacatacgggctcagcaacatggacttccactcaccaaggctgacctggctgcagctactgctgagtgtccaatttgccaacagcagagaccaacagtgagccctcgatatggcaccatttctcagggtgatcagccagctacctggtggcagcttgattatactgaacctcttccaccatggaaagggcagaggtttgtcctcactagaatagacacttactccagatatgggtttgcctatcctgcaggcaatgcttctgccaaaaccatcaaccgtggattcatagaatgccttatccacagccctg

SEQ ID NO: 17540 - DNA, 349 bp, Homo sapiens
  SIMILAR (151)..(342): 891254mologous to Mus musculus Pro-Pol-dUTPase polyprotein,accession number Y12713,Smith-Waterman Score=294.
ggctatatcaactctccagctttatgtcataatcttattcagagagactttgatcacttttcgcttctacaagatatcgcgctgggccattacattgattatattgtgctcattggatccagtgagccagaagtagcaaacgcactggacttgttgcccatttatcaagtgacccgaaaggctgccaattttgagtggggtccagaacaggagaaggctctgcaacaggtccaggctgctgtgcaatctgctttgccacttgggccatatgacccgacagatccaatggtgcttgaggtgtcagtggcaaatagggatgctgtttggagcctttggcaggctctcatag

SEQ ID NO: 17541 - DNA, 492 bp, Homo sapiens
  SIMILAR (190)..(486): 681254mologous to Mus musculus Pro-Pol-dUTPase polyprotein,accession number Y12713,Smith-Waterman Score=347.
cccatttatcaagtgacccgaaaggctgccaattttgagtggggtccagaacaggagaaggctctgcaacaggtccaggctgctgtgcaatctgctttgccacttgggccatatgacccgacagatccaatggtgcttgaggtgtcagtggcaaatagggatgctgtttggagcctttggcaggctctcatagccagagttcacggattcagcaatcaagaggtggaagtggaagtggcaccactcgccatcacccctagtgatccactagcaaaatttttgcttcctgttcccgcaacattacattctgctggcctagagacctcagttccagagggaggaaagctgccaccaggagttgcaacaacgatcccattaaactggaagttaagattgccacctggacactttggggtccttctacctttaagtaaacaggcaaagaagggagctacagtgttggctgctgtgattgcctcagactatagatga

SEQ ID NO: 17542 - DNA, 352 bp, Homo sapiens; identical to SEQ ID NO: 4496
  SIMILAR (1)..(213): 851254mologous to Mus musculus Pro-Pol-dUTPase polyprotein,accession number Y12713,Smith-Waterman Score=322.

SEQ ID NO: 17543 - DNA, 505 bp, Homo sapiens
  SIMILAR (1)..(300): 841254mologous to Mus musculus Pro-Pol-dUTPase polyprotein,accession number Y12713,Smith-Waterman Score=447.
aagacagatggatcttggagaatgacagtggattatcataagcttaaccaagtggccactccagttgcagctgctgtaccagatgtggtttcattgcttgagcaaattaacacatctctggatacctggtatgcagccatagatttgggaaatgtctttttctccattcctgtccataaggtccaccagaagaaatttgccttcagctggcaaggccagcaatatacctttactgtcctacctcagggatatatcaactctccagctttgtgtcgtcattttgttcggagacatcttgatccttttcccttccacaagatatcacagtggtccattacattgatgacattatgctggttggatccactcatttatcgaatgaccagaaaggctgccatttttgagtggggtccagaacagaaggctctgcaacaagtccaggctgctgtgcaagctgctctgccacttgggccatacgacccagcagatccaatgagattgaggg

SEQ ID NO: 17544 - DNA, 1557 bp, Homo sapiens; identical to SEQ ID NO: 17391
  SIMILAR (1078)..(1848): 751254mologous to Mus musculus Pro-Pol-dUTPase polyprotein,accession number Y12713,Smith-Waterman Score=1064.

SEQ ID NO: 17545 - DNA, 838 bp, Homo sapiens; identical to SEQ ID NO: 4499
  SIMILAR (355)..(1059): 741254mologous to Mus musculus Pro-Pol-dUTPase polyprotein,accession number Y12713,Smith-Waterman Score=910.

SEQ ID NO: 17546 - DNA, 1569 bp, Homo sapiens; identical to SEQ ID NO: 5555
  SIMILAR (22)..(321): 681254mologous to Caenorhabditis elegans Similarity to Yeast MSP1 protein (TAT-binding homolog 4) (SW:MSP1_YEAST), contains similarity to Pfam domain: PF00004 (ATPases associated with various cellular ac,accession number Z69664,Smith-Waterman Score=359.

SEQ ID NO: 17547 - DNA, 981 bp, Homo sapiens; identical to SEQ ID NO: 15669
  SIMILAR (535)..(975): 411254mologous to Mus musculus Pro-Pol-dUTPase polyprotein,accession number Y12713,Smith-Waterman Score=234.

SEQ ID NO: 17548 - DNA, 1219 bp, Homo sapiens; identical to SEQ ID NO: 3629
  SIMILAR (29)..(472): 1001254mologous to Homo sapiens lysozyme precursor (EC 3.2.1.17),accession number J03801,Smith-Waterman Score=800.

SEQ ID NO: 17549 - DNA, 2658 bp, Homo sapiens
  SIMILAR (357)..(995): 311254mologous to Haemophilus influenzae Rd ribosomal protein S6 modification protein (rimK),accession number U32828,Smith- Waterman Score=295.
atggagaacactgatagtccttggcatgagctgtttagggagttatccaaaataaatgcatttgacacacttgattcattgctcatgagaggcaaggagtttagtgactctacacataatacctttgaccatatgtggagaaccaaggaacataataaagctggttggttgcccctaaattcagtggaaaaagtgatgaaagaaaattatgaactcaaggattctgtctcccagcttcagaagcagatattgaacctcaaatctgctaggattgccctgactgagaggcttatctcctgtagaaaaagaactgaaattgtggacaaacagacacaagctcttatcatgctagtggctgacctgcaacagaagatgcatgcacagcctcgccagggagacctctggccttttaccagggtaactgtgcattgggaaaagggaaatgatcagacactttggggactactggacactggctctgagctgacgttgattccaggggacccaaaatgtcactgtggtcctccagttaaagtaggagcttatagaggtcagaagacagatggatcttggagaatgacagtggattattgtaagcttaaccaagtggtgactccaattgcagctgttgtaccagatgtgatttcattgcttgagcaaattaacacatttcctggtacctggtatgcagccactggcttggcaagtgcctttttctccatctctatccataaggcccataagaagcaatttgacttcaactggcaaggccagcaatatacctttacagtcctacctcaggggcatatcaactttccagctttgcatcataatcttatttggaaagatcttgattgctttttgctttcacaagatatcacactggtccattacattgatgacattatgctgattggatctggtgagcaagaagtagcaaacacactggacttattggttgattatatcggacctcctctatcatggaaagggcagacgtttgaccttactggaatagacacttactctggatatgggtttgcctatcctgcacgcaacactttttccaagactaccatccatggactcaaagaatgccttatccaccatcatggtattccatccagcattgcctctgatcaaggcactcgctttttgcctaaagaagtgcaaaatgggctcgtgctcatggaattcactgctaggattcacaggtccaggaatcaaggggtggaagtggcaccacccaccatcacccctagtgatccactagcaaaatttttgcttcctgttcccacgacattatgttctgctggcctagcagtcttagttccagagggaggaatgctgccaccaggagatgcaacaatgattccattaaactggaagttaagattgccacctggacagtttgggctcctcctacatttaagtcaacaggctaagaagggagttacagtgttagttgggatgactgacccagactatcaagatgaaatcagtctactactccacaacagaagaaaggaagagtccccaaagtctcatgtcattatagctatcagctcaaagtccaggatctcatcaactaagtcagatcccggtacggatgagatttctcagggtgagttccaaagttcagctccttatatggattctcttactatagagacctatgaaaatagaaatccaggttctctgcttctcacacatcaatatactatggtgaaacagcacagacacactcacctagactctcagacatgggcacagtcacctcgcgttcatcacaatgaaaacatagtgaactttcccaggatgagccgtgtgactagattgggtgagtccaggacatacagaccaaaatccaggaatgattctgagctgtggactgcagggatcctacctgtacttcctgtcagagcagaaagtgaagcggatacaggttcacctgggtctacaaatgcatccagggagagatacagcaactggctgggagaaagtagctggtgtctttggacaagcaacagggaagatggagcagcagttgcagggacaggggatcccagtgggtctggcttgagatgggacaatgctatagcaagaaatctgtggtcccagagtctgacacctcagagagaagcagcagttaagaaagcttccaagtccaggtatcggagatcatcgattctcgtcgatgcttccagcctcaattgccgtccgcacttcgcatccattggctacgctgtcgatcatcgtacatgctccgcctccatcgaggacaatcactaccacttgctcgtctcacagtgtgctttctcgtcctccctgtcgactgtgcccgtcgggtcgatcgatcttatctccgcatcagcgtcgtcagcagcgcatgtccgccaggtcatggctatcgcttcgtcttgttacgctcagcatttcgtcattatcgtcccgcggtcttgccgtggagagcttgatctaagcccatgttcgtcgacctgtagtgatcaacatgctatcctttcctcattgcttatttttgtcaggcttcatcctggggatgaagctgacttgatcatagtggataagctttttgatgtgctgctggatttggtttgccagtattttattgaggatttttgcatcaatgttcattag

SEQ ID NO: 17550 - DNA, 945 bp, Homo sapiens; identical to SEQ ID NO: 3632
  SIMILAR (217)..(462): 501254mologous to Homo sapiens Human secreted protein, SEQ ID NO: 7211,accession number G03130,Smith-Waterman Score=151.

SEQ ID NO: 17551 - DNA, 868 bp, Homo sapiens
  SIMILAR (1)..(864): 561254mologous to Mus musculus Pro-Pol-dUTPase polyprotein,accession number Y12713,Smith-Waterman Score=815.
atggtgattcccaccacatcctcattcacctctcccaattggcctgtgcagaagacagatggatcttggagaatgacagtggattatcataagcttaaccaagtgatgactccagttgcagctgctgtaccagatgtggtttcattgcttgagcaaatgaacacatctcctggtacctggtatgcagccactgacttggcgaatgcctttttctccattcctgtccataaggcctaccagaagcaatttgccgtcagctggcaaggccagcaatataccttcactgtcctacctcaggagtatatcaactttccatctttgtgtcataatcttattcagagagaacttgaccactttttgcttctgcaagatatcacactggtctgttatatcaatggcattacactgattggatccagtgagcaagaagtagcaaacacactggacttattggtgagacatttgcttgccagagggtgggaaataaatctgactaaaattcagggaacttctacctcagtaaattttctaggggtccagtggtgtggggcctgtcgatatattccttccaaggtccccgcaggtgaatcacagtggaggcctctaggattttggagcaaggccctgccatcttctgcagataactactctccttttgagagacagctcttggcctgttattgggctttggtggaaactgaacgtctgactgtggctcatcaagtcaccatgagacctgaactgcctatcatgaattgggtgctttctgaaccatctagccataaagtgggttgtgcacatcagcactccatcatcaaatggaagtggtatatacatgatcagtctcaagcaggtcctgaaggcacaa

SEQ ID NO: 17552 - DNA, 423 bp, Homo sapiens
  SIMILAR (161)..(3): 571254mologous to Mus musculus Gag polyprotein,accession number Y12713,Smith-Waterman Score=149.
  misc_feature (1)...(423): n = a,t,c or g
tgtatgttccttccagcattatcccacacccttaatatccattcccgtgcctgttctccaaatttctgcttatataaattagaaaactcaattcaagtgtagctcacctccccatgggtcacactctgaacctcacttctgtgggcccatcgggactttagttataggtctagaagcaaacaaaggtgttgagggtgctagaggagaatcgatattatcttgcctggcaactgcctcaggggaggccatcactgttgcctcaggcagcacagggtttatctcctcagacaaaggtggaaaggctgatggcagcatgggtcggggagaggatgttgccactattgnggatgccattttcctttctctttcttctgcctattanacctccactcctatnnnnnnnnnnnggaaggaaattggtgg

SEQ ID NO: 17553 - DNA, 643 bp, Homo sapiens
  SIMILAR (1)..(564): 711254mologous to Mus musculus Pro-Pol-dUTPase polyprotein,accession number Y12713,Smith-Waterman Score=662.
atggtgggaaaggccaaatggaagccattagagctgcctttacctagaaaaatagtaaatcaaaaacaacaccacattcctgaagggattgcagagattgctgccaccatcaaggacttgaaagatgcaggggtggtgattcccaccacatccccattcaactctcccatttgtcctgtgcagaagacagatggatcttggagaatgacagtggattattgtaaacttaaccaagtggtgactccaattgcagctgctgtaccagatgtggtttcatttcttgaggaaattaacacatctcttggtacctggtatgcagccattgacttggcaaatgcctttttctccattcctgtccataaggtccatcagaagccatttgccttcagctggcaaggccacaatatacctttactgtactacctcaggactatatcaactctctggctttgtgacataatcttatttggagggaccttgactacttttttgcttctgcaagatatcacactagtccattacattgatgacattatgctgattggatccaatgaccataaagtgggtggtgcacagcagcattccatcatcaaatggaagttgtatatacatgatcaggctcaaacaggtcctgaaggcacaa

SEQ ID NO: 17554 - DNA, 388 bp, Homo sapiens
  SIMILAR (88)..(32): 311254mologous to Homo sapiens Secreted protein encoded by gene 1 clone HTXBK30,accession number Y01135,Smith-Waterman Score= 40.
aggccctttcaatctacttccgttgaaagcactcagcatgccaaggtgccatagtttggggtatcatgttctgaccccagcaacggctcagactactgcacaggaaacaggtacagagagggaagtggattgcaggggtttcagttggaaagacgtgacagtggttaaggagaggaaaaggggggcctggactcttccctgaaagggctgtgaattgggtgtagctcaatgtcacttacagaaagagccctcatggtagcattctgtgtgacgtcaagccccgcatcctgtagaccagtgagtgggtccacaggaagtccctgaggtgttctgagagcaatacatttacaaaaccttggggcaaagccagaaggacagtcgggggcta

SEQ ID NO: 17555 - DNA, 410 bp, Homo sapiens
  SIMILAR (270)..(410): 721254mologous to Mus musculus Pro-Pol-dUTPase polyprotein,accession number Y12713,Smith-Waterman Score=171.
acctaaagtcccggcaggcccctagatgtgaggttgagagtgtgactcacgaggaggtgtactacactcgaaaagaactgtttgagttctctaatttatatagaaagaaatctggagaacagatacgggaatggatattaaggaagacagatggatcttggagaataacagtggattatcgtaagcttaaccaaatggtgactccaattgcagctgctgtaccagatgtggggtttcattgcttgagcaaattaacacatctcctggtacctggtttgtgtcataatcttatttggagagaccttgattgctttttgcttccgcaaaatatcacactggtccattacactgatgacattatgcagattggatccagtgagcaagaagtagcaaacacactggacttattg

SEQ ID NO: 17556 - DNA, 526 bp, Homo sapiens
  SIMILAR (188)..(391): 791254mologous to Mus musculus Pro-Pol-dUTPase polyprotein,accession number Y12713,Smith-Waterman Score=281.
accacgtggtagaaataggaggagaaagacattccaagagagaagaatgacactgaatgaaagcccagagaaaataggcaaatggattgaatgctatgggcacccacctgcctctaagctggtggaaatttatattcatacagtctttgtggaagacaaattgtcaatatgtatcagaagctttaacaagaaggcagatggatcttggagaatgacagtggattattgtaagcttaaccaagtggtgactgcaattgcagctgctataccagatgtggtttcattgcttgagcaaattaatacatctcctgatacctggtatgcagccattgacttggcaaatgcccttttctccattcctgtccataaggggtatatcaactctctggctttgtgtcataatgttatttggagagaacttgattgcttttcacttccacgagataccacactggtccattacattgatgacattatgctgattggatccagtgtgcaagaagtagaaaacaaactggacttactg

SEQ ID NO: 17557 - DNA, 433 bp, Homo sapiens
  SIMILAR (246)..(269): 621254mologous to Mus musculus Pro-Pol-dUTPase polyprotein,accession number Y12713,Smith-Waterman Score=37.
gacacctctagcttctaccagggcaactgtggattggggaaatggaaatgatcagacatttcagggactactggacactggctctgagctgacattgactccaggggacacaaaatgtcattgtcgttctccagttaaagtaggggcttatggaggtcagtggggtccagaacaagagaaggttctgcaacaggtccaggctgctgtgcaagctgttcttacacttgggccatatgacccatcagatccaatggtgcttgaggtgtcggtggcagatagggatgccgtttggagcctttggcaggcccctgtaggtgaaacacagtggcagcctctaggatttggacctgcactgatagcttcttggggagttcactataatcaatcgatagaggaagagaagacaagggcctggttaataaactccccttag

SEQ ID NO: 17558 - DNA, 1506 bp, Homo sapiens; identical to SEQ ID NO: 6114
  SIMILAR (1125)..(1244): 701254mologous to Mus musculus Pro-Pol-dUTPase polyprotein,accession number Y12713,Smith-Waterman Score=147.

SEQ ID NO: 17559 - DNA, 756 bp, Homo sapiens
  SIMILAR (325)..(753): 791254mologous to Mus musculus Pro-Pol-dUTPase polyprotein,accession number Y12713,Smith-Waterman Score=600.
atgaagtcgggctcggagctgggaggctggtccctgggacgctggacccacgatggaattgacatcaacaacaactttcctgatttaaacacgctgctctgggaggcagaggatcgacagaatgtccccaggaaagttcccaatcactatattgcaatccctgagtggtttctgtcggaaaatgccacgatttgtgagggcagcaactgcatctttgaagctccctggattcatcctgtggtcacttccccagtgccagaatgcataattggcatagacatacttagaagctggcagaacccccacattggctccctggctggtaggaagacagatggatcttggggaatgacagtggattatcataagcttaaccaagtggtgactccaattgcagctgctgtaccagatgtggtttcattccttgagcaaattaacacatctcctggcaactggtatgcagccattgacttggcaaatgcctttttctccattcctgtccataaggcccaccagaagcaatttgtcttcagctggcaaggccagcaatatacctttactgtcctacatcaggggtatattaactctccggctttgtatcataatcttatttggagagatcttgatcgcttttcacttccacaagatatcacattgatccattacattgatgacatgacactgattggatccagtgagcaagacgtagcaaacacactggacttattggtgagacatttgcttgccagaggatag

SEQ ID NO: 17560 - DNA, 745 bp, Homo sapiens
  SIMILAR (745)..(263): 991254mologous to Leishmania major probable levansucrase precursor,accession number AL160371,Smith-Waterman Score=844.
agtgggtccctggactcatgcagttgtcatttccccagtgccggaatgcataatgggcacagacatacttagcagctggcagaacctccacattggctccctgactgaaagggtgctggttttgagtggggtccagaacagaagaaggctctgcaataggtccaggctgctgtgcaagctgctctgccacttgggccatatgacccagcagatccaatggtgcttgtggtgtcagtggcagataaggatgctgtttggatctttcatctttcaggatcggatcgttggcgtcgaacttatcgctgtctttaaagacacggcccgcgtttttccagctgtcgattgagttgtcgccgaccttttgataaaacatgtagattgatgtgtcatcagcgtctttcgggcttcccgcaagagcaaacacaacgtgatagccgttgtattcagctactgttccgtcagcgttttgcagcggccagctgtcccacacatcaagtccttttgcagactcaatatttttaatcgttgattgatcgaattgaggcacttggtatttttcgttttgctgctgtttagggatctgcagcatatcatggcgtgtaatatgagagacgccgtacgtttctttgtatgctttttggttattttctttcgcgaaggcttgagtcgctcctcctgccagaagtgcagtcgtaaaagtcagaactgtggcttgttttacaatttttttgatgttcatgttcat

SEQ ID NO: 17561 - DNA, 1322 bp, Homo sapiens
  SIMILAR (67)..(705): 991254mologous to Escherichia coli K12 diaminopimelate epimerase,accession number AE000457,Smith-Waterman Score=1097.
atggatggagttggaagccattatcctcagcaaactaatgcaggaacagtaaaccaaacaccacatattctcacttgcaagtgggagttgatcaatgagagcacggacacatggcaagcacttgaaaaccaccccaattgttccaccaatgatgagactggtatgggaaatatgtggcacatatacaccttggaatactatccgcccatacaaaatgatgactacagctcctttgtacggacatcgatgaagctcgcaaccattattctcagtaaagtatcgcaagtacaaaaacccagacaccgcatgttctcactcatagaagacagatggatcctggagaaagtggattatcgtaagcttaaccaagtggtgactccaattgcagctgctgtaccagatgtggtttcattgcttgagcatattaatatatcccctggtatctggcccaccagaagcaatttgccttcagctagcaaggccagcaatttaccttactgtcctactcacgggtatatcaactctctggctttgtgtcataatcttattcgaagagaccttgatcacttttcccttccacaagatatcacactggtccattacattgatgacattgtgctgactggatccagtgagcaagaagtagcgggatcctctagagtcgacctgcaggcatacaaaggtgtaaatacgtatggcagtggggctcggcgagtggagtatgccactactggggatggggaagctgtctcttctggcaaaaaaagttcatcagagtttacaaactcagtatccccagcttcatcagggtcctcccacacatccccattccaagttgcagggtcccattcttttccaatcagtgccctcactttaacagtagacacctggtgaggctgtgcatgcacctttccttgcaggtcagccacttgcatgataagagcttgtgtctgtttttccacaatttcagctctttttctacaggagataagggtctcactcaggtcaatcttagcagatttgaggctcagtatctgcttctgaagccaggagatagaatccctaagttcatcattttctttcatcactttgtctacagaatttaggagcaaccaaccagcttcactatgttccttggttctccacatatgcgcaaaggcattatgtatagagtcactaaactcctcgcctctcatgtgcaatgaatcagaagtgtcaaatgcatttattttgcataactctctaaacagttcatgccaaggattatccgtgttctccatactattagaagtagagtccttagcattttggggtctaatcat

SEQ ID NO: 17562 - DNA, 1364 bp, Homo sapiens
  SIMILAR (675)..(1091): 741254mologous to Mus musculus Pro-Pol-dUTPase polyprotein,accession number Y12713,Smith-Waterman Score=539.
tttgtggtgataactgtgtgtttgaaagctggattggagacatcatattggacatggacaatgagtttagtgactctatacataatacctttggccatatgtggagaaccaaggaacataatgaagctggttggttgctcctaagttcagtggacaaagtaatgaaagaaaatgatgaactcagggattctatctcctggcttcagaagcagatactgagtctcaaatctgctaagattgccctgagtgagagtcttatctcctgcagggaaagagctgaaattgtggaaaaacagacacaagctgttatcatgcgaatggctgacccgcaaggaaaggtgcatgcgcagcctcaacaggtgtctactgttaaagggaggacattgattggaaaagaatgggaccccgcaacttggaatggggacgtgtgggaggaccctgatgaagctggggacactgagtttgtaaactctgatgaaccttttttgccagaagtaacagcttccccatccccaagagacctctggccttttaccagggtaactttgcactggggaaagggaaatgatcagacattttggggactactggacactggctctgagctggtgatgattccaggggacccaaaatgtcattgtggtcctccagttaaagtaggagcttatagaggtcagaagacagatggatcttggagaatgacagtggattattgtaagcttaaccaagtggtgactccaattgcagctgttgtaccagatgtgatttcattgcttgagcaaattaacacatttcctggtacctggtatgcagccactggcttggcaagtgcctttttctccatctctatccataaggcccataagaagcaatttgacttcaactggcaaggccagcaatatacctttacagtcctacctcaggggcatatcaactttccagctttgcatcataatcttatttggaaagatcttgattgctttttgctttcacaagatatcacactggtccattacattgatgacattatgctgattggatctggtgagcaagaagtagcaaacacactggacttattggttgattatatcggacctcctctatcatggaaagggcagacgtttgaccttactggaatagacacttactctggatatgggtttgcctatcctgcacgcaacactttttccaagactaccatccatggactcaaagaatgccttatccaccatcatggtattccatccagcattgcctctgatcaaggcactcgctttttgcctaaagaagtgcaaaatgggctcgtgctcatggaattcactggtcttaccatgttccccattatcctgaagcagctggattga

SEQ ID NO: 17563 - DNA, 1206 bp, Homo sapiens
  SIMILAR (622)..(1059): 781254mologous to Mus musculus Pro-Pol-dUTPase polyprotein,accession number Y12713,Smith-Waterman Score=573.
atgggggatccttctagacgtcgaacatgcagggctatgcaagccaagtatccattggtttttaaagggtgtggtgtatgttggggttctctagatccaagatgcagggttgcaagccaagtatggccaataccaaaacgcctctcccgcggttggccgtttcataatgcagttggcagacaggtttccgactggaaaagcgggcaggattttgccgatttcggaaccacccatcaaacaggattttcgcctgctggggcaaaccagcgtggaccgcttgctgcaactctctcagggccaggcggtgaagggcaatcagctgttgcccgtctcactggtgaaaagaaaaaccaccctggcgcccaatacgcaaaccgcctctccccgcgcgttggccgattcattaatgcagctggcacgacaggtttcccgactggaaagcgggcagtgagcgcaacgcaattaatgatactttgccttttaccagggtatctgtgcaatggaaaaagaaaattatcagccattcagggactattggacaatggctctgagctgagtttattcccagagaacccaaaacgtcattgtggtctcccagttaaagtaggggcttatggaggtcagaagacagacagatcttggagaaagacagtggattattgtaagcttaaccaagtggtggctccaattgtcgctgctgtaccagatgtggtttcattgcttgagcaaattaacacatctcctggtacctggtatgcagccattgacttgacaaatgcctttttctccattcctgtccataaggcccatcagaagcaatttgccttcagctggcaaggccagcaatatacttttactgtcctacctcaggggtatatcagctctctggctttgtgtcataatcttattcgaagagaccttgatggctttttgcttctgcaaaatatcacactgctggtccattatgttgatgacattatgctgattggatccagtgagcaagaagtagcaaatgcactggacttattggtgttttctgaccatctagccataaagtgggtcatgcacagcagcattgcatcatcaagtggaagtggtatatgcgtgatcaggctcaagaaggtcctgaaggcacaacctgcaccaatggcctcatggggggttctctatgatcagttgacagaagaagagaagattagggcctag

SEQ ID NO: 17564 - DNA, 1374 bp, Homo sapiens; identical to SEQ ID NO: 3631
  SIMILAR (2274)..(1162): 1001254mologous to Homo sapiens N- acetylgalactosaminyltransferase; similar to Q10473 (PID:g1709559),accession number AC006017,Smith-Waterman Score=2012.

SEQ ID NO: 17565 - DNA, 1765 bp, Homo sapiens
  SIMILAR (274)..(651): 761254mologous to Mus musculus Pro-Pol-dUTPase polyprotein,accession number Y12713,Smith-Waterman Score=511.
atggcttcccctgaggcagttgccagtcaagataatgatggtttttctcagaagccacccccaacacctctgtttgcctctagatctgtaaatagactgaagtcccagcggacccctagaggtgaggttgaaagtgtgaccgatggggagaagacagatggatcttggagaatgacagtggattactgtaagcttaaccaagtggtgactccaattgcagctgctgtaccagatgtagtttcattgcttgagcaaattaacagtctcctggggtacatcaactctccaggtttgtgtcataatcttattcagagagaccttgatcgcttttggtttccacaagatatcacactcgtgccttacattgatgacattatgctgattcgatccagtgagcaagaagtagcaaacatactggacttattggtgagacatttgcatgccagaagatgggaaataaatccaactaaaattcaggaaccctctacctcagtaaaatttccaggggtcccttggtgtgggacctgtcaagatattccttctaaggtgaaggataagttgctgcatttggcccctcctaccatcaagaaagaggcacaatgcctagtcagcctatttggattttggaggaaacacattcttcatttgggtgaatcacaggagacacctctaggattttggagcaaggccctgccatcttctgcagatacctactctctttttgagagacagcttttggcctcttactgggctttggtggaaactgaatgtttgactatggatcatcaagtcaccatgagacctgaactgcctgtcatgaactgggtgctttctgacccatctagccataaagtgggtcatgcacagcagcattttgtcatcagatggaagtggtatatatatgatcaggctcaagcagccacccttgtaatcgcaaaatgggcccatgaacaaagtggccacggtggcagggatggaggctacacaaggactcagcaatatggacttctactcaccaaggctgacctggctacagcgggcaaagttttccagaaggctgtgtaagctctgaattagcattcaatatatggtactctttctctcatagccaggattcacaggtccaggaatcaaggagtggaagtggaagtggcaccactcaccatcagccccagtgatccaccagcaaaatttttgcttcctgttcccccgacattacgttctgctggcctagagttcttagttccagaggaaggaatgctgccatcaggagacacaacagttccattaaactggaagttaagattgccacctggacactttgggctcctcttccctttacatcaacaggctaataagggaaggcttagcccccattctcgggaaaggggtacttctgtctttgcctcctccaattcccaacctgtcacagctctgaacaatgagccagcaggccctaataagagagatattggcaaagccaagggattgaaattccaccaccctgggccccacaggcaggagagagacatgctggagcaatgctatgaccttggggctatccagtgggaaagcaatggaaccatcttatcaagaagcaaggaaggcattgaaattggacctgctttccatcaggcacacagaaacatcactctccatcagttaggccggagacagaaggagctgaccagaggccacggcattcctgggctagacgggaacccactaactggaattgcctggtctcccatgcaaaccttgtccc

SEQ ID NO: 17566 - DNA, 522 bp, Homo sapiens
  SIMILAR (96)..(227): 451254mologous to Homo sapiens BA46,accession number U58516,Smith-Waterman Score=101.
tcaagctgtcagcttcatcacactgtttccaggtaaagagaaggagcccttgtttcctgggtaaagagaaggagcgttgtttgctgacccctggtccacagcctgccgtggtcgcctcgctgtgctggcctttgtgttgctgtcccctccttccctcctttttggcattgtgctcccttcaagtggccccctgtcattcaggtggaatgtggaacgagattgcccagctgtggatttgaacatcattaaagtcaacaaagggttaaaagttacttcctctgatggatttaaaattgccgcatacacgcaaacaagtttttcaaactgccccattttatgtttattataagaaatgtacctgctgaatgggctagaatttgctgatgactggtcagtgcattttcccagcagggcagtcttcagttcttttgatacaactttgagagcttccttactttctggtacaacaagatgtttcaggttcatcttgtgcgtttcctgccccagacctgaatagggcat

SEQ ID NO: 17567 - DNA, 368 bp, Homo sapiens
  SIMILAR (257)..(355): 451254mologous to Homo sapiens Secreted protein encoded by gene 125 clone HPWAZ95,accession number W88658,Smith-Waterman Score =59.
gcggccgcctactactactatacggctgcgagaagacgacagaagggagagatacaggcctcgcgggactcaccagtggtgactaaaaagcccttgggccttgaataaacatcagtggcagccaagcggtagctgccctgagcctagagtgataatggccatagggagagacttctgcttgaggaaaggagaaggaaaagtaaagaggactttgtcttgcaacctggtaaaataagcaccaagaagattccttaaagcctcccatcccaggccctagctcttggacggcatttctaaacccaccttgggccagaaggggacctgctgcactgaaaaaaaaaaaaaaaaaaaaaaaaagggtcgtatcg

SEQ ID NO: 17568 - DNA, 1582 bp, Homo sapiens
  SIMILAR (1348)..(1707): 581254mologous to Homo sapiens Neuroblastoma,accession number D89016,Smith-Waterman Score=380.
atgggcaaagacttcatgactaaaacacaaaaagcaattgcaacaaaagccaaaattgacaaacgggatctaattaaactaaagagcttctgcacagcaaaagaaatgattatcagagccacaaaagaagtaatagaacgggaagcaccagggatggccctggcaatgctgatgggatcacttaatgttacacctctgggcatgctctctagacaaacagagagccaaatcatgagtgaactcccattcacaaatgcttcaaagagaataaaatacctaggaatccaacttacaagggatgtggaggacctcttcaaggagaactacaaattactgctcaacaaaataaaagaggatacaaacaaatggaagaacattccatgctcatggataggaagaatcaatatcgtgaaaatggccatactgcccaaggttgttgtagctcctattgtttgtgatatatttatctattcgccttcatactggagttatgattgtgtgtccagagttggttccttccggtgggttcgtggtctcgctgacttcaagaatgaagccgcggacctttgcagtatatttgttccttcagacacttgtgatgcttcccatgggttaaggcagggacaggtctactgccagggcatgcaaaatgatggaaagctggctgttcaccttgatctcactttttccaatgttaaaacagaatgctttcaattcatactgccagctctacctcatgccattgaccttttacgtgatgccattgtaaaagtaaaggaggtgcatgatgaacttgaagatttgccttccccacctccccctctttcccctcctcctactaccagcccccataaacagacagaagacaaaggagttcaatgtgaggaagaggaagaagagaagaaagacagtggtgttgcttcaacagaagatagttcctcatcacatataactgcagcagccattgctgccaagaagcatccattctacaccagtcctgctgttgtcatggcacacggtgaacagcccatccctggtctcatcaattattcccatcattcaacagatgaacgggctcagggcagctaccgcttggctgccactgatgtttattcaaggcccaagggctttttagtcaccactgcagttacatctccttcagaggcctatctaagggtccccaacaaaagggaccatcggccaagcctccagttgcatgaccgtttggaggttgatggcctgaaggtgacaagagagaaaccaggttattagaaaacttgtatcaaaatgaaacaaggggcaggtgaggacagctcaaaaatctcgtgtcctttgaccagtctgtacagggagaagggggaccaaaagcttgaccggtaagaaaaacttttacccttttgctagcatttcagacttctgggttcctgtcccctgagctcaatcctaagccaatcagtttaaggtttgggaaattaactcttctcagtttggaagatgtatccaaagggagtgtcccatagtatggagacacagttacctatctgtgaagagaggacagggaaggaaaaaggaaaaaaaaaaa

SEQ ID NO: 17569 - DNA, 397 bp, Homo sapiens
  SIMILAR (976)..(1959): 931254mologous to Homo sapiens dJ908M14.2 (novel protein),accession number AL121832,Smith-Waterman Score=1570.
  misc_feature (1)...(397): n = a,t,c or g
cgatcacctgaggtcgggagtttgagaccagcctgatcaacatggagaaacctcgtctctactaaaaacacgaaaaaattagctgggcgtnngtggcgcatgctcattcacgtacatgggagagtctacaaagtcacacgtattcataggttaagccacatgctgacaaatgtcataagaagaccctacacttttaccttggccgatccctcccctcagtgcaagctctgtgcaagagtgaacttgaactytcactcagtgcaagagtgaacacacactttgtgccggctttaaagaacccagcacaaagccagtctgcatggcctacagacatattttggctgggacaatgattacttgcttttctttttgtttttcttgtatttgcctctaagct

SEQ ID NO: 17570 - DNA, 1979 bp, Homo sapiens
  SIMILAR (1572)..(1796): 861254mologous to Homo sapiens Human Ksr-1 (kinase suppressor of Ras),accession number W19919,Smith-Waterman Score=324.
ttttaagctcatcacgtgttgttagcattagtgtattttatgtgtggctcaggagcattcttcttccaatgtgggcctgagaagtcaaaagactggacacctgtgcactcaatcaaaaggctattccttctggaagcaattgtaaagaatttctcacattatcttgacatgaaaaccaatggatagtgggacagaatgcaaaatcttcaagaatttttgttgttgttgttgtttttgagtcaaggtcttgctctgtggcccaggctggagtacactggggagatcagagctcagggcaggatcaagggctcctcccgcctcagccacagtagtagctgggactacagatgcccacaaccacccctggctaatattttattttttgtaaaaatggggtctcactatattgcccaggttggtctcaaactccttgactcaagggatccaggaaaggataacaggcgggttcctggcaagtcatttctccctcaggccttcggtttcctcacctacaagatgagagggctgcaccagatggaaattcagggggtaaggggatgtcctcgcgcagcccacccccacccccacgggaccctggagcctccatcccagttcccaccacgcacctgctccacaaatcctgcccaaggacgccagtagagccggcagccgagtctgctgctcccgccctcagagccgcggcggcggggacaaaaatcctcggcggcgggggcaaaaagtcgcggtggcaaaaagcggcggcgacgggggcaaaaagtcgcggcagcaaaaagccgcggcggcggggacaaaaagccgcggcggcgtgggggcagaaagccacggcgggcaaaaagccgcggcggcaaaaagccatggcggcgagggtgcaaaaagctgtgtcggcggtggggcaaaaagcctggtcgggaaaaaagccgcggcagcggcgaagggcaaaaagccgcggcggcggagggcgaaaagtcgcggcggcgggaggaaaaaagccgcggaggtcaaaaagccgaggcagggggggaaaaagccatggcagcgaaaaagccgcggcggcggggggggcaaaaagcggcggggggcaaaaagcggcagggggcaaacagccgctgcaccagttgggggaaaaagccgcggcgggcaaaaagccacggcggcaaaattcgcagaggcgaaggtcaaaaagccgcggtggtcaaaaagccttggcgcttggggggcaaaaagccgcggcgggcaaaaagcggaggcgcggccatgcagactggctttgtgctgggttctttaaagccagagaaaagtgtgtgttcactcttgcactgaatgaagttcaagttcattcttgcacagaggttgcactgaggggagggatcggccaaggtttttcccgccgtggcttcttgccctgccgccccggcattttgccgtcatggcttttggccgaggccaccgcggctttttacgcctttccgcccccgccgccgcggcttttttccccctccgccacaggtttttccagccgcggcttcttgcccccactctgcagccagcatagagctgcgctgcgctcggccccgatgggagagaagaaggagagcggtggagggggtgacgcggctatcgcggagggaggcgcaggggccgcagccagccgggtgctgcagcagtgcgggcagcttcagaagctcatcggcatctctcttggcagcctgcgcgggctgcgcaccaagtgcactgtgtccaaggacctcacccagcaggagatacggaccgtgcaggaagaagcaaatgggtttgctttcctagctctgtccagtaccttagggaccctgagaactggagagattcttggagagccatctggtgtatgtcatgggtgggccttgtttgaaggtcagtctgcccagtgggctggctcagcccgaatgaactgtcttgaatctttggagatgtctgggtag

SEQ ID NO: 17571 - DNA, 415 bp, Homo sapiens
  SIMILAR (254)..(358): 571254mologous to Sus scrofa acrosin precursor (EC 3.4.21.10),accession number J04950,Smith-Waterman Score=117.
tttccggggggagccgcaacccggaaatgaatgagttgtcagggcttggtatcctggatggggtcaggggtcggagaaggagtggcagtgggatcagcaggaagctctcggtagggtccgggggtcgaaggtcacaggtgagtgggaggggcgggccggacctgaggggaccgggcagaacggagaggggcctagggggatactagaggtgggtgggaccacagcgccattttgtctagcagagggggagtgggggcctggaggccatcctcaccatcttctgtttcctccgtcgccgcctcggccgccgcctcagcctccaccgacgccaccagagccgccttcttagccgccgcctcacagtaacttccagcctcggcacagcacgaaatcgtcgcgccggtacttagtgccg

SEQ ID NO: 17572 - DNA, 975 bp, Homo sapiens
  SIMILAR (615)..(911): 351254mologous to Human herpesvirus 4 RPMS1 protein,accession number AJ251097,Smith-Waterman Score=89.
atggccacgctctggctgacagaggatgaggcaagctctacaggtggcagggaacctgtcggcccttgccggcacctgccagtctccactgtgtctgacttggagttgctgaagggactccgagcacttggtgagaatcctcaccccatcacacccttcaccaggcagttgtaccaccagcagctggaagaagcccagattgctcctggcccagagttttcagggcacagcctagaactggctgcagccctgcggacgggctgtattccagatgtccaggcagatgaagacgcgctggcccagcagtttgagcagccagatcctgccaggaggtggcgggagggggtcgtgaagtctagcttcacctatctgctgctggaccccaggtggtgcctagtggggtatgttggtgtgacagggaccaccaaagatggcatagattccatcgtggccagtgagatggaaggtgatggaccctaccaggattggcatgaagttaacccacctatgcctgccagtgttgacataggcaccttttctgttttctatagccctgaaggcagcagtgtggataagcccaccccacaggaagtggctttccagctccgaagctatgtccagcgtctccaggagcgccgttctctaatgaagattctctcagagcctggccccaccttggcacccatgcccactgtgccccgtgcagaagccatggtgcaggccattctggggacccaggctggcccagctcttccccgactggagaagacacaaattcagcaggacctggtgccgcaagggtacaaatgggctgtggccactgtgtcagtctggtaccgagatgagttgtatcatcaggctggaaacgctgccaagaagagagaccaggagcaagtggagctggaaggcgagagctccgcacctccccgcaaggtggcgcggaccgacagcccagacatgcacgaggacacttaa

SEQ ID NO: 17573 - DNA, 492 bp, Homo sapiens
  SIMILAR (83)..(268): 361254mologous to rat cytomegalovirus Maastricht pr4.1,accession number AF232689,Smith-Waterman Score=80.
atggcagattttttgaaaggactgcctgtctacaataaaagcaattttagtcgatttcacggggactccgtgtgcaaagcctcgaaccaacggccctcagtctacctgcccacccgagagtacccgtctgaacagatcatcgtgaccgaaaagacaaacatcctcctgcgctacctgcatcagcaatggacaaaaagaacgctgccaagaaggaagaccaggagcaagcagaggaagctcacctatggctactgccactacaggtccacagggagtaatgcccggctaccactgatgttcattaagacccaagggttcttcagtcggcttgtggtagatgctgcctggcctgggactcacccttcaggacagtgggctcccttctggcccaaggcaggtccagaattactgtccaggagccaaggctttgaatcagggacctcaagagcccgcttgatgttctaccccactatggctgcgcctgtacctaag

SEQ ID NO: 17574 - DNA, 755 bp, Homo sapiens
  SIMILAR (645)..(713): 651254mologous to Hydra sp. mini-collagen,accession number X61045,Smith-Waterman Score=104.
  misc_feature (1)...(755): n = a,t,c or g
aggaatcggggaaactggccccgatgnaaggcgaanggtccggcagggacaatgttgctttttttaaaaagcatctaccaacatcacactaactgggtctgatgtgccctgtagccaaggcttgatagcaggtgtagaggatgaaataagagctcaaggaaaataaatacatcggctcctatgaggttggaaagtggtgtggaacgcaagggtgtggatgggccggcagggaggcgggcgggcggggtgcttaacacatggcgggcaaggcgggtgggcgaaccgaaggaagcaagacctgggcaggaggcgcctgtggagttgagagtcttaagtgtcctcgtgcatgtctgggctgtcggtccgcgccaccttgcggggaggtgcggagctctgcgccttccaagctccacttgctcctgggtctctcttcttgggcagcgttctttttgtcccattgctgatgcaggtagcgcaggaggatgtttgtcttttctgtcacgatgatctgttcagacgggtactccgcgggtaggacaggtagactgagggccgtcggttcgaggctttgcacacggaagtccgcgtgaaatcgactaaaattgcttttgttgtagacaggcagtcctttcaaaaaatctgccatcttctgtttccgtccgtcgccgcctcggccgccgcctcagcctccaccgccgccaccagagccgccttcttctcgtgccgaattcctgcagccggaggcgaggtcaatt

SEQ ID NO: 17575 - DNA, 1263 bp, Homo sapiens
  SIMILAR (805)..(957): 981254mologous to Homo sapiens T cell-death associated protein,accession number U95218,Smith-Waterman Score=276.
ttaacgactccaccacccaccaactcctccaaaagggagagacacagccaaagcatcccactggggcgttctctttcgcacacggacgctcccgcactccctggccctttctggagcgacgctccccgactgccttttccgcgagaagacagcctgtgccccactgcctgggacgagggtttcagcccccgctacttcactacttagacctgtcactttaactctttgacctatactctcctgacctccggtacccatttggtcaaacctactgcctgtctgtcctctttgctgtgaggatgtcaacctgctgctcctcatactgtcttctggtcccctctggcctttgagatgatgtcctgtctgtccattaggcatccccctggcagaagcttctgagaccacagtcagtataattggtgatctggtggtctgctgggggtctactgtgtcccctccagttatactcccttgtcttggttcttgctgttccattgtaagaagaacctggagaaacccacctgaaagcttggtattcctggccaccttatctttctcattttttaaagaagtcatatagccattgatataattctgatttaaaatgcgaccccagcagcctgcacccatgtcactgtggagggtgctaaagtcttcagaagaccaaagcttcttcccagtcaactttgcatcttttgctgaatgggttccaggataatgagccctttggtattttaccctaatggtgcgggggggtgtgtttaagagaccaccaattgggatcactacttttgattttggcaaacctggaataaagacaactggactttctctcctgccttgtgcaaagggagtgcttttctcatgtacatgaatttttacagcagcacagcattcctcacctgcattgccgttgatcggtatttggctgttgtctaccctttgaagttttttttcggggcggttgtatgctttttggttattttctttcacaaaggcttgagtcgctcctcctgccagaagtgcagtcgtaaaagtcagaactgtggcttgttttacaatttttttgatgttcatcttcatgtcgggtggtgatggactgttttttgcgatctgccgtttccatcctcccgagtggactagtgggtaggcctggcggccgcctggccgtcgacatttaggtgacactatataaggatccgcggaattctttgctctgggactcaaatccggtggccaattactaatcttcagtttagtcat

SEQ ID NO: 17576 - DNA, 391 bp, Homo sapiens
  SIMILAR (363)..(217): 421254mologous to Homo sapiens Human normal ovarian tissue derived protein 103,accession number Y59826,Smith-Waterman Score= 87.
atggtggaacaagggaaaggaggttggtccacatgtaggcttgtgatacccaagcatgattctggagcaagaggcagaagggatgagtgtgaagagctgtactggttcatgggcatcttgcctgaaaatagcagggccaaggaagagcttggaacaaagtgggcagcagcatctgacttcagcagccctaagtgtttaggcaaacactcaggcttctttcccttgcctacgctcattttggcttggctggctgtcttggggcagaatagcaggaaatatagggcgctagtcgcgactagcagggctgagccttacaggaagtggactcatcatgcctttaccacaggtggttggcacctgcagggagccgcacctggttacagaccccaag

SEQ ID NO: 17577 - DNA, 697 bp, Homo sapiens
  SIMILAR (1)..(591): 991254mologous to Homo sapiens phospholipase C-beta- 1a,accession number AJ278313,Smith-Waterman Score=1013.
gccggggctcaacccggagtgcacgccttgcaactcaagcccgtgtgcgtgtcggacagcctcaagaagggcaccaaattcgtcaagtgggatgatgactcaactattgttactccaattattgtgaggactgaccctcagggatttttcttttactggacagatcaaaacaaggagacagagctactggatctcagccttgtcaaagatgccagatgtgggagacacgccaaagctcccaaggaccccaaattacgtgaacttttggatgtggggaacatcgggcgcctggagcagcgcatgatcacagtggtgtatgggcctgacctcgtgaacatctcccatttgaatctcgtggctttccaagaagaagtggccaaggaatggacaaatgaggttttcagtttggcaacaaacctgctggcccaaaacatgtccagggatgcatttctggaaaaagcctatactaaacttaagctgcaagtcactccagaagggcgtattcctctcaaaaacatatatcgcttgttttcagcagatcggaagcgagttgaaactgctttagaggcttgtagtcttccatcttcaagggtggaaaaagctaatgaggctgcgaaaagtgagcagagctgtggaaaggctcccccaaaacacccccaccttcattttataaagcaaaataaaatgcttgaacctg

SEQ ID NO: 17578 - DNA, 891 bp, Homo sapiens
  SIMILAR (700)..(768): 1001254mologous to Homo sapiens dJ606P22.1 (PLCB1(1- Phosphatidylinositol-4,5-bisphosphate Phosphodiesterase Beta 1, EC 3.1.4.11, Phospholipase C Beta 1)),accession number AL034551,Smith- Waterman Score=118.
atgggccctcctgggtgggctatcacctcccaagcacttccagctctccatagtgttagggcagttgcagtagcaaaagagaaatttctgaagaaggctgctacagatactgctgcagcagtatcttctgttgccatccagattaccatttccattctcagccttctgaagaaggctgcagttggaaataaagcatgtaaaagctgggaatgggagcacagaccctgcaaaagggacagaggtggcaactctggtggcagcagcagtatctgctacgtcctcttgggttttataggcaccagcaaaacacatcttttgttaaaatggtggccttctgacgggaagggcaggtctactactgaggtcaaaattcatgtgttatttttaaacgagagaaaaggcatctgtgattgtgcctctgattgggtggcatccaaaatcttgtttctcaggacagccagccaagccaaaatgagcgtaggcaagggaaagaagcctgagtgtttgcctaaacacttagggctgctgaagtcagatgctgagggcaaagggcaaccattaaacttcttcaagcttgattcccttactgtttctcctcttccagcaaatattttggttgtcattgctgtagagatgaagaaacctggacatatgcttgacttactcatgtctggtttttccaccgtttcttcacagagggagacagagctactggatctcagccttgtcaaagatgccagatgtgggagacacgccaaagctcccaagcacattatgaccattgctggagacaaggatgaacagagagggatgaatgatgcccagaaaggtgcctgtaaccaagactgtggttctcaggaagccagagacgtccaggattcagagatgtga

SEQ ID NO: 17579 - DNA, 1669 bp, Homo sapiens
  SIMILAR (1070)..(1666): 811254mologous to Homo sapiens putative p150,accession number U93569,Smith-Waterman Score=828.
ccatgaccatgcattacgagattccggtccgtacccggagatcaaaagggacgacataactccctcagaacgcctggtgaacaacatgcctcactgaacaggtgctatttaagctgatatctcaatgactaattatgcaaggattgagaggaaccatttagggagaggaaacagcaactccaaagaccctaagctacgagagagctctgagcatttgaggaaattaaagaccagagtggtgaacgagcagaccaggcttggtctcataatggagacgtttgtgggccgaggcggagaggctccattttactttcaatgtgacaaacatctgtcacggagttttcagggactcggtctgatctgtctgtaaaaagcctgtaaaactgctctctgggcagggcatctctgaaagaaaggcagcagccccagtcaggggattacagatcaaactgccatctccctgggacagagcacctgggggaaggggcggctgtgggtgcagcttcagcagacctaaacgtttttgcctctcggctctgaagagagcagcagctctcccagcacagcgctcaaactctgaagagttttggctggcatctagcaggtgccattctgggacaaagcttccagaggaaggaacaggcagcaatctctgctgttctgcagcctctgctggtgatacccaggcaaaaaggacctggagtggacctccagcaaattccaacagacctgcagaagaggggcctgactgttagaaggaaaactaaccaaacagaaaggaatagcatcaacatcaacaaaaaggacatccccacaaaaactccatctgaaggtcaccaacatcaaagaccaaagtaacggggagaatggaaccaagttggaaaacactcttcaggttgttatccaggagaactatcccaacctagcaagacaggccaacattcaaattcgggaaatacagagaacaccacaaagatactactcgagaagagcaaccccacgacacataattgtcagattcaccaggattgaaatgaaggaaaaaatgttaagggcagctagagagaaagacagatcgacgagtcagaaaattaacaaagatattcaggacttgaactcagctttagaccaagtggacttaatagacatctacagaactctccaccccaaatcaacagaatatacattcttctcagcaccacatcacacttattccaaatttaaccgcataattggaagtaaaacactgctcagcaaatggaaaagaatggaaatcataacgaacaggctctcagaccacagtgcaatcaaattagaactcaggattaagaaactcactcaaaaccgcacaactacatggaaactgaacaacctgctcctgaatgactactgggtaaataacaaaattaaggcagaaataaataagttctttgaaaccaatgagaacaaagatgcaacataccagaatctctgggacacagctaaagcagtgtttagaaggaaatttatagcactaaatgcccacaggaaaaggcagaaaagatctaaaatcagcaccctaatattacaattaaaagaattagagaagcaagagcaaacaaagtcaaaagctagcagaagacaagaaataactaagattcgagtggaactgaaggagatagagacatga

SEQ ID NO: 17580 - DNA, 2088 bp, Homo sapiens
  SIMILAR (1827)..(1507): 631254mologous to Homo sapiens LBP-32,accession number AF198489,Smith-Waterman Score=383.
agacccaggcgaacaccaaatgatgctggtgcccagcgccgcatcttcccgctactctgtcactcagccggaccgcggcgtcccccgaggcggcgaacagcctttggagccccgaagccggctttggtgaaggactttattgatctgacattatcgaagactcaaagaaagactccaacagttattcacaaacattatcaaattcaccgaattcgacatttttatatgagaaaagtcaaatttactcaacagaattaccatgacagactgtcacagattttgacagatttccccaaattggatgatatccatccattttacgctgacttgatgaatattctctatgacaaagatcattacaagttggctctaggtcaaataaatattgccaaaaatttggtggacaatgttgctaaagattatgtgcggcttatgaaatacggtgattctctgtaccgctgcaagcagctgaagcgcgctgcccttgggcgcatgtgtactattatcaagagacagaaacagagtttggagtatttggaacaagtacgtcaacatttatcccgcttgccaaccattgatccaaatacaaggactctgcttttgtgtgggtatccaaatgttgggaaatccagcttcatcaataaggtgacaagagcagatgtggatgttcagccctatgcatttaccaccaaatctctgtttgttgggcacatggattataagtacttgcgctggcaggttgtagataccccagggattttggatcatcctttggaggatcggaacaccattgaaatgcaagctatcacagccctggcccacctccgagctgcagttctgtatgtgatggatttgtctgagcagtgtggacatgggttgaaggagcaattagaactcttccagaatatcagacctctgtttatcaacaagcctcttattgttgtagcaaacaaatgtgatgtgaagagaataactgagctttctgaagaagatcagaaaatatttaccgacttgcaggctgaaggattccctgtcatcgagaccagcaccctgactgaggaaggtgtcattcaggttaaaacagaggcttgtgataggcttttggctcatcgagtcgaaacaaaaatgaaaggaaataaagtgaatgaggttctgaacagattgcatttagctgtgccaaacaagagagatgataaggagcgaccccctttcatcccagaaggagtggtagctcgaaggaaaagaatggagattgtagagcccaggaagaagagggaacgagatcttgagctggaaatgggagatgattatattttggatcttcagaaatactgggacttaatgaattcatccgagaaatatgataagataccagagatctgggaaggccataatgttgctgattatatcgatcctgctatcatgaagaaattggaagagttagaaaaagaagaagagctaagaacagctgctggggagtatgacagtgactctgaaagtgaagatgaggaaatgatggaaatccgacagctggcaaaacaaattagagaaaaaaagaagttgaaaattctacagtccaaagaaaagaatacacagggacccaggatgccccgaactgctaagaagggcagtttatcagtccctgttactggtgaatctagggagaacctctgtaggtgtgaatggaagacatcagattcttcccatttcttggcttcatattgggatgtcattgtctcctacttctgctttcgtctagatgacaggcccatatcacatgtctacccttttgactatagcttccctgaaagttggggtaaaggagtggcaggctcccaaaagagacaaggttctgggaagttaaaatataacaggagggttcaacgggcagacttggagaatgagatgcgtagtcttggtgttgacatggatgataaagacaatgcccactatgcagtccaggcaagaagatctcggagcgtcactaggaaaagaaaacgagaagaatctgttccaccctcttctatagcccggagtcggagttgttctcgaactccacgtgatgtttctggtcttcgggatgtcaag

SEQ ID NO: 17581 - DNA, 730 bp, Homo sapiens
  SIMILAR (890)..(1105): 721254mologous to Homo sapiens LBP-32,accession number AF198489,Smith-Waterman Score=257.
ctacagcagaaggcttttaacgacataaaacacattatcaggtgttccataggtgatgtacagagaaaaacccatatttggagattgcgctgaactggaaattgctgctgcagttatgaagatttttatgcacctctgcatctttgccctgggactgtatctgataacatcctgatgagtagatctagttgcatagtcacctggtgttccacaatcaggaacagtttctattagaatccagtaaaatatccaaagccagttttcatatgagaccattcttgttatcagcagttcctggacctcataagttgtattggctctgttcatttcaaagcctgattcttcatcctttccgctcttccatatttggccttgtgatgctgaagccggttgtgggtaacctccagtgtcatttttgccacctggcttccggttagattctgccaatgggggagctgtagagcttgttaaatcaggattcctggctccactgcacagtttctggttcactaggtctggaatagggcctgatgatttgcattctaacaattcccaggggacgttgatgctattggtccaggaaccacatttgcctcgaccaggaaatacttctactgtccccaccctctgattgttaggcttgtggtcagaatcccagcacatgaactggcactgctgctgggaattatgagtcaccctttcatgttcttcctggtgttgaagcaagtct

SEQ ID NO: 17582 - DNA, 497 bp, Homo sapiens
  SIMILAR (12)..(98): 411254mologous to Chironomus pallidivittatus giant secretory protein,accession number X13030,Smith-Waterman Score=53.
gccttgtctggtatccttatgcagaatgaactgaaataatcatcaatctgaaaagctactcttaaacagagacttgcttcaacaccaggaagaacatgaaagggtgactcataattcccagcagcagtgccagttcatgtgctgggattctgaccacaagcctaacaatcaggtcagggagtcagatttctgttggatttagaaaagcatctatgtgtttatgaaagaaacccactggatttttaatagttctgcagctcttggaggctctacatctaccctttctccccagccaagagcatggctagtgggagaatggaaggcaggcagcaggcaggtaagtgtgacttcctcacttcccctaccttctcatcttaaagccatagagtggttgctgggtaacccactcctacatatattggttcataaagcctagtgagccactgaaattcttactgatctgtaaaatttcaaacacactagtaacacagacagcc

SEQ ID NO: 17583 - DNA, 1029 bp, Homo sapiens; identical to SEQ ID NO: 4044
  SIMILAR (253)..(378): 541254mologous to Homo sapiens Human secreted protein, SEQ ID NO: 6434,accession number G02353,Smith-Waterman Score=88.

SEQ ID NO: 17584 - DNA, 822 bp, Homo sapiens
  SIMILAR (442)..(702): 891254mologous to Rattus norvegicus Nadrin,accession number AB042827,Smith-Waterman Score=397.
atgcctgttctgcgcgttttcgaattaggctttggacaaaagtttcagaacgcaggagtggacagcttataccggttaggcttccagaaacccggcgtcctgcgcctattatacctgcccgccattcgccaagagcgcaacgagttcctgcgttcgggctttaaacactacgcaatttacgccaggctgctgttcggcaaagcgaccgctaacaacttagtacaaaaactctaccagtgcgacaacaacaacctcgggttgtattcagtacgcctcgactgccccaactcgcgcgattgcgtaggcggctgcgcgtccataaccggttacgcccccagactcctgagcaaatcgtacaaactggcgtccgcatccttctatggaaaacacgccgcttaccggatccggagactacaacgccaggtagccaggcgacggaagaaacagaaaggaacacttgctgaaatggcagcagccacatccgtccatgtggttgcagtgattgaacccatcattcagcatgccgactggttcttccctgaagaggtggaatttactgtatcagaagcatttgtacctctcaccaccccgagttctaatcactcattccacactggaaacgactctgactcggggaccctggagaggaagcggcctgctagcacgccggtgatggaaggagacctggtgaagaaggaaagcgtcgtcaattttgaccgccgaaagattttgcgcgttaatcgcctggagcaccatatcggtaccgatcacttgggtggcgacagtgggttgcatcgccgtagtcgcacctgcccgtggtag

SEQ ID NO: 17585 - DNA, 2118 bp, Homo sapiens
  SIMILAR (1)..(711): 1001254mologous to Homo sapiens VHL disease gene g7 product,accession number R66286,Smith-Waterman Score=1262.
atgtcagggagttatagcagtgtctgggctgaagacgacattcagtttgattcccgttttctggaattaaaaggcgacacaaaaattgatctgaagcgtttttccagccaggggtatgttgagcccggaaaatacaatttacaggttcaactaaataaacagccattggcggaagagtacgatatttactggtatgctggtgaagatgacgttagcaaaagctatgcttgtctgacaccggaactggtggcgcagtttggtttaaaagaagacgtggcgaaaaatctgcaatggagccacgatggtaaatgcctgaagcccggtcaactggaaggcgtggaaattaaggctgatttaagccagtccgcattagtcatttcactaccgcaggcttacctcgaatatacctggcccgactgggatccaccttctcgttgggatgatggcatctccgggatcattgcggactacagcatcactgcgcaaacacgacacgaagaaaatggcggcgatgacagtaacgagatcagcggcaacgggacggtcggggttaacctggggccatggcgtatgcgcgctgactggcagaccaactatcaacatacgcgcacccaactggcgctgggcgaagattacctcaattccgatattttcgacggtttgaattatgttggtggcagtgtcagcactgacgatcaaatgttgcctccccatctgcgcggctacgcgccagacatttccggcgtggcacacaccacagccaaagtgaccgtcagccagatggggcgtgtgatttacgaaacgcaggttccggctggaccgtttcgtattcaggatcttggtgattccgtctccggtacgttgcatattcgcattgaagaacagaacggccaggtgcaggaatatgacatcagcaccgcctcgatgccatacctcactcgcccaggccaggttcgctataagatcatgatgggacgtccgcaagagtggggccaccatgtcgaggggggatttttctctggtgctgaagcctcctggggcatcgctaacggctgtcgttatatgccgagcgctggctgtattgctgaatttccctttcccggagccacgaaactgttgcgcgaagtggggatggactggatgtcgcaagatctcgctgctcgtttgtctacccgcccagctcaggggattggtgcaggacttctgacggcacgactcgggattaaagctatggagctttgccgcccgctgccgtggattgacgatgacaaacctcgcctcggggatttccgtcgtcagcttatcggtcaggtgaaggttcccatgcgtctggaagtcttttgtgaagaccgactcggtctgacccgcgaattactcgatctactcgtgctaagaggcattgatttacgcggtattgagattgatcccattgggcgaatctacctcaattttgctgaactggagtttgagagtttcagcagtctgatggccgaaatacgccgtattgcgggtgttaccgatgtgcgtactgtcccgtggatgccttccgaaccagagtggatatggcgaacccggcgagctgtcagctttttgggcaaaattggatcgcctgcgcaaccataccgccgcacaatgattaggtaccgaactcgagtgtatctccatttgatcaactccggttctgctgcgctggacggttcctgtaaacaacgcgacagcgaaggtaacccgacgatgaagttgcaggtggcggcgattgcggcgctggagggcgatcaacagtgcgtgcgcgacattgccgaacagtacaaacgccgccgtgatgtattggttaaaggtgccgtaatcgtgatagcttttaatacgagccagggcgctgaccagcgttttgttgccaaccataaagccgatacgagccccagggccccccacccacaacagagggaacaaatgaggccaaatcccgggagggggggaaaaaaaaagaaaggaaataagcgggtgtccgggaggaaaataaccagcgaggaacccgccagggagtcatggttagacgcccccaccgaggaaggaacaaggcagctaaccagcaggggcacgatggtccagaggggataa

SEQ ID NO: 17586 - DNA, 1083 bp, Homo sapiens
  SIMILAR (511)..(993): 911254mologous to Escherichia coli TyrR protein,accession number M12114,Smith-Waterman Score=755.
atgaaaattgaactgaagattacaatcaatttaacaacaagttacacaaccaattcagactccgccagcccaccaatcatgattggacggtgtaaggacaacaccaacaaaaacaggaagttagaagtctcagcaaaacaccgaccagacgatgttcctgtctttgttcgggggcatgccgcgtttgccgaaggcgttggtgaaatactaacgccggtggatccgccagagaagtggtatctggtggcgcaccctggtgtaagtattccgactccggtgatttttaaagatcttgaactcccgcgcaatacgccaaaaaggtcaatagaaacgttgctaaaatgtgaattcagcaatgattgcgaggttatcgcaagaaaacgttttcgcgaggttgatgcggtgctttcctggctgttagaatacgccccgtcgcgcctgactgggacaggggcctgtgtctttgctgaatttgatacagagtctgaagcccgccaggtgaaggttcccatgcgtttgaaagtcttttgtaaagaccgtctcggtttgacccgagaattactcgatctactcgtgctaagaggcattgatttacgcggtattgagattgatcccattgggcgaatctacctcaattttgctgaactggagtttgagagtttcagcagtctgatggccgaaatacgccgtattgcgggtgttaccgatgtgcgtactgtcccgtggatgccttccgaacgtgagcatctgacgttgagcgcgttattgaaggcgttgcctgaacctgtgctctctgtcgatatgaaaagcaaagtggatatggcgaacccggaaagctgtcagctttttgggcaaaaattggattgcctgcgcaaccataccgccgcacaattgattaacgcctttaattttttacgttggctgaaaagcgatccgcaagattcgcataccgagcttgtcgttattaatgggcagaatttcttcatgcaaattcacatgcaaaaacatagatgcacacacaagttttacaccccactttcaaaatcagattttattttatctccaaaacatataactaaataa

SEQ ID NO: 17587 - DNA, 253 bp, Homo sapiens
  SIMILAR (1)..(120): 1001254mologous to Salmonella typhimurium LivF protein,accession number D12589,Smith-Waterman Score=198.
atgggcgtggtgcgcaccttccagcatgtgcgtctgttccgtgaaatgacggtaattgaaaacctgctggtggcgcagcatcagcaactgaaaaccgggctgttctctggcctgttgaaaatactgaaaggagtaccaggaatgatgtctgaactctccattcccgaaggctgtggctatagctccatagttccaagcaggacctctgagaaggggctcaacacagctgccaaagctgggcctcaggtgacag

SEQ ID NO: 17588 - DNA, 1128 bp, Homo sapiens
  SIMILAR (148)..(771): 991254mologous to Escherichia coli CG Site No. 553,accession number U00039,Smith-Waterman Score=1056.
atgacaacaaaactctggtttaaggagcgggttctcattcaagataccgttcaattgaaacgtgaaagggtaccgaactcgaattcgaaaacatgggcatatgggggttgccccgagctgcagctgcattgccatctagaagaccccgtcaatcttgaactgtacccgcaggagatcgtctcgttaatcggccctaacggtgccggaaaaaccacggtttttaactgtctgaccggattctacaaacccaccggcggcaccattttactgcgcgatcagcacctggaaggtttaccggggcagcaaattgcccgcatgggcgtggtgcgcaccttccagcatgtgcgtctgttccgtgaaatgacggtaattgaaaacctgctggtggcgcagcatcagcaactgaaaaccgggctgttctctggcctgttgaaaacgccatccttccgtcgcgcccagagcgaagcgctcgaccgcgccgcgacctggcttgagcgcattggtttgctggaacacgccaaccgtcaggcgagtaacctggcctatggtgaccagcgccgtcttgagattgcccgctgcatggtgacgcagccggagattttaatgctcgacgaacctgcggcaggtcttaacccgaaagagacgaaagaactggatgagctgattgccgaactgcgcaatcatcacaacaccactatcttgttgattgaacacgatatgaagctggtgatgggaaattcggaccgaatttacgtggtcaatcaggggacgcgctggcaaacgaacccaggccagctgaaaaagccgctaaacagcttaaccaatggagacaaaaaagccgtcacgttattggatgagagtcaacttgacgctttgctggataagctctctggttatgccaaaccggaagagcgcattctgatcctggcgcgttaccatcacatgaggcctgccagcctggaaaaagcggcaacacgctggccgaagttgcaaatcgactttatgaccattcatgccagcaaagggcaacaggcggattacgtcatcatcgttggcttgcaggagggaagtgatggttttccggctgcggcgcgggagtcgattatggaagaagcgctactgccaccg

SEQ ID NO: 17589 - DNA, 764 bp, Homo sapiens
  SIMILAR (211)..(762): 981254mologous to Homo sapiens p53 tumor antigen (aa 1- ?),accession number X02469,Smith-Waterman Score=971.
atggcagcaatcgcgtttatcggtttaggacaaatgggttcgccaatggcgagcaatttattgcagcaagggcatcaacttcgcgtctttgatgtgaacgccgaagctgtgcggcatctggtagacaaaggtgcgactcccgccgccaacccggcgcaggccgctaaagatgccgaatttatcattaccatgttgccgaatggcgatctgcatcttatccgagtggaaggaaatttgcgtgtggagtatttggatgacagaaacacttttcgacatagtgtggtggtgccctatgagccgcctgaggttggctctgactgtaccaccatccactacaactacatgtgtaacagttcctgcatgggcggcatgaaccggaggcccatcctcaccatcatcacactggaagactccagtggtaatctactgggacggaacagctttgaggtgcgtgtttgtgcctgtcctgggagagaccggcgcacagaggaagagaatctccgcaagaaaggggagcctcaccacgagctgcccccagggagcactaagcgagcactgcccaacaacaccagctcctctccccagccaaagaagaaaccactggatggagaatatttcacccttcagatccgtgggcgtgagcgcttcgagatgttccgagagctgaatgaggccttggaactcaaggatgcccaggctgggaaggagccaggggggagcagggctcactccagccacctgaagtccaaaaaggtcgagtctag

SEQ ID NO: 17590 - DNA, 990 bp, Homo sapiens
  SIMILAR (1)..(579): 991254mologous to Escherichia coli similar to 3- hydroxyisobutyrate dehydrogenases; similar to E. coli hypoth. 31 kDa protein in rnpB 3' region,accession number L19201,Smith- Waterman Score=953.
catttattgcagcaagggcatcaacttcgcgtctttgatgtgaacgccgaagctgtgcggcatctggtagacaaaggtgcgactcccgccgccaacccggcgcaggccgctaaagatgccgaatttatcattaccatgttgccgaatggcgatctggtgcgcaacgtgttgttcggtgaaaacggcgtttgcgaaggcttatctaccgatgcgctggtcattgatatgtccaccatccatccgctgcaaaccgataaattgattgccgatatgcaagccaaaggcttcagcatgatggatgttccggtaggccgtacttctgcaaatgccattaccggtactctgttactgctggctggcggcaccgctgaacaagttgaacgtgccacaccgatcctgatggcgatgggcagtgagttgatcaacgctggcggtccgggcatggggatccgcgttaagctcatcaacaactacatgagcatcgcgctcaatgcgctttcggcagaagccgccgttttgtgcgaagccctgaatcttcccttcgatgttgccgtcaaagtgatgagcggtaccgccgccgacagtgtccggcatttggtagtcaaaagcgcgactcccgcagccagccaggagcagaccgctaaagatgctgacttgatctatgccatgtccccgaatgtcgatctagtgcgcaccgtgttgttcggtgaaatcggcgtttgcaaaggcttgtcgcgtaatccgttgttctttgatatgtccaccatccttccgatgccaaccgataaattgattgcctatatgctagccaaaggtttcagctcgatgcatgttccgctagcccgtatttttgcgaatgccaacattggccgtgtgcaggtgctggctgacgccatcgttgtacaagttgagcatgccaatccgatcatcctgggagtgcaatgtgagtatatcaacgttggcgctcagcgctttaccaaccccgtatag

SEQ ID NO: 17591 - DNA, 1425 bp, Homo sapiens
  SIMILAR (415)..(1155): 961254mologous to Escherichia coli CG Site No. 553,accession number U00039,Smith-Waterman Score=1206.
atggctcgacaacgaccgactctggaaaatttaggcaagcaagccgtggttgcagctgctgcaggtgcagacttcatcgccccttccgccgcgatggacggccaggtacaggcgattcgtcaggcgctggacgctgcgggatttaaagatacggcgattatgtcgtattcgaccaagttcgcctcctccttttatggcccgttccgtgaagctgccggaagcgcattaaaaggcgaccgcaaaagctatcagatgaacccaatgaaccgtcgtgaggcgattcgtgaatcactgctggatgaagcccagggcgcagactgcctgatggttagacctgctggagcgtacctcgacatcgtgcgtgactggcgtggacgtactggattgcccgtggcgcatatcaggagagcaggcatgagtcagccattattatctgttaacggcctgatgatgcgcttcggcggcctgctggcggtgaacaacgtcaatcttgaactgtacccgcaggagatcgtctcgttaatcggccctaacggtgccggaaaaaccacggtttttaactgtctgaccggattctacaaacccaccggcggcaccattttactgcgcgatcagcacctggaaggtttaccggggcagcaaattgcccgcatgggcgtggtgcgcaccttccagcatgtgcgtctgttccgtgaaatgacggtaattgaaaacctgctggtggcgcagcatcagcaactgaaaaccgggctgttctctggcctgttgaaaacgccatccttccgtcgcgcccagagcgaagcgctcgaccgcgccgcgacctggcttgagcgcattggtttgctggaacacgccaaccgtcaggcgagtaacctggcctatggtgaccagcgccgtcttgagattgcccgctgcatggtgacgcagccggagattttaatgctcgacgaacctgcggcaggtcttaacccgaaagagacgaaagaactggatgagctgattgccgaactgcgcaatcatcacaacaccactatcttgttgattgaacacgatatgaagcttgtgatgggaatttcggaccgaatttacgtggtcaatcaggggacgccgctgggcaacggtacctcttatactgcctgcagggcaaacagcgatgcgtcgttttccgccgcctgcgccatcaacgaggcacaaatctcagcgttcttttcccacacagatgtaacagcaaactgtcctgcggcaaccagcattgccacctcctgtcagagtcgtaaaattcgccaacgacgattattcggcgttacacttatcactcatacaaatcaaatagcaggattttgcagtgttacaacttcttttagcagtttttattggcggtggtacgggaagcgtggcgagatggctgttaagtatgcgatttaa

SEQ ID NO: 17592 - DNA, 1113 bp, Homo sapiens
  SIMILAR (739)..(915): 941254mologous to Escherichia coli CG Site No. 553,accession number U00039,Smith-Waterman Score=280.
ctacagcgagttgccagatggtactgtaacactcagagaggcgatgtatccgagctgaagcgctttaaagaccatgcaggcaaatgttcgcaagcgcctgttcaccttgcactgtgtggtcaaagtgaaatcctggttgggccgacgacgaacgcgcactgcgcagtctcggttacgttgacgatctttaagagtaactccgatggaaggctggcagcgcgcatttggtccttgcatagtcagccctgtggcagcgcaaacccagccttgatgcttggcactgtacttcactggcaggcaatcgtgggctgcgtgctgtcttggtttgcccaacaggctgccacgcatcttaacactgctcgtcacccatgcaacaggttgccattcaccagcccttttccaccgccttccttctttgctaacgcgtttttggctggtgctgttggcagcaagatcgaaaaactgcttgctgccagttgcttgacaagccagtcctccgcatgtgcggtattggcgcttcgggtctgtcgcggggctcgagtctgaagtggggcttactccggtaccttgaaacccgtttggtttcgcgcctgtggccgttcttcggaagatttgttcgcggggggatacgccgtccagaaacggcatctggtagacaaaggtgcgactcccgccgccaacccggcgcaggccgctaaagatgccgaatctatcattaccatgttgccgaatggcgatctggtgcgcaccttccagcatgtgcgtctgttccgtgaaatgacggtaattgaaaacctgctggtggcgcagcatcagcaactgaaaaccgggctgttctctggcctgttgaaaacgccatccttccgtcgcgcccagagcgaagcgctcgaccgcgccgcgacctggtgcgcacgaactccgcacattcccagtatccccccagaacgacaccatccagccaacaacacccgcaaatacagccacacttacaaccaacagcaggacacttacaaactctaaaggcgagttacccacaccagcaaaacttcccaacaccacaccagcttccaaactggggaggaccaccaaagagccccaacacctcaaccgcat

SEQ ID NO: 17593 - DNA, 431 bp, Homo sapiens
  SIMILAR (188)..(430): 1001254mologous to Escherichia coli htrP,accession number M64472,Smith-Waterman Score=414.
atgcttactaattttatgtccagacccgcacaaccgggggaatggcagaaccctggggtaaaccacctttgtcacatagcaacgaatctgtcgggcatggacccgctcacgttattttggctatatgccgccactcctaagactgccctgattctggtaaccataattttagtgaggtttttttaccatgaatcagacgctactttcctcttttggtacgcctttcgaacgtgttgaaaatgcactggctgcgctgcgtgaaggacgcggtgtaatggtgcttgatgatgaagaccgtgaaaacgaaggtgatatgatcttcccggcagaaaccatgactgttgagcagatggcgctgaccattcgccacggtagcggtattgtttgcctgtgcattactgaagatcgccgtaaacaactcgatctgccaa
